United States Patent Application Publication US 2008/0034453 A1 - sequence listing, part 14

SEQ ID NO: 105103 - DNA, 278 bp, Glycine max
ctcagtgttgttcaccctatttataaactccttcaccctcactatcgtgacaccatgaacataaatggccttgctcggttatcactggtcaacgacggtggcgttatagaacaaacatttttgtggggaaggtattctgtggaaatgtctgctgtagtttacaaggattgggtttttacagatcaagcattgcctgctgatcttataaaaagaggaatggcaattgaggatccatcgtgccctcatggcattcgccttgtgatagatgactaccctta

SEQ ID NO: 105104 - DNA, 279 bp, Glycine max
cattgccaaggcattggcaaggccaccctcttacacaaccaagtactttggttgcgaacttggggcacagtctaaatttgacgagaaagttgggacttctcatgttaatggggcacatgacactgcaaaacttgcagctcttctgagagatctttatcaagaaatacgtccagtgttatggttgtggaaaccctgaaactgagatattgattactaagaaccaaatgatccagctgaaatacgctgcttgtggttttgtgtcagatgtggatatgagag

SEQ ID NO: 105105 - DNA, 281 bp, Glycine max
ttgcaaatgaaccagtaacagtcaagagtgaccagaacaatgtagaggttaaaccacagggtgtgagcaagggactagtggccacacgcctactttctgccatgcaagaaaaggggatgtgccctgattttgttttgtgtataggagatgacaggtctgatgaagacatgtttgaggtaattaccagttcaatgggcggtctgatcgctccaaaggccgaggtatttgcatgcacggtttgtcgaaaacccagtaaggctaagtactacctggatgataca

SEQ ID NO: 105106 - DNA, 258 bp, Glycine max
ggctcgaggttcaatatcctagtatacctacataaataatttaagatactatgatgagagcacggttcccattactgttgctgggacttgttttcctggcttcagtttctgtctcatttggcattgcttactgggaaaaagagaaccccaaacacaacaagtgtctccagagttgcaatagcgagagagactcgtacaggaaccaagcatgccacgctcgttgcaacctccttaaggtggagaaagaagaatgtgaag

SEQ ID NO: 105107 - DNA, 203 bp, Glycine max
tgtgcatatgggctcaatcctggtatttcaggttctcgtcttttgggcaccattcctcagtctatttcacagcaaactgtttggaatcaaatggcaacagtgagaacaccattgaattttgattctagcaagcagagtttttgtcaattttctattgaccttctcggtggaggaattttagtggacaaaactggagattggat

SEQ ID NO: 105108 - DNA, 315 bp, Glycine max
gcgtacgtaggctcagggttctccaacttaaagcagatcttctcatgaaaccggcaataccatcgacggaagacgtgccagcgtgcacgttgctgcgggtccatgcataacgatacagtacgtgaccaacgtcatcatccatgggattcacatacacgattgcaagcagggagggaacgctatggtgcgggactccccacggcactacggctggagaaccgtatcgtacggtgacggcgtgtccatcttcggagggagccacgtgtgggttgaccattgctcgctgtctaactgcaacgacgggttgatctacgc

SEQ ID NO: 105109 - DNA, 292 bp, Glycine max
tatcgagcgattcggctcgagaaagaaaggtaataattgatcagtgaaaatgcacggaggaaagaaagctggagagtacatcaaggacacagctgcaaacattggtgcttctgccaaggctggcatggagaaaaccaaggccactgtccaggagaaggcagaaagaatgacggcacgtgatccgatgcaaaaggagttggcaacccagaagaaagaggcatagatgagccaggcagagctggacaagcaggcggcgcgtcagataacacagcggcgaacaggatgccacggc

SEQ ID NO: 105110 - DNA, 278 bp, Glycine max
cagtggtgccttatcgctgtggttatcatcttcttcttcctctttcttagatctcttctttctctacgccgcacgccgaaaccatggccggaaaaggagagggtcctgctatcggaatcgatctcggaaccacctactcttgcgtcggtgtgtggcaacatgaccgcgttgaaatcatcgccaacgaccaacggaacagaaccacgccgtcttacgtcggattcactgacaccgagcgtctcatcggtgatgcggccaagaatcaagtcgccatgaac

SEQ ID NO: 105111 - DNA, 280 bp, Glycine max
aacagattggaatgtttactttcactggattgaatgcggaacaagtttccttcatgactaaagagttccatatatacatgacatctgatgggaggattagcatggctggtctgagttccaaaactgtcccacttctggcggatgcgatacatgcagctgtaacccgagttgtctaaaacatgttgacaacagttttcaacatgctccctagtccctataggagaacttccattatttttgtttaataattgtcaacatcaacaatgaaaccttttatttg

SEQ ID NO: 105112 - DNA, 265 bp, Glycine max
caataacaatacagaagggtatatatgcaagtttactggggttgagtgttggcaccctgatgaaaacaaggtcttgaatctcaaactgtcaaacatgggactcaagggccccttccctcgcggcattcagaattgttcaagcatgacaggattagatttttcgcttaacagactctctaaaaccattccggccgatatatccacacttcttacatttgtgacaacccttgatctttcctcaaatgattttacaggggagatacct

SEQ ID NO: 105113 - DNA, 273 bp, Glycine max
ttgcaatgtcatttgctccaagggactctcacgaagcccaagtacaatttgctcttgaaaggggtgtacctgctgtcattggtgttctgggaaccattaaattgccttatccatctgcagcctttgacatggcacattgctctcgctgcttgattccttggggagctaatgatggaatgtatatgatggaagttgaccgagttctaagacctggtggttattgggtgctttcgggtcctccaatcaattggaagattaattacaaagcctggc

SEQ ID NO: 105114 - DNA, 266 bp, Glycine max
gttcaatatcctagtataccttaataaataatttaagatactatgatgagagcacggttcccattactgttgctgggacttgttttcctggcttcagtttctgtctcatttggcattgcttactgggaaaaagagaaccccaaacacaacaagtgtctccagagttgcaatagcgtcagagactcgtacaggaaccaagcatgccacgctcgttgcaacctccttaaggtggagaaagaagaatgtgaagaaggtgaaattccacg

SEQ ID NO: 105115 - DNA, 121 bp, Glycine max
gcaaaggattctacccgccgctcgatgggaattgcgcttcaaggcgtctcgtagggctaatccgcctcacgagggtcaccaacggcacgtgcctttggggggccgaggcccactactgctg

SEQ ID NO: 105116 - DNA, 266 bp, Glycine max
gaacaatcaaacagaagaggctcaaggtcgcagaagcagcagctacaggacagtcaccagaagattcgtcacttcaatgaaggagacgtactcgtgattcctcctggtgttccttactggacctataacactggcgatgaaccagttgttgccatcagtcttcttgacacctctaacttcaataaccagcttgatcaaacccctagggtattttaccttgctgggaacccagatatagagtacccagagaccatgcaacaacaaca

SEQ ID NO: 105117 - DNA, 266 bp, Glycine max
agcaaactgtttggaatcaaatggcaacagtgagaacaccattgaattttgattctagcaagcagagcttttgtcaattttctattgaccttctcggtggaggaattttagtggacaaaactggagattggatcacacttatacaaaactctccaattagtaacttgttgagagttgctgcttggaagaaaggctgtttaatggttaagattgtgatgtctggaaatgcagcagtcaaaaggagtgattgggcctcattggtacaa

SEQ ID NO: 105118 - DNA, 267 bp, Glycine max
ccttcatttgaacagtgctttccaaagagcaccaaagaacacagggaagtcactcatgaagaaactggtcatgtgctcaaagttccctttcgtcgagttcacctgtctggggaagcaggacactttgatacctatgacactagcggtccccaaaatgtaaacccaaggacaggactcccaaaattgcgcagagggtgggttgataggagggagaaactgggttatccaagattcactcagatgtactacgctaagcaaggaatcatc

SEQ ID NO: 105119 - DNA, 269 bp, Glycine max
ccaagagaaagatttgttggagggaaatttttcctttgatattaaatctcgctctagattggaaaaagtttcctctacaaaagcacaatttgttagtggaaaaaccttcaaatatgatataattggtgctggttcacattcttcagaagattttcctgaaaaggaagatcaagaaaaacccaaaaagattgatgccagattgagacagagaatagatcctcaatacaatgaggttcaggctcagatggaaacaaatttgtttaaattgt

SEQ ID NO: 105120 - DNA, 267 bp, Glycine max
ccccaaacagaacaacggcagagcaagcagccagaaaaatggtgttgctgtccaaagcaacaacagaacaatactcctacatcaagaactacatgccaactgcattctcctcaacaattcccatagtggacctctccaaacccgatgcaaagaccctcatagtgaaggcttgtgaggagtttggattcttcaaagtcatcaaccatggtgttcccattgaagctatatcccaattggaatccgaagccttcaagttcttctctatgc

SEQ ID NO: 105121 - DNA, 119 bp, Glycine max
cgcacttgctaggcaatctctcattaatgctgatggcataatagagaaatcttttttgccctcaaagcattccgttgagatgtcttcagcggtttataagaattgggttcttcactgat

SEQ ID NO: 105122 - DNA, 266 bp, Glycine max
gattttgagaccagagtcgaaactgaaggtggcagaattcgggttctcaagaagttcactgaaaaatccaagcttcttcagggcattgagaacttccgtttggccattttggaagctagagcacacacgttcgtgtctcctcgccactttgattccgaggttgtttttttcaacatcaaggggcgagccgtacctgggttggtgagtgaaagtgaaacagaaaaaatcacccttgaacctggggacatgatacacataccagctgg

SEQ ID NO: 105123 - DNA, 264 bp, Glycine max
agcaaactgtttggaatcaaatggcaacagtgagaacaccattgaattttgattctagcaagcagagcttttgtcaattttctattgaccttctcggtggaggaattttagtggacaaaactggagattggatcacacttatacaaaactctccaattagtaacttgttgagagttgctgcttggaagaaaggctgtttaatggttaagattgtgatgtctggaaatgcagcagtcaaaaggagtgattgggcctcattggtac

SEQ ID NO: 105124 - DNA, 262 bp, Glycine max
attagggtttggcgattcagagagaaagagaaatgggagaacgaaaaggaatcccaattgctctggggctcttggcgatgctcctcttcttcattgcttcttcctcttcctctcacctcgttcgtgcttccgatgacgccgacgacgcgatcttctacgagtcattcgacgaggattttgacggacggtggattgtgtccgacaaggaggattacaacggtgtctggaagcatgctaagagtgctgggcatgatgattatgg

SEQ ID NO: 105125 - DNA, 268 bp, Glycine max
aaacaaggttctgtttagtagagaggaagggcagcagcaaggggagcagaggctgcaagagagcgtgattgtggaaatctcgaaggaacagattcgggcactgagcaaacgtgccaaatctagttcaaggaaaaccatttcttctgaagataaaccttttaacttgagaagccgcgaccccatctactccaacaagcttggcaagttctttgagatcaccccagagaaaaacccccagcttcgggacttggatatcttcctcagtatt

SEQ ID NO: 105126 - DNA, 268 bp, Glycine max
ttaataaataatttaagatactatgatgagagcacggttcccattactgttgctgggacttgttttcctggcttcagtttctgtctcatttggcattgcttactgggaaaaagagaaccccaaacacaacaagtgtctccagagttgcaatagcgagagagactcgtacaggaaccaagcatgccacgctcgttgcaacctccttaaggtggagaaagaagaatgtgaagaaggtgaaattccacgaccacgaccacgttcacaacac

SEQ ID NO: 105127 - DNA, 266 bp, Glycine max
gccagcaggccaggcagataaagaacaacaaccctttcaagttcctggttccacctcaggagtctcagaagagagctgtggcttagagccctttttgtatgtgctaccccacttttgtctttttggcaatagtgctagcaaccaataaataataataataataatgaataagaaaacaaaggctttagcttgccttttgttcactgtaaaataataatgtaagtactctctataatgagtcacgagacttttgcgggaataaaagg

SEQ ID NO: 105128 - DNA, 263 bp, Glycine max
gcatcatgggattggaggaaaaaaggtgtcatcacccaagtaaagtaccaagggggctgtggaagcggttgggcgttttctgccacgggagccatagaagcagcacatgcaatagcaacaggagaccttgttagcctttctgaacaagaactcgtagactgtgtggaagaaagcgaaggttgttacaatggatggcactatcaatcgttcgaatgggttttagaacatggtgggattgccactgatgatgattatccttacag

SEQ ID NO: 105129 - DNA, 263 bp, Glycine max
cctcaacaaggagctggagctggacaaatttatcactcactctgtcccattctcagagatcaacactgcatttgatcttatgctgaaaggggagggaataaggtgcctcatctgcatggaagagtaaatcaatgatgttctctgctgaacagtgtttgcgtgtaatgtgaaaagagaattgaataaatttggcatgtaattcggttattggattcatgctacatgagtgtgtaaagaggtaatgggggtgatgactttcttgg

SEQ ID NO: 105130 - DNA, 263 bp, Glycine max; identical to SEQ ID NO: 101759

SEQ ID NO: 105131 - DNA, 265 bp, Glycine max
atcataaaattcttccaccaagttatgggtataccttgtgttgcttcttttctccctcttaggtctctcttctagttccagcatatcaactcatcgttccatattggaccttgacctaaccaagtttaccacacagaaacaggtgtcttcactgttccaactatggaagagtgagcatggacgtgtctaccataaccacgaagaagaggcaaagagacttgagattttcaagaataacttgaactatatcagggacatgaatgca

SEQ ID NO: 105132 - DNA, 272 bp, Glycine max
ggaagagcacgagcagaaggaggaacacgaatggcatcgcaaggaggaaaaacacggaggaaagggaactgaagaggaacaagatgaacgtgaacacccacgcccacaccaacctcatcaaaaggaagaggaaaagcacgaatggcaacacaagcaggaaaagcaccaaggaaaggaaagtgaagaagaagaagaagaccaagacgaggatgaggagcaagacaaagagagccaagagagtgaaggttctgagtctcaaagagaaccacgaa

SEQ ID NO: 105133 - DNA, 266 bp, Glycine max
gaagccacaacagcaatcaagcagaagaggctcaaggtcgcagcagcaactacaagacagtcaccagaagattcgtcacttcaatgaaggagacgtactagtgattcctcctggtgttccttactggacctataacactggcgatgaaccagttgttgccatcagtcttcttgacacctccaacttcaacaatcagcttgatcaaaaccccagagtattttaccttgctgggaaccagatatagagcacccagagaccatgcaaca

SEQ ID NO: 105134 - DNA, 264 bp, Glycine max
gaggaagatgaggatgaggagcagcagcgagagagcgaagaaagtgaagattctgagttacgaagacataagaataagaacccttttctcttcggctctaacaggttcgaaactctcttcaaaaaccaatatggtcgcattcgcgtcctccagaggttcaaccaacgctccccacaacttcagatttgccgagactaccgcattttggagttcaactccaaacccaacaccctccttctccccaaccatgctgatgctgattac

SEQ ID NO: 105135 - DNA, 262 bp, Glycine max
gacactcctgttgttgccgtttctattattgacaccaacagcttggagaaccagctcgaccagatgcctaggagattctatcttgctgggaaccaagagcaagagtttctaaaatatcagcaagagcaaggaggtcatcaaagccagaaaggaaagcatcagcaagaagaagaaaacgaaggaggcagcatattgagtggcttcaccctggaattcttggaacatgcattcagcgtggacaagcagatagcgaaaaacctac

SEQ ID NO: 105136 - DNA, 262 bp, Glycine max
gttcaatatcctagtataccttaataaataatttaagatactatgatgagagcacggttcccattactgttgctgggacttgttttcctggcttcagtttctgtctcatttggcattgcttactgggaaaaagagaaccccaaacacaacaagtgtctccagagttgcaatagcgagagagactcgtacaggaaccaagcatgccacgctcgttgcgacctccttaaggtggagaaagaagaatgtgaagaaggtgaaattc

SEQ ID NO: 105137 - DNA, 260 bp, Glycine max
atcattttccaaacgagcatcttcgtagtttcttaagtcaagagaagaagtgaagtgctgcttcaatggcttcaagtcaggaagaggtgatcttttgggggttattggaagcccatttctgcacagggtgcagattgctctcaaattgaagggagttgaatacaaatatttggaagatgatttgaacaacaagagtgatttgctcctcaagtataacccagtttataaaatgattccagtgtttgttcacaatgaaaagc

SEQ ID NO: 105138 - DNA, 265 bp, Glycine max
ggatggagaaggtggtatgtgtgaccggcggcagctgctgcattggttcatggctcgtccatctcctcttggatcgcggctacaccgttcacgccaccgtccaaaacctcaacgatgaagccgagacgaagcatcttcaatccctcgacggagcgtccacgcgcctccgcctcttccagatggatctcctccgccacgacaccgtcctcgccgccgtgcgtggctgcgccggcgtcttccacctcgcctctccctgcattgtcga

SEQ ID NO: 105139 - DNA, 264 bp, Glycine max
ttaaacactcatcagtcatcaccatggccaagctagttttttccctttgttttctgcttttcagtggctgctgcttcgctttcagttccagagagcagcctcagcaaaacgagtgccagatccaaaaactcaatgccctcaaaccggataaccgtatagagtcagaaggagggctcattgagacatggaaccctaacaacaagccattccagtgtgccggtgttgccctctctcgctgcaccctcaaccgcaacgcccttcgta

SEQ ID NO: 105140 - DNA, 263 bp, Glycine max
gttcaatatcctagtataccttaataaataatttaagatactatgatgagagcacggttcccattactgttgctgggacttgttttcctggcttcagtttctgtctcatttggcattgcttactgggaaaaagagaaccccaaacacaacaagtgtctccagagttgcaatagcgagagagactcgtacaggaaacaagcatgccacgctcgttgcaacctccttaaggtggagaaagaagaatgtgaagaaggtgaaattcc

SEQ ID NO: 105141 - DNA, 260 bp, Glycine max
cataaacgatgccgaccagggatcagcggatgttgcttttaggactccgctggcaccttatgagaaatcaaagtctttgggttccggggggagtatggtcgcaaggctgaaacttaaaggaattgacggaagggcaccaccaggagtggagcctgcggcttaattcgacgtacgctgcgatgaaacccaccaagccagggttggaggagtcccaggaacagatccataagataaggatcaccctttcttccaagcacgtc

SEQ ID NO: 105142 - DNA, 252 bp, Glycine max
tcctacgataccaaattcgaggagataaacaaggttctgtttagtagagaggaagggcagcagcaaggggagcagaggctgcaagagagcgtgattgtggaaatctcgaaggaacagattcgggcactgagcaaacgtgccaaatctagttcaaggaaaaccatttcttctgaagataaaccttttaactaacaaagccgcgaccccatctactccaacaagctaggcaagttctttgagatcaccccagag

SEQ ID NO: 105143 - DNA, 260 bp, Glycine max
cattgtctttgaacactcatcaccatggccaagcttgttctttccctttgtttccttcttttcagtggctgcttcgctctgagagagcaggcacagcaaaatgagtgccagatccaaaagctgaatgccctcaaaccggataaccgtatagagtcggaaggtgggttcattgagacctggaaccctaacaacaagccattccagtgtgccggtgttgccctctctcgctgcacccttaaccgcaatgcccttcgtagacc

SEQ ID NO: 105144 - DNA, 257 bp, Glycine max
tgacggcaacgttagggagtccggagacgtcggcgggggccccggaaagagttatcttttctgtttaacagcctgcccaccctggaaacggctcagccggaggtagggtccagcggctggaagagcaccgcacgtcgcgtggtgtccggtgcgcccccggcggcccttgaaaatccggaggaccgagtgcctcccacgcccggtcgtactcataaccgcatcaggtctccaaggtgaacagcctctggtcgatggaa

SEQ ID NO: 105145 - DNA, 257 bp, Glycine max
caaaaagaaagaatcccaggcgaggagaaagatggaggggaaggagcaggatgtgtcgttgggagcgaacaagttccccgagagacagccgattgggacggcggcgcagagccaagacgacggcaaggactaccaggagccggcgccggcgccgctggttgacccgacggagtttacgtcatggtcgttttacagagcagggatagcagagtttgtggccacttttctgtttctctacatcaccgtcttaaccgtta

SEQ ID NO: 105146 - DNA, 258 bp, Glycine max
caggataaagcatttgaaaatgccttggcaattcaccctgaggatgcttcagaccggtgggagaagattgcagctgatgtaccagggaaaaccttggaagagattaaacaccactatgagctcttggttgaagatgttagccagatcgaatccggttatgtgcctttaccatcttataattcttctccagagggctcaacaagtcatgctagtgaagaaggagctggcaagaagggaggccactcttggaatagtaat

SEQ ID NO: 105147 - DNA, 251 bp, Glycine max
tgcagagcagagagagacgcagccatggggcgaagacccgcgaggtgttataggcaaattaagaacaaaccataccccaagtcacggttttgccgtggtgttcctgatcccaagatcaggatttacgatgttggtatgaagaagaagggtgttgatgagtttcctttctgtgtccatctggttagttgggagaaggaaaacgtttctagtgaggccctggaagctgctcgtattgcttgcaacaagtacat

SEQ ID NO: 105148 - DNA, 259 bp, Glycine max
tctcgagccgaatcggctcgagattctctccattgtctttgaacactcatcaccatggccaagcttgttctttccctttgtgcccttcttttcagtggctgcttcgctctgagagagcaggcacagcaaaatgagtgccaaatccaaaagctgaatgccctcaaaccggataaccgtatagagtcggaaggtgggttcattgagacctggaaccctaacaacaagccattccagtgtgccggtgttgccctctctcgct

SEQ ID NO: 105149 - DNA, 256 bp, Glycine max
aagtttgcaaaaattatgaaccttagacaaagtgttgttggtgatcttaaacttcttactgatgggaagttgtatgagggtaagcatattcctgtatctaatattagtgcaggggaaaatcatgtagttcaaatacccttaatggcacaggaggaaattctgtcttctagtgcaagtgatttcagaactgcaagggtgagtaaaaatagcaaacctcaagctactgcaatgcatgtgggagctatagaaattatca

SEQ ID NO: 105150 - DNA, 257 bp, Glycine max
agattactgagtaagggcaatgatattctgtgttgcgattatgctagttttgatggtttgattaccaagcaagttatgagcaagatggcagaaatgataaacagtctttgtggtggtgatgaaaaattgatgcgtgaaaggacgcacctgctgttggcttgttgttcaaggatggcaatttgtaagaatgatgtttggagagttgaatgtggaatcccttctggatttccgctcacagttatttgcaatagcatttt

SEQ ID NO: 105151 - DNA, 257 bp, Glycine max
aaactcccaaggaatggcaactggatctaccttgtgacaaaattcctagtgtcttgactacaactgatgagagattggtaggcacagaacatgagggatatgatccttttcttggtggaattcaaaaatatgccactcccatgatgcccctagatgaagaaattctttctaaggttgcacaagatatggttgaggaatggtttgattgtgttgatgaggaggattcctttgaggaagtttctttaagtgcagcactt

SEQ ID NO: 105152 - DNA, 165 bp, Glycine max
agcaaaatgaccaagttcacaatcctcctcatctctcttctcttctgcatcgcccacacttgcagcgcctccaaatggcaacaccagcaagatagctgccgcaagcagctccagggggtgaacctcacgccctgcgagaagcacatcatggagaagatccaaggc

SEQ ID NO: 105153 - DNA, 256 bp, Glycine max
aaaattcttccaccaagttatgggtttccttgtgttgcttcttttctccctcttaggtctctcttctagttccagcatatcaactcatcgttccatattggaccttgacctaaccaagtttaccacacagaaacaggtgtcttcactgttccaactatggaagagtgagcatggacgtgtctatcataaccacgaagaagaggcaaagagacttgagattttcaagaataacttgaactatatcagggacatgaat

SEQ ID NO: 105154 - DNA, 255 bp, Glycine max
gttcaatatcctagtacaccgtattaaagaatttaagatatactatgatgagagcgcggttcccattactgttgctgggagttgttttcctggcatcagtttctgtctcatttggcattgcgtattgggaaaagcagaaccccagtcacaacaagtgcctccgaagttgcaatagcgagaaagactcctacaggaaccaagcatgccacgctcgttgcaacctccttaaggtggaggaagaagaagaatgcgaag

SEQ ID NO: 105155 - DNA, 261 bp, Glycine max
ctcgagccgttcaattctgttcatcctttgcttcccaaagaaagagaaaataaaaagcaatgggtagccttgaagcggaaagaacaacagtaggattggcagcaagagacccttcatggattctctccccatacacctacaatctaagaaacacaggccctgatgatgtttacataaaagttcactactgtggaatttgccattctgatctccaccagattaaaaatgatcttggcatgtccaactatcccatggtcccag

SEQ ID NO: 105156 - DNA, 258 bp, Glycine max
gtgcagtgctgaagattggtcccaacgagccatctgagctgtctatccatgagaacgcctatggcttggctagatacgctgtcatatgccaggagaatggcctggttcccattgttgagcctgagatccttgttgatggacctcatgacattcacaagtgtgccgccgtcaccgagcgtgtccttgcagcatgctacaaggctttgaatgatcaccatgtccttcttgagggtaccctattgaagccaaacatggtca

SEQ ID NO: 105157 - DNA, 254 bp, Glycine max
ctcgagccggccattactaccactgttcgctatgaaagatgacaaacaggctccagttcctgcttctacaaccgaaggacaacctatacgatgtaaagcggcggtttctagaagagctggtgagccgttggttattgaggacatcattgtggcgccgccaaagcctcgtgaggctcggattcgtattatttgttcctctctctgccacagcgacatcacacttcggaaccttcaggaccctcctgccattttcc

SEQ ID NO: 105158 - DNA, 256 bp, Glycine max
ctcgagccgcttaattattaacacttccttagttcaatatggggaagcccttcactctctctctttcttccctttgcttgctactcttgtcgagtgcatgctttgctattagctccagcaagctcaacgagtgccaactcaacaacctcaacgcgttggaacccgaccaccgcgttgagtccgaaggtggtttgattcaaacatggaactctcaacaccctgagctgaaatgcgccggtgtcactgtttccaaact

SEQ ID NO: 105159 - DNA, 255 bp, Glycine max; identical to SEQ ID NO: 105154

SEQ ID NO: 105160 - DNA, 255 bp, Glycine max
gggttttagggcagcttctttctttgagattaagtttcagtagtaatgggtaaggaaaaggttcacattaacatcgtggtcattggccatgtcgactctgggaagtcaaccaccaccggtcaccttatctacaagctcggaggtattgacaagcgtgtcatcgagagattcgagaaggaagctgctgagatgaataagaggtctttcaagtatgcctgggtgcttgacaagctcaaggctgagcgtgaaagagga

SEQ ID NO: 105161 - DNA, 245 bp, Glycine max
agcaaactgtttggaatcaaatggcaacagtgagaacaccattgaattttgattctagcaagcagagcttttgtcaattttctattgaccttctcggtggaggaattttagtggacaaaactggagattggatcacacttatacaaaactctccaattagtaacttgttgagagttgctgcttggaagaaaggctgtttaatggttaagattgtgatgtctggaaatgcagcagtcaaaaggagt

SEQ ID NO: 105162 - DNA, 257 bp, Glycine max
gaacacgaatggcatcgcaaggaggaaaaacacggaggaaagggaagtgaagaggaacaagatgaacgtgaacacccacgcccacaccaacctcatcaaaaggaagaggaaaagcacgaatggcaacacaagcaggaaaagcaccaaggaaaggaaagtgaagaagaagaagaagaccaagacgaggatgaggagcaagacaaagagagccaagaaagtgaaggttctgagtctcaaagagaaccacgaagacataa

SEQ ID NO: 105163 - DNA, 255 bp, Glycine max
tcctagtataccttaataaataatttaagatactatgatgagagcacggttcccattactgttgctgggacttgttttcctggcttcagtttctgtctcatttggcattgcttactgggaaaaagagaaccccaaacacaacaagtgtctccagagttgcaatagcgagagagactcgtacaggaaccaagcatgccacgctcgttgcaacctccttaaggtggagaaagaagaatgtgaagaaggtgaaattcc

SEQ ID NO: 105164 - DNA, 257 bp, Glycine max
gccccccaaaaatgaagagcaccatcttctttgctctctttctcttttgtgccttcaccacctcatacctaccttcagccatcgctgatttcgtgctcgataatgaaggtaaccctcttgaaaatggtggcacatattatatcttgtcagacataacagcatttggtggaataagagcagccccaacgggaaatgaaagatgccctctcactgtggtgcaatctcgcaatgagctcgacaaagggattggaacaatc

SEQ ID NO: 105165 - DNA, 255 bp, Glycine max
gattggaaaaagtttcctctacaaaagcacaatttgttagtggaaaaaccttcaaatatgatataattggtgctggttcacattcttcagaagattttcctgaaaaggaagatcaagaaaaacccaaaaagattgataccagattgagacaaagaatagatcctcaatacaatgaggttcaggctcagatggaaacaaatttgtttaaattgtctcttgatgatgttgaaactcccaaaggttccatgttggatc

SEQ ID NO: 105166 - DNA, 258 bp, Glycine max
gtttgtcgttcctcactgacctcaccatggcgaccagagccaagctttctttagctatcttccttttctttcttttagccttgatttcaaacctagccttgggcaaacttaaagaaaccgaggtcgaagaagatcccgagctcgtaacatgcaaacaccagtgccaacagcaacggcaatacactgagagtgacaagcgaacatgcttgcaacaatgtgacagtatgaagcaagagcgagagaaacaagtcgaagagg

SEQ ID NO: 105167 - DNA, 177 bp, Glycine max
caagagactaagttcttttgatatgtacaagcaagaagttctccttggccatctggattggtctcccatgcacaaagatcccatattctggcgagaaaatataaacaactttgaagaaaatgatttccagattctaagggtcctactaacaattttggacacgtccagtgatccaag

SEQ ID NO: 105168 - DNA, 292 bp, Glycine max
gttaccatttgctcccagcactgagcttaaccgagcttcacaaagatgaatcgggaaaaattgatgaagatggccggttcggttagaactgggggaaagggcaccgtgagaagaaagaagaaggctgtccacaagacaacaaccacagatgacaaaaggcttcagagcaccctgaagagaataggggtgaatgccatcccggctattgaggaggtcaatatctttaaggatgacgtaattatccagtttctaaatcccaaagttcaagcatccattgctgctaatacttggg

SEQ ID NO: 105169 - DNA, 282 bp, Glycine max
gccccccaaaaatgaagagcaccatcttctttgctctctttctcttttgtgccttcaccacctcatacctaccttcagccatcgctgatttcgtgctcgataatgaaggtaaccctcttgaaaatggtggcacatattatatcttgtcagacataacagcatttggtggaataagagcagccccaacgggaaatgaaagatgccctctcactgtggtgcaatctcgcaatgagctcgacaaagggattggaacaatcatctcgtccccatatcgaatccgtt

SEQ ID NO: 105170 - DNA, 287 bp, Glycine max
gttaaagttaatgtagcatgtgctgctgttggcttgacatcaagttacactccaactccattgttggaatctggtttgcaaaaagacagagggttaattgtggagtattttggaaggatgtcttacgttgctcataacgttaatcagccccaagagaaagatttgttggagggaaatttttcctttgatattaaatctcgctctagattggaaaaagtttcctctacaaaagcacaatttgttagtggaaaaaccttcaaatatgatataattggtgctggttcaca

SEQ ID NO: 105171 - DNA, 287 bp, Glycine max
tatcagtttcattcctgaatcaattagtttcttcactttcactttctaactgggaggatcaaagtgtgtgtctttgtcctcttggtgttgtttcttcttcttcttcaagtgtgcttcataaagcagtaggatttggaagcaacaaaagagttgcaaagtgggtagtgatcatggcagctgtaaagcctgaggagataagccacccaccaatggaccaacttcaaggcttagagtattgtatagattcaaacccatcttgggctgagacaatagctttgggtttccag

SEQ ID NO: 105172 - DNA, 289 bp, Glycine max
gcggaagaacgaagcctcctcgttcttcttcttctgcgctttatctctccctctctagaaccgtaaccgtcgtttctttctttctctctcatcaaccagagataaagagtcaccttcttatttttctgaatctcgcggcgttgttctttctgctgctgcggctgtggttccggcggcgatgggacagcaatcgttgatctacagcttcgtcgctcgaggcaccgttatcctcgcggagtacaccgagttcaccggaaacttcaccggcgtggcggcgcagtgcctccag

SEQ ID NO: 105173 - DNA, 128 bp, Glycine max
cacaccccactaacaattccttcacttgcagcactgttgcatcatcatcttcattgcaaaaccctaaacttcaccgtcaaccatgaccacacaagtaccaccacacagtgtccaagtccacacaacag

SEQ ID NO: 105174 - DNA, 286 bp, Glycine max
tttagctttctcttccttcataatttctcacctttcaaatctccattcagcttcattttctgcatagaaaaaacccttttctggagaaagaatatagtcttcagctggacaaggatcattcatcttgaaagaagagtttgtgtgtgacaatctttatagttctaaggagggtgcaagagagaactgaatttgctgtgatggcaactcgtagatatgcttttggaagagctgatgaggccatcatccagactccatgagggccactttggctgaatttgtttctact

SEQ ID NO: 105175 - DNA, 173 bp, Glycine max
ggacaaagagaaccccaaacacaacaagtgtctccagagttgcaatagcgagacagactcgtacaggaaccaagcatgccacgctcgttgcaacctccttaaggtggagaaagaagaatgtgaagaaggtgaaattccacgaccacgaccacgaacacaacacccggagaggg

SEQ ID NO: 105176 - DNA, 284 bp, Glycine max
ttttcagtggctgcttcgctctgagagagcaggcacagcaaaatgagtgccagatccaaaagctgaatgccctcaaaccggataaccgtatagagtcggaaggtgggttcattgagacctggaaccctaacaacaagccattccagtgtgccggtgttgccctctctcgctgcacccttaaccgcaatgcccttcgtagaccttcctacaccaggggtccccaggaaatctacatacaacaaggtaatggtatttttggcatgatattccggggttgtcctagc

SEQ ID NO: 105177 - DNA, 175 bp, Glycine max
ccttaataaataatttaagatactatgatgagagcacggttcccattactgttgctgggacttgttttcctggcttcagtttctgtctcatttggcattgcttactgggaaaaagagaaccccaaacacaacaagtgtctcgagagttgcaatagcgagagagactcgtacagga

SEQ ID NO: 105178 - DNA, 290 bp, Glycine max
caagctcactgtgccgatgttggatctcatttgcttgaacgattgagatttctcatggaaagacatgacatcataggaaatgtaaggggaaggggcctaatggtaggcatagagttggtcactgaccgagacaacaagacacccgcaaaggctgaaactgctgtcgtgtttgaaaaactcagagagcttggtgtgctagttgggaaaggaggacttcatggcaatgttttcaggatcaagccaccaatgtgtttctccaaagatgatgcagattttcttgtggatgcctt

SEQ ID NO: 105179 - DNA, 266 bp, Glycine max
  unsure (1)..(266): unsure at all n locations
ttaattattaacacttccttagttcaatgatggggaagcccttcactctctctctttcttccctttgcttgctactcttgtcgagtgcatgctttgctattagctccagcaagctcaacgagtgccaactcaacaccctcaacgcgttggaacccgaccaccgcgttgagtccgaaggtggtttgattcaaacatggaactctcaacaccctgagctgaaatgcgccggtgtcactgtttccnactcaccctcaaccgaatggcct

SEQ ID NO: 105180 - DNA, 288 bp, Glycine max
ataaaattcttccaccaagttatgggtagaccttgtgttgcttcttttctccctcttaggtctctcttctagttccagcatatcaactcatcgttccatattggaccttgacctaaccaagtttaccacacagaaacaggtgtcttcactgttccaactatggaagagtgagcatggacgtgtctaccataaccacgaagaagaggcaaagagacttgagattttcaagaataacttgaactatatcagggacatgaatgcaaacagaaaatcaccccattctcatcg

SEQ ID NO: 105181 - DNA, 286 bp, Glycine max
cttaattattaacacttccttagttcaatatggggaagcccttcactctctctctttcttccctttgcttgctactcttgtcgagttcatgctttgctattagctccagcaagctcaacgagtgccaactcaacaacctcaacgcgttggaacccgaccaccgcgttgagtccgaaggtggtttgattcaaacatggaactctcaacaccctgagctgaaatgcgccggtgtcactgtttccaaactcaccctcaaccgcaatggcctccacttgccatcttactc

SEQ ID NO: 105182 - DNA, 283 bp, Glycine max
agcagtcaaaaggagtgattgggcctcattggtacaagtgtttttaacaaacagcaacagtacagagcattttgatgcatgcaagtggacaaaatcggaaccacattcctgggaattgatcttcccaatagaggtatgtggtcctaacaatggttttgaaatgtggagttctgagtgggcaaatcaaacttcatggcatttgagtttccttattgacaatcccaaacagtctacagtttttgatattctcttgggaatttctcaagattttgaaattgctggt

SEQ ID NO: 105183 - DNA, 282 bp, Glycine max
agtgatttcagtgagtgatcggtgttcacttgatctcatcataatcgtcagcgtcaattgaagaagatgccgatcagaaacatcgccgtcggaaggcctgaagaggcgactcacccctacacgttgaaggcggctttggctgagttcatctcaaccttcatcttcgtgttcgccggctcaggctccggcatcgcctacaacaagctcaccgacaacggcgctgccacccctgccggcctcatctccgcctccatcgcccatgcattcgccctcttcgtcgcc

SEQ ID NO: 105184 - DNA, 282 bp, Glycine max
cagaggccagattttccccttttcttctctggtgccacacctttagttggagcgttgccttatgctcagtgctatggcgggcatcaatttggtatgtgggctgggcagctgggtgatggcagggcaatgactctaggggagatactgaattctaactctgaaaggtgggaacttcaacttaaaggagctggcaagactccttacagtcgctttgccgatggccttgccgtcctccgcagcagcgtcagggagttcctttgcagtgaggcaatgcaccacctt

SEQ ID NO: 105185 - DNA, 279 bp, Glycine max
  unsure (1)..(279): unsure at all n locations
gtgcatgatagttcagtgtctacaataccaggtgattttgtcattggtgttaagttgacaaccataaacaatatgtgtgcatatgggctcaatcctggtatttcaggttctcgtcttttgggcaccattcctcagtccatttcacagcaaactgtttggaatcaaatggcaacagtgagaacaccattgaattttgattctagcaagcagagcttttgtcaattttctattgaccttctcggtggaggaatnttagtggacaaactggagattgatcac

SEQ ID NO: 105186 - DNA, 286 bp, Glycine max
cagggatattaaggcaaccaatgtcttacttgataaacatctgcatgccaagatctctgactttggtttagccaaacttgatgaagaagagaatactcatatcagcacaagaatagctgggacaattggttacatggctcctgagtatgctatgaggggttacttgactgacaaagcagatgtctatagctttggaattgtagctttagagattgttagtggaaagagcaacacaaattataggccaaaggaggagtttgtatatcttttagattgggcctatgtc

SEQ ID NO: 105187 - DNA, 284 bp, Glycine max
gaggcctcatacgacaccaaattcgaggagataaacaaggttctgtttggtagagaggaggggcagcaacaaggggaggagaggctgcaagagagtgtgattgtggagatctcagagagacaaattcgggaactgagcaaacatgccagatctagttcaaggaaaaccatttcttctgaagataaaccttgcaacttcagaagccgcgaccccatctattccaacaagcttggcaagttgtttgagattaccccagggaacaaccctcagcttcgggacttgga

SEQ ID NO: 105188 - DNA, 283 bp, Glycine max
ctcgagccgctccaaacccaacaccctccttctccccaaccatgctgacgctgattacctcatcgttatccttaacgggactgccattctttccttggtgaacaacgacgacagagactcctacagacttcaatctggtgatgccctgagagtcccctcaggaaccacatactatgtggtcaaccctgacaacaacgaaaatctcagattaataacactcgccatacccgttaacaagcctggtagatttgagagtttcttcctatctagcactgaagctcaa

SEQ ID NO: 105189 - DNA, 284 bp, Glycine max
attcattctcatctttctctcttctctctccacccaaaccctaactcccgaccctgttcccctctcgtatccgtcatgaaaggaggaaagtccaagaccgaatctaagagagccgatcccaaacttgctgtgaataagaagggagccgccaccaaggctaggaaacccgccggcaaggggaaggcagcgaaagaccctaacaagccaaagaggcctccaagtgctttcttcgttttcatggaggagttcaggaaggtattcaacaaagaacatcctgaaaacaa

SEQ ID NO: 105190 - DNA, 283 bp, Glycine max
actcgagccgaatcggctcgagggatcacacttatacaaaattctctaattagtaacttgtagagagttgctgcttggaagataggttgtttaatggtcaagattgtgatgtctgggaatgcagcagtcaaaaggagtgattgggcctcattggtacaagtgtttttaacaaacagcaacagtacagagcattttgatgcatgtaagtggacaaaatcagaaccacattcctgggaattaatcttcccaatagaggtatgtggtcctaataatggttttgaaa

SEQ ID NO: 105191 - DNA, 275 bp, Glycine max
agcctggtagatttgagagtttcttcctatctagcactgaagctcaacaatcctacttgcaaggattcagcaggaacattttagaggcctcctacgataccaaattcgaggagataaacaaggttctgtttagtagagaggaagggcagcagcaaggggagcagaggctgcaagagcccgtgattgtggaaatctcgaaggaacagattcgggcactgagcaaacgtgccaaatctagttcaaggaaaaccatttcttctgaagataaacctttt

SEQ ID NO: 105192 - DNA, 275 bp, Glycine max
gaggttctctatttgtggataagtggggtccacctggccacgtggaccgcgccgagccgggagtgtttaacctgctgggagccgctaattcggctcgcggcgccgagctgtgtctccgtttgtttggagtggtggtggtatgagatcatgattttgttgtgtgggttgttggtggaccccactgccagcgtggcggctatggggattttaatccagactacgtccttgatctacgtttttccctcctcgctggggcttgcggtgtctacgcgcgt

SEQ ID NO: 105193 - DNA, 285 bp, Glycine max
ttcaactctaaaaggttccaaactctcttcaaaaaccaatatggccacgttcgcgtcctccagaggttcaacaaacgctcccaacagcttcagaatctccgagactaccgcattttggagttcaactccaaacccaacacccttcttctcccccaccatgctgacgctgattacctcatcgttatccttaacgggactgccattcttaccttggtgaacaacgacgaccgagactcttacaaccttcaatctggcgatgccctaagagtccctgcaggaaccaca

SEQ ID NO: 105194 - DNA, 277 bp, Glycine max
ctctcgctaaccaagaaggaactagggttttacagaatacaagctctctctctctctcgtcggttttcgtcaatcaaatccaatccaatatcaaatatgagtcgtcatcccgaggttaagtgggctcagaggcttgacaaggtctatatcacggtgcaattggctgattcaaaaaatgcaaaagtggatcttacgccagatggtatttttaccttctccggtagtgctggtgctgaagaccatcagtatgagctaaaactggagctctttgataagg

SEQ ID NO: 105195 - DNA, 279 bp, Glycine max
ctccacggagaacacggcgagaatgaaagaggggctccgaacatcaccatggaggcctcgcctttccttagttcaatatggggaagcccttcttcactctctctctttcttccctttgcttgctactcttgtcgagtgcatgctttgctattacctccagcaagttcaacgagtgccaactcagcaacctcaacgcgttggaactcgaccacggcgttgagtccgaaggtggtcttatggaaacatggacgtctcaacaccctgagctgcaatgcgccg

SEQ ID NO: 105196 - DNA, 280 bp, Glycine max
aaacaattcaattcaatctgcgtcgatcatggagaggaaaacatttgggtttttgttcttgctcctccttgtcttagcttctgatgtgacggtgaagagagcagaggcgaaagattgcttgacaaggaggcacgggttccagggtagatgcttattcgacaggcaatgtgcacatgtgtgcaggagcgatggattcatcggtggtcagtgccgaggccctcttcgcaaatgcttttgcagcaggccatgttgatcgaaattactactgccaaagaggcca

SEQ ID NO: 105197 - DNA, 282 bp, Glycine max
aagaaaagccatttccatagcagcctaagaaaatgatcagagcactagcttgttcgctatctttctactttgcgccttcacctcatacctaccttccgccaccgcccaggacgtgctcgacgtggatggcgatccgattcggaacggtttcatatactacgttttgccggcaataagaggaaacggtggcggaatagaacgagccgcactcgggaaagacacttgccctatcactgtagtgcaatctcccaatccaaactctaaggggttagaaattaagtt

SEQ ID NO: 105198 - DNA, 280 bp, Glycine max
ctgcatcggaagaaaccctagccactctcccggcgtcacgatgcagatcttcgtgaaaaccctaacgggtaaaacgatcacgttggaggtggagtcttcggacaccatcgacaacgtgaaggccaagatccaggacaaggaaggcatccctccggaccagcagcgcctcatcttcgccgggaagcagctggaggacggccgcaccctcgccgactacaacatccagaaggagtccacgcttcacctcgtcatccgcctccgtggcggcgccaagaagcgc

SEQ ID NO: 105199 - DNA, 277 bp, Glycine max
cttaattattaacacttccttagttcaatatggggaagcccttcactctctctctttcttccctttgcttgctactcttgtcgagtgcatgctttgctattagctccagcaagctcaacgagtgccaactcaacaacctcaacgcgttggaacccgaccaccgcgttgagtccgaaggtggtttgattcaaacatggaactctcaacaccctgagctgaaatgcgccggtgtcactgtttccaaactcaccctcaaccgcaatggcctccacttgcc

SEQ ID NO: 105200 - DNA, 276 bp, Glycine max
atcacaaacaaattgttggtttccatgttgctggaagcaagggaagactgggatatgcttcactgataccatatgttgagccagttgtgcaagctcaaagtgctgaagtttactttgacttcttccctgtggaggttaatagtcaagagggagttgctcatattggtgaattgaaatctggtgtctatgttccactgcctacaaaaactaatttggtggaaactcccaaggaatggcaactggatctaccttgtgacaaaattcctagtgtcttga

SEQ ID NO: 105201 - DNA, 274 bp, Glycine max
cttgtgttgcttcttttctccctcttaggtctctcttctagttcgagcatatcaactcattgttccatattggaccttgacttaaccaagtttaccacacagcataagaaatcgaaaactgatccaactatggaagagtgtgcatggacgtgtctaccataaccacgaagaagaggattagagacttgagattttcaagaataacttgaactatatcagggacatgaatgcaatcagagaatcaccccattctcatcgtttaggattgaacaag

SEQ ID NO: 105202 - DNA, 273 bp, Glycine max
cgaaccagatttcaagatgaagttcaacattgcgaatcccaccactggttgtcagaagaagctggagatcgatgatgacctgaagctacgagcattttgggacaagaggatctcacaagaggttgttggtgatgctctgggtgaggaattcaaaggctatgtcttcaaaattactggaggttgcgacaagcaaggatttccaatgaagcaaggagtgttgacccctggtcgtgttcgcctcttgctgcatagaggaactcttgtttccgtggt

SEQ ID NO: 105203 - DNA, 115 bp, Glycine max
attctctccattggtccttagacactcatcagtcatgaccatggccaagctagttttttccctttgttttctgcttttcagtggctgctgcttcgctttcagttccagagagcag

SEQ ID NO: 105204 - DNA, 279 bp, Glycine max
ggcatgtgcgccattgattgctatacttcctttggagattagggggacaattggcgatttcataatgggtgtgtttgctgtcttcaaagatctggacttcagttttttagagatgaatccatttacactggtgaatgaaaagccatatccactggatatgagaggggaattggatgacactgccgcattcaagaacttcaacaagtggggtaatatagaatttccattgccttttggaagaatctgagccctacagaaagcttcattcattcttggatg

SEQ ID NO: 105205 - DNA, 162 bp, Glycine max
gcaaaattgtgctgtgtggatgcctaatgttgataagactgagatgaacctcactcatgaattgaatgggaggaattttaatttgactatacgcattactgatccagatgttgtgagaattaagtgaagtgacggtgtaaatatactcagctccgactcagc

SEQ ID NO: 105206 - DNA, 288 bp, Glycine max
aagaacttgttgaagtgtggttggtctcctaatggaagcaaggtaacagctggtagttctgatcgaatggtttacatctgggataccacttctcgccgcatcttgtataagcttcccggtcacaatggatctgttaatgagtgtgtttttcatcccaatgagcctattattggatcttgcagcagtgacaagcagatttatcttggggagatatgaagcacaacgtttaggaaatgaaatgagcatgttggtgcttttgaccaccattagggagtggtaaactttaga

SEQ ID NO: 105207 - DNA, 274 bp, Glycine max
gccttcccctaccaattctttctctcaaccgaatgatctgagtgaggggtttggccaatgacgagtggttttggtgaatcaacgatagcgtctgcaccgagcccatcatgctcggggaacagttcacacgatgccggtgattttgaatgctacatatgcttcgatttggcgcaagaccctgtgatcacactctgtggtcacctattctgttggccatgcctttataggtggctcaaccatcactcccattctcaggaatgcactgttagcaagg

SEQ ID NO: 105208 - DNA, 257 bp, Glycine max
caagaacaatcaaacagaagaggctcaaggtcgcagaagcagcagctacaggacagtcaccagaagattcgtcacttcaatgaaggagacgtactcgtgattcctcctggtgttccttactggacctataacactggcgatgaaccagttgttgccatcagtcttcttgacacctctaacttcaataaccagcttgatcaaacccctagggtattttacattgctgggaacccagatatagagtacccagagaccat

SEQ ID NO: 105209 - DNA, 274 bp, Glycine max
ttcagtttctcctcgttgttcttcgctttcctgttttcaatttcgattctttcgttaatttaataagatgtttgggagggcaccgaagaagagcgataatacgaggtactacgaaatcctcggcgtctccaagaacgcttcgcaggatgatctgaagaaggcttacaagaaagccgccattaagaatcaccccgacaagggcggtgatcccgagaagtttaaagagctggcgcaacttatgaggttctgagtgaccctgagaagcgtgagatat

SEQ ID NO: 105210 - DNA, 274 bp, Glycine max
ctccattgtctttgaacactcatcaccatggccaagcttgttctttccctttgtttccttcttttcagtggctgcttcgctctgagagagcaggcacagcaaaatgagtgccagatccaaaagctgaatgccctcaaaccggataaccgtatagagtcggaaggtgggttcattgagacctggaaccctaacaacaagccattccagtgtgccggtgttgccctctctcgctgcacccttaaccgcaatgcccttcgtagaccttcctacacca

SEQ ID NO: 105211 - DNA, 249 bp, Glycine max
cggctcgagcttgcaacgattgacaatggcttcaaccgacaagtcaccggacccaacgccggcgaagggtccggatccaactccggggaagccgatgagtgttggtcagcacgtgatcgacaagagtgcaatgatggtgcagtcgctggaccccattaagcagatgagtcagcacgtgtgctccttcgctatctacagccatgacatgtctcgccagatagagacacatcactactgctcgagactcca

SEQ ID NO: 105212 - DNA, 276 bp, Glycine max
ctttgctttggcactcatcttgcatgaaaagttcactgttcaagagattttctgggcattttcaatatacttggaggcagttgcaatattaccccagttggttttgttgcaaaggagtggaaatgtggacaatttgactgggcaatacatattctttcttggtgcatatcgtgcattttacatcctgaactggatatacggtatctgactgagccacattttactagatggatagcttgtgtctcaggtgttgttcagacagctttgtatgcagat

SEQ ID NO: 105213 - DNA, 278 bp, Glycine max
cctaaggtaaaaatgtttgaacaagcacaaaactgccttcttcctatgggaattacctccgaaaatgttgcacagcgctttggggtttcaaggaaggaacaagaccaggccgcagttgagtctcacaggcgagctgccgcagctactgcttctggtaaatttaaagatgaaattgtcccagttaccactaagattgtggacccaaaaactggtgaggagaaatctgtcaccatttctgttgatgatggaattcgacctggcacaacagtgtctgatct

SEQ ID NO: 105214 - DNA, 262 bp, Glycine max
actcgccatacccgttaacaagcctggtagatttgagagtttcttcctatctagcactgaagctcaacaatcctacttgcaaggattcagcaggaacattttagaggcctcctacgataccaaattcgaggagataaacaaggttctgtttagtagagaggaagggcagcagcaaggggagcagaggctgcaagagagcgtgattgtggaaatctcgaaggaacagattcgggcactgagcaaacgtgccaaatctagttca

SEQ ID NO: 105215 - DNA, 275 bp, Glycine max
ggaaaaggcgtcttcataaacgccgcccaaaacttctcatacccttttattcattccattcgtttctagggttttcttttctttgccgagaaaatgagagagtgcatttcgatccacattggccaggccggtatccaggttggaaacgcctgctgggaactctattgccttgaacacggcattcagcccgatggacagatgccgagtgacaagaccgttggcggaggagacgacgccttcaacacatttttcagcgagaccggcgccggaaagca

SEQ ID NO: 105216 - DNA, 271 bp, Glycine max
gacccaccttcgtaaataaaaaccctatgcaactgcactattctcgtgttcgctttaaatcaaaccgctcattctcctcaatcatacctctatctctctctctttctctttctgatcacaatgtcgacctttggcgccgcggcgaatacgaatcccaacaaatcctacgaggtagcccaaccaccctctgattctatttcgagtctttgtttcagtcccaaggccaatttcctcgtcgctacttcatgggacaccaggtgcggtgttggga

SEQ ID NO: 105217 - DNA, 275 bp, Glycine max
  unsure (1)..(275): unsure at all n locations
tcttctaccacacttcaattcagaggcgatagtgatactggtaattaatgaaggagatgcaaacattgaacttgttggcctaaaagaacaacaacaggagcagcaacaggaagagcaacctttggaagtgcgganatatagagccgaattgtctgaacaagatatatttgtaatcccagcaggttatccagttgtggtcaacgctacctcaaatctgaatttctttgctattggtattaatgccgagaacaaccagaggaacttcctcgcaggtt

SEQ ID NO: 105218 - DNA, 274 bp, Glycine max
ccagactgagaggaagagagagggagattctttgtttgctaccttctctcggaaaaatggttacgttcaggtttcaccagtaccaggtggttgggagggctcttcccacggaagcagatcagcaccccaagatctaccgaatgaagctctgggccaccaacgaggttcgcgccaagtccaagttctggtattttctgaggaaactgaaaaaggtgaagaagagcaatggccaagtgcttgccatcaacgagatttttgagaagaacccaaccaa

SEQ ID NO: 105219 - DNA, 266 bp, Glycine max
agcggcattaaaaatgcagatcttcgtgaaaaccctaacggggaagaccataaccctcgaggtcgaaagcagcgacaccattgacaatgtcaaggctaagattcaagacaaggaaggcatccctccggatcagcagcgtttgattttcgccggaaagcaacttgaagatggaaggaccttggccgattacaacatccagaaggaatcaacccttcaccttgtcctcaggcttcgtggtggcatcatcgagccttccctcatggctt

SEQ ID NO: 105220 - DNA, 272 bp, Glycine max
attggtccttaaacactcatcagtcatcaccatggccaagctagttttttccctttgttttctgcttttcagtggctgctgcttcgctttcagttccagagagcagcctcagcaaaacgagtgccagatccaaaaactcaatgccctcaaaccggataaccgtatagagtcagaaggagggctcattgagacatggaaccctaacaacaagccattccagtgtgccggtgttgccctctctcgctgcaccctcaaccgcaacgcccttcgta

SEQ ID NO: 105221 - DNA, 271 bp, Glycine max
ctcgagccgctcattcttcatccatagacatggccaccgtcacttctgcagccgttgctattccctcattcactggcctcaaggcaagcgcaggcaaagtgagtgccgcagttaaagtctcagctccccaagccacaaggttgggcatcaaggcttcgctgaaagacgttggagtcgctgttgtggccactgccgcgagtgcagtgctggctagcaacgccatggccattgaagtgttgctgggtggtgatgacgggtctctggctttcgt

SEQ ID NO: 105222 - DNA, 270 bp, Glycine max
gtcatcaccatggccaagctagttttttccctttgttttctgcttttcagtggctgctgcttcgctttcagttccagagagcagcctcagcaaaacgagtgccagatccaaaaactcaatgccctcaaaccggataaccgtatagagtcagatggagagctcattgagacatggaaccctagcaacaagccattccagtgtgccggtgttgccctctctcgctgcagcctcaaccgcaacgcccttcgtagaccttcgtataccaacggt

SEQ ID NO: 105223 - DNA, 283 bp, Glycine max
cagcgagagagcgaagaaagtgaagattctgagttacgaagacataagaataagaacccttttctcttcggctctaacaggttcgagactctcttcaaaaaccaatatggtcgcattcgcgtcctccagaggttcaaccaacgctccccacaacttcagaattttccgagactaccgcattttggagttcaactccaaacccaacaccctccttctccccaaccatgctgaagctgattagctcatcgttatccttaacgggactggcattctttcctgggtg

SEQ ID NO: 105224 - DNA, 287 bp, Glycine max
ggaattcggatcgagcagcaggtgagtgagttagtgagcaatagttgtgagcgatgagaatggctcccaagggttgtaatcttccgtgctgtgttctgcgtctcagcactgtcactgagtcgttgtcttgcggaggatcatggactcattatgatacttctacgctgaatcatgccctcaggtcgtagacatcatcatataacaggtcaagctgctctacaagcggcacaagaacagtgctttcgcctgggtcagaaacatcttccaggtgtgtgctgtgcagagtt

SEQ ID NO: 105225 - DNA, 278 bp, Glycine max
agaaagtcttccatagccccccaaaaatgaagagcaccatcttctttgctctctttctcttttgtgccttcaccacctcatacctaccttcagccatcgctgatttcgtgctcgataatggaaggtaaccctcttgaaaatggtggcacatattatatcttgtcagacataacagcatttggtggaataagagcagccccaacgggaaatgaaagatgccctctcactgtggtgcaatctcgcaatgagctcgacaaagggattggacagtcatctcg

SEQ ID NO: 105226 - DNA, 278 bp, Glycine max
ggctgggaaacctgctgtgcttacacgtgttgtggatagcatgactgacaacttgagaccaactcgtgctgaagccacagatgttgccaatgctgttttagatggaagtgatgccatacttctgggtgctgagactttacgtgggttgtaccctattgagactatttctactgttggcagaatttgttctgaggctgagaaagttttcaatcaagacctttattttaagaggacagtcaagtatgttggagaacccatgacccacttggaatctattg

SEQ ID NO: 105227 - DNA, 277 bp, Glycine max
ctcactcactcacaactcagtgaaagagaatccgaggcgaagagaagagaaaaattaagatggaggggaaggagcaggatgtgtcgctgggagcgaacaagttcccggagagacagccgattgggacggcggcgcagagccaagacgacggcaaggactaccaggagccggcgccggcgccactggttgacccgacggagtttacgtcatggtccttacagagcagggatagcagagtttgtggccacttttctgtttctatacatcactgtcttaa

SEQ ID NO: 105228 - DNA, 274 bp, Glycine max
ctccattgtctttgaacactcatcaccatggccaagcttgttctttccctttgtttccttcttttcagtggctgcttcgctctgagagagcaggcacagcaaaatgagtgccagatccaaaagctgaatgccctcaaaccggataaccgtatagagtcggaaggtgggttcattgagacctggaacaccaacaacaagccattccagtgtgccggtgttgccctctctcgctgcacccttaaccgcaatgcccttcgtagaccttcctacacca

SEQ ID NO: 105229 - DNA, 277 bp, Glycine max
actcgagccgattcggctcgagatagcatctcctttaccaccatcctagatatcagagaactttgcagctctcttaggtacttaaaaaacaccacgcaaacagcaagatggccacttccgacagtaacatgctactaaattatgttccagtttatgtgatgctcccactcggagttgtcaatgttgacaatgtttttgaagacccagatggccttaaagaacagctcttgcagcttcgagctgcgggtgttgacggggttatggttgatgtgtggtg

SEQ ID NO: 105230 - DNA, 271 bp, Glycine max
ctcgagccgattcggctcgagagcgaagagaatggctcccaagggtttaatctttttggctgtgttatgcttctcagcactgtcactgagtcgttgtcttgcggaggataatggacttgttatgaacttctacaaggaatcatgccctcaggctgaagacatcatcaaagaacaagtcaagcttctctacaagcgccacaagaacactgctttctcctggctcagaaacatcttccatgactgtgctgttcagagttgtgatgcttcactg

SEQ ID NO: 105231 - DNA, 289 bp, Glycine max
ctcgagccgaatcggctcgagattggtccttaaacactcatcagtcatcaccatggccaagctagttttttccctttgttttctgcttttcagtggctgctgcttcgctttcagttccagagagcagcctcagcaaaacgagtgccagatccaaaaactcaatgccctcaaaccggataaccgtatagagtcagaaggagggctcattgagacatggaaccctaacaacaagccattccagtgtgccggtgttgccctctctcgctgcaccctcaaccgcaacgccctt

SEQ ID NO: 105232 - DNA, 269 bp, Glycine max
gacccctctacaagcttgggattagagaccttccagtccttctatattgggggaggagccaattcgcactcggtgctttctggattcgaacctgccatccttgaaactgcatttaatgaatcaagaacggtggtagaggaaatcttctccaaggaactagatgggccaattatgttcgtggatgattctcatgcacctagcttatggactaaattccttcaactgaagaaggatgacaaagagcaacagctgaagataatgatgcaaga

SEQ ID NO: 105233 - DNA, 265 bp, Glycine max
cagagtttttgtcaattttctattgaccttctcggtggaggaattttagtggacaaaactggagattggatcacacttatacaaaattctccaattagtaacttgttgagagttgctgcttggaagaaaggctgtttaatggttaagattgtgatgtctgggaatgcagcagtcaaaaggagtgattgggcctcattggtacaagtgtttttaacaaacagcaacagtacagagcattttgatgcatgtaagtggacaaaatcgg

SEQ ID NO: 105234 - DNA, 233 bp, Glycine max
caattccttcacttgcagcactgtagcatcatcatcttcattgcaaaaccctagacttcaccttcaaccatgaccacacaagtaccacaacacagtgtccaagtccacactacaacacgcctaaacgaagctggcgtcgtccaccccggagcccgtttcgaaccgaagcgttatgaagcaggcgtctaagcgccatccatataccattccgagagaggtccaacgaattccca

SEQ ID NO: 105235 - DNA, 273 bp, Glycine max
cgaaggaacagattcgggcactgagcaaacgtgccaaatctagttcaaggaaaaccatttcttctgaagataaaccttttaacttgagaagccgcgaccccatctactccaacaagcttggcaagttctttgagatcaccccagagaaaaacccccagcttcgggacttggatatcttcctcagtattgtggatatgaacgagggagctcttcttctaccacacttcaattcaaaggcgatagtgatactggtaattaatgaaggagatgcaa

SEQ ID NO: 105236 - DNA, 274 bp, Glycine max
gagctggcacaccacttcagaataatcttcatgaactctggtctcttctcaactttcttctgcccgaaatttttagttctgctgaaacttttgatgaatggtttcaaatctctggtgaaaatgaccaacaggaggttgttcaacaattacacaaggtcctccgcccatttctccttcgaaggttgaagtcagatggagagaaagggttgccaccgaaaaaggaaactattcttaaggtaggcatgtcccaaatgcagaaacagtattatagagc

SEQ ID NO: 105237 - DNA, 259 bp, Glycine max
caaattttaataaaccgcgatcacaggttgccgcaccttaaaaccggaaacaaaagcaatcgttacttgatttcaagaatttctcaattgcttcctacttctttgtgtacgatttcttaaggagaaagaaaatcactctctgtgctggtcacagacttcgtcaatcattttcttgtccactcctagtttatttactgaacactctcctatatgatataggacttcgtgtcagatttagactaattctgtttcattctca

SEQ ID NO: 105238 - DNA, 266 bp, Glycine max
ggagagggaacctcagcaacccggtgagaaggaggaagacgaagatgagcaaccacgtccaatcccattcccacgcccacaacctcgtcaagaagaagagcacgagcagagagaggaacaggaatggcctcgcaaggaggaaaaacgcggagaaaagggaagtgaagaggaagatgaggatgaggatgaggaacaagatgaacgtcaattcccattcccacgcgcacctcatcagaaggaagagcgaaagcaagaggaagatgagg

SEQ ID NO: 105239 - DNA, 274 bp, Glycine max
gtataccttaataaataatttaagatactatgatgagagcacggttcccattactgttgctgggacttgttttcctggcttcagtttctgtctcatttggcattgcttactgggaaaaagagaaccccaaacacaacaagtgtctccagagttgcaatagcgagagagactcgtacaggaaccaagcatgccacgctcgttgcaacctccttaaggtggagatcagaagaatgtgaagaaggtgaaattccacgaccacgaccacgaccacaac

SEQ ID NO: 105240 - DNA, 272 bp, Glycine max
atctggttaccctaccattcaatggtttcctaagggatctctagagcctaaaaagtatgaaggtgcacttactgcagaagcccttgcggcgtttgtgaacattgaagcaggtacaaatgtgaagatagcttctgttccatccagtgtggtagttctctctccagataactttgatgaggttgtcttggatgaaacaaaagatgttctggtggaattctatgcaccatggtgcggtcattgcaaggcccttgcccctatttatgagaaggttg

SEQ ID NO: 105241 - DNA, 274 bp, Glycine max
tgggaaccaagagcaagagtttctaaaatatcagcagcagcagcaaggaggttcccaaagccagaaaggaaagcaacaagaagaagaaaacgaaggaagcaacatattgagtggcttcgcccctgaattcttgaaagaagcgttcggcgtgaacatgcagatagtgagaaacctacaaggtgagaacgaagaggaggatagtggagccattgtgacagtgaaaggaggtctaagagtcacagctccagccatgaggaagccacagcaagaagaa

SEQ ID NO: 105242 - DNA, 274 bp, Glycine max
accaggtgattttgtcattggtgttaagttgacaaccataaacaatatgtgtgcatatgggctcaatcctggtatttcaggttctcgtcttttgggcaccattcctcagtccatttcacagcaaactgtttggaatcaaatggcaacagtgagaacaccattgaattttgattctagcaagcagagcttttgtcaattttctattgaccttctcggtggaggaattttagtggacaaaactggagattggatcacacttatacaaaattctcca

SEQ ID NO: 105243 - DNA, 265 bp, Glycine max
ctatggccaagctagttttgtcgctattgttttctgcttatcagtagctgctgcttcgctttcagatccagagagtagcctacagtcaaacgagtgccagatctacaaactcaatgacctcaaaccgtataaccgtatagagtcagaaggacggctcattgagacatggaacgctaactacaagccattccagtgtgccgttgatgcactatctcgctgcacgctcaaccgcttcgcacttcgtagacgttcttacaggaatggt

SEQ ID NO: 105244 - DNA, 271 bp, Glycine max
aagcaggtgagtgagtgagtgagcaagagtgaagagcgaagagaatggctcccaagggtttaatctttttggctgtgttatgcttctcagcactgtcactgagtcgttgtcttgcggaggataatggacttgttatgaacttctacaaggaatcatgccctcaggctgaagacatcatcaaagaacaagtcaagcttctctacaagcgccacaagaacactgctttctcctggctcagaaacatcttccatgactgtgctgttcagagttg

SEQ ID NO: 105245 - DNA, 271 bp, Glycine max
aaaatggagacccacaaaaatggagaaccaacaaccggcacctatctccgtgacactgctacatctgctatccaaaacttcgctcccatcaacaaaatccaccaacatctctgcgcgtttcacttttactcatatgacatgagccggcaagtggaggcacaccatttttgcgcgcaccagaacgaggagatgaggcagtgccttatctacgacagccccgagaagaaagccaggctcatagggctggaatacatcatctccgaaaaccttt

SEQ ID NO: 105246 - DNA, 268 bp, Glycine max
attggtacaagtctttttaacaaacagcaacagtacagagcattttgatgcttgtaagtggacaaaatcggaaccacattcctgggaattgatcttcccaatagaggtatgtggtcctaataatggttttgaaatgtggagttctgagtgggcaaatcaaacttcatggcatttgagtttccttattgacaatcccaaacagtctacagtttttgatattctcttgggaatttctcaagattttgaaattgctggtaatactcttatg

SEQ ID NO: 105247 - DNA, 266 bp, Glycine max
cggggcgaagcagaggaaactctggtggaggcccgcagcgatactgacgtgcaaatcgttcgtctgacttgggtataggggcgaaagactaatcgaaccgtctagtagctggttccctccgaagtttccctcaggatagctggagcccgcgggcgagttctatcgggtaaagccaatgattagaggcatcgggggcgcaacgccctcgacctattctcaaactttaaataggtaggacggtgcggctgctctgttgagccgcgcca

SEQ ID NO: 105248 - DNA, 271 bp, Glycine max
gggacatgaatgcaaacagaaaatcaccccattctcatcgtttaggattgaacaagtttgctgacatcactcctcaagagttcagcaaaaagtacttgcaagctcccaaggatgtgtcgcagcaaatcaaaatggccaacaagaaaatgaagaaggaacaatattcttgtgaccatccacctgcatcatgggattggaggaaaaaaggtgtcatcacccaagtaaagtaccaagggggctgtggaagcggttgggcgttttctgccacggg

SEQ ID NO: 105249 - DNA, 269 bp, Glycine max
attcctttgatattaaatctcgctctagattggaaaaagtttcctctacaaaagcacaatttgttagtggaaaaaccttcaaatatgatataattggtgctggttcacattcttcaggagattttcctgaaaaggaagatcaagaaaaacccaaaaagattgataccagattgagacaaagaatagatcctcaatacaatgaggttcaggctcagatggaaacaaatttgtttaaattgtctcttgatgatgttgaaactcctaaaggt

SEQ ID NO: 105250 - DNA, 269 bp, Glycine max
attttgatgcccaatgctgaacaaccattccgtctgaactgggcaacatttagcacaggagacaagggttcagataatgttcctgacctttctatttttgtaggagatttagctgcagatgttacagatagtttgttgcatgaaacttttgctagtgtatatccttctgttaaagctgcaaaagttgtttttgatgccaatactggccgttcaaagggctatggtttcgtcaggtttggagatgacaatgagagaacccaggccatgac

SEQ ID NO: 105251 - DNA, 272 bp, Glycine max
gttcaatatcctagtacaccgtattaaagaatttgagatatactatgatgagagcgcggttcccattactgttgctgggagttgttttcctggcatcagtttctgtctcatttggcattgcgtattgggaaaagcagaaccccagtcacaacaagtgcctccgaagttgcaatagcgagaaagactcctacaggaaccaagcatgccacgctcgttgcaacctccttaaggtggaggaagaagaagaatgcgaagaaggtcaaattccacgg

SEQ ID NO: 105252 - DNA, 270 bp, Glycine max
ctcactcactcacaactcagtgaaagagaatccgaggcgaagagaagagaaaaattaagatggaggggaaagagcaggatgtgtcgctgggagcgaacaagttcccggagagacagccgattgggacggcggcgcagagccaagacgacggcaatgactaccatgagccggcgccggcgccactggttgacccgacggagtttacgtcatggtccttacagcgcagggatagcagagtttgtcgacacttttctgattctatacatcact

SEQ ID NO: 105253 - DNA, 266 bp, Glycine max
aacttattaacactttccttagttcaatatggggaagcccttcttcactctctctctttcttccctttgcttgctactcttgtcgagtgcatgctttgctattacctccagcaagttcaacgagtgccaactcaacgacctcaacgcgttggaacccgaccagcgcgttgagtccgaaggtggtcttattgaaacatggaactctcaacaccctgagctgcaatgcgccggtgtcactgtcttcaaacgcaccctcaaccgcaacg

SEQ ID NO: 105254 - DNA, 269 bp, Glycine max
gggttttgctatggagaagctagaagcagagaacgttctggtccttccctctgagcaacccaacaacaataggccaaagccaaaaccatagcgtttcgtgaaaaaccaaatcccagactcaatccttaacaaccctcttctgagcgccgcaatctctgtgctcccttccaactagaacttcgaggtccacaagtgcgtctagcgcgtgctctccacgggagcaaaacgcgtggctctccagttcccgtgaggtctcctcatgtactctc

SEQ ID NO: 105255 - DNA, 268 bp, Glycine max
ctcagccgcaaaatcaaataaaaaatctccttctcggaaatggcgtcgtcaatccaacaacaacgctcgactgcaacaagttctggatctgaaggaggaggagatccgcaaatgatcgacgagaggaagcggaagaggatgctgtcgaaccgcgagtcggcgcggcgatcgcggatgaggaagcagaaacagctggaggatttgaccgatgaagttagcagattgcaaggcgcgaacaagaagctggcggagaacataaaggcaaagg

SEQ ID NO: 105256 - DNA, 263 bp, Glycine max
caagcttttctttttcttgttctttaattttctgattttagcaaattaaaatagtagtgttattggtaggttttggcaaagatgttttcagttccaggggtgtcgggaatcctgaacagaggaggagggcataagataaaagggacagtggtgttgatgaggaagaatgtgttggacttcaacagcgtggctgatcttactaaaggaaatgttgggggactcataggcaccggcctcaacgttgttggctcaacacttgataa

SEQ ID NO: 105257 - DNA, 120 bp, Glycine max
agaaaacaaaggctttagcttgccttttgttcactgtaaaataataatgtaagtactctctataatgagtcacgaaacttttgcgggaataaaaggagaaattccaatgagttttctgtc

SEQ ID NO: 105258 - DNA, 266 bp, Glycine max
ccctcttcttgttatcttcagccccatccttgtccctgctgcgtttgtgctgttcctggttgcttctggctttttgttctctgggggctgtggtgtggctgccattgctgctttatcttggatttacaactacgtttctgggaaccagcctgcgggttctgacacccttgactatgcaaaagggtaccttactgataaggcaagggatgtgaaggagagggcaaaggattatggaagttatgctcagggtagaattaatgaggcca

SEQ ID NO: 105259 - DNA, 264 bp, Glycine max
gtataccttaataaataatttaagatactatgatgagagcacggttcccattactgttgctgggacttgttttcctggcttcagtttctgtctcatttggcattgcttactgggaaaaagagaaccccaaacacaacaagtgtctccagagttgcaatagcgagagagactcgtacaggaaccaagcatgccacgctcgttgcaacctccttaaggtggagaaagaagaatgtgaagaaggtgaaattccacgaccacgaccac

SEQ ID NO: 105260 - DNA, 271 bp, Glycine max
ttcgaatcctactatgttgatgctcagcctcagcagaaggaggaggggagtaagggaagaaagggtccttttccttcaatcttaggtgctctctactgaataactacgtaaatgtatgctgtaagagctcatcgtgagcgtggaatgtatctgcccatgtaactataaaaacttgagctccacctatcttctatctactacgaataaataaatccagcatatgatgcttgtgttttgtaaaaaaaaaaaaaaaaaacaaaaacaaaataaa

SEQ ID NO: 105261 - DNA, 270 bp, Glycine max
actgaaagcactcagtagggtttgcggtttcagagtttgtgacgcacgcatccatggccaccaccaccaacgccgccgcagccccgccgcgccagctctcccagaaggaagccgacatccagatgatgttagccgccgacgtccacctcggcaccaaaaactgcgacttccaaatggaacgttacatcttcaagcgccgcaacgacgggatttacattattaaccttgggaagacatgggagaagcttcagttagcagctagggttattg

SEQ ID NO: 105262 - DNA, 274 bp, Glycine max
agacagtcttccatagccccccatctatgtagagcaccatcttctttgctctctttctcttgtgtgccttcaccacctcatacctaccttcagccatcgctgatttcgtgctcgataatgaaggtaaccctcttgaaaatggtggcacatattatatcttgtcagacataacagcatttggtggaataacagcagccccaacgggacatgaaagatgccctctcactgtggtgcaatctcgcaatgagctcgacaaagggattggaacaatcat

SEQ ID NO: 105263 - DNA, 271 bp, Glycine max
actcgagccgaatcggctcgagcacaggcagtattgtccaagttgacccagaatctgttgcacaattgaatgtggtggtacatgaaggtgactttaatgaggaagtagacgatgattggacaagagagcactttgaaagccacgaagtaaaggaacgtgaggggaaaaggccacttctaactggagatttgcaggttagcctaaaggaaggagtaggaacctttggtgatcttactttcacggacaattctagctggataagaagcagaaa

SEQ ID NO: 105264 - DNA, 269 bp, Glycine max
caattccttcacttgcagcactgttgcatcatcatcttcattgcaaaaccctaaacttcaccttcaaccatgaccacacaagtaccaccacacagtgtccaagtccacacaacaacacaccgctacgaagctggcgtcgtcccccccggagcccgtttcgaaccgccgcgttatgaagccggcgtcaaagcgccctccatttaccattccgagagaggtccaacgacttcccaggtcctcgccgtcctcgacggcctcccggtcggtgg

SEQ ID NO: 105265 - DNA, 267 bp, Glycine max
cttcaattcaaaggccatagtggtactagtgattaatgaaggagacagcaaacattgaacttgttggcattaaagaacaacaacagaggcagcaacaggaagagcaacctttggaagtgcggaaatatagagctgaattgtctgaacaagatatatttgtaatcccagcaggttatccagttgtggtcaacgctacctcagatctgaatttctttgcttttggtatcaatgccgagaacaaccagaggaacttccttgcaggttcga

SEQ ID NO: 105266 - DNA, 255 bp, Glycine max
aaacaattcaattcaatctgcctcgatcatggagaggaaaacatttgggtttttgttcttgctcctccttgtcttagcttctgatgtgacggtgaagagagcagatgcgaaagattgcttgacaaggaggcacgggttccatggtagatgcttattcgacaggcaatgtgcacatgtgtgcaggagcgatggtttcatctgtggtcagtgccgaggccctcttcgcaaatgcttttgcagcaggccatgttgatc

SEQ ID NO: 105267 - DNA, 260 bp, Glycine max
cttccatagccccccaaaaatgaagagcaccatcttctttgctctctttctcttttgtgccttcaccacctcatacctaccttcagccatcgctgatttcgtgctcgataatgaaggtaaccctcttgaaaatggtggcacatattatatcttgtcagacataacagcatttggtggaataagagcagccccaacgggaaatgaaagatgccctctcactgtggtgcaatctcgcaatgagctcgacaaagggattggaa

SEQ ID NO: 105268 - DNA, 265 bp, Glycine max
actcgagccgattcggctcgaggtgaagagcgaagagaatggctcacaagggtttaatctttactggctgtgttatgcttctcagcactgtcactgagtcgttgtcttgcggaggataatggacttgttatgaacttctacaaggaatcatgccctcaggctgaagacatcatcaaagaacaagtcaagcttctctacaagcgccacaagaacactgctttctcctggctcagaaacatcttccatgactgtgctgttcagagtt

SEQ ID NO: 105269 - DNA, 262 bp, Glycine max
tgatacaccgcgatcacaggttgctgaaccttaaaaccggaaacattagcaatcgttacttgatttcaagaatctctcaatttcttcctacttctttgtgtacgatttcttaagggatagaaaatcactctctgtgctggtcacagacttcgtgaatcacttactgttccactcttagtatatgatatgaacactctcctatatgatataggacttcgtgtcagatttaaacttcttctgtctcttgctcagttctctgtac

SEQ ID NO: 105270 - DNA, 265 bp, Glycine max
tgttaacgagcacgagtacaagccagagcttgatattatttccaatgctagctgcacaaccaactgccttgctccacttgctaaggttattaatgacaggtttggcattgttgagggtttgatgaccactgttcattccatcactgccacccagaagactgttgatgggccatcagccaaagactggagaggtggaagagctgcttcatttaacatcattcctagcagcactggagctgccaaggctgttggaaaagtccttcct

SEQ ID NO: 105271 - DNA, 270 bp, Glycine max
caatatcctagtataccttaataaataatttaagatactatgatgagagcacggttcccattactgttgctgggacttgttttcctggcttcagtttctgtctcatttggcattgcttactgggaaaaagagaaccccaaacacaacaagtgtctccagagttgcaatagcgagagagactcgtacaggaaccaagcatgccacgctcgttgcaacctccttaaggtggagaaagaagaatgtgaagaaggtgaaattccacgaccacga

SEQ ID NO: 105272 - DNA, 269 bp, Glycine max
gagctccaagtgggccatttttggtaagcagaactagcgatgcgggatgaaccggaagctgggttacggtgcccaactgcgcgctaacctagaccccacaaagggtgttggtcgattaagacagcaggacggtggtcatggaagtcgaaatccgctaaggagtgtgtaacaactcacctgccgaatcaactagccccgaaaatggatggcgctaaagcgcgcgacctatacccggccgtcggggcaaggaccaagccccgatgagtagg

SEQ ID NO: 105273 - DNA, 268 bp, Glycine max
ctctaccaatctttaagttcaaattgaagaacaatgaaaatggtgatgaccaggatgccaattcagctatagatgaaggtggaattttggctgcagggacagaaaaggagcgaatgatttcaggagaagatgctgtttgttgcatttgcttagcaaaatatgcagatgatgacgagcttagagagttaccttgctctcacgtttttcacgtcgaatgtgttgacaaatggttaaagataaatgcaacctgccctctctgtaaaaatga

SEQ ID NO: 105274 - DNA, 265 bp, Glycine max
aagagaagagatctgaaaccctaaccctaaccctaaccagaggtaatggattcagtgcctcgaagaagcagaggaggaggcgttttggaaaacctcgacaaggtcctaatgcgtcgcaactgagtctacgtcaccttcgtcatcgcaggcgccttcctcggagaacgggctgtggattacggagctcacaagatcggggagcacaataacgttgggtccaaatggcacctagatggaaaggacaagatgcaaaagctaaaaagga

SEQ ID NO: 105275 - DNA, 262 bp, Glycine max
caccccactaacaattccttcacttgcagcactgttgcatcatcatcttcattgcaaaaccctaaacttcaccttcaaccatgaccacacaagtaccaccacacagtgtccaagtccacacaacaacacacctctacgaagctggcgtcgtcccccccggagcccgtttcgaaccgccgcgttatgaagccggcgtcaaagcgccctccatttaccattccgagagaggtccaacgacttcccaggtcctcgccgttctcgc

SEQ ID NO: 105276 - DNA, 262 bp, Glycine max
gtctgtgactcacctcttcggttccaagtcgccacccaagctttgcgtctttactctcagatgctctgctggcaatggagaaaggccttggaaaacttcaggcgctagacttatgttagaagatggatcaatctggaaagcaaagtcatttggtgcttcaggaacccaagttggagaacatgtttttaatacatcattgactgggtatcaagaaattctaacagatcctagttatgctggtcagtttgtactgatgacaaat

SEQ ID NO: 105277 - DNA, 259 bp, Glycine max
attttgatgcccaatgctgaacaaccattccgtctgaactgggcaacatttagcacaggagacaagggttcagataatgttcctgacctttctatttttgtaggagatttagctgcagatgttacagatagtttgttgcatgaaacttttgctagtgtatatccttctgttaaagtcgcaaaagttgtttttgatgccaatactggccgttcaaagggctatggtttcgtcaggtttggagatgacaatgagagaaccc

SEQ ID NO: 105278 - DNA, 261 bp, Glycine max
tcaatatcctagtacaccgtattaaagaatttaagatatactatgatgagagcgcggttcccattactgttgctgggagttgttttcctggcatcagtttctgtctcatttggcattgcgtattgggaaaagcagaaccccagtcacaacaagtgcctccgaagttgcaatagcgagaaagactcctacaggaaccaagcatgccacgctcgttgcaacctccttaaggtggaggaagaagaagaatgcgaagaaggtcaa

SEQ ID NO: 105279 - DNA, 259 bp, Glycine max
taagcttcctacagaagtaattagcacaattatgcccttaccggtggtcaaagaactctttcgtacagatggtgaacaagtcctcaagtttccaccacctcatgtcattcaagtgagtaagtctgcatggatgaccgatgaagaatttgcaagagagatggttgcgggtgtaaatccatgcgtaattcgtggtcttcaagagtttcctccaaaaagcaatctggatcctacaatctatggtgagcaaaccagtaagata

SEQ ID NO: 105280 - DNA, 260 bp, Glycine max
caaaatttttgacaaacctaagacgcgctgcttcactattctccctatggagtttaatcttgtggttcgtcagaagtttttaaattttgtgaggttcattatgaagaaaagggacaagcttagttgtcaagttggaatcaacccatactccatggaatggactggtttggccaatagattactgagtaagggcaacgatattctgtgttgcgattatgctagttttgatggtttgattaccaagcaagttatgagcaaaa

SEQ ID NO: 105281 - DNA, 257 bp, Glycine max
aatgttcttcatgaatctgtcaaggagaagaaaggcaacagtgaagaagtcatcaggatccttactacaagaagcaaaactcaacttgtggcaactttcaaccgctacagagatgaacatggaatttccatcagtaagaaattgttggatcaaacatctgatgacttccacaaggtgttgcacactgctattcgctgcatcaatgaccataagaagtactatgagaaggttttgcgcaatgcagtcaagaagtttgg

SEQ ID NO: 105282 - DNA, 253 bp, Glycine max
ctttgattggtggagatgacttcaatagtggtcagaccaaaatgaaatctgtgttggttgatttccttgtgggggctggtatcaagccaacatctatagtcagttacaaccatctgggaaacaatgatggtatgaatctttcggctccacaaactttccgttcctaggaaatctccaagatcaacgttgttgatgatatggtcaacagcaatgccatcctctatgagcctggtgaacatccagaccatgttgt

SEQ ID NO: 105283 - DNA, 253 bp, Glycine max
cactaaccagcttgatcaaacccctagggtattttaccttgctgggaacccagatatagagtacccagagaccatgcaacaacaacaacagcagagaagtcatggtggaagcaagcaggggcaacaccagcaggaggaagacgaagaaggtggcagcgtgctcagtggcttcagcacacacttcttggcacaatccttcagcaccaatcgagggcatagctgataaacttcagtctccagacgacgaaaggaa

SEQ ID NO: 105284 - DNA, 247 bp, Glycine max
gttcaatatcctagtataccttaataaataatttaagatactatgatgagagcacggttcccattactgttgctgggacttgttttcctggcttcagtttctgtctcatttggcattgcttactgggaaaaagagaaccccaaacacaacaagtgtctccagagttgcaatagcgagagagactcgtacaggaaccaagcatgccacgctcgttgcaacctccttaaggtggagaaagaagaatgtg

SEQ ID NO: 105285 - DNA, 245 bp, Glycine max
gttacagtccaaattgtcacttctgagaaaagctattggcatgtgtacgatcctgataaatttcaaatgtttgataacagtgaaatcgggatgtatacgaatccagctttggaggtcatcccacattctgcttgggaccttttctgctgggacagtgagaaaaccttgccaaataagtattctggtgaattgctttcctgtaaattggacactgatacgggacaatattatccagaatgggctcc

SEQ ID NO: 105286 - DNA, 244 bp, Glycine max
atctggttaccctaccattcaatggtttcctaagggatctctagagcctaaaaagtatgaaggtgcacttactgcagaagcccttgcggcgtttgtgaacattacaagcaggtacaaatgtgaagatagcttctgttccatccagtgtggtagttctctctccagataactttgatgaggttgtcttggatgaaacaaaagatgttctggtggaattctatgcaccatggtgcggtcattgcaa

SEQ ID NO: 105287 - DNA, 243 bp, Glycine max
aaactgaggagggaaagaaaaacattgaggcgcagctggagaaactgaagaagtatgctactgtggttcgtgttttggctcacactcagatcaggaaaatgaaagggttgaagcagaagaaagcccatatcatggaaattcaggttaatggtggtagtattgcacaaaaggtggactttgcatacagtttctttgagaaacaggttcctattgatgcagtgttccagaaggatgagatgattg

SEQ ID NO: 105288 - DNA, 242 bp, Glycine max
atcctagtacaccgtattaaagaatttaagatatactatgatgagagcgcggttcccattactgttgctgggagttgttttcctggcatcagtttctgtctcatttggcattgcgtattgggaaaagcagaaccccagtcacaacaagtgcctccgaagttgcaatagcgagaaagactcctacaggaaccaagcatgccacgctcgttgcaacctccttaaggtggaggaagaagaagaat

SEQ ID NO: 105289 - DNA, 244 bp, Glycine max
ctagtataccttaataaataatttaagatactatgatgagagcacggttcccattactgttgctgggacttgttttcctggcttcagtttctgtctcatttggcattgcttactgggaaaaagagaaccccaaacacaacaagtgtctccagagttgcaatagcgagagagactcgtacaggaaccaagcatgccacgctcgttgcaacctccttaaggtggagaaagaagaatgtgaagaagg

SEQ ID NO: 105290 - DNA, 244 bp, Glycine max
aagctctcaagagttttaagggagagcgcaatgggaatgagtatcttatcaatctcattgactcccctgggcacgttgacttctcatctgaggttactgctgcactccgtattactgatggagctctagttgtggtcgattgtgtggaaggagtttgtgtccaaactgaaactgtgctaagacaagcccttggagaaaggattaggcctgttctgactgtcaataagatggacaggtgcttcct

SEQ ID NO: 105291 - DNA, 253 bp, Glycine max
cggctcgagcggctcgagcggctcgagaacctacctctttttcttctctctcaacaacttcaccttcttccacctcgataatgtctcacttcaagggcaagtaccatgatgagcttatcgccaatgctgcgtacattggcactcctggaaagggtattcttgctgctgatgagtcaacagggacaattggcaagcgtttggccagcatcagtgtagagaacattgaatccaacaggcgagctcttagggagct

SEQ ID NO: 105292 - DNA, 251 bp, Glycine max
aatctggtctgcaaaaagacagagggttaattgtggagtattttggaaggatgtcttacgttgctcataacgttaatcagccccaagagaaagatttgttggagggaaatttgtcctttgatattaaatctcgctctagattggaaaaagtttcctctacaaaagcacaatttgttagtggaaaaaccttcaaatatgacataattggtgctggttcacattcttcagaagattttcctgaaaaggaagat

SEQ ID NO: 105293 - DNA, 248 bp, Glycine max
atgtggtcgatttgaagacttctcttcccgagtgggtgaggatagggttctctgctgccacgggactcgacatacctggggaatcgcatgacgtgctttcttggtcttttgcttccaatttgccacacgctagcagtaacattgatcctttggatcttacaagctcttgtgttgcatgaggccatctaaatgtgacagatcgaaggaagaaagtgtaataagacgactctcactactcgatcgctagt

SEQ ID NO: 105294 - DNA, 246 bp, Glycine max
caaatcagtgctcactgagttgatacaagagatagaacctctggatgttagccacatccagaaagatgttccgccaactacaacagatgccatgaaaaggactatatctggtatgctgggcttgcttccatctgatcagtttcacgttgtcattgaacgccttgtgggaacccctttccaagttactaatttcttcaatgatgactgggtatacgctgcacaatgttgaatatagactttgtcttg

SEQ ID NO: 105295 - DNA, 244 bp, Glycine max
gaaattttgataaaccgcgatcacaggttgccgcaccttaaaaccggaaacaaaagcaatcgttacttgatttcaagaatctttcaatttttcctacttctttgtgcacgatttcttaagggacagataatcactctctgtgccggtcacagacttcgtgaatcattttctttaccactcttagtttatttgctgaacactctcctattttgtccgggacttcgtgtcagatttaaacttcttc

SEQ ID NO: 105296 - DNA, 240 bp, Glycine max
agatgttaaggaatggttgtggtgttggtgggaatttgagtggaagagtaaaagtgagggctgaggatgttgttgaagctgtgactcttgctgctagtaacaaggcttttgaggttgtgtattacccaagagccagtactcctgagttttgtgttaaggcttcttctgtgggggctgctatgaggattcagtggtgttccgggatgaggttcaagatggcctttgagactgaggatgcta

SEQ ID NO: 105297 - DNA, 242 bp, Glycine max
cttcctcacgcatttcctcgtttttttcttcccttttctctttctccggcgacgatctcagattccggccactcctctcgccggcgagcccttactcttccctcctccgtcgagccctctccgattcgaatcgttcccagcctcgcaccaccatgaatcccgaatacgattatttgttcaagcttttgctgattggagatcctggtgtaggcaagtcatgtcttctcctgaggtttgctgat

SEQ ID NO: 105298 - DNA, 243 bp, Glycine max
aatccaccaatttacaagccaccttcctacaatccaccaggttacaaagcaccatcttataatccaccatcttacaagtcaccttcctataatccaccagtttataaagcaccagtttacaagtcaccttcctacaatccaccaggttacaaagcaccatcttataatccaccagtttataagccaccttcctataattcacctgattacaagccaccttcctacaatgcaccagtctacaag

SEQ ID NO: 105299 - DNA, 243 bp, Glycine max
aaaaaccaatatggtcgcattcgcgtcctccagaggttcaaccaacgctccccacaacttcagaatctccgagactaccgcattttggagttcaactccaaacccaacaccctccttctccccaaccatgctgacgctgattacctcatcgttatccttaacgggactgccattctttccttggtgaacaacgacgacagagactcctacagacttcaatctggtgatgccctgagagtcccc

SEQ ID NO: 105300 - DNA, 244 bp, Glycine max
taaaattcttccaccaagttatgggtttccttgtgttgcttcttttctccctcttaggtctctcttctagttccagcatatcaactcatcgttccatattggaccttgacctaaccaagtttaccacacagaaacaggtgtcttcactgttccaactatggaagagtgagcatggacgtgtctaccataaccacgaagaagaggcaaagagacttgagattttcaagaataacttgaactatat

SEQ ID NO: 105301 - DNA, 258 bp, Glycine max
ctagatttgttagcattgcagaagaaccagatactcccaacaatggaggttgtagagaaggagaagaagaagtacatcacctcagaggagctgaagggtcacaacaaggagggagatttatggatctcaattcaaggtaaggtgtacaatgtctcagattgggtgaaggagcaccctggtggtgatgttcctatctcaaaccttgctggccaggatgtcactgatgcattcatagcataccatcctggcacagcatgg

SEQ ID NO: 105302 - DNA, 249 bp, Glycine max
taagaaatgaagagtactatcttctttgctctctttctagtttgtgccttcaccatctcatacctgccttcagccaccgctcagttcgtgctcgacactgatgatgatcctcttcaaaacggtggcacatactatatgttgccagttatgagaggaaagggcggtggaatagaagtagattcaactggaaaagacatatgccctctcactgatgtgcaatcacccaatgagctcgataaggggattgga

SEQ ID NO: 105303 - DNA, 251 bp, Glycine max
tcagaagaggctcaaggtcgcagcagcaactacaagacagtcaccagaagattcgtcacttcaatgaaggagacgtactagtgattcctcctggtgttccttactggacctataacactggcgatgaaccagttgttgccatcagtcttcttgacacctccaacttcaacaatcagcttgatcaaaaccccagagtattttaccttgctgggaacccagatatagagcacccagagaccatgcaacaacag

SEQ ID NO: 105304 - DNA, 245 bp, Glycine max
taaaattcttccaccaagttatgggtttccttgtgttgcttcttttctccctcttaggtctctcttctagttccagcatatcaactcatcgttccatattggaccttgacctaaccaagtttaccacacagaaacaggtgtcttcactgttccaactatggaagagtgagcatggacgtgtctaccataaccacgaagaagaggcaaagattgcagagattttcaagaataacttgaactatatc

SEQ ID NO: 105305 - DNA, 241 bp, Glycine max
gtttgttgttcctcactgacctcaccatggcgaccagagccaagctttctttagctatcttccttttcttacttctagccttgatttcagacctagccttgggcaaacttaaagaaaccgaggtcgaagaagatcccgagctcgtagcatgctaacaccagtgccaacagcaacggcaatacactgagagtgacaagcgaacatgcttgcaacaatgtgacagtatgaagcaagagcgaga

SEQ ID NO: 105306 - DNA, 241 bp, Glycine max
ctcgcaagcaaaaagaaagaatcccaggcgaggagaaagatggaggggaaggagcaggatgtgtcgttgggagcgaacaagttccccgagagacagccgattgggacggcggcgcagagccaagacgacggcaaggactaccaggagccggcgccggcgccgctggttgacccgacggagtttacgtcatggtcgttttacagagcagggatagcagagtttgtggccacttttctgtttc

SEQ ID NO: 105307 - DNA, 241 bp, Glycine max
agaaattggtgtcattcgttaccatatggtacatgtggatgatgtcgctagagcacatatcttcctgcttgagcatcctaatccaaaagggaggtataactgctcaccattcattgtacccattgaagagatgggtgaaattctttcagccaaatatccagaatatcaaataccaacagtagacgagctgaagggaattaaaggtgtcaagcaaccacatttaacctccaagaaacttgag

SEQ ID NO: 105308 - DNA, 240 bp, Glycine max
attttcagaggaaaatggcgggtacggtttcgacttgtttcttcttcgtgtttcttctttctctccttcttccttttcagatctccgctgaggaatcctcggagaaggagttcgtactcacattggatcactctaactttcacgacactgtcagcaagcacgatttcatcgtcgtcgagttctacgccccatggtgtggtcactgtaagaagcttgctccggagtatgagaaagctgctt

SEQ ID NO: 105309 - DNA, 240 bp, Glycine max
caccattgaattttgattctagtaaacagagcttttgtcaattttctattgaccttctcggtggaggaattttagtggacaaaactggagattggatcacacttatacaaaattctccaattagtaacttgttgagagttgctgcttggaagaaaggctgtttaatggttaagattgtgatgtctgggaatgcagcagtcaaaaggagtgattgggcctcattggtacaagtgtttttaa

SEQ ID NO: 105310 - DNA, 243 bp, Glycine max
aattcttggaacatgcattcagcgtggacaagcagatagcgaaaaacctacaaggagagaacgaaggggaagacaagggagccattgtgacagtgaaaggaggtctgagcgtgataaaaccacccacggacgagcagcaacaaagaccccaggaagaggaagaagaagaagaggatgagaagccacagtgcaagggtaaagacaaacactgccaacgcccccgaggaagccaaagcaaaagca

SEQ ID NO: 105311 - DNA, 248 bp, Glycine max
aggaaatttttcctttgatattaaatctcgctctagattggaaaacgtttcctctacaaaagctcaatttgttagtggaaaaaccttcaaatatgatataattggtgctggttcacattcttcagaagattttcctgaaaaggaagatcaagaaaaacccaaaaagattgatgccagattgagacaaagaatagatcctcaatacaatgaggttcaggctcagatggaaacaaatttgtttaaattgt

SEQ ID NO: 105312 - DNA, 248 bp, Glycine max
ctcaagctcaacagtcctacttgcaagggttcagcaagaatattctagaggcctcatacgacaccaaattcgaggagataaacaaggttctgtttggtagagaggaggggcagcaacaaggggagtagaggctgcaagagagtgtgattgtggaaatctcaaagaaacaaattcgggaactgagcaaacatgccaaatctagttcaaggaaaaccatttcttctgaagataaacctttcaacttgaga

SEQ ID NO: 105313 - DNA, 246 bp, Glycine max
ccaactaacaataattccttcacttgcagaacttagttctctgttgcatcatcatcatcttcattagtgttagccctaaacttcaccttcaaccatgaccacagtgccaccacacagtgtccaagtgcacacaacaacacaccgctacgaagccggcgtcgtcccgccggctcgttttgaggcgccgcgttacgaagccggcatcaaggcgccctcttccatttaccattccgagagaggtccgac

SEQ ID NO: 105314 - DNA, 245 bp, Glycine max
  unsure (1)..(245): unsure at all n locations
gcataaggtgaagaaggtgcgaactagagcatttacaaggcggcgagaagcatagagcgaggagagaacagtttgtacgacgcactgagatccatctaccaagactccatcttcgtctccgagatctctcttctatggcctcagctccctctcctcgacaacctccgctgcggcctctggtactcccgccccgcagccttccagtcgacctttttttnagagtccaccgactgctagatcaacaa

SEQ ID NO: 105315 - DNA, 243 bp, Glycine max
catgagcttgccaaagagttgcaaggcaagccagatctgattgtcggaaactacagtgatggaaacattgttgcctctttgttggcacataaattaggagtcactcagtgtaccattgctcatgcacttgagaagaccaaataccccgaatccgacatttactggaaaaaattggaagagagataccacttctcttgccaattcacagctgatctatttgccatgaaccacacagatttcatt

SEQ ID NO: 105316 - DNA, 238 bp, Glycine max
ggcaaaactgttatgacagatgccgaacgatacgaatccctgcgccactgcaaatgggtggatgaagttattcctgatgccccctgggttatcaatcaagagtttcttgacaagcacaacattgactatgtggctcatgactctcttccttatgctgatgccagtggtgctgccaatgatgtttatgaatttgttacatctgttgggaggtttaaggctacaaaacggactgaaggaa

SEQ ID NO: 105317 - DNA, 241 bp, Glycine max
tgctggtagcatcacaaccgccaccagccttgacttcccagccctctggcttctcaaactcagtgcccagtatggatcactccgcaagacatgctatgttcgtgccacactacaccctgaacgcgaacagcataatatacgcattgaatgggcgggcattggtacaagtggtgaattgcaatggtgagagagtgtttgatggagagctgcaagagggaggggtgctgatcgttccacaaaa

SEQ ID NO: 105318 - DNA, 242 bp, Glycine max
aatctgcaaaaaagatgtttggagggttgagtgtggtatcccttctggatttccactcactgttatctgcaatagcattttcaatgagatgcttatcagatatagttatgaaaagttgttgcgtcaagctaaggctcctagtatgtttctccagtcttttaaaaattttatttctttgtgtgtttatggagatgataatttaattagtgttcatgagtatgttaagccatattttagtggtt

SEQ ID NO: 105319 - DNA, 246 bp, Glycine max
caaacaacaaggttctgcagaatataaggtgggaatggaacttaccaaactatttggtaacggctcgagctcttctcttctgcatcgcccacacttgcagcgcctccaaatggcagcaccagcaagatagctgccgcaagcagctccagggggtgaacctcacgccctgcgagaagcacatcatggagaagatccaaggccgcggcgatgacgatgatgatgatgacgacgacaatcacattctca

SEQ ID NO: 105320 - DNA, 251 bp, Glycine max
ctcattgagacatggaaccctaacaacaagccattccagtgtgccggtgttgccctctctcgctgcaccctcaaccgcaacgcccttcgtagaccttcctacaccaacggtccccaggaaatctacatccaacaaggtaagggtatttttggcatgatatacccgggttgtcctagcacatttgaagagcctcaacaacctcaacaaagaggacaaagcagcagaccacaagaccgtcaccagaagatcta

SEQ ID NO: 105321 - DNA, 228 bp, Glycine max
cggctcgagggaaaatccggccctttggtcaacccataaataacaacaagcatatatgaaggtgtggtgaggccatcttatatgaaataatatcaagatatatattgtgtaataataaaactatggcctatgtatttaccaccctccgacccagcctatgttaatatctgagtggcgttgtacctttgaatcgccttaataaaatgtcagtcttcaagttttgtcttt

SEQ ID NO: 105322 - DNA, 244 bp, Glycine max
gcagacttaacaacagcacaaagcgggttactgtctgttcaagctaccatctctctctctctttcttagtgcctccttgccagaagttaaaatggcccaagaaactatcctattcacatctggatcagtgaacgaggggcaccctgacaagctctgtgaccagatctccgatgctgtgctctatgcatgcttggagcaggatcctgacagcaaggttgcctgtgaaacctgcaccaagaccaac

SEQ ID NO: 105323 - DNA, 245 bp, Glycine max
ctcgagccgcaacggtccccaggaaatctacatacaacaaggtaatggtatttttggcatgatattcccgggttgtcctagcacttatcaagagccgcaagaatctcagcaacgaggacgaagccagaggccccaagaccgtcaccaaaaggtacatcgcttcagagagggtgatttgatcgcagtgcctactggtgttgcatggtggatgtacaacaatgaagacactcctgttgttgccgttt

SEQ ID NO: 105324 - DNA, 239 bp, Glycine max
aatttaatgagatgctcattagatatagctatgaaaaattactgcgccaggctaaagctccaagtatgtatatacaatccttcaaaaattttatttctttgtgtgtgtatggtgatgataacttaattggtgtacatgggtatgtcaagccttactttagtggttctatattgaaaagctttctagctggtcataatatcaccattactgatggtattgacaaaactagtgcaactttg

SEQ ID NO: 105325 - DNA, 235 bp, Glycine max
ctgctttctacaagagtcttaccaatgattgggaagagcatttggctgttaagcacttttctgttgagggtcagctggagtttaaggctgtcctctttatccccaagagggcaccttttgatctttttgacactaagaagaagcctaacaacatcaaactgtatgtccgccgtgttttcatcatggacaactgtgacgagttgatgccagaatatcttagctttgttaagggtat

SEQ ID NO: 105326 - DNA, 238 bp, Glycine max
gtgattttgtcattggtgttaagttgacaaccataaacaatatgtgtgcatatgggctcaatcctggtatttcaggttctcgtcttttgggcaccattcctcagtccatttcacagcaaactgtttggaatcaaatggcaacagtgagaacaccattgaattttgattctagcaagcagagcttttgtcaattttctattgaccttctcggtggaggaattttagtggacaaaactgg

SEQ ID NO: 105327 - DNA, 235 bp, Glycine max
cgccgtgagcagctacattaaggatgtgtttagtgcgttgtggtgtgtcttgaacactacgtattccaatccttgttctcccccttgctcagccaccacaacgccgtgagcagctacattaaggatgtgtttagggcaatcccttcggaggttctttccaattcttacaaccttggccagagtcaagtgcgtcagtcaagtatcaaggaaactccggctctttggtcaacccata

SEQ ID NO: 105328 - DNA, 222 bp, Glycine max
gtgccttgtaaaatggtgtgtcatcaaatcggtagtactcacccaatattggcttcattgcattgggccatagtgggagttatggaagttttgtcacttatcacttaattagtagaatgttataaataagtggatttgccgcgtaatgacttgtgtgcattgtgaaacagcttgtagcgatccatggctataatgtaaaaatatgtggaaagtgttctgctt

SEQ ID NO: 105329 - DNA, 254 bp, Glycine max
cttcactcaaaactcttctctttcacctccataattcccacacaatatggctgaacttcactaccaaccacaacaccaataccccctccgctaccctaacgatccacaccaacaaacccgttcctccacccaccaggtcgtcaaggccgccaccgccgtcacagcgggcggctccctcttgatcctcgcctcgttgatcctcgccgccaccgtcattgccctcaccatcgtcaccccgctgttcgtcattttca

SEQ ID NO: 105330 - DNA, 246 bp, Glycine max
tgttctttaatgccaacaacagaggcagctacaggaagagcaacctttggaagtgcggaaatatagagctgaattgtctgaacaagatatatttgtaatcccagcaggttatccagttgtggtcaacgctacctcagatctgaatttctttgcttctggtatcaatgccgagaacaaccagaggaacttccttgcaggttcgaaagacaatgtgataagccagatacctagtcaagtgcaggagct

SEQ ID NO: 105331 - DNA, 224 bp, Glycine max
gttctatatgctagtattgcttaatgattagtttaagatactatgatgcgagtacgggtcccattactgttgctgggacttgttttcctgtcttcagtttctgtctcatctggcattgcttattgagataaagagaactccagacacaataagttcctccacagatgttatagcgatatggactcgtacaggatctaatcatgcgacgctcgttgctacctcct

SEQ ID NO: 105332 - DNA, 239 bp, Glycine max
cttggcggaaatgcaaaattagcattggtttgtgctatttccccagcactaagttgtaagagtgaaactcttagtacattgagatttgcacaacgtgtaaaggctatcaagaataaagcagttgtcaatgaagtaatgcacgatgatgtgaatcaattacgagacgtgatatgccaactcagggatgaactgcatcgaattaaacgaaagggttacagtccaagtgatggaagtcgggg

SEQ ID NO: 105333 - DNA, 236 bp, Glycine max
ggagtgagagagagtgttcttcgtttgctaccttctcccagaaatggttacgttcaggtttcaccagtaccaggtggtcgggagggctctcccaacggaagcagatcagcatccgaagatctaccgaatgaagctctgggccaccaacgaggttcgcgccaagtctaagttctggtattttatgaggaagctgaagaaggtgaagaagagcaatggtcaagttcttgctatcaacg

SEQ ID NO: 105334 - DNA, 234 bp, Glycine max
gttcaatatcctagtataccttaataaataatttaagatactatgatgagagcacggttcccattactgttgctgggacttgttttcctggcttcagtttctgtctcatttggcattgcttactgggaaaaagagaaccccaaacacaacaagtgtctccagagttgcaatagcgagagagactcgtacaggaaagaagcatgccacgctcgttgcaacctccttaaggtggag

SEQ ID NO: 105335 - DNA, 235 bp, Glycine max
agtaaagtaaagcaaaggaatggcgaacatagacatcgaagggatcttgaagcagcagcctgatgatgggcgcgttccgaagacgaaaatagtgtgtactttgggccccgcttctcgatccgtggaaatgactgagaagcttcttagggctgggatgaacgttgctcgtttcaatttctctcatggcacccacgactatcatcaggaaaccctcaacaatctcaagactgctatg

SEQ ID NO: 105336 - DNA, 238 bp, Glycine max
ttcgaatcctactttgttgatgctcagcctcagcagaaggaggaggggagtaagggaagaaagggtccttttccttcaatcttaggtgctctctactgaataactacgtaaatgtatgctgtaagagctcatcgtgagcgtggaatgtatctgcccatgtaactataaaaacttgagctccacctatcttctatctactacgaataaataaatccagcatatgatgcttgtgttttgt

SEQ ID NO: 105337 - DNA, 242 bp, Glycine max
cgagcagagagaggaacaggaatggcctcgcaaggaggaaaaacgcggagaaaagggaagtgaagaggaagatgaggatgaggatgaggaacaagatgaacgtcaattcccattcccacgcccacctcatcaggaggaagagcgaacaagaggaagatgaggatgaggagcagcagcgagagagcgaagaaagtgaagattctgagttacgaagacataagaataagaacccttttctcttc

SEQ ID NO: 105338 - DNA, 245 bp, Glycine max
actcgagccgctcgagccgctcgagccgctaaaatctcttctgctacatatgattatcaggaacagatatcagctattctatgtatccatacttacatctcccactactgggggggtaactgctagttttggcatgttgggggatatcattattgccgaaccaaatgcttatattgcatctgctggtaaaagagtaattgaacaaacattgaataaggcagtacctgaaggttcacaagcagctg

SEQ ID NO: 105339 - DNA, 237 bp, Glycine max
accttaataattaatttaagatactatgatgagagcacggttcccatcactggtgctgcggcttgttttcctggcttcagttactgtctcatttggcattgcttactgggaaaaagagaaccccaaacacaacaagtgtctccagagttgcaatagtcgaagagactcgtacaagaaccaagcatgccacgctggttgcaactccttaaggtggaggaagaagaatgtgaagaaggt

SEQ ID NO: 105340 - DNA, 283 bp, Glycine max
acttgttatctatacagatgttgcattagatccttattcatcagatgggcatgatggcatagttagagaagatggagttattatgaatgatgagacagttcatcagctatgtaaacaagctgtagcccaggcccaagctggagcagatgttgtccagtctagtgatatgatggatggtcgggtaggagcactgcgtgcagctctggatgctgaaggcgttcagcatgtatctataatgtcctatacagcaaagtatgcaagttctttttatggtccatttaga

SEQ ID NO: 105341 - DNA, 266 bp, Glycine max
aaaatggtggccacagttggtattcctgagaatacaggtatagcattggcctgtgctatgaatagttcttttagggggcgtgccagttctgatatttacaccatctgctctcaagactgtgaattatggaatcctgcttgcacaaaagcaatgactatgtcatttaatccaaacccgtgttctgatgcatggagtttggaatttctgaagcgtaccggatttcattgtgatatcatttgtgtcactggatggactgccaccccaat

SEQ ID NO: 105342 - DNA, 266 bp, Glycine max
gttcaatatcctagtataccttaataaataatttaagatactatgatgagagcacggttcccattactgttgctgggacttgttttcctggcttcagtttctgtctcatttggcattgcttactgggaaaaagagaaccccaaacacaacaagtgtctccagagttgcaatagcgagagagactcgtacaggaaccaagcatgccacgctcgttgcaacctccttaaggtggagaaagagaatgtgaagaaggtgaaattccacga

SEQ ID NO: 105343 - DNA, 251 bp, Glycine max
tgttcgcacgccttgttcggtgaagtgagtagtgagtgctgaatcgaatcgaatcgattctccgaacatggcggcgagcgatcgcacagtgttgcaattctcttcatcatcttcttcttcttcgcagatcttgtccgcgaaggtccaccctctggtcatcttcaacatcgggcgatgctatgttcgacgccctgacaaaccgagcgcgtcatcggaaccctactcggctccggtcttcccgagggaacgtc

SEQ ID NO: 105344 - DNA, 202 bp, Glycine max
ctttgaacactcatcaccatggccaagcttgttctttccatttgtttccttcttttcagtggctgattcgctctgagagagcaggcacagcaaaatgagtgccagatccaaaagctgaatgccctcaaaccggataaccgtatagagtcggaaggtgggttcattgagacctggtaccctaacaacaagccattccagtgtg

SEQ ID NO: 105345 - DNA, 221 bp, Glycine max
ccaaacccgtgttctgatgcatggagtttggaatttctgaagcgtaccggatttcattgtgatatcatttgtgtcactggatggactgccaccccaatgcaggatgttcaggttacaattgattggtttatttcctctcaggaatgtgttcccaggacctattgtgttttaaatccacaaaatccttttgtgttaaataggtggataggaaactgactttc

SEQ ID NO: 105346 - DNA, 212 bp, Glycine max
cttctttattccttttgtaatttcattcattcttaatctatgtgaaaaataatgttcatcgagaattttaaggttgagtgtcctaatgtgaagtacaccgagactgagattcagtccgtgtacaactacgaaaccaccgaacttgttcacgagaacaggaatggcacctatcagtgggatttcaaacccaaatctgtcaaatacgaatttaa

SEQ ID NO: 105347 - DNA, 269 bp, Glycine max
atttgatcgcagtgcctactggtgttgcatggtggatgtacaacaatgaagacactcctgttgttgccgtttctattattgacaccaacagcttggagaaccagctcgaccagatgcctaggagattctatcttgctgggaatcaagagcaagagtttctacaatatcagcagcagcagcaaggaggtacccaagccagacaggacagcaacaagacgaagtaaacgaagtaagcaacatattgagtggcttcgcccctgaattcttga

SEQ ID NO: 105348 - DNA, 271 bp, Glycine max
cttcgggaatttattctggagaaggtgaatattttggtggacatgaaggcgaaagtctctttagctggtatagagaaatggatggaggaagcattgaactgattaatcggccaaattctaaaatctatgaagttactgattcggattacaattatcgtttgttgtttggatatacacctattcgttcagattcagttgcgggggaacttgtcttatcggatccaactaacactgttctcccagagcttccatatgtggagatgcttgctct

SEQ ID NO: 105349 - DNA, 277 bp, Glycine max
gctgaagcaaagcaatggctacttcaaagttgaaaacccagaatgtggttgtatctctctccctaaccttaaccttggtactggtgctactgaccagcaaggcaaactcagcggaaactgtttctttcagctggaacaagttcgtgccgaagcaaccaaacatgatcctccaaggagacgctattgtgacctcctcgggaaagttacaactcaataaggttgacgaaaacggcaccccaaaaccctcgtctcttggtcgcgccctctactccacccc

SEQ ID NO: 105350 - DNA, 174 bp, Glycine max
ttcaaaccttgctctatactacacagtacacacactagaagaataatggcttccatcctccactactttttagccctctctctttcttgctcttgtctgggcttcttatccgactcagtcacccctacaagaccaataaaccttgttgatctacccgttcacaatgatggctcc

SEQ ID NO: 105351 - DNA, 253 bp, Glycine max
gattagtccactacccgtgcttaaggaaatcttccgaactgatggtgaacaggcccttaagtttcctcctcctaaagtaattcaagcagtgagtaagtctgcatggatgactgatgaagaatttgcaagagaaatgcttgctggtgtaaatccaaacttgattcgttgtcttaaggatttccctccacgaagcaagctagatagccaagtctatggtgatcatactagtcaaataaccaaagaacacctagag

SEQ ID NO: 105352 - DNA, 96 bp, Glycine max
cttaattattaacacttccttagttcaatatggggaagcccgtcactctctctctttcttccctttgcttgctactcttgtcgagtgcatgcgttg

SEQ ID NO: 105353 - DNA, 246 bp, Glycine max
ctactagatcatcatgacccaatcatgccatatttgaggcgactaaatgcaacctccacaaaggcttatgctaccagaaccatccttttcctgaaaaatgacggaactttaaggccacttgccatagagttgagtttgccacatcctcagggagatcaatctggtgcttttagtcaagtttttctgcctgcagatgaaggtgttgaaagttctatttggctgctagcaaaggcttatgtagttgtg

SEQ ID NO: 105354 - DNA, 247 bp, Glycine max
gtccaattttgtctgggcttagagtactataccctgtaaaacggacatactggtttgatatttataagaatatcgacaaagttggtgcggtcaaatgtcctgttttggttatacatgggactgcagatgaagttgtggatgtgtcccatgggaagcagctctgggagttttgcaaggtaaatacgaacccttgtgggtaagtggtggtggacattgtaatcttgaactttacccagaattcattaaa

SEQ ID NO: 105355 - DNA, 270 bp, Glycine max
cgcaccacccaccacgtatccctgaaaagagagacaaacacactaagccgaagccaaagcagcaatggttacagacacaaagcctttagcctatgctgctaataatggataccagaaggaagcttttgatcccagtgctcctccaccgtttacgattgcagaaatcagagttgcaataccacaacattgctgggtcaagaatccatggagatccctcagttatgttctcagggatgtgcttgtaattgctgcattgatggctgctgcagt

SEQ ID NO: 105356 - DNA, 100 bp, Glycine max
ggagattctatcttgctgggaaccaagagcaagagtttctaagatatcagcaagagcacggaggtcatccaagccagaaaggtaagcatcagcaagaaga

SEQ ID NO: 105357 - DNA, 241 bp, Glycine max
ctcgagcgctcgtaaatgtgttacgagaattgtatttgcacagtccagaggaagctcgccaattgagaaggaaagctctctctcgtattgaatggctgcaaaaagctgatgtgcctaccatagcacagattgaagagttccattcgatgcagaggatgatgaatgctcctgattcacatgatcatattgatctactgttgagcatgatttgttgggtttacaaggagaggtaaagcttttc

SEQ ID NO: 105358 - DNA, 99 bp, Glycine max
ggaaaaggttcacatcaacattgtcgtcattggacatgtcgactctgggtagtcaactaccactggtcacttgatctacaagcttggaggtattgacaa

SEQ ID NO: 105359 - DNA, 213 bp, Glycine max
gccatggctacttcaaagttgaaaacccagaatgtggttgtatctctctccctaaccttaaccttggtactggtgctactgaccagcaaggcaaactcagcggaaactgtttctttcagctggaacaagttcgtgccgaagcaaccagacatgatcctcctaggagacgctattgtgacctcctcgggacagttacaactcaataaggttgac

SEQ ID NO: 105360 - DNA, 276 bp, Glycine max
gaatggatgacatgccgttgccggcgctctttgagcaagcccgcaagatccacgccgcagctaccgattccggcgccgaccaggaggttgtgaagaaggggtgcgaggctctgcatagatgcgaggacatggtcaataatctaggtttgttctctcccaacgagaccaaagaagttatcagcaccacgaatctcaaatacattctggttcgtatgtttgagtttagttacttttacttttaattaacgccattattttatataatcaaggaaaatg

SEQ ID NO: 105361 - DNA, 97 bp, Glycine max
ctagtataccttaataaataatttaagatactatgatgggagcacggttcccattactgttgctgggacttgttttcctggcttcagtttctgtctc

SEQ ID NO: 105362 - DNA, 251 bp, Glycine max
tcctgagaatacaggtatagcattagcctgtgctatgaatagttcttttacggggcgtgccagttctgatatttacaccatctgctctcaagactgtggattatggaatcctgcttgcacataagcaatgactatgtcacttaatccatacccgtgatctgatagctggagtttggcatttctgaagcgtaccggatttcatcatgacaacactggtgtcgctggatggactgccactccaatgcatgatg

SEQ ID NO: 105363 - DNA, 269 bp, Glycine max
ctcgagcgaatcggctcgagattttaccaacgagctagttccgacacagacaaagcactggcaaagactgagttagaggtgactgttgagagcaagaacaaagaactatagcacctgggatttgtgaggattgctgctattcaaacttttgtgattgtgtcaaatctgtatgagtacgcaaagcagaattctgggcctttgagatccgctgttggaacggttgagaacactgtaaccaccgttcttggtcctgtctgcaacaaaatcaa

SEQ ID NO: 105364 - DNA, 269 bp, Glycine max
ggcttaggtgctgacgattggttcctgtgttgcctacctaccaaacggtattcgtgtggctagtcagacccattccatccaggcctctttgttggggacgctggaggatttcaaagtcccacacgtgaaccacgttagtcgtccatcataacggcttcctgtggcacacgtgtggtgattgttctctcggatgcggtgcatgcagtgaacgtgggtggtctagtgcccccacattgttccttaaaatcggttgtctcggatgacgcttg

SEQ ID NO: 105365 - DNA, 221 bp, Glycine max
aaataatacgactatttttgttggcaatttggatcctaatgtaaccgatgatcatctgaggcaagttttcagccagtatggagaattagttcatgtgaagattccagcaggcaagcgatgtgggtttgtccaatttgcagacaggagctgtgctgaagagggccttcgggtgttgaatgggacgctgttgggtggacaaaatgtgcgtctttcatggggtc

SEQ ID NO: 105366 - DNA, 268 bp, Glycine max
tctcgagcgaatcggctcgacaatccttcaaaaattttgttactttgtgtgtgtatggtgatgacaacttaattagagtacatgaatatgtcaagccttactttagtggttctaaattgaaaagctttctagctggtcataatatcaccattactgatggtattgacaaaactagcgcaactttgcaatttagaaagttagcagattgtgactttctcaaaagaaactttaagcagatgtctaatgtcttgtgggtggctctgaggac

SEQ ID NO: 105367 - DNA, 274 bp, Glycine max
aaatgaccaagttcacaatcctcctcatctctcttctcttctgcatcgcccacacttgcagcgcctccaaatggcagcaccagcaagatagctgccgcaagcagctccagggggtgaacctcacgccctgcgagaagcacatcatggagaagatccaaggccgcggcgatgacgatgatgatgatgacgacgacaatcacattctcaggaccatgcggggaagaatcaactacataaggaggaacgaagggaaagacgaagacgaagaagaaga

SEQ ID NO: 105368 - DNA, 271 bp, Glycine max
tggcactactgttatgacagaggccgaacgatacgaatccctgcgccattgcaaatgggaggatgaagttattcctgatgaccgctgaggtatcaatcaagagtttcttgactagcacaacattgactatgtggctcatgactctcttccttatgctgatgccagtggtgctgctaatgatgtttatgaatttgttagatctgttgcgaggtttaaggtaacataacggactgaaggcatatccacgtcagatgttatgatgaggattgtc

SEQ ID NO: 105369 - DNA, 271 bp, Glycine max
  unsure (1)..(271): unsure at all n locations
ggaaactcccaangaatggcaactggatctaccttgtgacaaaattcctagtgtcttgattacaactgatgagagattggtaggcacagaacatgaggggtatgatccttttcttggtggaattcaaaaatatgccactcccatgatgccccaagctgaagaaattctttctaaggttgcacaagatatggttgaggaatggtttgattgtgttgatgaggaagattcctttgaggaagtttctttaagtgcagcactcaatggtgttgag

SEQ ID NO: 105370 - DNA, 260 bp, Glycine max
taattgtggagtattttggaaggatgtcttacgttgctcataacgttaatcagccccaagagatagatttgttagagggaaatttttcctttgatattaaatctcgctctagattggaaaaagtttcctctacaaaagcacaatttgttagtggacaaaccttcacatatgatataattggtgctggttcacattcttcaggagattttcctgataaggaagatcaggataaacccaaaaagattgataccagattgaga

SEQ ID NO: 105371 - DNA, 95 bp, Glycine max
cagatctgattgttggaaactacagtgatggaaacattgtcgcttctttgttggcacataaattaggtgtcactcagtgtaccattgcacacgca

SEQ ID NO: 105372 - DNA, 269 bp, Glycine max
cacctttgttcactcttcttctcttgcggctagggttttagcgcagttcttctagatttaaggaagatgggtaaggaaaaggttcacatcagtattgtggtcattggccatgtcgactctgggagatccactaccactggtcacctgatttacaagcttggaggcattgacaagcgtgttattgagaggtttgagaaggaagctgctgagatgaacaagaggtctttcaagtatgcctgggtgctggacaaacttaaggctgagcgtga

SEQ ID NO: 105373 - DNA, 268 bp, Glycine max
aatcactctagctgttgcaaatttctactatttttcaatggcttctgcagatgttgagttccgttgctttgttggtgggcttgcttgggtcaccggcaacgatgccctcgagaaagccttttcaatctacggcgacatcgttgaatcgaaggttatcaacgaccgtgagacttgaacgtccagaggattcggatttgtgaccttcgcctcagagcagtcaatgaaagatgcgatcgcaggaatgaacggccaggacttgacggtcgta

SEQ ID NO: 105374 - DNA, 254 bp, Glycine max
cctggatatatgtatacagatcttgcaacaatttatgaacgagctgggagaattgaggggcgtaaaggctctattacacaaattccaattctaaccatgcccaatgatgatattacgcacccaactcctgatctaacaggatatatcactgaggggcagatatacatcgacaggcagctgtataatagacagatatagccaccaatcaatgtcctcccgtcaatatctcggttgatgaagagtgctattggtga

SEQ ID NO: 105375 - DNA, 241 bp, Glycine max
tgaacaaattccctctcaccctcctcgccgaccaagccatggaaagcgtgaacaagacgaggacgaggacgaagatgaagataaacctcgtcctagtcgaccaagccaaggaaagcgtgaacaagaccaggaccaggacgaggacgaagatgaagatgaagatcaacctcgcaagagccgcgaatggagatcgaaaaagacacaacccagaagacctagacaaggagaaccacgtgaaaga

SEQ ID NO: 105376 - DNA, 265 bp, Glycine max
gtcagatgttgcctggaacatgcagcctctgtagccaaaaccttcttaatgtcagattgtgtggttgtcgagataaaggaacctgagcctgtacctgctggaaaccccatggacaattcaggatatggtatctagagacacggctgcttcagtgagaagagtattttttttctcctcggatgaaatgcaaaatttggtatagccatatagcaagagtcgaaatgtattgaagtgtggtgaactagatagtgatgcatcctctcct

SEQ ID NO: 105377 - DNA, 273 bp, Glycine max
catgagcttgccaaagagttgcaaggcaagccagatctgattgtcggaaactacagtgatggaaacattgttgcctctttgttggctcataaattaggagtcactcagtgtaccattgctcatgcacttgagaagaccaaataccccgaatccgacatttactggaaaaaattggaagagagataccacttctcttgccaattcacagctgatctatttgccatgaaccacacagatttcattatcaccagtaccttccaggagattgctgga

SEQ ID NO: 105378 - DNA, 94 bp, Glycine max
attgaattagtttctgaaccgtggccaagtatctcagaaaatgctaaagaattggtaaaacagatgttggatagggacaaagagaaaagaattt

SEQ ID NO: 105379 - DNA, 269 bp, Glycine max
attttgttggagatctcgtctttgaagtttctaagatgacttctccctacattaaatgtacaatctctttcttcatagcatttggaaatttggctgatgacaccatcaattttgaggcttttccccacaagctggtgcagtttggagagattcaggaaaaagttgtattgaaattttcacaagaggaatttcttacagcttggtcaactcaggtgcgtcctgcaacaactctgttggctgatgggtgtccatatttgtatgctatggtg

SEQ ID NO: 105380 - DNA, 266 bp, Glycine max
ggcttaagtgctgacgattggttcctgtgttgcctacctagcaaacggtattcgtgtggctagtcagacccattccatccaggcctctttgttggggacgctggaggatttcaaagtcccacacgtgaaccacgttagtcgtccatcataacggcttcctgtggcacacgtgtggtgattgttctctcggatgcggtgcatgcagtgaacgtgggtggtctagtgcccccacattgttccttaaaatcggttgtctcggatgacgc

SEQ ID NO: 105381 - DNA, 94 bp, Glycine max
gattagtccactacccgtgcttaaggaaatcttccgaactgatggtgaacaggcccttaagtttcctgcctcctaaagtaattcaagcagtgag

SEQ ID NO: 105382 - DNA, 267 bp, Glycine max
gttattatcaaataattaattaaattcctcgtggaatcttgttgaagccatgtctacagctggtcaggtcatcaagtgcagagctgcggtggcatgggaagcagggaagccactatcgatagaaaccatagaagtggcaccaccccagaaaggtgaagtgcgtttgaagatcctcttcaactccctttgccgtacagatgtttactggtgggatgctaagggccagactccgctgtttcctcgtatcttaggccacgaagcttcggg

SEQ ID NO: 105383 - DNA, 264 bp, Glycine max
  unsure (1)..(264): unsure at all n locations
ctcgagccgctgtggcagaggtcacaggaagcaacgttgtgtaggttgcggaggacgaactcatgagaatcctcattctaatgaggaatttcatgccagggtaccatcaggctgttaatggggaatggaatgttgctggcattgcacatagagcttatgatcttgaaggaaagacagtaggaaccgttggcgctggtcgaatagggaagcttttgctccagaggttgaaaccttttagctgtaatcttctntattttgatcgac

SEQ ID NO: 105384 - DNA, 103 bp, Glycine max
attggtccttaaacactcatcagtcatcaccatggccaagctagttttttccctttgttttctgcttttcagtggctgctgcttcgctttcagttccagagag

SEQ ID NO: 105385 - DNA, 96 bp, Glycine max
cggctcgacgggaaacttggaaacgctacctttttggcaggtctcattacttcattgccaactttgggagcaggccaatctgcattcacaattaat

SEQ ID NO: 105386 - DNA, 101 bp, Glycine max
gtgaaaggacgcacctgctgttggcttgttgttcaaggatggcaatttgtaagagagatgtctggagagttgaatgtggaatcccttctggatttccgctc

SEQ ID NO: 105387 - DNA, 101 bp, Glycine max
gcgagagagcgaagaaagtgaagattctgagttacgaagacataagaataagaacccttttctcttcggctctaacaggttcgaaactctcttcaaaaacc

SEQ ID NO: 105388 - DNA, 101 bp, Glycine max
tctccattggtccttaaacactcatcagtcatcaccatggccaagctagttttttcgctttgttttctgcttttcagtggctgctgcttcgctttcagttc

SEQ ID NO: 105389 - DNA, 101 bp, Glycine max
cttaattattaacacttccttagttcaatatggggaagcccttcactctctctctttcttccctttgcttgctactcttgtcgagtgcatgctttgctatt

SEQ ID NO: 105390 - DNA, 98 bp, Glycine max
cttattaacactttccttagttcaatatggggaagcccttcttcactctctctctttcttccctttgcttgctactcttgtcgagtgcatgctttgct

SEQ ID NO: 105391 - DNA, 99 bp, Glycine max
aacccagatatagagtacccagagaccatgcaacaacaacaacagcagaaaagtcatggtggacgcaagcaggggcaacaccagcaggaggaagaggaa

SEQ ID NO: 105392 - DNA, 97 bp, Glycine max
gtcttacgttgctcataacgtaaatcagccccaagagaaagatttgttggagggaaatttttcctttgatattaaatctcgttctagattggaaaaa

SEQ ID NO: 105393 - DNA, 98 bp, Glycine max
caacaaggtaagggtatttttggcatgatatacccgggttgtcctagcacatttgaagagcctcaacaacctcaacaaagaggacaaagcagcagacc

SEQ ID NO: 105394 - DNA, 97 bp, Glycine max
agcagaccacaagaccgtcaccaggagatctataacttcagagagggtgatttgatcgcagtgcctactggtgttgcatggtggatgtacgacaatg

SEQ ID NO: 105395 - DNA, 96 bp, Glycine max
caggaatgtgttcccaggacctattgtgttttaaatccacaaaatccttttgtgttaaataggtggatggggaaactgacttttccccagggcact

SEQ ID NO: 105396 - DNA, 97 bp, Glycine max
caattccttcacttgcagcactgttgcatcatcatcttcattgcaaaaccctaaacttcaccttcaaccatgaccacacaagtaccaccacacagtg

SEQ ID NO: 105397 - DNA, 97 bp, Glycine max
ctcgagccggtcttccatagccccccaaaaatgaagagcaccatcttctttgctctctttctcttttgtgccttcaccacctcatacctaccttcag

SEQ ID NO: 105398 - DNA, 96 bp, Glycine max
atctgaatgcaaacagtgtgatctatgtgactcgaggacaaggaaaggttagagttgtgaactgccaagggaatgcagtgttcgacggtgagctta

SEQ ID NO: 105399 - DNA, 96 bp, Glycine max
cggctcgagcggctcgagctctccattgtctttgaacactcatcaccatggccaagcttgttctttccctttgtttccttcttttcagtggctgct

SEQ ID NO: 105400 - DNA, 92 bp, Glycine max
caagaaacggggttgaggaaaatatctgcaccttgaagcttcacgagaacatcgctcgcccttcacgcgctgacttctacaaccctaaagct

SEQ ID NO: 105401 - DNA, 95 bp, Glycine max
tgagaaacttcagtctccagacgacgaaaggaagcagatcgtgacagtggaaggaggtctcagcgttatcagccccaagtggcaagaacaacaag

SEQ ID NO: 105402 - DNA, 93 bp, Glycine max
cttaattattaacacttccttagttcaatatggggaagcccttcactctctctctttcttccctttgcttgctactcttgtcgagtgcatgct

SEQ ID NO: 105403 - DNA, 95 bp, Glycine max
atactatgatgagagtgcggtttcctttgttggtgttgctgggaactgttttcctggcatcagtttgtgtctcattaaaggtgagagaggatgag

SEQ ID NO: 105404 - DNA, 96 bp, Glycine max
gttttcctggcttcagtttctgtctcatttggcattgcttactgggaaaaagagaaccccaaacacaacaagtgtctccagagttgcaatagcgag

SEQ ID NO: 105405 - DNA, 97 bp, Glycine max
gaacacttttgtaccagggctgattgatcttgccatcgcgaggaacactttgattggtggagatgacttcaagagtggtcagaccaaaatgaaatct

SEQ ID NO: 105406 - DNA, 92 bp, Glycine max
ggacaaaactggagattggatcacacttatacaaaattctccaattagtaacttgttgagagttgctgcttggaagaaaggttgtttaatgg

SEQ ID NO: 105407 - DNA, 92 bp, Glycine max
gaaataccactacttttaacgttattttacttattccgtgaatcggaagcggggcactgcccctctttttggacccaaggtcggcttcggcc

SEQ ID NO: 105408 - DNA, 92 bp, Glycine max
ccggaactcttgggatccaccaaatccacacatcggaattaacgtcaattctatcagatccatcaaaacgacgtcttgggatttggccaaca

SEQ ID NO: 105409 - DNA, 93 bp, Glycine max
cacaacacccggagagggaacctcagcaacccggtgagaaggaggaagacgaagatgagcaaccacgtcctatcccattcccacgcccacaac

SEQ ID NO: 105410 - DNA, 92 bp, Glycine max
gtgagtgaaagtgaaacagaaaaaatcacccttgaacctggggacatgatacacataccagctggcaccccactgtacatcgttaacagaga

SEQ ID NO: 105411 - DNA, 89 bp, Glycine max
aaatgaccaagttcacaatcctcctcatctctcttctcttctgcatcgcccacacttgcagcgcctccaaatggcagcaccagcaagat

SEQ ID NO: 105412 - DNA, 90 bp, Glycine max
gtgactcgaggacaaggaaaggttagagttgtgaactgccaagggaatgcagtgttcgacggtgagcttaggaggggacaattgctggtg

SEQ ID NO: 105413 - DNA, 89 bp, Glycine max
accaaactttctttagctatctttttctttttgcttttagccttattttcaaacctagcctttggcaaatgtaaagaaaccgaggtaga

SEQ ID NO: 105414 - DNA, 88 bp, Glycine max
cacgagtacgagccagagcttgatattatttccaatgctagctgcacaaccaactgccttgccccacttgccaaggttatcactgaca

SEQ ID NO: 105415 - DNA, 90 bp, Glycine max
gaaataccactacttttaacgttattttacttattccgtgaatcggaagcggggcactgcccctctttttggacccaaggtcggcttcgg

SEQ ID NO: 105416 - DNA, 91 bp, Glycine max
cggggacaacgagcttctgcgcacggagaagaagttcaaggttttcatggagaattacgggaggagctactccacagaggaggagtatttg

SEQ ID NO: 105417 - DNA, 92 bp, Glycine max
gtctttgaacactcatcaccatggccaagcttgttctttccctttggatccgtcgtttcagtggctgcttcgctctgagagagcaggcacag

SEQ ID NO: 105418 - DNA, 280 bp, Glycine max
cagaattataaacatggcctcaaaagacccagtccgagtgaaatacttgtccaccttagtgagtcaaaagacagtctccacggccccaatcgcttcgggccaggccttcaacatcggcaactatgtggtgagggtcaaattgggaacacccggtcaacttttgttcatggtcctcgacaccagcactgacgaggccttcgtaccctgctcgggctgcactggctgctccgacaccactttctcgcccaaagcctcaaccagttacggcccattagactgc

SEQ ID NO: 105419 - DNA, 272 bp, Glycine max
caacaacagaggcagcaacaggaagagcaacctttggaagtgcggaaatatagagctgaattgtctgaacaagatatatttgtaatcccagcaggttatccagttgtggtcaacgctacctcagatctgaatttctttgcttttggtatcaatgccgagaacaaccagaggaacttccttgcaggttcgaaagacaatgtgataagccagatacctagtcaagtgcaggagcttgccttccctgggtctgcaaaagatattgagaccctaat

SEQ ID NO: 105420 - DNA, 274 bp, Glycine max
ctttgaacactcatcaccatggccaagcttgttctttcccattgtttccttcttttcagtggctgcttcgctctgagagagcaggcacagcaaaatgagtgccagatccaaaagctgaatgccctcaaaccggataaccgtatagagtcggaaggtgggttcattgagacctggaaccctaacaacaagccattccagtgtgccggtgttgccctctctcgctgcacccttaaccgcaatgcccttcgtagaccttcctacaccaacggtcccc

SEQ ID NO: 105421 - DNA, 275 bp, Glycine max
catttatcaactcactcatcaatctcgtttgttctcactaactattacttcatcatgtcgtcgagcacagttggtcaagtcatcaaatgcaaagctgcggtttcatgggaggcagggaagccacttgtgattgaagaagtagaggtggcaccaccacaagctggtgaagtgcgtttgaagatcctctacacctctctttgccacactgatgtttacttctgggaagccaagggccaaactccattgtttcctcgtatatttggtcatgaagctgg

SEQ ID NO: 105422 - DNA, 273 bp, Glycine max
agaaagtcttccatagccccccaaaaatgaagagcaccatcttctttgctctctttctcttttgtgccttcaccacctcatacctaccttcagccatcgctgatttcgtgctcgataatgaaggtaaccctcttgaaaatggtggcacatattatatcttgtcagacataacagcatttggtggaataagagcagccccaacgggaaatgaaagatgccctctcactgtggtgcaatctcgcaatgagctcgacaaagggattggaacaatca

SEQ ID NO: 105423 - DNA, 266 bp, Glycine max
ctttgacttcttccctgtggaggttgatagtcaagagggaattgctcacattggtgaattgaaatctggtgtctatgttccactgcctacaaaaactaatttgatggaaactcccaaggaatggcaactggatctaccttgtgacaaaattcctagtgtcttgactacaactgatgagagattggtaggcacagaacatgagggatatgatccttttcttggtggaattcaaaaatatgccactcccatgatgcccctagatgaag

SEQ ID NO: 105424 - DNA, 269 bp, Glycine max
gcttggtcaactcaggtgcgtcctgcaacaactctgttggctgatgggtgtccatatttgtatgctatggtgcatgatagttcagtgtctacaataccaggtgattttgtcattggtgttaagttgacaaccataaacaatatgtgtgcatatgggcttaatcctggtatttcaggttctcgtcttttgggcaccattcctcagtccatttcacagcaaactgtttggaatcaaatggcaacagtgagaacaccattgaattttgattc

SEQ ID NO: 105425 - DNA, 265 bp, Glycine max
tgttgttcctggcggtgatcttgccaaggttcagagggctgtgtgcatgatctccaattccaccagtgttgttgaggtcttctctcgcatcgaccacaaatttgacctcatgtatgccaagagggcttttgttcattggtatgttggtgagggtatggaagagggagagttctctgaggctcgtgaagatcttgctgccctggagaaagattatgaggaagtcggtgcagaggcaactgaagaagatggtgatgaaggagaagat

SEQ ID NO: 105426 - DNA, 261 bp, Glycine max
tgaaattttgataaaccgcgatcacaggttgccgcaccttaaaaccggaaacaaaagcaatcgttacttgatttcaagaatctctcaatttcttcctacttctttgtgtacgatttcttaagggaaagaaaatcactctctgtgctggccacagacttcgtgaattattttcttctccattcttagtttatttgctgaacactctcctatttgatataggacttcgtgtcagataaaacttcttctgtctctaactcagtt

SEQ ID NO: 105427 - DNA, 269 bp, Glycine max
gattcaaagagatcaaagacaattaccagatcagctaaccgattcctggaccaacgatgaagtgcttgcacttttcagaatcagatctagcatggaaaattggctcccagagctcacatgggaccatgtctcaaggaggctagcagaggttgggtttaagaagagtgctgagaagtgcaaggagaagtttgaagatgagagtagatatttcgacaacatcaataactaacggcaagaacaatttccggttccttattagcgagctggag

SEQ ID NO: 105428 - DNA, 271 bp, Glycine max
cataaagatcacacagggtatcaaacttccattcctccctttcaacggcaacaaaaaaatgcgtaacaataatttcactgtctcatcaatgcatggtgacatgcctcagaaagaaagagatgctattatgggagaatttcgtgctggaacaacccgtgtactaataacaactgatgtttgggcccgtggtcttgatgtacagcaggtttctctagttatcaattatgaccttccaaataatcgtgagctttacattcatcgaattggccgt

SEQ ID NO: 105429 - DNA, 254 bp, Glycine max
tcatggtgcagcacgagctgtagggggatgtccaatttatgtcagtgacaagcccggacaccatgactttgatcttttgaagaagcttgcactacctgatggttctatattaagggctaaacttccaggacgaccaacaaaggattgcttatttactgatcctgccagagatggaaagagtcttctgaagatttggaacatgaatgattttcctggagttgttgcggtattcaattgccaaggagctgggtggt

SEQ ID NO: 105430 - DNA, 279 bp, Glycine max
tgatactggtaattaatgaaggagatgcaaacattgaacttgttggcctaaaagaacaacaacaggagcagcaacaggaagagcaacctttggaagtgcggaaatatagagccgaattgtctgaacaagatatatttgtaatcccagcaggttatccagttgtggtcaacgctacctcaaatctgaatttctttgctattggtattaatgccgagaacaaccagaggaacttcctcgcaggttcgcaagacaatgtgataagccagatacctagtcaag

SEQ ID NO: 105431 - DNA, 272 bp, Glycine max
ttcgaagatcattgaagtggacaacaatgtaagggaggatcgtgctctcttaaatggtgcacagaagctacttggcattttgatagctgttggtgaggcagttgcatatgttctttctggaatgtatggtagtgtgggtcaacttggagtgggaaatgccatcctcatcatcctccagctatgttttgcgggtattattgtgatatgtttggatgagctccttcaaaaaggctatggcttgggatctggaatttctctgttcattgccacta

SEQ ID NO: 105432 - DNA, 270 bp, Glycine max
tattgggcctcattggtacaagtgtttttaacaaacagcaacagtacagagcattttgatgcatgtaagtggacaaaatcggaaccacattcctgggaattgatcttcccaatagaggtatgtggtcctaataatggttttgaaatgtggagttctgagtgggcaaatcaaacttcatggcatttgagtttccttattgacaatcccaaacagtctacagtttttgatattctcttgggaatttctcaagattttgaaattgctggtaat

SEQ ID NO: 105433 - DNA, 269 bp, Glycine max
tgtgtccatatttgtatgctatggtgcatgatagttcagtgtctacaataccaggtgattttgtcattggtgttaagttgacaaccataaacaatatgtgtgcatatgggcttaatcctggtatttcaggttctcgtcttttgggcaccattcctcagtccatttcacagcaaactgtttggaatcaaatggcaacagtgagaacaccattgaattttgattctagcaagcagagcttttgtcaattttctatcgaccttctcggtgga

SEQ ID NO: 105434 - DNA, 268 bp, Glycine max
ataaaattcttccaccaagttatgggtttccttgtgttgcttcttttctccctcttaggtctctcttctagttccagcatatcaactcatcgttccatattggaccttgacctaaccaagtttaccacacagaaacaggtgtcttcactgttccaactatggaagagtgagcatggacgtgtctaccataaccacgaagaagaggcaaagagacttgagattttcaagaataacttgaactatatcagggacatgaatgcaaacagaa

SEQ ID NO: 105435 - DNA, 267 bp, Glycine max
catcttgtgacttattggctgatgaccctggcacctaccgttggatggcacctgagatgatcaaaaggaaatcctacgggaaaaaggttgatgtctacagttttgggcttatcttatgggagatgttgactggaacaataccatatgaggatatgaatccaatacaggctgcttttgcagtagtaaataagaattcaagaccgattattccatcaaactgccctcctgcaatgcgagctctaattgagcaatgttggagcttgcaac

SEQ ID NO: 105436 - DNA, 268 bp, Glycine max
caaacccgtgttctgatgcatggagtttggaatttctgaagcgtaccggatttcattgtgatatcatttgtgtcactggatggactgccaccccaatgcaggatgttcaggttacaattgattggtttatttcctctcaggaatgtgttcccaggacctattgtgttttaaatccacaaaatccttttgtgttaaataggtggatgggaaaactgactttccctcagggcacttcccgaagtgttaagagaatgcctctttctatagg

SEQ ID NO: 105437 - DNA, 271 bp, Glycine max
gttcacaatcctcctcatctctcttctcttctgcatcgcccacacttgcagcgcctccaaatggcagcaccagcaagatagctgctcgcaagcagctccagggggtgaacctcacgccctgcgagaagcacatcatggagaagatccaaggccgcggcgatgacgatgatgatgatgacgacgacaatcacattctcaggaccatgcggggaagaatcaactacataaggaggaacgaaggaaaagacgaagacgaagaagaagaaggaca

SEQ ID NO: 105438 - DNA, 275 bp, Glycine max
gaaaggaaaggttaactaagaagcaatacttcaatggccacccttgttgttcataaccaaacttcttctgctcaagatgctgaggctctccaacaggctttcaaaggatggggggctgatgacaaggccattatagcaatactgggtcacagaaatgttcatcagaggcaagaaatcagaaaagcttatgaggagatttaccaagaggatctcatcaaacgccttgagtccgagatctctggtgactttgagagagctatgtaccggtggatgtt

SEQ ID NO: 105439 - DNA, 273 bp, Glycine max
gtggtagcaaagtatggtgacaagagtgtgtactttgatttggaggatctaggcaacactactggtcagtgggacttgtacggctccgatgcaccttcaccctacaaccctcttcagagcaagttcttcgagacatttgcctctccattcacaaaaaggggattgttactcaagtttttgatcctgggaggtggttccaccctggcatacttcagttccacagcttcaggtgacattctaccaatcaagaagggcccacaacttccaccaaag

SEQ ID NO: 105440 - DNA, 273 bp, Glycine max
aggtcatctaagccagaaaggaaagcatcagcaagaagaagaaaacgaaggaggcagcatattgagtggcttcaccctggaattcttggaacatgcattcagcgtggacaagcagatagcgaaaaacctacaaggagagaacgaaggggaagacaagggagccattgtgacagtgaaaggaggtctgagcgtgataaaaccacccacggacgagcagcaacaaagaccccaggaagaggaagaagaagaagaggatgagaagccacagtgcaa

SEQ ID NO: 105441 - DNA, 264 bp, Glycine max
gattcagcaggaacattttagaggcctcctacgataccaaattcgaggagataaacaaggttctgtttagtagagaggaagggcagcagcaaggggagcagaggctgcaagagagcgtgattgtggaaatctcgaaggaacagattcgggcactgagcaaacgtgccaaatctagttcaaggaaaaccatttcttctgaagataaaccttttaacttgagaagccgcgaccccatctactccaacaagcttggcaagttctttg

SEQ ID NO: 105442 - DNA, 190 bp, Glycine max
tgttactgctagcgtgttgcatgaggccatctaaatgtgacagatcgaaggaagaaagtgtaataagacgactctcactactcgatcgctagtgattgtcattgttatatataataatgttatctttcacaacttatcgtaatgcatgtgaaactataacacattaatcctacttgtcatatgataaaaa

SEQ ID NO: 105443 - DNA, 269 bp, Glycine max
ggaatttcgatgctcagtcatctcttttaccattctcttctctcttgctcttgcaggagagagccatgtccatgcatcgctacctgaggaagattattgggaagctgtttggccaaacactcccattcccactgcactgcgagagcttctaacgcctctccctgcaggtgttgaaatcgatgaactccctaagcaaattgatgatacacagtacccaaaaacattcttctataaagaagaccttcatccaggcaaaacaatgaaagtac

SEQ ID NO: 105444 - DNA, 167 bp, Glycine max
ctcgagctgccatgtggaataatttatctgattccaactggcactctttatgcttggacccctacatcaacttatattcatgagccaccttattttagagatatgagcatgtctcccccaggctctcatggagtgaaagatgcttactgtttgctcaactttggaga

SEQ ID NO: 105445 - DNA, 266 bp, Glycine max
cagcagaactctgcttcttcggattccgatcgcacgcgccgtcaccatggtgaacgttccgaaaacaaagaagacatactgcaagagtaaggagtgcaggaagcacacgctgcacaaggttacccaatacaagaagggtaaggatagcattgctgcccaaggaaaacgccgttatgatcgcaaacaatccggttatggtggacaaactaagcccgtcttccacaagaaggctaaaaccaccaagaagattgttctgaggttgcaat

SEQ ID NO: 105446 - DNA, 267 bp, Glycine max
acttattaacactttccttagttcaatatggggaagcccttcttcactctctctctttcttccctttgcttgctactcttgtcgagtgcatgctttgctattacctccagcaagttcaacgagtgccaactcaacaacctcaacgcgttggaacccgaccaccgcgttgagtccgaaggtggtcttattgaaacatggaactctcaacaccctgagctgcaatgcgccggtgtcactgtttccaaacgcaccctcaaccgcaacggc

SEQ ID NO: 105447 - DNA, 268 bp, Glycine max
cggctcgagcattggtccttaaacactcatcagtcatcaccatggccaagctagttttttccctttgtttcctgcttttcagtgcctgctgcttcgctttcagttccagagagcagcctcagcaaaacgagtgccagatccaaaaactcaatgccctcaaaccggataaccgtatagagtcagaaggagggctcattgagacatggaaccctaacaacaagccattccagtgtgccggtgttgccctctctcgctgcaccctcaaccg

SEQ ID NO: 105448 - DNA, 202 bp, Glycine max
gaacactctcttgaacattcatggatccagtgagcgtgtggggtaacacgcccttggcgacggtggatcccgagatccatgacctcatcgagaaggagaagcaccgccaatgccgcggcatcgagctcatcgcctccgagaacttcacctccttcgcagtcatcgaggccctcggcagcgctctcaccaacaaatactccga

SEQ ID NO: 105449 - DNA, 273 bp, Glycine max
tttctctctcgctcgcaaacgcaaataataaaaaacaaggttttagccatggcatcgaagcggatcttgaaggaactcaaggatctccaaaaggatcctcctacctcatgcagcgccggtcctgttgctgaagacatgtttcactggcaagcaacaattatgggtcctccagacagtccttatgctggaggtgttttcctagtcactattcatttccctccagattatccctttaagccacccaaggttgcattcaggacgaaggtatttcac

SEQ ID NO: 105450 - DNA, 270 bp, Glycine max
gtacactggaatttttccatgtatccccccaacaatcataatgctacaatttgtcaacttgacttcttgtttactttatttagcccctattttcttgaggtgtttattgtaaactgagaagtagacaatcttaaaattgatccttattgtgatagattagagtctaccaaaggatcctacgcaaaagaatggataaaatgggaaaaacagttacgggatattctttgtggaaatgctgagtattttaattctattcaggttccatttgag

SEQ ID NO: 105451 - DNA, 269 bp, Glycine max
gcttggtcaactcaggtgcgtcctgctcacaactctgttggctgatgggtgtccatatttgtatgctatggtgcatgatagttcagtgtctacaataccaggtgattttgtcattggtgttaagttgacaaccataaacaatatgtgtgcatatgggcttaatcctggtatttcaggttctcgtcttttgggcaccattcctcagtccatttcacagcaaactgtttggaatcaaatggcaacagtgagaacaccattgaattttgatt

SEQ ID NO: 105452 - DNA, 264 bp, Glycine max
ggcagaggcgcggagaagatgtggttcaccctctcaaggtctctctggaggacctttatctcgggacttctaagaagctctccctctccagaaatgtcatatgctccaagtgcactggtaagggttctaagtctggtgcttcgatgaagtgtgctggttgtcaaggaactggtatgaaggtttctataagacatcttggcccgtccatgattcagcagatgcagcatgcttgcaatgaatgcaagggtactggagaaaccatca

SEQ ID NO: 105453 - DNA, 264 bp, Glycine max
tgttgttgctgcaccaccgaacaacttcccctgtaaatcgcgtttcgtttgtgcaaggttttaaaagatggctgatgctgaggacattcaacctcttgttgttgataatggaactggaatggtcaaggctggttttgcaggtgatgatgctcctagggccgtgttccccagcattattgggagaccacgccatactggtgtaatggttgggatgggtcagaaggatgcttacgtgggtgatgaagcccaatcaaaaaggggtat

SEQ ID NO: 105454 - DNA, 266 bp, Glycine max
ccggcggcggacaactccgaccacctccaggaggtagggtggaagctcgcgcagtaggcggaggagatcaacgtgcagttcgagtaccgtggcttcgtcgcgaacagcctcgccgatctcgacgcctccatgctcgatctccgggaaggcgaagcgtcgctgtgaactctgtcttcgagtttcacaagctcctcgcccgccccggcgcggtggagaaagtactctccgtcgtacggcagattcggccggagattgtcaccgtcgtc

SEQ ID NO: 105455 - DNA, 266 bp, Glycine max
cggctcgagagtttcatagacccagaatggcttgatggctcgctaccaggtgactatggttttgacccactaggactaggaaaggacccggcattcctgaaatggtatagagaagctgaactcattcatgggaggtgggcaatggctgcagttgtaggcatcttcattgggcaggcatggagtggagttccatggtttgaggctggagcagatcctaatgcaattgctcctttctcatttggctctctcttaggtacccagttgct

SEQ ID NO: 105456 - DNA, 275 bp, Glycine max
gttcaatatcctagtacaccgtattaaagaatttaagatatactatgatgagagcgcggttccgattactgttgctgggagttgtttagctggcatcagtttctgtctcatttggcattgcgtattgggaaaagcagaaccccagtcacaacaagtgcctccgaagttgcaatagcgagaaagactcctacaggaaccaagcatgccacgctcgttgcaacctccttcaaggtggaggaagtagaagaatgcgaagatggtcaaattccacgacc

SEQ ID NO: 105457 - DNA, 129 bp, Glycine max
accgtatagagtcagaaggagggctcattgagacatggaaccctaacaacaagccattccagtgtgccggtgttgccctctctcgctgcaccctcaaccgcaacgcccttcgtagaccttcctacacca

SEQ ID NO: 105458 - DNA, 270 bp, Glycine max
cactcctgttgttgccgtttctattattgacaccaacagcttggagaaccagctcgaccagatgcctaggagattctatcttgctgggaaccaagagcaagagtttctaaaatatcagcagcagcagcaaggaggttcccaaagccagaaaggaaagcaacaagaagaagaaaacgaaggaagcaacatattgagtggcttcgcccctgaattcttgaaagaagcgttcggcgtgaacatgcagatagtgagaaacctacaaggtgagaa

SEQ ID NO: 105459 - DNA, 267 bp, Glycine max
ataacactcgccatacccgttaacaagcctggtagatttgagagtttcttcctatctagcactgaagctcaacaatcctacttgcaaggattcagcaggaacattttagaggcctcctacgataccaaattcgaggagataaacaaggttctgtttagtagagaggaagggcagcagcaaggggagcagaggctgcaagagagcgtgattgtggaaatctcgaaggaacagattcgggcactgagcaaacgtgccatatctagttca

SEQ ID NO: 105460 - DNA, 266 bp, Glycine max
gaagaatgtgaagaaggtgaaattccacgaccacgaccacgtccacaacacccggagagggaacctcagcaacccggtgagaaggaggaagacgaagatgagcaaccacgtccaatcccattcccacgcccacaacctcgtcaagaagaagagcacgagcagagagaggaacaggaatggcctcgcaaggaggaaaaacgcggagaaaagggaagtgaagaggaagatgaggatgaggatgaggaacaagatgaacgtcaattccc

SEQ ID NO: 105461 - DNA, 264 bp, Glycine max
ggcacatattatatcttgtcagacataacagcatttggtggaataagagcagccccaacgggaaatgaaagatgccctctcactgtggtgcaatctcgcaatgagctcgacaaagggattggaacaatcatctcgtccccatatcgaatccgttttatcgccgaaggcatcctttgagccttaagttcgattcatttgcagttataatgctgtgtgttggaattcctaccgagtggtctgttgtggaggatctaccagaaggac

SEQ ID NO: 105462 - DNA, 264 bp, Glycine max
atcctgcttgcacaaaagcaatgactatgtcatttaatccaaacccgtgttctgatgcatggagtttggaatttctgaagcgtaccggatttcattgtgatatcatttgtgtcactggatggactgccaccccaatgcaggatgttcaggttacaattgcttggtttatttcctctcaggaatgtgttcccaggacctattgtgttttaaatccacaaaatccttttgtgttaaataggtggatggggaaattgactttccccc

SEQ ID NO: 105463 - DNA, 268 bp, Glycine max
ctcgagccgttgcaagctcccaaggatgtgtcgcagcaaatcaaaatggccaacaagactatgaagaaggaacaatattcttgtgaccatccacctgcatcatgggattggaggaaaaaaggtgtcatcacccaagtaaagtaccaagggggctgtggaagcggttgggcgttttctgccacgggagccatagaagcagcacatgcaatagcaacaggagaccttgttagcctttctgaacaagaactcgtagactgtgtggaagaaa

SEQ ID NO: 105464 - DNA, 272 bp, Glycine max
tgcggctctaggaacaatggcgtgtagggttttctcgtgcttcttcttcgtgtttgctctttctctccttcttccttttcagatctccgctgaggaatcatcggagaaagagttcgtactcacattggatcactctagacttcacgacactgtcagcatgcacgatttcatcgtcgtcgagttctacgctccatggtgtggccactgtaagaagcttgctcccgagtatgagaaagctgcttctatcttgagtagtcatgatcctccggttg

SEQ ID NO: 105465 - DNA, 270 bp, Glycine max
ggcactatcaatcgttcgaatgggctttactgcattttttggattgccactgatgatgattatccttacagagctaaagagggtagatgcaaagccaataagatacaagacaaggttacaattgacggatatgaaactctaataatgtcagatgagagtacagaatcagagacagagcaagcgttcttaagcgccatccttgagcaaccaattagtgtctccattgatgcaaaagattttcatttatacaccgggggaatttatgatgga

SEQ ID NO: 105466 - DNA, 223 bp, Glycine max
ctctccattgtctttgaacactcattaccatggccaagcttgttctttcccttaggcaccttcttatcagtggctgcttcgctctgatagagcaggcacagcaaaatgagtgccagatccaaaagctgaatgccctccaaaccggataaccgtatatagtcggaaggtgggttcattgagccctggaaccctaacaacaagctattccagtgtgccggtgttg

SEQ ID NO: 105467 - DNA, 266 bp, Glycine max
aatggattccacaaactcaaatgatggagagcctgccccatcaaagccagaaaacacacatccatcttatcctatgttatatcctgcgtattattctccagtgttcccgtttcctctgccctattggtcaggatacagtccagagcccaccaagaaggaggaaacacatgaagtgctgaaaccaactgcagtacattctaaaagcccaatcaatgttgatgaactggttggcatatcaaaactgagtttaggggagtctattggtg

SEQ ID NO: 105468 - DNA, 248 bp, Glycine max
ttcccacgcccacaacctcgccaagaagaagagctcgagcagagagaggaacaggaatggcctcgcaaggaggaaaaacgcggagaaaagggaagtgaagaggaagatgaggatgaggatgaggaacaagatgaacgtcaattcccattcccacgcccacctcatcagaaggaagagcgaaagcaagaggaagatgaggatgaggagcagcagcgagagagcgaagagagtgaagattctgagttacg

SEQ ID NO: 105469 - DNA, 265 bp, Glycine max
gaaaccactcccgcctcgtcgtcaccacgccgcaaggggattacattgagcgtcacagaagagactatggctaccgtctcgatcacttcgagcggaagcgcaagaaagaggcgcgtcaagttcacaaacgctctgcaattgcccagaaggctctgggtattaagggcaaaatgattgccaagaaaaattatgctgaaaaggcacagatgaagaagactttggctatgcatgaagaatcaacttctaggcgcaagactgatgataa

SEQ ID NO: 105470 - DNA, 222 bp, Glycine max
ggatatgaacgagggagctcttcttctaccacacttcaattcaaaggcgatagtgatactggtaattaatgaaggagatgcaaacattgaacttgttggcctaaaagaacaacaacaggagcagcaacaggaagagcaacctttggaagtgcggaaatatagagccgaattgtctgaacaagatatatttgtaatcccagcaggttatccagttgtggtcaa

SEQ ID NO: 105471 - DNA, 272 bp, Glycine max
ctcgagccgtaaaattcttccaccaagttatgggtttccttgtgttgcttcttttctccctcttaggtctctcttctagttccagcatatcaactcatcgttccatattggaccttgacctaaccaagtttaccacacagaaacaggtgtcttcactgttccaactatggaagagtgagcatggcgtgtctaccataaccacgaagaagaggcaaagagacttgagattttcaagaataacttgaactatatcagggacatgaatgcaaaca

SEQ ID NO: 105472 - DNA, 271 bp, Glycine max
cttctccctacattaaatgtacagtctctttcttcatagcatatggaaatttggctgatgacaccatcaattttgaggcttttccccacaagctggtgcagtttggagagattcaggaaaaagttgtattgaaattttcacaagaggaatttcttacagcttggtcaactcaggtgcgtcctgaacaaccctgttggctgatgggtgtccatatttgtatgctatggtgcatgacagttcagtgtctacaataccaggtgattttgttatt

SEQ ID NO: 105473 - DNA, 270 bp, Glycine max
atgagggactcagagcaaccctcagatgccaaaatggcatgatggcgagacagcatccttgcaatggggcggtatccgtctctatcattaaggttgtaatatccagcagtaagctccgcagctcgtctatcaaaagaggaggcaaactcaattgctcagaaacctggtgtggtgtctgttttcctgaccccattctgaagctccacactacacgttcatgggatttcctcaaaagccaaactcgtgtcaatatcgacaccaaaccaaata

SEQ ID NO: 105474 - DNA, 270 bp, Glycine max
ccatcgttaagctagtggcgatcggatccagctacagcatagagatcaaggaaggaaggaaggaagatgttgggtgttataaggcacaagagtattcgccctgccttctccgcaatcagacacttgtcttctgcagctaaagagattactgtcagggaggctctgaactccgcactcgatgagaaatgtcagctgatcctaaagtgttcttgatgggtgaagaggttggggaatatcagggtgcatacaagatatccaaggggctgctcg

SEQ ID NO: 105475 - DNA, 268 bp, Glycine max
ctccattgtctttgaacactcatcaccatggccaagcttgttctttccctttgtttccttcttttcagtggctgcttcgctctgagagagcaggcacagcaaaatgagtgccagatccaaaagctgaatgccctcaaaccggataaccgtatagagtcggaaggtgggttcattgagaccggaaccctaacaacaagccattccagtgtgccggtgttgccctctctcgctgcacccttaaccgcaatgcccttcgtagaccttccta

SEQ ID NO: 105476 - DNA, 260 bp, Glycine max
gcgccaagtcacaccagaaattggatccctccgccgtccacggcgtcaccaggttctccgatctcactccggcggagtttcgccgccagttcctcggcctgaagccgctccgccttccctctgacgctcagaaggctccgatcctaccgaccaacgacctccctaccgatttcgattggccgaacatggagccgttactggagtaaaaaatcagggttcgtgcggatcgtgttggtcctttagcgccgttggagcgttgg

SEQ ID NO: 105477 - DNA, 257 bp, Glycine max
ttgggaatctctcaagattttgaaattgctggtaatactcttatgccagctttttctgttccacaggctactgccagatcttctgaaaatgcggaatcctctgcatgatctggaattcgtgttttctttcgcttgttcgtttgtttaattcaataaaggaaattaggcatgaccctcttttgagtatgctctgcctatctgaaaatttccacacctcttttaattgtcgtaatgatgtgtgaagtgtgtgttatttt

SEQ ID NO: 105478 - DNA, 266 bp, Glycine max
aacacaacaagtgtctccagagttgcaatagcgagagagactcgtacaggaaccaagcatgccacgctcgttgcaacctccttaaggtggagaaagaagaatgtgaagaaggtgaaattccacgaccacgaccacgaccacaacacccggagagggaacctcagcaacccggtgagaagaggaagacgaagatgagcaaccacgtccaatcccattcccacgcccacaacctcgtcaagaagaagagcacgagcagagagaggaac

SEQ ID NO: 105479 - DNA, 264 bp, Glycine max
aacatgaaaagattattagggggttagcattgggattagctcttacagtttatggaagagaagaagaagctgacactttgattgagcagatgactagggatcaagatccaatattgcgttacggtggcatgtatgctttggccttggcgtataagggaacagcaaacaataaggccatcgccagttactgcactttgctgtgtctgatgtgagtgatgatgtcaggaggactgcagttctagcattagggtttgtgttgtactc

SEQ ID NO: 105480 - DNA, 265 bp, Glycine max
ataaaattcttccaccaagttatgggtttccttgtgttgcttcttttctccctcttaggtctctcttctagttccagcatatcaactcatcgttccatattggaccttgacctaaccaagtttaccacacagaaacaggtgtcttcactgttccaactatggaagagtgagcatggacggtctaccataaccacgaagaagaggcaaagagacttgagattttcaagaataacttgaactatatcagggacatgaatgcaaacag

SEQ ID NO: 105481 - DNA, 255 bp, Glycine max
ggctcgagtaattattaacacttccttagactcaatatggggaagccgcttcactctctctctttcttaccctttgcttgctactcttgtcgagtgcatgctttgctattagctccagcaagctcaacgagtgccaactcaacaacctcaacgcgttggaacccgaccacgcgttgagtccgaggtggtttgattcaaacatggaactctcaacaccctgagctgaaatgcgccggtgtcactgtttccaaactc

SEQ ID NO: 105482 - DNA, 241 bp, Glycine max
tcgagctcgagccggtgagtcctactttgtggatgctcagcctcagcagaaagaggaggggaacaagggaagaaagggtcctttgtcttcaattttgagggctttttactgaataagtatgtagtactaaaatgtatgctgtaatagctcatagtgagcgaggaaagtatcgggctatttaatatgacttgagctccatctatgaataaataaatcagcatatgatgcttttgttttgtgt

SEQ ID NO: 105483 - DNA, 265 bp, Glycine max
attacactctttgcctcgcaccttcaacttaaccttttctactcataatcttaacaacttgctagaagaagataaagaaagagaaaaagtgtgtgtgtgtgagagagagcaatggctggctcgtgggcacgccgttctctgattgttctggctatcatttccttcggatgtttatttgaatttccattgctaaggaggaagccacaaaattggggacggtcatcgggattgatcttggaacgacctattcatgtgttggtgttta

SEQ ID NO: 105484 - DNA, 266 bp, Glycine max
aaacagaaaaaatcaccctagaacctggagacatgatacacataccagcaggcacaccactgtacatcgttaacagagatgagaatgagaagctcctccttgccatgctccatatacctgtctctactcctggaaaatttgaggaatttttcgggcctggaggacgagacccagaatcgtcctctcagcattcagctggaatgtgctgcaagctgcgctccaaaccccaaaaggaaagttagaaaggctttttaatcaacagaacg

SEQ ID NO: 105485 - DNA, 253 bp, Glycine max
ggtctacctagataaaggactagttgctttttctgctggtttgcatggctgggcttttaccctgactaactttgccaagatgtatgcatccaagtttggagttgatgaaggaaagatgatggaaaggctctggggtgaaaacttttatgatccagccacaaagacatggaccagcaacatagtggttctgctacctgcaagcgtgggtatgttcagttctgttatgagcccatcaagcagtattataacactt

SEQ ID NO: 105486 - DNA, 265 bp, Glycine max
ctcgagccgtttgcaccatgaagcttcacgagaacattgctcgcccttcacgtgctgacgtctacaacccaaaagctggtcgcattagcaccctcaacagtctcaccctcccagccctccgccaattcggactcagtgcccaatatgttgtcctctacaggaatggaatttactctccaattggaacttgaacgcgaacagtgtgatctatgtgactcgagggaaaggaagagttagagtggtgaactgccaagggaatgcagtg

SEQ ID NO: 105487 - DNA, 268 bp, Glycine max
cactgaccaagccatggcgatgagaaccaaactttctttagctatctttttcttttttcttttagccttattttcaaacctagcctttggcaaatgtaaagaaaccgaggtagaagaagaagaccctgagctcgtaacatgcaaacaccaatgccaacagccacagcaatacactgaggggacaagcgggtatgcttgcaaagatgtgacaggtatcatcgtatgaagcaagagcgagagaaacaaatccaagaggaaactcgtgaga

SEQ ID NO: 105488 - DNA, 257 bp, Glycine max
tataccttaataaataatttaagatactatgatgagagcacggttcccattactgttgctgggacttgttttcctggcttcagtttctgtctcatttggcattgcttactgggaaaaagagaaccccacacacaacaagtgtctccagagttgcaatagcgagagagactcgtacaggaacaagcatgccacgctcgttgcaacctccttaaggtggagacagaagaatgtgaagaaggtgaaattccacgacacga

SEQ ID NO: 105489 - DNA, 269 bp, Glycine max
ggtccttaaacactcatcagtcatcaccatggccaagctagttttttccctttgttttctgcttttcagtggctgctgcttcgctttcagttccagagagcagcctcagcaaaacgagtgccagatccaaaaactcaatgccctcaaaccggataaccgtatagagtcagaaggagggctcattgagacatggaaccctaacaacaagccattccagtgtgccggtgttgccctctctcgctgcaccctcaaccgcaacgcccttcgta

SEQ ID NO: 105490 - DNA, 266 bp, Glycine max
agccattccagtgtgccggtgttgccctctctcgctgcacccttaaccgcaatgcccttcgtagaccttcctaccgccatagaaaataagaaatctacatacaacaaggtaatggtatttttggcatgattttcccgggttgtcctagcacttatcaagagccgcaagaatctcagcaagaggacgaagccagaggccccaagaccgtcaccaaaaggtacatcgcttcagagagggtgatttgatcgcagtgcctactggtgttg

SEQ ID NO: 105491 - DNA, 266 bp, Glycine max
gtttctaaaatatcagcagcagcagcaaggaggttcccaaagccagaaaggaaagcaacaagaagaagaaaacgaaggaagcaacatattgagtggcttcgcccctgaattcttgaaagcagcgttcggcgtgaacatgcagatagtgagaaacctacaaggtgagaacgaagaggaggtagtggagccattgtgacagtgaaaggaggtctaagagtcacagctccagccatgaggaagccacagcaagaagaagatgatgatga

SEQ ID NO: 105492 - DNA, 263 bp, Glycine max
caaccataaacaatatgtgtgcatatgggctcaatcctggtatttcaggttctcgtcttttgggcaccattcctcagtccatttcacagcaaactgtttggaatcaaatggcaacagtgagaacaccattgaattttgattctagcaagcagagcttttgtcaattttctattgacttctcggtggaggaattttagtggacaaaactggagattggatcacacttatacaaaattctccaattagtaacttgttgagagttg

SEQ ID NO: 105493 - DNA, 263 bp, Glycine max
ctcgagccgctcgagccgatttcattcattcttaatctttgtgaaaaataatgttcatcgagaattttaaggttgagtgtcctaatgtgaagtacaccgagactgagattcagtccgtgtacaactacgaaaccaccgaacttgttcacgagaacaggaatggcacctatcagtggatgtcaaacccaaatctgtcaaatacgaatttaaaaccaacatccatgttcctaaattaggggtaatgcttgtgggttggggtggaa

SEQ ID NO: 105494 - DNA, 262 bp, Glycine max
aaaatctcagattaataacactcgccatacccgttaacaagcctggtagatttgagagtttcttcctatctagcactgaagctcaacaatcctacttgcaaggattcagcaggaacattttagaggcctcctacgataccaaattcgaggagataaacaaggttctgtttagtagagggaagggcagcagcaaggggagcagaggctgcaagagagcgtgattgtggaaatctcgaaggaacagattcgggcactgagcaaa

SEQ ID NO: 105495 - DNA, 264 bp, Glycine max
atcctagtacaccgtattaaagaatttaagatatactatgatgagagcgcggttcccattactgttgctgggagttgttttcctggcatcagtttctgtctcatttggcattgcgtattgggaaaagcagaaccccagtcacaacaagtgcctccgaagttgcaatagcgagaaagctcctacaggaaccaagcatgccacgctcgttgcaacctccttaaggtggaggaagaagaagaatgcgaagaaggtcaaattccacga

SEQ ID NO: 105496 - DNA, 262 bp, Glycine max
cggctcgagtaaaattcttccaccaagttatggatataaatgtgttgcttcttttctccctcataggtctctcttctagttccagcatatcaactcaatgttccatattggaccttgacctaaccaagtttaccacacagaaacaggtgtattcactgttccaactatggaagagtagcatggacgtgtctaccataaccacgaagaagaggcaaagagacttgagattttcaagaataacttgaactatatcagggacatg

SEQ ID NO: 105497 - DNA, 263 bp, Glycine max
cgaagatgaagataaacctcgtcctagtcgaccaagccaaggaaagcgtgaacaagaccaggaccaggacgaggacgaagatgaagatgaagatcaacctcgcaagagccgcgaatggagatcgaaaaagacacaacccagaagacctagacaagaagaaccacgtgaaagaggatgcggacaagaaacggggttgaggaaaatatctgcaccttgaagcttcacgagaacattgctcgcccttcacgcgctgacttctacaa

SEQ ID NO: 105498 - DNA, 262 bp, Glycine max
ctctttctgagatatttcgaatttcgatactttgatcagatccacaacactccttcatccatgacgcttggctcttcaggatccagtgtcgtggttccaaggaacttcagattgctggaggagcttgagaagggagaaaaaggaatcggagatggaacagttagctatggaatggatatggtgacgacatttacatgcgctcttggactggaaccattattggcccctataatactgtacatgaaggaagaatttatcaatt

SEQ ID NO: 105499 - DNA, 264 bp, Glycine max
gagctaaagagggtagatgcaaagccaataagatacaagacaaggttacaattgacggatatgaaactctaataatgtcagatgagagtacagaatcagagacagagcaagcgttcttaagcgccatccttgagcaaccaattagtgtctccattgatgcaaaagattttcatttatcaccgggggaatttatgatggagaaaactgtacaagtccgtatgggattaatcactttgttttacttgtgggttatggttcagcgga

SEQ ID NO: 105500 - DNA, 261 bp, Glycine max
ctctgcagcaacaagatgtggaaccaaccattgggaaaaaccgatttggaaagcggttctcgcccgctgtatccgatgatgcttgagagccccgaactgcgctggtctttcatcagaaaagtatactccataatcgccatacagttgctcgtaaccatcgtcgtcggcgccgtcgtgtcaccgtccgcccaatcagcgtcttcttcgccaccaccggcgccggattggctctctacatcgtcctcatctttgtccccttca

SEQ ID NO: 105501 - DNA, 262 bp, Glycine max
gaagcagcctggggtctggctcgctatgccgcaattgctcaggacaatggattggtcccaattgtggagccagagatcttgcttgatggggagcatggtattgacagaacttttgaagtagcaaaaaaggtctgggcagaggttttcttctaccttgctgagaacaatgtccttttgagggtattcttcttaagcctagcatggttacacctggagctgagtccaaggacaaggccagtcctcagacagttgctgattacac

SEQ ID NO: 105502 - DNA, 260 bp, Glycine max
gcagaacagagagagcaaaaccctagagcatccatcacaagcagaggaagaagatggtgaagttcctgaagcctaacaaggcagtgatcgtcctgcagggccgctacgccgggcgcaaggcggtgatcgtgaggaccttcgacgagggaaccagggagcgcccctacggccactgctcgtcgccggaataaagaagtacccaagcaaggtcatcaagaaggactccgcgaagaagaccgcgaagacatctagggttaagg

SEQ ID NO: 105503 - DNA, 263 bp, Glycine max
gggaagcccttcactctctctctttcttcctattgcttgctactcttgtcgagtgcatgctttgctattagctccagcaagctcaacgagtgccaactcaacaacctcaacgcgttggaacccgaccaccgcgttgagtccgaacgtggtttgattcaaacatggaactctcaacacctgagctgaaatgcgccggtgtcactgtttccaaactcaccctcaaccgcaatggcctccacttgccatcttactcaccttatccc

SEQ ID NO: 105504 - DNA, 263 bp, Glycine max
gtccgaaggtggtcttattgaaacatggaactctcaacaccctgagctgcaatgcgccggtgtcactgtttccaaacgcaccctcaactgcaacggcctccacttgccatcttactcaccttatccccaaatgatcattgtcgttcaagggaagggagcaattggatttgcatttccggatgtcctgagacgtttgagaagccacaacagcaatcaagcagaagaggctcaaggtcgcagcagcaactacaagacagtcacca

SEQ ID NO: 105505 - DNA, 264 bp, Glycine max
gtactgccgcgagcagctcaaggggatcaacctcaacccctgtgagtacatcatggagaagatccaagactggccgccgcggcgaggacggcagcgacgaagatcacattctcatcaggaccatgccgggaagaatcaactacatcaggaagaaggaaggaaaagaagaagaagaagaggacacatgcagaagtgctgcagcgaaatgagcgagctgaaaagccccatatgccagtgcaaagcgctacagaagataatggataa

SEQ ID NO: 105506 - DNA, 260 bp, Glycine max
aagggtgtctctgaaattgtcatgtccacgttaaggtcttgattggctttctgggtttggagaagaatctctgcttcactctcttcactgctgggaggtaactgacccaaaccctattggttttggcaacatggaagatgaacacactttggcggttgctgagagagagatgtggtgaacagtgaccaagacgagttcctaggtgtcaatgatgcttccatgttctacgctgatttccctcctctccctgatttcccttg

SEQ ID NO: 105507 - DNA, 262 bp, Glycine max
ggatgacatgccgttgccggcgctctttgagcaagcccgcaagatccacgccgcagccaccgattccggcgccgaccaggaggttgtgaagaaggggtgcgaggctctgcatagatgcgaggacatggtcaataatctaggtttgttctctcccaacgagaccaaagaagatatcacaccacgaatctcaaatacattctggttcgtatgtttgagtttagttacttttacttttaattaacgccattattttatataatca

SEQ ID NO: 105508 - DNA, 259 bp, Glycine max
tggtggtgctggttctggcgcgggacctaagattgaagaagttgactaagcttgtgcatgtgactaactcaaaaactttggttaggttcttgttatttggtctaataatgtaagttttagtgatgatgtaaggtttcaggaatcgtgaataaggtcttttttgcttcatgtgatagtgtaatatcagagatggagttgagattaatgtaattttttatacagtttgggcttttaaaaaaaaaaaaaaaaaaagggcggc

SEQ ID NO: 105509 - DNA, 261 bp, Glycine max
gaataattaagaaaagccatttccatagcagcctaagaaaatgaagagcactagcttgttcgctatctttctactttgcgccttcacctcatacctaccttccgccaccgcccaggacgtgctcgacgtggatggcgatccgattcggaacggtttcatatactacgttttgccgcaataagaggaaacggtggcggaatagaacgagccgcactcgggaaagacacttgccctatcactgtagtgcaatctcccaatcca

SEQ ID NO: 105510 - DNA, 258 bp, Glycine max
ctcgagccgttttcgcagtttcttcgtttctctctctctctctctcttcagaaaagcagaacgaaataacccattcaaaaaaagaaagagcaatcaattccaatcacaatggcaaatcaactcaccgatgaacagatctctgagttcaaggaagccttcagtttgttcgataaggatgagatggttgcatcacaacaaaggagcttgggaccgttatgcgttcgttgggtcagaacccaacagaggctgagctccaag

SEQ ID NO: 105511 - DNA, 256 bp, Glycine max
gccacagcaagaagaagatgatgatgatgaggaagagcagccacagtgcgtggagacagacaaaggttgccaacgccaaagcaaaaggagcagaaatggcattgatgagaccatttgcacaatgagacttcgccaaaacattggtcagaattcatcacctgacatctacaaccccaagctggtagcatcacaaccgccaccagccttgacttcccagccctctggcttctcaaactcagtgcccagtatggatcac

SEQ ID NO: 105512 - DNA, 258 bp, Glycine max
caataattccttcacttgcagaacttagttctctgttgcatcatcatcatcttcattagtgttagccctaaacttcaccttcaaccatgaccacagtgccaccacacagtgtccaagtgcacacaacaacacaccgctacgaagccggcgtcgtcccgccggctcgttttgagcgccgcgttacgaagccggcatcaaggcgccctcttccatttaccattccgagagaggtccgacgacctctcaggttctcgcagt

SEQ ID NO: 105513 - DNA, 118 bp, Glycine max
ctaacaattccttcacttgcagcaccggtgcatcatcatcttcattgcaaaaccctaaacttcaccttcaacgatgaccacacaagtaccaccagacagtgtccaagtccacacaaca

SEQ ID NO: 105514 - DNA, 237 bp, Glycine max
ctcgagccggtgagtcctactttgtggatgctcagcctcagcagaaagaggaggggaacaagggaagaaagggtcctttgtcttcaattttgagggctttttactgaataagtatgtagtactaaaatgtatgctgtaatagctcatagtgagcgaggaaagtatcgggctatttactatgacttgagctccatctatgaataaataaatcagcatatgatgcttttgttttgtgta

SEQ ID NO: 105515 - DNA, 83 bp, Glycine max
gaaaaacaagtagttgagaactaagaagaaggacatggcttcctcaatgatctcctccccagctgttaccaccgtcaaccgtg

SEQ ID NO: 105516 - DNA, 246 bp, Glycine max
ctcgagccgctctcttctctctgcatcgcttcaggttcttctgaaaagatgtctcgcgtgtctgttggtaacttggattcacgagtcaccgagagagatctcgaagacgaattccgtgttttcggagttattcggagtgtttgggttgcacgtagaccacctggtgatgcttttattgactttgatgaccgcagagatgcacaggatgctatccgtggaattggatgggcagaatggtttggaggg

SEQ ID NO: 105517 - DNA, 248 bp, Glycine max
cccatactccatggaatggactggtttggccaatagattactgagtaagggcaacgatattctgtgttgcgattatgctagttttgatggtttgattaccaagcaagttatgagcaagatggcagaaatgataaacagtctttgtggtggtgatgaaaaattgatgcgtgaaaggacacacctgctgttggcttgttgttcaaggatggcaatttgtaaagaagatgtttggagagttgaatgtggaa

SEQ ID NO: 105518 - DNA, 193 bp, Glycine max
tgccgtttctattattgacaccaacagcttggagaaccagctcgaccagatgcctaggagattctatcttgctgggaaccaagagcaagagtttctaaaatatcagcagcagcagcaaggaggttcccaaagccagaaaggaaggcaacaagaggaggaaaacgaaggaagcaccatattgagtggcttcgcc

SEQ ID NO: 105519 - DNA, 238 bp, Glycine max
aaaattcttccaccaagttatgggttcccttgtgttgcttcttttctccctcttaggtctctcttctagttccagcatatcaactcatcgttccatattggaccttgacctaaccaagtttacccacagaaacaggtgtcttcactgttcccaatatggaagagtgagcatggacgtgtctaccataaccacgaagaagaggcaaagagacttgagattttcaagaataacttgaact

SEQ ID NO: 105520 - DNA, 249 bp, Glycine max
ggcataatagagacaacctttttgccctcaaagtattctgtggagatgtcttcggcggtttataagaattgggttttcactgatcaagcactacctgcagatcttatcaagagaggagtggcaattaaggatccatcaaccccacatggagttcgtcttctgatagaggactatccttatgccgctgatggactggagatatgggctgcaattaagacatgggttcaagaatatgtgcctttgtactat

SEQ ID NO: 105521 - DNA, 107 bp, Glycine max
cgaagatctaccactcaacatttcaagtgaaatgttgcaacagaacaagatcttgaaggtcatcagaaagaacttggttaagaagtgccttgagctcttctttgaaa

SEQ ID NO: 105522 - DNA, 115 bp, Glycine max
catcatcaaagaacaagtcaagcttctctacaagcgccacaagaacactgctttctcctggctcagaaacatcttccatgactgtgccgttcaaagttgtaatgcctcaatggtg

SEQ ID NO: 105523 - DNA, 225 bp, Glycine max
gattggaaaaagtttcctctacaaaagcacaatttgttagtggaaaaaccttcagatatgatataattggtgctggttcacattcttcaggagattttcctgaaaaggtagatcaagaagaacccaaacagattgataccagattgagacaaagaatagatcctgcatacaatgagggtcaggctcagatggcaacaagttgtctaacttgtctctggatgatgt

SEQ ID NO: 105524 - DNA, 196 bp, Glycine max
attctgatcgctccctgagagagctcgtcgcggcggttgcagaagaagattgcaagatgaagttccacatcgcgaatcccaccactggatgccagaagaagctcgagatcgacgacgatctgaaaatgcgagcattttgggacaagaggatctcacaggaggtcatcggagatgcactcggtgaggaatttaaggg

SEQ ID NO: 105525 - DNA, 179 bp, Glycine max
gttcaatatcctagtacaccgtattaaagaatttaagatatactatgatgagagcgcggttcccattactgttgctgggagttgttttcctggcatcagtttctgtctcatttggcattgcgtattgggaaaagcagaaccccagtcacaacaagtgcctccgaagttgcaatagcgag

SEQ ID NO: 105526 - DNA, 212 bp, Glycine max
gtcttccatagccccccaaaaatgaagagcaccatcttctttgctctctttctcttttgtgccttcaccacctcatacctaccttcagccatcgctgatttcgtgctcgataatgaaggtaaccctcttgaaaatggtggcacatattatatcttgtcagacataacagcatttggtggaataagagcagccccaacgggaaatgaaagatg

SEQ ID NO: 105527 - DNA, 80 bp, Glycine max
ctttctcatcaataatggaggttatacaattgaagttgagattcacgatggtccatacaatgtgataaagaattgggact

SEQ ID NO: 105528 - DNA, 220 bp, Glycine max
  unsure (1)..(220): unsure at all n locations
taacgacgtgcaacttgtatttaggattcagccagctcttagttaagagcttcacctccgagttccctcacgtcgagaggtacttttggacattggtcaaccagcctaacttccgaaagatattaggtcaggttaagcanactgagtctgttccaccattccatccgctgcaaagaagccttcccagcctaaggaatctaagcccaagcctaaggatgaa

SEQ ID NO: 105529 - DNA, 226 bp, Glycine max
tgtctttgaacactcatcaccatggccaagcttgttctttccctttgtgtccttcttttcagtggctgcttcgctctgagagagcaggcacagcaaaatgagtgccagatccaaaagctgaatgccctcaaaccggataaccgtatagagtcggaaggtgggttcattgagacctggaaccctaacaacaagccattccagtgtgccggtgttgcctctctcgctg

SEQ ID NO: 105530 - DNA, 242 bp, Glycine max
ggaaatttggctgatgacaccatcaattttgaggcttttccccacaagctggtgcagtttggagagattcaggaaaaagttgtattgaaattttcacaagaggaatttcttacagcttggtcaactcaggtgcgtcctgcaacaaccctgttggctgatgggtgtccatatttgtatgctatggtgcatgacagttcagtgtctacaataccaggtgattttgttattggtgttaagttgac

SEQ ID NO: 105531 - DNA, 139 bp, Glycine max
gaccacgaccacgaccacaacacccggagagggaacctcagcaacccggtgagaaggaggaagacgaagatgagcaaacacgtccaatcccattcccacgcccacaacctcgtcaagaagaagagcacgagcagagaga

SEQ ID NO: 105532 - DNA, 203 bp, Glycine max
gaagaaggcgctgccggcgaacgcgaagatctcgaaggacgcgaaggagacggtgcaggagtgcgtgtcagagttcatcagcttcatcaccggcgaggcctccgacacgtgccagcgcgagaagcgcaagacgatcaacggcgacgacctgctctgggcgatgaccactctgggcttcgaggactacgtggagcctcctcaaa

SEQ ID NO: 105533 - DNA, 237 bp, Glycine max
ttcggctcgagctcgggccgaatcggctcgagctaaaatatcagcagcagcagcaaggaggttcccaaagccagaaaggaaagcaacaaggggaagaaaacgaaggaagcaacatattgagtggcttcgaccctgaattcttgaaagaagcgttcggcgtgaacatgccgatagtgagaaaactacaaggtgagaacgaagaggaaggtaatggagccattgtgacagtgcaaagga

SEQ ID NO: 105534 - DNA, 215 bp, Glycine max
gacccacatactatgtggtcaaccctgacaacaacgaaaatctcagattaataacactcgccatacccgttaacaagcctggtcgatttgagagtttcttcctatctagcactgaagctcaacaatcctacttgcaaggattcagcaggaacattttagaggcctcctacgataccaaattcgaggagataaacaaggttctgtttagtagagag

SEQ ID NO: 105535 - DNA, 222 bp, Glycine max
ccacaaggtaggctggaccccgaagttatagatcttcttttagagcttgctgatgacttcattgattctgcaactacacatggttgcattttggcgaaacatagaaaatcgtcaaatttggagtccaaggatttattgctacacctagagaaattggggatttaacaattcccggatactcaagtgaagagaaggagaatcagagcaacctcaattaaatga

SEQ ID NO: 105536 - DNA, 198 bp, Glycine max
  unsure (1)..(198): unsure at all n locations
gaggagagctgtggcttagagagccctttttgcatgtgctaccacacttttgtccttttgggctctagctagtgctggtagcagtanataagaatgaataaaagaaacaaaggcttagatgccctttgttaagtgtagaataacgggtatagtaactatgtacccttgtgtaatgagtcactcaagtacctatgcggg

SEQ ID NO: 105537 - DNA, 216 bp, Glycine max
gccattgtgacagtgaaaggaggtctaagagtcacagctccagccatgatgaagccacagcaagaagaagatgatgctgatgaggaagaggagccacaatgcggggagacagacaaggttgccaacgccaaagccaaaggtgagcaatggcattgatgagaccattgcacaatgagacttcgccaaaacattgggtcaaattcatcactgacatct

SEQ ID NO: 105538 - DNA, 207 bp, Glycine max
actagtataccttaataaataatttaagatactatgatgagagcacggttcccattactgttcctgggacttgttttcctggcttcagtttctgtctcatttggcattgcttactgggaaaaagataaccccaaacacaacaagtgtctccagagttgcaatagcgagagagactcgtacaggaaccaagcatgccacgctcgttgc

SEQ ID NO: 105539 - DNA, 262 bp, Glycine max
tgcaaactctaatcctccgtcaagacaagcctcaactagaggataatgctgttgagactattgcaaaatgctgtcatgaactgcagatcctggacctcagcaaaagtttcaagctaactgatcgttcactctatgagctcgcccttggttgtcgcgatcttacaaaactcaacatcagcgggtgttcagcatttagtgacaatgctctggcttaccttgccagcttctgcagaaaactgaaagttctaaatctttgtggatg

SEQ ID NO: 105540 - DNA, 261 bp, Glycine max
tgaagatcacgccggtccagaagcagacccgggccgggcagaggacccggttcaaggccttcgtcgtcgtcggagacaacaacggccacgtcgggctgggcgtgaagtgcagcaaggaagtggcgacagtattcgttgcgcgattattctggcgaactgtctgttatccccgtgaggagggggtactgggggaacaagatcgggaagccccacaccgtcccgtgcaaggttacggggaagtgcggctccgttaccgttagg

SEQ ID NO: 105541 - DNA, 253 bp, Glycine max
ctcgagcaagaccgagctagctagctagcaagcaagcacagagatggaggcaaagcgaggtcatgccctcatgtgcttggcacgtgtttcactcttcctcagcgctctaaccctatccgctgctcacggaagcaccacggttcaagacatcgcgagaaagttgaaactcggggacaacgagcttctgcgcacggagaagaagttcaaggttttcatggagaattacgggaggagctactccacagaggaggag

SEQ ID NO: 105542 - DNA, 265 bp, Glycine max
agtatgttgagcatcatctcaagtatcccccttctgtcccatcggacaaactaactcatgtgtacactgcaattctgaagcctgataatgaattgcaaatcttgattgatggggaggagaagaaaaaggcaaatttcttgtcttctgaggactttgagcctcctcttataccttccaagacaatccctgatcctgatgataagaaacctgaggactgggacgaaagagccaaaatcccagacccaagtgctgtgaagccagatga

SEQ ID NO: 105543 - DNA, 264 bp, Glycine max
cactgatctccattcccattccatggcttccactgaatcatcccctttcaagaaaattcagattcaaagggatgacactacatttgacgcatatgtggttggaaaagaggatgctcctggaattgttgtgattcaggagtggtggggtgtggattacgaaattaagaaccatgccgtgaagatttctcagcttggtagtgggtttaaagctcttattccagatttatacagaggaaaggttggtctggatgttgctgaagctca

SEQ ID NO: 105544 - DNA, 264 bp, Glycine max
ctgacaacaacgaaaatctcagattaataacactcgccatacccgttaacaagcctggtagatttgagagtttcttcctatctagcactgaagctcaacaatcctacttgcaaggattcagcaggaacattttagaggcctcctacgataccaaattcgaggagataaacaaggttctgtttagtagagaggaagggcagcagcaaggggagcagaggctgcaagagagcgtgattgtgcgaatctcgaaggaacagattcggg

SEQ ID NO: 105545 - DNA, 262 bp, Glycine max
tactcgagccgaatcggcccaggcttggcaagttctttgagatcatcccagagaaaaaccatcagcttcgggacttggatatcttcctcagtattgtggatatgaacgagggagctcttcttctaccacacttcaattcaaaggcgatagtgatactggtaattaatgaaggagatgcaaacattgaacttgttggcctaaaagaacaacaacaggagcagcaacaggtagagcaacctttggaagtgcggaaatatagagc

SEQ ID NO: 105546 - DNA, 272 bp, Glycine max
cgaagatctaccactcaacatttcaagacaaatgttgcaacagaacaagatcttgaaggtcatcagaaagaacttggttaagaagtgccttgagctcttctttgaaattacagtgaacaaggaggattacaacaagttctatgaggctttctccaagaacttgaagctaggtatccatgaggattcacagaacaagggatagattgctgaattgctcaggtaccactccaccaagagtggtgatgaaatgacaagcctcaaggattatgtga

SEQ ID NO: 105547 - DNA, 260 bp, Glycine max
cagatttctcatcaataatggaggttatacaattgaagttgagattcatgatggtccatacaatgtgataaagaattgggactacactcgctttgtggacgctatccataatgggcaaggcaaatgctggactgccaaggtacgtacagaggatgatctgactgaagcaattgcaaaagctactggaccacagtaagattcactatgttttatagaagtttttgtacacaaggatgacaccagcaaagaattgctggaat

SEQ ID NO: 105548 - DNA, 257 bp, Glycine max
agaaagtcttccatagctccccaaaaatgaagagcaccatcttctttgctctctttctcttttgtgccttcaccacctcatacctaccttcagccatcgctgatttcgtgctcgataatgaaggtaaccctcttgaaatcggtggcacatattatatcttgtcagacataacagcatttggtggaataagagcagccccaacgggaaatgaaagatgcactctcactgtggtgcaatctcgcaatgagctcgacaaa

SEQ ID NO: 105549 - DNA, 259 bp, Glycine max
tgaatatgccaaatgctgttctttcaatgtggagatattttgttggagatctcgtctttgaagtttctaagatgacttctccctacattaaatgtacagtctctttcttcatagcatttggaaatttggctgatgacaccatcaattttgaggcttttccccacaagctggtgcattttggagagattcaggacaaagttgtattgaaattttcacaagaggaatttcttacagcttggtcaactcaggtgcgtcctgc

SEQ ID NO: 105550 - DNA, 187 bp, Glycine max
atttgaaattttgatcaaccgcgatcacaggttgcagcaccttaaaaacggcaacaaaagcaatcgttacttgcatttcaagaatctctcaatttcttcctacttctttgtgtacgatttcttaagggacagaaaatcactctctgtgctggccacagacttcgtgaatcattttcttttccacaca

SEQ ID NO: 105551 - DNA, 237 bp, Glycine max
agagaagagagatggatccagacgcgttggcaaaggcattcgtggagcactactacagcaccttcgacaccaacaggaacggcttagcgaatctctaccaggagggttccatgctcactttcgaagggcagaagatccaaggcgcttccaacatcgttgccaagctcacctccctcccttttcagcagtgccagcactccatctccaccgtcgactgccagccctccggcgtcaacg

SEQ ID NO: 105552 - DNA, 258 bp, Glycine max
tctcgagccgattcggctcgacttcaccttcaaccatgaccacagtgccaccacacagtgaccaagtgcacacaacaacataccgctacgaagccggcgtcgtcccgccggctcgttttgaggcgccgcgttacgaagccggcatcaaggcgccctcttccatttaccattccgagagaggtccgacgacctctcaggtcctcgcagttgtcgccggccttccggtcggcggcatcctcctgctcctggtaggactgc

SEQ ID NO: 105553 - DNA, 145 bp, Glycine max
aaacactcatcagtcatcaccatggccaagctagttttttccctttgttttctgcttttcagtggctgctgcttcgctttcagttccagagagcagcctcaggaaaacgagtgccagatccaaaaactcaatgccctcaaaccgg

SEQ ID NO: 105554 - DNA, 197 bp, Glycine max
ctgcattacaggctattggacaatactgcaatcagctacaatctttgaaccttggatggtgtgataatgttggcgatgttggagtgactactttagcatatgggtgtcctgatcttaggatagttgacttgtgtggctgtgtccgtataacagatgacagtgtgattgctttggcgactagatgcccccatctgagg

SEQ ID NO: 105555 - DNA, 165 bp, Glycine max
caactcgtaaggcaaccatgaggggcattctttctgtaaggacagccttggttcaacatcgtagtgagaaattgggccttggtttcaggctatttagcactcagggtgcttccactgctagtaccccacagccgccgccaccacctccaccaccagagaaaaccc

SEQ ID NO: 105556 - DNA, 268 bp, Glycine max
tcctggctcaggatgaacgctggcggcatgccttacacatgcaagtcggacgggaagtggtgtttccagtggcggacgggtgagtaacgcgtaagaacctacccttgggaggggaacaacagctggaaacggctgctaataccccgtaggctgaggagcaaaaggaggaatccgcccgaggaggggctcgcgtctgattagctagttggtgaggcaatagcttaccaaggcgatgatcagtagctggtccgagaggatgatcagccac

SEQ ID NO: 105557 - DNA, 272 bp, Glycine max
atcgagcgattcggctcgagaccaagttcacaatcctcaccatctctcttctctacctgcatcgcccacacgtacagcgcctccaaatggcagcaccagcaagatagctgccgcaagcagctccagggggtgaacctcacgccctgcgagaagcacatcatggagaagatccaaggccgcggcgatgacgatgatgatgatgacgacgacaatcacattctcaggaccatgcggggaagaatcaactacataaggaggaacgaaggaaaagc

SEQ ID NO: 105558 - DNA, 185 bp, Glycine max
ttcctcccaacacattctgttcaccggtggtgccggtttcattggcacccacaccgtcgttcagcttctcaaagctggcttcagcgtttcaataatcgacaatttcgataactccgtcatggaagcagtggaccgcgtccgccaagtggttggccctctgctttctcagaacctccaattcaccc

SEQ ID NO: 105559 - DNA, 191 bp, Glycine max
gcactggtatttaaacaagtctgatgggttcaagattcccatctcatcagctcagcaatggcctgtatgtatcaggtcggcctgaacagccgaaagaaagaactccaacaatgagctcagttgccatgccttacactggtggagacatcaagaaatccggagaattagggaaaatgtttgatatccccatg

SEQ ID NO: 105560 - DNA, 85 bp, Glycine max
attctctccattgtctttgaacactcatcaccatggccaagcttgttctttccctttgtttccttcttttcagtggctgcttcgc

SEQ ID NO: 105561 - DNA, 217 bp, Glycine max
gaattagacaaacatgttgctcatgaaagcctcaaggatcaaattcctgctgttgacaagttgtattctactaaggttaataagtttgcaaaaattatgaaccttagacaaagtgttgttggtgatcttaaacttcttactgatgggaagttgtatgagggtaagcatattcctgtatctaatattagtgcaggggaaaatcatgtagttcaaatac

SEQ ID NO: 105562 - DNA, 213 bp, Glycine max
caaaaatgaagagcaccatcttctttgctctctttctcttttgtgccttcaccacctcatacctaccttcagccatcgctgatatcgtgctcgataatgaaggtaaccctcttgaaaatggtggcacatattatatcttgtcagacataacagcatttggtggaataagagcagccccaacgggaaatgaaagatgccctctcactgtggtgc

SEQ ID NO: 105563 - DNA, 252 bp, Glycine max
caaaatgccaccaatgttgaacaggctttcatggccatggctgctgaaattaaaaacagaatggcaagccagccagtgaacaatgcgaggcctccaacagttcaaattcgaggacagccagtgaaccagaaggctggttgctgctcgacttagagagagacgaagtatttggggtcttagaagttcatgtgtctcagtggcatctaaaactagcttttcacattgctttcatatcaagattgttcgtcatga

SEQ ID NO: 105564 - DNA, 272 bp, Glycine max
tcaagagttcagcaaaaagtacttgcaagctcccaaggatgtgtcgcagcaaatcaaaatggccaacaagaaaatgaagaaggaacaatattcttgtgaccatccacctgcatcatgggattggaggaaaaaaggtgtcatcacccaagtaaagtaccaagggggctgtggaagcggttgggcgttttctgccacgggagccatagaagcagcacatgcaatagcaacaggagaccttgttagcctttctgaacaagaactcgtagactgtg

SEQ ID NO: 105565 - DNA, 115 bp, Glycine max
ccctacgataccaaattcgaggagataaacaaggttctgtttagtagagaggaagggcagcagcaaggggagcagaggctgcaagagagcgtgattgtggaaatctcgaaggaac

SEQ ID NO: 105566 - DNA, 171 bp, Glycine max
tagatttgagagtttcttcctatctagcactgaagctcaacaatcctacttgcaaggattcagcaggaacattttagaggcctcctacgataccaaattcgaggagataaacaaggttctgtttagtagagaggaagggcagcagcaaggggagcagaggctgcaagagag

SEQ ID NO: 105567 - DNA, 94 bp, Glycine max
ccgtattaaagaatttaagatatactatgatgagagcgcggttcccattactgttgctgggagttgttttcctggcatcagtttctgtctcatt

SEQ ID NO: 105568 - DNA, 173 bp, Glycine max
tctctccattgtctttgaacactcatcaccatggccaagcttgttctttccctttgtttccttcttttcagtggctgcttcgctctgagagagcaggcacagcaaaatgagtgccagatccaaaagctgaatgccctcaaaccggataaccgtatagagtcggaaggtgggtt

SEQ ID NO: 105569 - DNA, 203 bp, Glycine max
cacccaagtaaagtaccaagggggctgtggaagcggttgggcgttttctgccacgggagccatagaagcagcacatgcaatagcaacaggagaccttgttagcctttctgaacaagaactcgtagactgtgtggaagaaagcgaaggttgttacaatggatggcactatcaatcgttcgaatgggttttagaacatggtggga

SEQ ID NO: 105570 - DNA, 276 bp, Glycine max
cagaaggcttaccaggtctgtgtatctcacgtggtggagggtgtagatgtcaagcttctggttgtacagaaggggcacagggaagcactatgttctgcaaagcacatggtgggggaaaacgctgtacagcaccagggtgcaccaaaggtgcttgaggggaccacaccactttgcaaaggccatggtggaggaaaatgctgtgcagaccacggtggtggaatttgtactaaaagtgtgcatggaggtaccaacttctgtgtggcacatgggggtgga

SEQ ID NO: 105571 - DNA, 268 bp, Glycine max
gttcaggctcagatggaaacaaatttgtttaaattgtctcttgatgatgttgaaactcctaaaggttccatgttggatcttaaaatttctcaatctaaaattgcacttcccaaaaacacagttggaggaaccatcctgcgtagtgatctattggcaaattttttgacagagggcaattttagagcaagtgttgatttgcagcgcactcatcgtattaaaggaatgattaaaatggtagccacagttggtattcctgagaatacaggta

SEQ ID NO: 105572 - DNA, 265 bp, Glycine max
gcacgagcagagagaggaacaggaatggcctcgcaaggaggaaaaacgcggagaaaagggaagtgaagaggaagatgaggatgaggatgaggaacaagatgaacgtcaattcccattcccaggcctacctcatcagaaggaagagcgaaagcaagaggaagatgaggatgaggagcagcagcgagagagcgaagaaagtgaagattctgagttacgaagacataagaataagaacccttttctcttcggctctaacaggttcgaa

SEQ ID NO: 105573 - DNA, 252 bp, Glycine max
gttcctcactgaccaagccagggcgatgagaaccaaactttctttagctatctttttcttttttcttttagccttattttcaaacctagcctttggcaaatgtaaagaaaccgaggtagaagaagaagaccctgagctcgtaacatgcaaacaccaatgccaacagccacagcaatacactgagggtgacaagcgggtatgcttgcaaagatgtgacaggtatcatcgtatgaagcaagagcgagagaaaca

SEQ ID NO: 105574 - DNA, 156 bp, Glycine max
ataaaattcttccaccaagttatgggtttccttgtgttgcttcttttctccctcttaggtctctcttctagttccagcatatcaactcatcgttccatattggaccttgacctaaccaagtttaccacacagaaacaggtgtcttcactgttccaa

SEQ ID NO: 105575 - DNA, 159 bp, Glycine max
gggattgctaaaggtatagcatatttacatgcatacaaagcaaacaaaccagctcttgttcaccaaagcatctcagctgagaaagtgctcattgatcagcggtacaacccattgctttcagattccggcctgtacaagcttcttaccaatgatgttgtc

SEQ ID NO: 105576 - DNA, 93 bp, Glycine max
gtgagaccaaggtgttcagccctgaggaaatcagtgccatgattctgaccaagatgaaggaaactgcggaagcattccttgggaagaaaatta

SEQ ID NO: 105577 - DNA, 126 bp, Glycine max
ctccattggtccttaaacactcatcagtcatcaccatggccaagctagttttttccctttgttttctgcttttcagtggctgctgcttcgctttcagttccagagagcagcctcagcaaaacgagt

SEQ ID NO: 105578 - DNA, 180 bp, Glycine max
attaataaagatgagtttgaagaacaacatggtggtgctaaaggtgtgtttgttgcttcttttccttgtgggggttacagctgcacgcatggaactgagcttcttcaaaagtgatcagtcatcaagttatgatgatgatgagtattcaaaaccatgctgtgatctctgcatgtgcacacg

SEQ ID NO: 105579 - DNA, 190 bp, Glycine max
ctagtataccttaataaataatttaagatactatgatgagagacacggttcccattactgttgctgggacttgttttcctggcttcagtttctgtctcatttggcattgcttactgggaaaaagagaaccccaaacacaacaagtgtctccagagttgcaatagcgagagagactcgtacaggaaccaag

SEQ ID NO: 105580 - DNA, 264 bp, Glycine max
ctcatcagtcatcaccatggccaagctagttttttccctttgttttctgcttttcagtggctgctgcttcgctttcagttccagagagcagcctcagcaaaacgagtgccagatccaaaaactcaatgccctcaaaccggataaccgtatagagtcagaaggagggctcattgagacatggaaccctaacaacaagccattccagtgtgccggtgttgcactctctcgctgcaccctcaaccgcaacgcccttcgtagaccttc

SEQ ID NO: 105581 - DNA, 265 bp, Glycine max
cgttaacaagcctggtagatttgagagtttcttcctatctagcactgaagctcaacaatcctacttgcaaggattcagcaggaacattttagaggcctcctacgataccaaattcgaggagataaacaaggttctgtttagtagagaggaagggcagcagcaaggggagcagaggctgcaagagagcgtgattgtggaaatctcgaaggaacagattcgggcactgagcaaacgtgccaaatctagttcaaggaaaaccatttct

SEQ ID NO: 105582 - DNA, 259 bp, Glycine max
cctggtcttactgtgtggtgactgtgctctgctctcatctcattcatattcatttcaatggcaactcaaggtcaagtcattacctgcaaagctgcggtggcctgggaacccaacaagcccttaaccgtccaagacgttcaggttgctccgcctcaggccggcgaggtccgtgtccaaatcctcttcaccgctctctgccacaccgatgcttacacttggggcggcaaggatcccgaagtctcttcccctgtattctcgg

SEQ ID NO: 105583 - DNA, 112 bp, Glycine max
cttcttttcagtggctgcttcgctctgagagagcaggcacagcaaaatgagtgccagatccaaaagctgaatgccctcaaaccggataaccgtatagagtcggaaggtgggt

SEQ ID NO: 105584 - DNA, 103 bp, Glycine max
taggagcacgaatggcatcgcaaggaggaaaaacacggaggaaagggaagtgaagaggaacaagatgaacgtgaacacccacgcccacaccaacctcatcaaa

SEQ ID NO: 105585 - DNA, 103 bp, Glycine max
cagagcacgagcagaaggaggaacacgaatggcatcgcaaggtggaaaaacacggaggaaagggcagtgaagaggaacaagatgaacgtgaacacccacgccc

SEQ ID NO: 105586 - DNA, 114 bp, Glycine max
cctagtataccttaatagataatttacgatactatgatgagagcacggttcccattactgttgatgggacttgtattcctggcttcagtttccgtctcatttggcattgcttac

SEQ ID NO: 105587 - DNA, 214 bp, Glycine max
gcagcaacaggaagagcaacctttggaagtgcggaaatatagagctgaattgtctgaacaagatatatttgtaatcccagcaggttatccagttgtggtcaacgctacctcagatctgaatttctttgcttttggtatcaatgccgagaacaaccagaggaacttccttgcaggttcgaaagacaatgtgataagccagatacctagtcaagtg

SEQ ID NO: 105588 - DNA, 267 bp, Glycine max
tgttgttgccgtttctattattgacaccaacagcttggagaaccagctcgaccagatgcctaggagattctatcttgctgggaaccaagagcaagagtttctaaaatatcagcagcagcagcaaggaggttcccaaagccagaaaggaaagcaacaagaagaagaaaacgaaggaagcaacatattgagtggcttcgcccctgaattcttgaaagaagcgttcggcgtgaacatgcagatagtgagaaacctacaaggtgagaacga

SEQ ID NO: 105589 - DNA, 260 bp, Glycine max
attctctccattggtccttaaacactcatcagtcatcaccatggccaagctagttttttccctttgttttctgcttttcagtggctgctgcttcgctttcagttccagagagcagcctcagcaaaacgagtgccagatccaaaaactcaatgccctcaaaccggataaccgtatagagtcagaaggagggctcattgagacatggaaccctaacaacaagccattccagtgtgccggtgttgcctctctcgctgcacctc

SEQ ID NO: 105590 - DNA, 266 bp, Glycine max
ctccgcagcagccacacttcttcgccgtttcagctgaagagccatccgcaggtaagcaatggttaagcataataatgttatccccaatgggcacttccggaaacactggcaaaactatgtgaagacttggtttaatcaaccagcccgaaagaccagaagacggttggctcggcagaagaaggctgtcaagattttccccaggcctactgcctggatctctcaggcctattgttcatggccagactctgaaatacaacatgaaagtc

SEQ ID NO: 105591 - DNA, 264 bp, Glycine max
gtttcagtttcggatccctttcttctctcacaccaatttccaggatttgaaacatggcagattcaaaatcaggattgaggaaaccagtgttcatcaaggttgatcagcttcgcccggggacaagtgggcacactttaactgtgaaggtagtcaatgctaagatggtgatgcagagaggtcgttctgatggtcctcaatcccggcaaatgcaaattgctgagtgcttggttggtgatgagactggaatgatcatattcactgcca

SEQ ID NO: 105592 - DNA, 263 bp, Glycine max
caataattccttcacttgcagaacttagttctctgttgcatcatcatcatcttcattagtgttagccctaaacttcaccttcaaccatgaccacagtgccaccacacagtgtccaagtgcacacaacaacacaccgctacgaagccggcgtcgtcccgccggctcgttttgaggcgccgcgttacgaagccggcatcaaggcgccctcttccatttaccattccgagagaggtccgacgacctctcaggttctcgcagttgtc

SEQ ID NO: 105593 - DNA, 144 bp, Glycine max
tgatatgttcaactctttccctcaaactgatgcagttctactaaagtgggttttacataattggaatgacgaaaattgcataaagatcctgaaaaagtgtaaagattctatttcaagcaaaggcaacaaaggaaaagtgattat

SEQ ID NO: 105594 - DNA, 228 bp, Glycine max
tccaaacccaacacccttcttctcccccaccatgctgacgctgattacctcatcgttatccttaacgggactgccattcttaccttggtgaacaacgacgaccgagactcttacaaccttcaatctggcgatgccctaagagtccctgcaggaaccacatactatgtggttaaccctgacaacgacgagaatctcagaatgataacactcgccatacccgttaacaaa

SEQ ID NO: 105595 - DNA, 122 bp, Glycine max
gaaactggtcatgtgctcaaagttccctttcgtcgagttcacctgtctggagaagaaggacactttgatacctatgacactagcggtccccaaaatgtaaacccaaggactggactcccaca

SEQ ID NO: 105596 - DNA, 124 bp, Glycine max
caccgtttttgatgctaagcgtttgattggaaggcgtttttccgatgcatcagtacaaggtgacatgaaattgtggccgttcaaggtgattcctggccctgctgagaaagctatgattgtggtg

SEQ ID NO: 105597 - DNA, 252 bp, Glycine max
aatatgtcaagccttactttagtggttctaaattgaaaagctttctagctggtcataatatcaccattactgatggtattgacaaaactagtgcaactttgcaatttagaaagttagcagattgtgattttctcaagagaaactttaagcagatgtctaatgttttatgggtggctcctgaggacaaggcgagtttatggtcacaacttcattatgtttcgtgcaataatctggaaatgcaagaagcttatc

SEQ ID NO: 105598 - DNA, 259 bp, Glycine max
gagctgcaagagggaggggtgctgatcgttccacaaaactttgcggtggctgcaaaatcccagagcgataactttgagtatgtgtcattcaagaccaatgatagaccctcgatcggaaaccttgcaggggcaaactcattgttgaacgcattgccagaggaagtgattcagcacacttttaacctaaagagccagcaggccaggcaggtgaagaacaacaaccctttcagcttcctggttccacctcaggagtctcaga

SEQ ID NO: 105599 - DNA, 256 bp, Glycine max
ctagtataccttaataaataatttaagatactatgatgagagcacggttcccattactgttgctgggacttgttttcctggcttcagtttctgtctcatttggcattgcttactgggaaaaagagaaccccaaacacaacaagtgtctccagagttgcaatatcgagagagactcgtacaggaaccaagcatgccacgctcgttgcaacctccttaaggtggagaaagaagaatgtgaagaaggtgaaattccacg

SEQ ID NO: 105600 - DNA, 259 bp, Glycine max
agcaaatattgcctattccgcaatatggcggaaaatgcttcgattgagctgaacaagtttgtgttcttttgtttgttggtgctaatacaagtggcagtttctgaaatcatttttgaagagcgttttgatgatggatggcgaggtaggtgggtgaagtcagactggaaaagcagtgaaggcaaagcaggttcattcaagcacacagctggaaaatgggccagtgatccagatgataaaggtattcaaacatccagtgatg

SEQ ID NO: 105601 - DNA, 98 bp, Glycine max
ttaattattaacacttccttagttcaatatggggaagcccttcactctctctctttcttccctttgcttgctactcttgtcgagtgcatgctttgcta

SEQ ID NO: 105602 - DNA, 134 bp, Glycine max
gcatggtatagttagtaactgggatgacatggaaaagatctggcatcacacattttacaatgaattgcgtgttgctcctgaggagcacccagtgcttctgactgaggctccactcaacccaaaggccaacagag

SEQ ID NO: 105603 - DNA, 166 bp, Glycine max
ctcgagcgcgaggacgaggacgaagaagaagatcaacctcgtcctgatcaccctccacagcgaccaagcaggcccgaacaacaagaaccacgtggaagaggatgtcagactagaaatggggttgaggaaaatatttgcaccatgaagcttcacgagaacattgctc

SEQ ID NO: 105604 - DNA, 265 bp, Glycine max
caggaatgtgttcccaggacctattgtgttttaaatccacaaaatccttttgtgttaaataggtggatgggaaaactgactttcccccagggcacttcccgaagtgttaagagaatgcctctttctatagggggaggagctggtgcaaagaatgctattctcatgaatatgccaaatgctgttctttcaatgtggagatattttgttggagatctcgtctttgaagtttctaagatgacttctccctacattaaatgtacagtct

SEQ ID NO: 105605 - DNA, 255 bp, Glycine max
attggtccttaaacactcatcagtcatcaccatggccaagctagttttttccctttgttttctgcttttcagtggctgctgcttcgctttcagttccagagagcagcctcagcaaaacgagtgccagatccaaaaactcaatgccctcaaaccggataaccgtatagagtcagaaggagggctcattgagacatggaaccctaacaacaagccattccagtgtgccggtgttgccctctctcgctgcaccctcaa

SEQ ID NO: 105606 - DNA, 253 bp, Glycine max
cctgccagtagtcatatgcttgtctcaaagattaagccatgcatgtgtaagtatgaactaattcagactgtgaaactgcgaatggctcattaaatcagttatagtttgtttgatggtatctactactcggataaccgtagtaattctagagctaatacgtgcaacaaaccccgacttctggaagggatgcatttattagataaaaggtcaacacaggctctgcctgttgctttgatgattcatgataactcgt

SEQ ID NO: 105607 - DNA, 254 bp, Glycine max
ctttctcggttcagtgtctctctttgacggtggtgctgtcagcattgacctcagcttgagcagtaaaacatcatcagcactactacggtaccatggctgtgctgcaatctttcgtttcggtccacccagattctcacttccccatacagaacctcgcttacggagtcttcaagccccaatccgcttcgcctcctcgtcccggcgtcgccatcggcgattcgtcctcgacctctccgaaatatcttccgctggtc

SEQ ID NO: 105608 - DNA, 227 bp, Glycine max
ggtaaatacggtgagataacggattccgtcatcatgaaggaccggaagaccggccagccgcgtggtttcggcttcataacttacgctgatccctccgtggttgatacagtgattgaggacactcacattatcaatggcaagcaggtggagattaagcggacgataccgaggggggctgctggctcgaactcaaaggacttccgaacgaagaagatttttgtgggtgg

SEQ ID NO: 105609 - DNA, 248 bp, Glycine max
ctccattgtctttgaacactcatcaccatggccaagcttgttctttccctttgtgtccttcttttcagtggctgcttcgctctgagagagcaggcacagcaaaatgagtgccagatccaaaagctgaatgccctcaaaccggataaccgtatagagtcggaaggtgggttcattgagacctggaaccctaacaacaagccattccagtgtgccggtgctgccctctctcgctgcacccttaaccgcaa

SEQ ID NO: 105610 - DNA, 216 bp, Glycine max
attttgttggagatctcgtctttgaagtttctaagatgacttctccctacattaaatgtacagtctctttcttcatagcatttggaaatttggctgatgacaccatcaattttgaggcttttccccacaagctggtgcagtttggagagattcaggaaaaagttgtattgaaattttcacaagaggaatttcttacagcttggtcaactcaggtgc

SEQ ID NO: 105611 - DNA, 253 bp, Glycine max
tgaaatggttggagctaaatctcgtaatatctcttatttaaaagggaaagtagcttcttggattggaattcctacctcggttgccataccatttggagttttcgaacatgttctttctgataaaccaaaccaggcagtggctgagagggtcaataatttgaaaaagaagttaattgagggagacttcagtgttctcaaggagattcgtgaaacagttctacaattgaatgcaccatcccatttggtagaggag

SEQ ID NO: 105612 - DNA, 248 bp, Glycine max
attttctttttctcttctcactgcatcgcttcaggttcttctgaaaagatgtctcgcgtgtatgttggtaacttggattcacgagtcactgagagagatctcgaagacgaattccgcgttttcggagttattcggagtgtttgggttgcacgtagaccacctggttatgcttttattgactttgatgaccgcagagacgcacaggatgctatccgtgaattggatggcaagaatggttggagggttga

SEQ ID NO: 105613 - DNA, 251 bp, Glycine max
atagctgtagcggcgacactaagatcggagaaagaatggcgaaaacgacgtcgttgctgctctttacactgctcctcttcggaaccctagctctcatccaggcgaagaaatcgaaggaggatttgaaggaggtgacccacaaggtttactttgatggtgagattaatggaaaagaagcaggtcgtattgtaatgggtctttatgggaaggctgttccaaaaactgcagaaaacttccgagcactttgcaca

SEQ ID NO: 105614 - DNA, 252 bp, Glycine max
gggattatggtgaactagatggggatagttggactgatcaagaaactttgctgcttcttgaagcaatggagatttacaatgagaattggaatgaaattgctgagcatgttggtaccaagtcaaaagcacaatgcattcttcattttctccgtctacccatggaagatggaaaattggaaaatattaacgttccaagcatgtctttgtcatccaatgcaataaatagagatcatagtggaagactgcattgtt

SEQ ID NO: 105615 - DNA, 254 bp, Glycine max
agatcacatagcagaatggcttctactcaatgtttcttgcaccaccatgctcttaccacccctgccagatccccatcacaacgcatcatggttagcaccaagcctaaccagcttgtttgcaaggcacagaagcaagaggatattgatgtcagcccaatctctcgccggttagctctaaccgtgctcattggtgctgctgctgttggctccaaagtccaacctgctgatgcagcttatggggaagctgccaatgt

SEQ ID NO: 105616 - DNA, 246 bp, Glycine max
aaaccctcttttttctctctcttgcaaaacctaattttcatttcttccctcaaatttcaaaatgcgtgagatccttcacatccagggtggccaatgcggcaaccagatcggcgccaagttctgggaggtggtttgcgcggacacgggatcgaccctaccggaaggtacggtggggactcggagttgcagctcgagaggatcaatgtctactacaacgaggccagttgcggtcggttcgtgccgcgc

SEQ ID NO: 105617 - DNA, 242 bp, Glycine max
gaaggaggaagacgaagatgagcaaccacgtccaatcccattcgagcgcccacaacctcgtcaagaagaagagcacgagcagagagaggaacaggaatggcctcgcaaggaggaaaaacgcggagaaaagggaagtgaagaggaagatgaggatgaggatgaggaacaagatgaacgtcaattcccattcccacgcccacctcatcagaaggaagagcgaaacaaacaggaggatgaggatg

SEQ ID NO: 105618 - DNA, 248 bp, Glycine max
cttattaacactttccttagttcaatatggggaagcccttcttcactctctctctttcttccctttgcttgctactcttgtcgagtgcatgctttgctattacctccagcaagttcaacgagtgccaactcaacaacctcaacgcgttggaacccgaccaccgcgttgagtccgaaggtggtcttattgaaacatggaactctcaacaccctgagctgcaatgcgccggtgtcactgtttccaaacgc

SEQ ID NO: 105619 - DNA, 245 bp, Glycine max
atttgatcgcagtgcctactggtgttgcatggtggatgtacaacaatgaagacactcctgttgttgccgtttctattattgacaccaacagcttggagaaccagctcgaccagatgcctaggagattctatcttgctgggaaccaagagcaagagtttctaaaatatcagcaagagcaaggaggtcatcaaagccagaaaggaaagcatcagcaagaagaagaaaacgaaggaggcagcatattg

SEQ ID NO: 105620 - DNA, 246 bp, Glycine max
aaacagtatccatccacagaacccgtggaagaaaaactcacccaactccacttctatttccataacaacataacgggggaacacccaactgctatgaaaactgttttgcctcctaaggggtccattcatggttttggggctacttacatgatggatgaccctctaactgaaggaccaagtccaacttcaaagcttgtgggaagatctcagggaatatacgctttggcttcacaacatgagcctggg

SEQ ID NO: 105621 - DNA, 250 bp, Glycine max
cccaaatcaaaacctaaattcccaccttcaactttctcccttaaatcgaccaccaccactgtcaagcccattcatttatattttattcgtatatatacatacagagagtgagtgagagagagagtgggaagaatggattcggatcaaggcaagcttttcatcggtgggatttcatgggatacgacggaggacaagctcaaggagcatttcggtaactacggcgacgttttgagcacttccgtcatgcggg

SEQ ID NO: 105622 - DNA, 203 bp, Glycine max
tgacagtggcatcgagcatccgacgtctggctgatgccatggagcaaagcaaatgctcatttgatgcaagagagctattacatgctgtgatggagatagatgggatggaagagggtaaacagatgtatgcattcgaatatttaaatgctgatcctgtcaaagccagagccttcctcacctagagtgctaggatgagaagacat

SEQ ID NO: 105623 - DNA, 235 bp, Glycine max
tgacaatgtgaaggcaaagatccaagacaaggagggtatcccaccagaccaacagaggctcatttttgctggcaaacagcttgaagatggccgaaccttggctgattacaacatccaaaaagaatctaccctccacttggtgctccgtctgcgcggtggtatgcaaatctgtgtgaagacccttactggaaacccttacattggaggtatagagctctcagacacattgacatgt

SEQ ID NO: 105624 - DNA, 241 bp, Glycine max
attctctccattggtccttaaacactcatcagtcatcaccatggccaagctagttttttccctttgttttctgcttttcagtggctgctgcttcgctttcagttccagagagcagcctcagcaaaacgagtgccagatccaaaaactcaatgccctcaaaccggataaccgtatagagtcagaaggagggctcattgggacatggaaccctaacaacaagccattccagtgtgccggtgtt

SEQ ID NO: 105625 - DNA, 233 bp, Glycine max
ctcgagccgattcggctcgaggaggatgttatacagactggtgtggtttctcgatcggtgggactacgttcaatcgaaagcagcttccgattgaacgtagtccaccgattgaggacgttatacagactggtgtggtttctcgatttgttgagtttctcatgagggaagactttccgcagttgcagtttgaggcagcttgggctttgacaaatatagcttctggaacgtctgaa

SEQ ID NO: 105626 - DNA, 241 bp, Glycine max
tatggccacgttcgcgtcctccagaggttcaacaaacgctcccaacagcttgagaatctccgagactaccgcattttggagttcaactccaaacccaacacccttcttctcccccaccatgctgacgctgattacctcacgttatccttaacgggactgcaatccttaccttggtgaccaaggaggacggggatcctaaaaactttaatcttggcgatgccctaagagtcctgcaggaacc

SEQ ID NO: 105627 - DNA, 249 bp, Glycine max
ctcgagccgctcgagccgcgccatacccgttaacaagcctggtagatttgagagtttcttactatctagagctgaagctcaacaatcctacttgcaaggattcagcaggaacattttagaggcctcctacgataccaaattcgaggagataaacaaggttctgtttagtagagaggaagggcagcagcaaggggagcagaggctgcaagagagcgtgattgtggaaatctcgaaggaacagattcgggc

SEQ ID NO: 105628 - DNA, 247 bp, Glycine max
tgctggtagcatcacaaccgccaccagccttgacttcccagccctctggcttctcaaactcagtgcccagtatggatcactccgcaagagtgctatgttcgtgccacactacaccctgaacgcgaacagcataatatacgcattgaatgggcgggcattggtacaagtggtgaattgcaatggtgagagagtgtttgatggagagctgcaagagggaggggtgctgatcgttccacaaaactttgcg

SEQ ID NO: 105629 - DNA, 243 bp, Glycine max
aactgccccaagattcatcaagtgcgtgaccgttggtgatggagctgtagggaagacctgcatgctcatttgctataccagcaacaaattccccacggactatatccccactgtgtttgataatttcagtgcaaatgtggttgttgaaggcataactgtcaacttaggcctttgggatacagctgggcaagaggattacaacaggctgaggcccttgagctacaggggggcagatgtctttgt

SEQ ID NO: 105630 - DNA, 246 bp, Glycine max
gaaggaggaagacgaagatgagcaaccacgtccaatcccattcccacgcccacaacctcgtcaagaagaagagcacgagcagagagaggaacaggaatggcctcgcaaggaggaaaaacgcggagaaaagggaagtgaagaggaagatgaggatgaggatgaggaacaagatgaacgtcaattcccattcccacgcccacctcatcagaaggaagagcgaaagcaagaggaagatgaggatgagga

SEQ ID NO: 105631 - DNA, 251 bp, Glycine max
tgaaatggttggagctaaatctcgtaatatctcttatttaaaagggaaagtagcttcttggattggaattcctacctcggttgccataccatttggagttttcgaacatgttctttctgataaaccaaaccaggcagtggctgagagggtcaataatttgaaaaagaagttaattgagggagacttcagtgttctcaaggagattcgtgaaacagttctacaattgaatgcaccatcccatttggtagagg

SEQ ID NO: 105632 - DNA, 252 bp, Glycine max
attcctgggaattgatcttcccaatagaggtatgtggtcctaataatggttttgaaatgtggagttctgagtgggcaaatcaaacttcatggcatttgagtttccttattgacaatcccaaacagtctacagtttttgatattctcttgggaatttctcaagattttgaaattgctggtaatactcttatgccagctttttctgttccacaggctactgccagatcttctgaaaatgcggaatcctctgcat

SEQ ID NO: 105633 - DNA, 245 bp, Glycine max
ctagttttttatattgctgtcgtatcttctctctgctacgtcgttttttgttttgcgttcgttgccgaagtcgttttaatttcttattgtcgctgtgtattcttcgttgcttcatttcgctttgcgccttctgcagttcaacatcgcgaatcccaccactggatgccagaagaagctcgagatcgacgacgatctgaaactgcgagcattttgggacaagaggatctcacaggaggtcatcggag

SEQ ID NO: 105634 - DNA, 243 bp, Glycine max
ggaaggcatagtacacaggacagttgaagtgaatggcataaaaatgcatgttgctgagaaaggtgaaggtcccgtggtcttgttcctccacggcttcccggagctctggtactcctggcgccaccagattctggctctcagcaacctcggctaccgcgccgtggctccagatctccgcggctacggagacaccgaggcaccagcttcaatcagcagctacaccatcctccacttagtttctga

SEQ ID NO: 105635 - DNA, 243 bp, Glycine max
tggatactgttactggccaatattatcctgagtgggctccaattaattgtcgagttcatcgacaaccaattcacatcactgaaggaaattatgtcagaaagcaagatgtcagcattgaatatgatgcatgtacaattccaaatgattgtggttcattggttgttgccaaggttggaaatcacaaacaaattgttggtttccatgttgctggaagcaaaggaagactgggatatgcttcattga

SEQ ID NO: 105636 - DNA, 240 bp, Glycine max
cacaacttcagaatctccgagactaccgcattttggagttcaactccaaacccaacaccctccttctccccaaccatgctgacgctgattacctcatcgttatccttaacgggactgccattctttccttggtgaacaacgacgacagagactcctacagacttcaatctggtgatgccctgagagtcccctcaggaaccacatactatgtggtcaaccctgacaacaacgaaaatctca

SEQ ID NO: 105637 - DNA, 242 bp, Glycine max
ctcgagccgctctcatcactacctctgcatttttctctcgctctctgccttccatcaccctacgccatctcccttcccaagatagtagaagatggcagacgctgaggatattcaacctcttgtttgtgacaatggaacaggaatggttaaggctggttttgctggagatgatgccccacgtgctgtgtttcccagcattgtaggtcgtcctcgtcacactggtgtgatggttggcatgggcc

SEQ ID NO: 105638 - DNA, 246 bp, Glycine max
cgctacctgaggaagattattgggaagctgtttggccaaacactcccattcccactgcactgcgagagcttctaaagcctctccctgcaggtgttgaaatcgatgaactccctaagcaaattgatgatacacagtacccaaaaacattcttctataaagaagaccttcatccaggcaaaacaatgaatgtacaattcaccaagcgtccctatgcacaaccttatggtgtatatacatggttaacgg

SEQ ID NO: 105639 - DNA, 254 bp, Glycine max
caaataataccaaaaaacaccatgatgcttggggagacccaccgcccaaatccaaccgtacacgtgccaccgtgggcgccggagatcttctcaccatacaccggcaatgccgattactctccgtactccatgcaagaagcacttagtgcacttcagcactacgaatccaccgatgctgagtcagactcggaggttccgtctcgggaaccggaagtcccggtggacgcttactcctgcgaccatttccgcatgtt

SEQ ID NO: 105640 - DNA, 253 bp, Glycine max
gcaagcagagcttttgttaattttctattgaccttctcggtggaggaattttagtggacaaaactggagattggatcacacttatacaaaattctccaattagtaacttgttgagagttgctgcttggaagaaaggctgtttaatggttaagattgtgatgtctggaaatgcagcagtcaaaaggagtgattgggcctcattggtacaagtctttttaacaaacagcaacagtacagagcattttgatgcttg

SEQ ID NO: 105641 - DNA, 259 bp, Glycine max
ctccgcagcagccacacttcttcgccgtttcagctgaagagccatccgcaggtaagcaatggttaagcataataatgttatccccaatgggcacttccggaaacactggcaaaactatgtgaagacttggtttaatcaaccagcccgaaagaccagaagacggttggctcggcagaagaaggctgtcaagattttccccaggcctactgctggatctctcaggcctattgttcatggccagactctgaaatacaacatg

SEQ ID NO: 105642 - DNA, 265 bp, Glycine max
tccaaacccaacacccttcttctcccccaccatgctgacgctgattacctcatcgttatccttaacgggactgccattcttaccttggtgaacaacgacgaccgagactcttacaaccttcaatctggcgatgccctaagagtccctgcaggaaccacatactatgtggttaaccctgacaacgacgagaatctcagaatgataacactcgccatacccgttaacaaacccggtagatttgagagtttcttcctatctagcactc

SEQ ID NO: 105643 - DNA, 253 bp, Glycine max
aacacccggagagggaacctcagcaacccggtgagaaggaggaagacgaagatgagcaaccacgtccaatcccattcccacgcccacaacctcgtcaagaagaagagcacgagcagagagaggaacaggaatggcctcgcaaggaggaaaaacgcggagaaaagggaagtgaagaggaagatgaggatgaggatgaggaacaagatgaacgtcaattcccattcccacgcccacctcatcagaaggaagagcg

SEQ ID NO: 105644 - DNA, 137 bp, Glycine max
cggctcgagagtggacaaaatcggaaccacattcctgggaattgatcttcccaatagaggtatgtggtcctaataatggttttgaaatgtggagttctgagtgggcaaatcaaacttcatggcatttgagtttcctt

SEQ ID NO: 105645 - DNA, 245 bp, Glycine max
acgctttcttgtgttaatggttctcatttggttgtatttggaggctgtggaaggcagggcttgctcaatgatgtgtttgtcctggacctggatgcaaagcctccaacttggcgtgaaatttctggattggcacctccacttcccagatcatggcacagctcctgtactcttgatggtactaagttgatagtttctgggggatgtgcagactctggagttctcttgagtgacactttcctccttga

SEQ ID NO: 105646 - DNA, 260 bp, Glycine max
aaatgaccaagttcacaatcctcctcatctctcttctcttctgcatcgcccacacttgcagcgcctccaaatggcagccccagcaagctagctgccgcaagcagctccagggggtgaacctcacgccctgcgagaagcacatcatggagaagatccaaggccgcggcgatgacgatgatgctgatgacgacgacaatcacattctcaggaccatgcggggaagaatcaactacataaggaggaacgaaggaaaagacgaa

SEQ ID NO: 105647 - DNA, 137 bp, Glycine max
gtacaagggaccaactctccttgaggctcttgaccaaatcaatgagcccaagaggccctccgacaagcctctaaggcttccattgcaggatgtctacaagattggtggtattggtactgtgccagtgggacgtgtag

SEQ ID NO: 105648 - DNA, 244 bp, Glycine max
ggagccacaagaacaatcaaacagaagaggctcaaggtcgcagaagcagcagctacaggacagtcaccagaagattcgtcacttcaatgaaggagacgtactcgtgattcctcctggtgttccttactggacctataacactggcgatgaaccagttgttgccatcagtcttcttgacacctctaacttcaataaccagcttgatcaaacccctagggtattttaccttgctgggaacccagat

SEQ ID NO: 105649 - DNA, 244 bp, Glycine max
tggggttctactctgcttaccttgttgcagagaaggtcattgttaccaccaagcacaatgatgatgaacagtacatttgggagtctcaggctggtggctcttacactgttactagggacactgatggcgagcaactcggaaggggaaccaagatcaccctcttcctcaaggaagatcagttggagtacttggaggagaggagaatcaaggatcttgtgaagaagcactctgaattcattagtta

SEQ ID NO: 105650 - DNA, 242 bp, Glycine max
gttgatttgcagcgcactcatcgtattaaaggaatgattaaaatggtggccacagttggtattcctgagaatacaggtatcgcattggcctgtgctatgaatagttcttttagggggcgtgccagttctgatatttacaccatctgctctcaagactgtgaattatggaatcctgcttgcacaaaagcaatgactatgtcatttaatccaaacccgtgttctgatgcatggagtttggaatt

SEQ ID NO: 105651 - DNA, 133 bp, Glycine max
gaaagtcttccatagccccccaaaaatgaagagcaccatcttctttgctctctttctcttttgtgccttcaccacctcatacctaccttcagccatcgctgatttcgtgctcgataatgaaggtaaccctctt

SEQ ID NO: 105652 - DNA, 255 bp, Glycine max
gggaattggcctcatacacaccgagctcgtatctgggatcccagctattttctcccactttgttaccaatctccctgccttccaccaagttgttatcttcctttgcattaaatcagtccaagtgccacatgttagacctgaagaaaggttcttggtgggaagagttggcccaaaggagtatagactttaccggtgcatagcgcggtatggctaccatgacattcacaaggatgacattgagtttgagagggatct

SEQ ID NO: 105653 - DNA, 256 bp, Glycine max
ctctccattggtccttaaacactcatcagtcatcaccatggccaagctagttttttccctttgttttctgcttttcagtggctgctgcttcgctttcagttccagagagcagcctcagcaaaacgagtgccagatccaaaaactcaatgccctcaaaccggataaccgtatagagtcagaaggagggctcattgagacatggaaccctaacaacaagccattccagtgtgccggtgttgccctctctcgctgcacc

SEQ ID NO: 105654 - DNA, 176 bp, Glycine max
ggttgccgcaccttaaaaccggaaacaaaagcaatcgttacttgatttcaagaatttctcaatttcttcctacttctttgtgtacgatttcttaagggaaagaaaatcactctctgtgctggccacagacttcgtgaatcattttcttttccactcttagtttatttgctgaacac

SEQ ID NO: 105655 - DNA, 254 bp, Glycine max
tcttattgaaacatggaactctcaacaccctgagctgcaatgcgccggtgtcactgtttccaaacgcaccctcaaccgcaacggcctccacttgccatcttactcaccttatccccaaatgatcattgtcgttcaagggaagggagcaattggatttgcatttccgggatgtcctgagacgtttgagaagccacaacagcaatcaagcagaagaggctcaaggtcgcagcagcaattacaagacagtcaccaga

SEQ ID NO: 105656 - DNA, 245 bp, Glycine max
ggctccaaagaaaggtgcgaaaggtggagttgtagcagcaaagaagaaggttcaggagaaggtaacgaaccctttgttcgagaagcgtccgaagcagttcgggatcggaggcgcgctgccgccgaagcgggacctgacgcgcttcgtgaagtggccgaagaacgtccaaatccaacgcaagaagcgcatcctcaagcagaggctcaaggtccctccggctctcaaccagttcaccaaaaccctcg

SEQ ID NO: 105657 - DNA, 146 bp, Glycine max
gccccccaaaaatgaagagcaccatcttctttgctctctttctcttttgtgccttcaccacctcatacctaccttcagccatcgctgatttcgtgctcgataatgaaggtaaccctcttgaaaatggtggcacatattatatcttg

SEQ ID NO: 105658 - DNA, 252 bp, Glycine max
gtagtcatatgcttgtctcaaagattaagccatgcatgtgtaagtatgaactaattcagactgtgaaactgcgaatggctcattaaatcagttatagtttgtttgatggtatctactactcggataaccgtagtaattctagagctaatacgtgcaacaaaccccgacttctggaagggatgcatttattagataaaaggtcaacacaggctctgcctgttgctttgatgattcatgataactcgtcggatc

SEQ ID NO: 105659 - DNA, 253 bp, Glycine max
gctgttctttcaatgtggagatattttgttggagatctcgtctttgaagtttctaagatgacttctccctacattaaatgtacagtctctttcttcatagcatttggaaatttggctgatgacaccatcaattttgaggcttttccccacaagctggtgcaatttggagagattcaggaaaaagttgtgttgaaattttcacaagaggaatttcttacagcttggtcaactcaggtgcgtcccgcaacgactc

SEQ ID NO: 105660 - DNA, 133 bp, Glycine max
gaagggggggaaatgatactacaagccactaggcatgggtctagcaaaggaaacaataatgggaggtggaggccgtgtggccaaagttgaaattcagcagaagaagcctctctcaagggttccaaacacaaag

SEQ ID NO: 105661 - DNA, 134 bp, Glycine max
atcctagtataccttaataaataatttaagatactatgatgagagcacggttcccattactgttgctgggacttgttttcctggcttcagtttctgtctcatttggcattgcttactgggaaaaagagaacccc

SEQ ID NO: 105662 - DNA, 136 bp, Glycine max
attgggaaaagcagaaccccagtcacaacaagtgcctccgaagttgcaatagcgagaaagactcctacaggaaccaagcatgccacgctcgttgcaacctccttaaggtggaggaagaagaagaatgcgaagaagg

SEQ ID NO: 105663 - DNA, 144 bp, Glycine max
acagacttcaatctggtgatgccctgagagtcccctcaggaaccacatactatgtggtcaaccctgacaacaacgaaaatctcagattaataacactcgccatacccgttaacaagcccggtagatttgagagtttcttcctat

SEQ ID NO: 105664 - DNA, 174 bp, Glycine max
gagagaagcgtcttaataaacgctcttctctgaaaaacctgatttcttctcttcttctcttctctttcgtttcgatcttcgatctctgaaaatgagagagtgcatttcaatccacatcggtcaggccggtattcaggtcggaaacgcctgctgggagctctactgcctcgaaca

SEQ ID NO: 105665 - DNA, 153 bp, Glycine max
ctcgagccgctccattggtccttaaacactcatcagtcatcaccatggccaagctagtttagtccctttgttttctgcttttcagtggctgctgcttcgctttcagttccagagagcagcctcagcaaaacgagtgccagatccaaaaactca

SEQ ID NO: 105666 - DNA, 248 bp, Glycine max
actatgtggtcaaccctgacaacaacgaaaatctcagattaataacactcgccatacccgttaacaagcctggtagatttgagagtttcttcctatctagcactgaagctcaacaatcctacttgcaaggattcagcaggaacattttagaggcctcctacgataccaaattcgaggagataaacaaggttctgtttagtagagaggaagggcagcagcaaggggagcagaggctgcaagagagcgtg

SEQ ID NO: 105667 - DNA, 253 bp, Glycine max
cttcaattcaaaggccatagtggtactagtgattaatgaaggagaagcaaacattgaacttgttggcattaaagaacaacaacagaggcagcaacaggaagagcaacctttggaagtgcggaaatatacgtactgaattgtctgaacaagatatatttgtaatcccagcaggttatccagttgtggtcaacgctacctcagatctgaatttctttgcttttggtatcaatgccgagaacaaccagaggaactt

SEQ ID NO: 105668 - DNA, 141 bp, Glycine max
ccgagaacaaccagaggaacttccttgcaggttcgaaagacaatgtgataagccagatacctagtcaagtgcaggagcttgcgttccctgggtctgcaaaagatattgagaacctaataaagagccaaagtgagtcctact

SEQ ID NO: 105669 - DNA, 173 bp, Glycine max
cttaattattaacacttccttagttcaatatggggaagcccttcactctctctctttcttccctttgcttgctactcttgtcgagtgcatgctttgctattagctccagcaagctcaacgagtgccaactcaacaacctcaacgcgttggaacccgaccaccgcgttgagtcc

SEQ ID NO: 105670 - DNA, 118 bp, Glycine max
caactctaaaaggttccaaactctcttcaaaaaccaatatggccacgttcgcgtcctccagaggttcaacaaacgctcccaacagcttcagaatctccgagactaccgcattttggag

SEQ ID NO: 105671 - DNA, 250 bp, Glycine max
cggtgacttcctcgccttcgtggcggccggcaacattctcctcgaagccctcgtcggtgctgccggcctcgggcgctcctggtcctcgtacttcgccagcatggtcaaatccgaccccgacatcttccgaatccacgtcccctccttcaaacccgggttcgacatgctcgatcctctcgccgtcgctgttctcctcatcgccaatggcatcgccgtcagcggcactcgcagaacctccctcttaacctgg

SEQ ID NO: 105672 - DNA, 128 bp, Glycine max
caatatcctagtataccttaataaatagtttaagatactatgatgagagcacggttcccattactgttgctgggacttgttttcctggcttcagtttctgtctcatttggcattgcttactgggaaaa

SEQ ID NO: 105673 - DNA, 250 bp, Glycine max
tggcaatttgtaagaaagatgtttggagagttgaatgtggaatcccttctggatttccgctcacagttatttcgcaatagcatttttaatgagatgctcattagatatagctatgaaaaattactgcgccaggctaaagctccaagtatgtttttacaatccttcaaaaattttgtttctttgtgtgtgtatggtgatgataacttaattagtgttcatgaatatgtcaagccttactttagtggttcta

SEQ ID NO: 105674 - DNA, 246 bp, Glycine max
ctaaggttgcacaagatatggttgaggaatggtttgattgtgttgatgaggaggattcctttgaggaagtttctttaagtgcagcactcaatggtgttgagggtttagactatatggaaagaattcctcttgccacatctgagggttttcctcatgtgctttcacgcaaaaatggtgaaaaaggcaaaaggagatttgtttctggggatggtgaagagatgacattgattccgggaaccagtgttg

SEQ ID NO: 105675 - DNA, 168 bp, Glycine max
gttcaatatcctagtacaccgtattaaagaatttaagatatactatgatgagagcgcggttcccattactgttgctgggagttgttttcctggcatcagtttctgtctcatttggcattgcgtattgggaaaagcagaaccccagtcacaacaagtgcctccgaagtt

SEQ ID NO: 105676 - DNA, 187 bp, Glycine max
ggcgccctcttccatttaccattccgagagaggtccgacgacctctcaggttctcgcagttgtcgtcggccttccggtcggcggcatcctcctgctcctggcaggactgaccctggctggaactctcaccgggctggtggtggcaacaccgctcttcatcatcttcagcccggtgctgattccggcc

SEQ ID NO: 105677 - DNA, 245 bp, Glycine max
ctcaaacctcttcgttccttcgattcattccatttcttccaaaatggccaaagacccagttcgcgttctcgtcactggagccgcagggcaaattggatatgctcttgtccctatgattgctaggggagtgatgctgggtcctgaccagcccgtgatcctccacatgcttgacattcctccagcagcagagtcattgaatggggttaaaatggaattggtggatgctgcattccctcttcttaaag

SEQ ID NO: 105678 - DNA, 129 bp, Glycine max
gttgccgtttctattattgacaccaacagcttggagaaccagctcgaccagatgcctaggagattctatcttgctgggaaccaagagcaagagtttctaaaatatcagcagcagcagcaaggaggttcc

SEQ ID NO: 105679 - DNA, 248 bp, Glycine max
ggcaaatcaaacttcatggcatttgagtttccttattgacaatcccaaacagtctacagtttttgatattctcttgggaatttctcaagattttgaaattgctggtaatactcttatgccagctttttctgttccacaggctactgccagatcttctgaaaatgcggaatcctctgcatgatctggaatttgtgttttctttcgcttgttcgtttgtttaattcaataaaggaaattaggcatgaccc

SEQ ID NO: 105680 - DNA, 248 bp, Glycine max
cctgccagtagtcatatgcttgtctcaaagattaagccatgcatgtgtaagtatgaactaattcagactgtgaaactgcgaatggctcattaaatcagttatagtttgtttgatggtatcttctactcggataaccgtagtaattctagagctaatacgtgcaacaaaccccgacttctggaagggatgcatttattagataaaaggtcaacacaggctctgcctgttgctttgatgattcatgataa

SEQ ID NO: 105681 - DNA, 251 bp, Glycine max
gtgcaatttagctgaagcaaagcaatggctacttcaaagttgaaaacccagaatgtggttgtatctctctccctaaccttaaccttggtactggtgctactgaccagcaaggcaaactcagcggaaactgtttctttcagctggaacaagttcgtgccgaagcaaccaaacatgatcctccaaggagacgctattgtgacctcctcgggaaagttacaactcaataaggttgacgaaaacggcaccccaaa

SEQ ID NO: 105682 - DNA, 235 bp, Glycine max
gcacagggtgagataaatgctggaataaatgtgaggaagggtcagattaccaacatcttggaggagaatgtggtgcagccccttcttgttagcacaagtgcgatcatgttggcgacagagtgtgtgcggatgattttgaagattgatgatattgtaactgtgaggtagagttgattgaacaatgtggaatttagagagaaactgaatcacccattatcttctttttttttttttt

SEQ ID NO: 105683 - DNA, 212 bp, Glycine max
caatatcctagtataccttaataaataatttaagatactatgatgagagcacggttcccattactgttgctgggacttgttttcctggcttcagtttctgtctcatttggcattgcttactgggaaaaagagaaccccaaacacaacaagtgtctccagagttgcaatagcgagagagactcgtacaggaaccaagcatgccacgctcgttg

SEQ ID NO: 105684 - DNA, 264 bp, Glycine max
cggctcgagcaagcctctactatactgcttcaccttctgctctagaaaattcagtgctgaaacatggcttcggctactctctctgtagccaaaccagcccttcaggcaaatgggaaaggcttctctgaattctctggcctccgaagctcatcaggcttccttcccttttctagaaaatcttcagaggatttccattctggtcattgccttcaagacctatgcagttggaagcagtggatgatacaagaagggtgtgcagaagca

SEQ ID NO: 105685 - DNA, 260 bp, Glycine max
aaaattcttccaccaagttatgggttaccttgtgttgcttcttttctccctcttaggtctctcttctagttccagcatatcaactcatcgttccatattggaccttgacctaaccaagtttaccacacagaaacaggtgtcttcactgttccaactatggaagagtgagcatggacgtgtctaccataaccacgaagaagaggcaaagagacttgagattttcaagaataacttgaactatatcagggacatgatgcaaa

SEQ ID NO: 105686 - DNA, 259 bp, Glycine max
cggctcgaggtggctggtgaaggcagcgactgcgagggaagggaagcatctttagctccaaatccaatggcggatacctcaagccgatcaagagacctcgacaagctccttctccgccctggcaatctcgtcggtcctaggttcgaacctggccctgagttgcgagatgaccttcaggccttcgccaattcttgttcagacttgaagatgttggcaaacccaaagccgaggtagctgccaagcgtgtcatggagagaat

SEQ ID NO: 105687 - DNA, 265 bp, Glycine max
ctcgagctcgagccgctaaaatatcagcagcagcagcaaggaggttcccaaagccagaaaggaaagcaacaagaagaagaaaacgaaggaagcaacatattgagtggcttcgcccctgaattcttgaaagaagcgttcggcgtgaacatgcagatagtgagaaacctacaaggtgagaacgaagaggaggatagtggagccattgtgacagtgaaaggaggtctaagagtcacagctccagccatgaggaagccacacaagaaga

SEQ ID NO: 105688 - DNA, 263 bp, Glycine max
caaactttccgttccaaggaaatctccaagagcaacgttgttgatgatatggtcaacagcaatgccatcctctatgagcctggtgaacatccagaccatgttgttgttattaagtatgtgccttacgtaggggacagcaagagagccatggatgagtacacttcagagatattcatgggtggaaagagcaccattgttttgcacaacacatgcgaggattccctcttagctgctcctattatcttggactggtccttcttgct

SEQ ID NO: 105689 - DNA, 267 bp, Glycine max
tgctcactctcacgtggatcacatagatccttctgtgatggtgtttttcaccatcgaagatttgaaggttgggaaaacaatgcctattcattttcccaagagggaccctgcaacatcccctaagttgtggccaagagaagaagcagattcacttcctttctcactgaacaaactcccaaaccttctcaaaatcttctctgtatctcaaaactctcccaaagccaaggccatggaagatacccttagggaatgtgagaccaaacccat

SEQ ID NO: 105690 - DNA, 267 bp, Glycine max
ctcgagccgctcgtgctcagacttgtcactaataacatgagaccatcagggttccacgtaggggcaaggtgttggagtaggacacatgcttatacttgagataatcatgacatttgggctaatgtacactgtgtatggtactgcaattgatcccaaaaggggttctgttagcaacattgcacctttggcaattggactcattgttggggcaaacatccttgttggtgggccatttgatggagcctgcatgaacccgctctagctttt

SEQ ID NO: 105691 - DNA, 260 bp, Glycine max
tagcatcacaaccgccaccagccttgacttcccagccctctggcttctcaaactcagtgcccagtatggatcactccgcaagaatgctatgttcgtgccacactacaccctgaacgcgaacagcataatatacgcattgaatgggcgggcattggtacaagtggtgaattgcaatggtgagagagttgtttgatggagagctgcaagagggaggggtgctgatcgttccacaaaacttgtgggtggctgcaaatcccaga

SEQ ID NO: 105692 - DNA, 262 bp, Glycine max
gctcatttacacacctctccaacctttcactttcagctttatttgaatccctctctctcctttccaaatggccagcgttgaggttgcacatcaaacaccaacaacagttccagaaaatgaaacaaccgaggtaatcaagacccaggaaacaaccccggaaccagtaccagccactgaggctcctgcaacagaacaagcagcagctgaggttcctgctcaagaagaacaacaagcaactgaggttcctgccccaaatcaacca

SEQ ID NO: 105693 - DNA, 256 bp, Glycine max
aagtcgtgcaagcaacaactgtagatcagcaaaatgccagagaagagcctgctaaacagagttcaactacatcagtctttgtgaactcgcaactgatgcgagaagaacaaattcagaatgctgtgaaatttctatcacacccaaaagttagaggttcacctgtcatgtataggcgatcatttctagagaagaagggccttacgaaggaggagattgatgaagcttttcagcgtgtgccagattcagctccaaagtg

SEQ ID NO: 105694 - DNA, 252 bp, Glycine max
atttgatcgcagtgcctactggtgttgcatggtggatgtacaacaatgaagacactcctgttgttgccgtttctattattgacaccaacagcttggagaaccagctcgaccagatgcctaggagattctatcttgctgggaaccaagagcaagagtttctaaaatatcagcaagagcaaggaggtcatcaaagccagaaaggaaagcatcagcaagaagaagaaaacgaaggaggcagcatattgagtggct

SEQ ID NO: 105695 - DNA, 261 bp, Glycine max
gccaaaaaccacacaaagcacaatagaggaggaacaacaatcacaaagggcatgaggaccaatgtaggagatattgttcaagtagaaggagggcacattgttaggtccacaggtagaaaagatcgccacagcaaggtgtacacatcgaaagggccacgcgatcgtcgcgttagactctcggcacacacagccattgagttctatgatgttcaagacaggcttggctatgacaggccaagcaaggctgtggactggctcatc

SEQ ID NO: 105696 - DNA, 244 bp, Glycine max
aaataatttaagatactatgatgagagcacggttcccattactgttgctgggacttgttttcctggcttcagtttctgtctcatttggcattgcttactgggaaaaagagaaccccaaacacaacaagtgtctccagagttgcaatagcgagagagactcgtacaggaaccaagcatgccacgctcgttgcaacctccttaaggtggagaaagaagattgtgaagaaggtgaaattccacgacc

SEQ ID NO: 105697 - DNA, 259 bp, Glycine max
cagaagaggctcaaggtcgcagcagcaactacaagacagtcaccagaagattcgtcacttcaatgaaggagacgtactagtgattcctcctggtgttccttactggacctataacactggcgatgaaccagttgttgccatcagtcttcttgacacctccaacttcaacaatcagcttgatcaaaaccccagagtattttaccttgctgggaacccagatatagagcacccagagaccatgcaacaaagcagcagcaga

SEQ ID NO: 105698 - DNA, 259 bp, Glycine max
cttcaaagttgaaaacccagaatgtggttgtatctctctccctaaccttaaccttggtactggtgctactgaccagcaaggcaaactcagcggaaactgtttctttcagctggaacaagttcgtgccgaagcaaccaaacatgatcctccaaggagacgctattgtgacctcctcgggaaagttacaactcaataaggttgacgaaaacggcaccccaaaaccctcgtctcttggtcgcgccctctatccacccccatc

SEQ ID NO: 105699 - DNA, 263 bp, Glycine max
cacaaacaagtggatcaaagagaccatcagagccgtcgatggagttggctaacccccgaaacgaaactgcttctgcccctcaaccacccaaacctgtcaagcgagagggcaatcgcaaaggtccaacgtcaagttctgaacatgaaggacctaaaacaccagatcctaagacactcagaagacttgctcagaatagagaggcagctaggaaaagcaggcttaggaaaaaggcctatgttcaacaactagagtcgagtaggatt

SEQ ID NO: 105700 - DNA, 257 bp, Glycine max
accttaataaataatttaagatactatgatgagagcacggttcccattactgttgctgggacttgttttcctggcttcagtttctgtctcatttggcattgcttactgggaaaaagagaaccccaaacacaacaagtgtctccagagttgcaatagcgagagagactcgtacaggaaccaagcatgccacgctcgttgcaacctccttaaggtggagaaagaagaatgtgaagaaggtgaaattccacgacacgacc

SEQ ID NO: 105701 - DNA, 267 bp, Glycine max
aacgcgaacagtgtgatctatgtgactcgagggaaaggaagagttagagtggtgaactgccaagggaatgcagtgttcgacggtgagctaaggaggggacaattgctagtggtgccgcagaactttgtggtggctgagcaagggggagaacaaggattggaatacgtagtgttcaagacacaccacaacgccgtgagcagctacattaaggatgtgtttagggcaatcccttcggaggttctttccaattcttacaccttggccaga

SEQ ID NO: 105702 - DNA, 263 bp, Glycine max
gcaaacattgaacttgttggcctaaaagaacaacaacaggagcagcaacaggaagagcaacctttggaagtgcggaaatatagagccgaattgtctgaacaagatatatttgtaatcccagcaggttatccagttgtggtcaacgctacctcaaatctgaatttctttgctattggtattaatgccgagaacaaccagaggaacttcctcgcaggttcgcaagacaatgtgataagccagatacctagtcaagtgcaggagct

SEQ ID NO: 105703 - DNA, 257 bp, Glycine max
ctgaacatcctgcattggggtggcagtccatccagtgacacaaatgattggtttatttcctctcaggaatgtgttcccaggacctattgtgttttaaatccacaagatccttttgtgttaaataggtggatgggaaaactgactttccctcagggcacttcccgaagtgttaagagaatgcctctttctataggggggaggagctggtgcaaagagtgctattctcatgaatatgccaaatgctgtgcttcaatgtg

SEQ ID NO: 105704 - DNA, 84 bp, Glycine max
gtcggaaggtgggttcattgagacctggaaccctaacaacaagccattccagtgtgccggtgttgccctctctcgctgcaccct

SEQ ID NO: 105705 - DNA, 256 bp, Glycine max
atttttggcatgatatacccgggttgtcctagcacatttgaagagcctcaacaacctcaacaaagaggacgaagcagcagaccacaagaccgtcaccagaagatctataacttcagagagggtgatttgatcggagtgcctactggtgttgcatggtggatgtacaacactgaagacactcctgtggttgcagtggctatgattgacaccagcaggttggagacccagctcgaccagatgcctaggagattctatc

SEQ ID NO: 105706 - DNA, 255 bp, Glycine max
catgatcagcagtctattgctgatgctcttttgaagcttgttagcaacaaacaactttgggcaaaatgtagacagaatgggttaaagcatattcatttattttcatggcccgagcactgtaagacttacctttctaaaatagccacttgcaagccaaggcatccacaatggcagcgaagtgaggatggaggtgaaagttcagaatcagattcaccaggtgattccttgagagatttacaggacttgtctctaaat

SEQ ID NO: 105707 - DNA, 255 bp, Glycine max
gctagctagctagcaagcaagcacagagatggaggcaaagcgaggccatgccctcatgtgcttggcacgtgtttcactcttcctctgcgctctaaccctatccgctgctcacggaagcaccacggttcaagacatcgcgagaaagttgaaactcggggacaacgagcttctgcgcacggagaagaagttcaaggttttcatggagaattacgggaggagctactccacagaggaggagtatttgcgccgtttggg

SEQ ID NO: 105708 - DNA, 252 bp, Glycine max
aaaattcttccaccaagttatgggtccccttgtgttgcttcttttctccctcttaggtctctcttctagttccagcatatcaactcatcgttccatattggaccttgacctaaccaagtttaccacacagaaacaggtgtcttcactgttccaactatggaagagtgagcatggacgtgtctaccataaccacgaagaagaggcaaagagacttgagattttcaagaataacttgaactatatggggacatg

SEQ ID NO: 105709 - DNA, 256 bp, Glycine max
gttcctcactgaccaagccaaggcgatgagaaccaaactttctttagctatctttttcttttttcttttagccttattttcaaacctagcctttggcaaatgtaaagaaaccgaggtagaagaagaagaccctgagctcgtaacatgcaaacaccaatgccaacagccacagcaatacactgagggtgacaagcgggtatgcttgcaaagatgtgacaggtatcatcgtatgaagcaagagcgagaaaacaaatcc

SEQ ID NO: 105710 - DNA, 260 bp, Glycine max
agaggattggagggtcgccacgtttagcaacaaccaaaccctctctactctttcttcttctcttcgctagggttttagcttcttcctcttcacttcgttcttctggcctctacaatgagcaacgacaaggacaccttcaacgtcgctgatctcacttccgctctcaacgaggacaatagagcagaccttgtcaatgctctcaagagcaagatacagagtttggctggacagcattctgatattctagatctctgtcgccc

SEQ ID NO: 105711 - DNA, 259 bp, Glycine max
cttgcctgggtaccatcaggctgttaagggtgaatggaatgttgctggcattgcacatagagcttatgatcttgaaggcaagacagtaggaaccgttggcgcgggacgaattgggaagcttttactccagaggttgaaaccttttaactgtaatcttctgtattttgatcgacttaggatcgatcctgaattggagaaagagattggagcaaaatttgaggaggaccttgatgcaatgcttccaaagtgtgatgtaatt

SEQ ID NO: 105712 - DNA, 262 bp, Glycine max
ctcgagccgctcgtgctcagacttgtcactaataacatgagaccatcagggttccacgtagggcaaggtgttggagtaggacacatgcttatacttgagataatcatgacatttgggctaatgtacactgtgtatggtactgcaattgatcccaaaaggggttctgttagcaacattgcacctttggcaattggactcattgttggggcaaacatccttgttggtgggccatttgatggagcctgcatgaccctgctctagc

SEQ ID NO: 105713 - DNA, 252 bp, Glycine max
gaatagatcctcaatacaatgaggttcaggctcagatggaaacaaatttgtttaaattgtctcttgatgatgttgaaactcctaaaggttccatgttggatcttaaaatttctcaatctaaaattgcacttcccaaaaacacagttggaggaaccattctgcgtagtgatctattggcaaattttttgacagggggcaattttagagcaagtgttgatttgcagcgcactcatcgtattagaggaatgatta

SEQ ID NO: 105714 - DNA, 257 bp, Glycine max
ttgagagatcacaacagcaatcaagcagaagaggctcaaggtcgcagcagcaactacaagacagtctccagaagattcgtcacttcaatgaaggagacgtactagtgattcctcctggtgttccttactggacctataacactgtcgatgaaccatttgttgccatcagtcttcttgacacctccaacttcaacaatcagctttatcaaaaccccatagtattttaccttgctgggaacccagatatagagcaccca

SEQ ID NO: 105715 - DNA, 251 bp, Glycine max
tgagaggaagagggagtgagagagagtgttcttcgtttgctaccttctcccagaaatggttacgttcaggtttcaccagtaccaggtggtcgggagggctctcccaacggaagcagatcagcatccgaagatctaccgaatgaagctctgggccaccaacgaggttcgcgccaagtctaagttctggtattttttgaggaagctgaagaaggtgaagaagagcaatggtcaagttcttgctatcaacgaga

SEQ ID NO: 105716 - DNA, 250 bp, Glycine max
agtgatttcagtgagtgatcggtgttcacttgatctcatcataatcgtcagcgtcaattgaagaagatgccgatcagatacatcgccgtcggaaggcctgaagaggcgactcaccccgacacgttgaaggcggctttggctgagtgcatctcaaccttcatcttcgtgttcgccggctcaggctccggcatcgcctacaacaagctcaccgacaacggcgcggccacccctgccggcctcatctccgcct

SEQ ID NO: 105717 - DNA, 250 bp, Glycine max
actcgccatacccgttaacaagcctggtagatttgagagtttcttcctatctagcactgaagctcaacaatcctacttgcaaggattcagcaggaacattttagaggcctcctacgataccaaattcgaggagataaacaaggttctgtttagtagagaggaagggcagcagcaaggggagcagaggctgcaagagagcgtgattgtggaaatctcgaaggaacagattcgggcactgagcaacgtgcca

SEQ ID NO: 105718 - DNA, 255 bp, Glycine max
ggaagaggaagagaatgttgtccaatagggaatcggcacgtagatcgaggataaggaaacagcagcacctggaaggtctgagtgcccaattggatcagcttaaaaaggagaacgcacaaatcaacacaaacataagcatcacgacgcagatgtacctcaacgtggaagctgagaacgcgattctgagggctcaaatgggggaactgagcaacaggattgaactctctgaacgaaatgataagttcattaactcca

SEQ ID NO: 105719 - DNA, 250 bp, Glycine max
gaggagaatgaccatacctgagatccgtcaacacccatggttccaagctcgacttccacgttatttagctgtgccaccaccagatacaatgcaacaggccaaaaagattgatgaggagatccttcaggaagtggtgaaaatgggatttgacaggaatcaattggttgaatctcttgggaacaggatacaaaatgagggtactgtggcatactatttgttattggacaaccgatttcgtgtttcagtggct

SEQ ID NO: 105720 - DNA, 254 bp, Glycine max
taagaaagtcttccatagccccccaaaaatgaagagcaccatcttctttgctctctttctcttttgtgccttcaccacctcatacctaccttcagccatcgctgatttcgtgctcgataatgaaggtaaccctcttgaaaatggtggcacatattatatcttgtcagacataacagcatttggtggaataagagcagccccaacgggaaatgaaagatgccctctcactgtggtgcaatctcgcatgagctcga

SEQ ID NO: 105721 - DNA, 236 bp, Glycine max
agatctccattcccaatccatggcttccgctgagtcatccccttccaagaaaattcagattcaaagggatgacactagatttgacgcctatgtggatagaaaatacgatgctcatgggatagcagttattcaggagtcgtgcggtatggactacgaaattaagatccatgccgtgaggatttctcagcttggtagtgggtttaaagctctaattccagatttatacagaggaaagg

SEQ ID NO: 105722 - DNA, 241 bp, Glycine max
gaaagtcttccatagccccccaaaaatgaagagcaccatcttctttgctctctttctcttttgtgccttcaccacctcatacctaccttcagccatcgctgatttcgtgctcgataatgaaggtaaccctcttgaaaatggtggcacatattatatcttgtcagacataacagcatttggtggaataagagcagccccaacgggaaatgaaagatgccctctcactgtggtgcaatctcgc

SEQ ID NO: 105723 - DNA, 262 bp, Glycine max
ctcgagccgctcgagccgtaaaattcttccaccaagttatgggtttccttgtgttgcttcatttctcccacttaggtctctcttctagttccagcatatcaactcatcgttccatattggaccttgacctaaccaagtttaccacacagaaacaggtgtcttcactgttccaactatggaagagtgagcatggacgtgtctaccataaccacgaagaagaggcaaagagacttgagattttcaagaatacttgaactatatc

SEQ ID NO: 105724 - DNA, 258 bp, Glycine max
ggagtcagagaaaccctaggtaagaagaaaagatgccggctggtcatggtttgagatcccgcaccagagattccttctctcgtcctttcaggaagaagggaaccatcgccctcaccacatacctgagaacctaccacgtcggcgactatgttgacgtcaaggttaacggtgccgttcacaagggaatgccccacaaattctaccatggccgcaccggacgcgtctggaatgtcaccaaacgtgctgttggcgtcgaag

SEQ ID NO: 105725 - DNA, 144 bp, Glycine max
cctagcctttggcaaatgtaaagaaaccgaggtagaagaagaagaccctgagctcgtaacatgcaaacaccagtgccaacagccacagcaatacactgagggtgacaagcgggtatgcttgcaaagatgtgacaggtatcatcg

SEQ ID NO: 105726 - DNA, 246 bp, Glycine max
caatatcctagtataccttaataaataatttaagatactatgatgagagcacggttcccattactgttgctgggacttgttttcctggcttcagtttctgtctcatttggcattgcttactgggaaaaagagaaccccaaacacaacaagtgtctccagagttgcaatagcgagagagactcgtacaggaaccaagcatgccacgctcgttgcaacctccttaaggtggagaaagaagatgtgaag

SEQ ID NO: 105727 - DNA, 242 bp, Glycine max
gtcgcagagaaagaaaaccctagctcaccgtttcaagatgcaaatcttcgttaagaccctcactggtaagaccatcactctcgaagtcgagagttcagataccatagacaatgtaaaggccaaaattcaagacaaggaagggatcccaccagatcagcaacggctcatttttgctggcaagcagcttgaggatggacgtacccttgctgattataacatccaaaaggagtccactctccatt

SEQ ID NO: 105728 - DNA, 250 bp, Glycine max
cttaattattaacacttccttagttcaatatggggaagcccttcactctctctctttcttccctttgcttgctactcttgtcgagtgcatgctttgctattagctccagcaagctcaacgagtgccaactcaacaacctctacgcgttggaacccgaccaccgcgttgagtccgaaggtggtttgattcaaacatggaactctcaacaccctgagctgaaatgcgccggtgtcactgtttccaaactcac

SEQ ID NO: 105729 - DNA, 239 bp, Glycine max
gagttgatcagcaaagggcagcagcttgatgcggttcactttacctatgaagtgggtctggtggaaaagttccctcctgttcccttgttgaagtcttttctcaaggatgctaagaaagttgcggcttctattttggaagatcctaataatgcaggccgagctgcgtacctagctgcaaggaaagagcagtctgcactcagggctgtgattaaatgcattgaagaatacaaacttgagga

SEQ ID NO: 105730 - DNA, 254 bp, Glycine max
ttttctcctcacttgttgcataacaccaaagaactacaaatagttgtcattgcacagccatagatggagtttcccaacgaagcaataatatcagaagggtctaattctcagaagaaaacggggagagggaaaatagaaatcaaacggatcgagaacacaacgaataggcaagttaccttctgcaaacgccgtaacggattgctgaagaaggcttatgaattgtctgttctgtgtgatgctgagttgctcttgtt

SEQ ID NO: 105731 - DNA, 253 bp, Glycine max
ccagaagattcgtcacttcaatgaaggagacgtactagtgattcctcctggtgttccttactggacctataacactggcgatgaaccagttgttgccatcagtcttcttgacacctccaacttcaacaatcagcttgatcaaaaccccagagtattttaccttgctgggaacccagatatagagcacccagagaccatgcaacaacagcagcagcagaagagtcatggtggacgcaagcagggcaacaccagc

SEQ ID NO: 105732 - DNA, 254 bp, Glycine max
gtgggacgggttgagactggtgtcttgaagcctggaatggtggtgacttttgcaccaactggactgacaaccgaagttaagtctgtggaaatgcaccatgaagctctcacagaggctcttcccggtgataatgtgggattcaatgttaagaatgttgctgttaaggatctcaagcgtggttatgttgcctcgaactcaaaggatgatcctgccaaggaggctgctaacttcactgcccaggttacatcatgaac

SEQ ID NO: 105733 - DNA, 254 bp, Glycine max
tgaagcaaagcaatggctacttcaaagttgaaaacccagaatgtggttgtatctctctccctaaccttaaccttggtactggtgctactgaccagcaaggcaaactcagcggaaactgtttctttcagctggaacaagttcgtgccgaagcaaccaaacatggatcctccaaggagacgctattgtgacctcctcgggaaagttacaactcaataaggttgacgaaaacggcaccccaaaacctcgtctcttgg

SEQ ID NO: 105734 - DNA, 238 bp, Glycine max
gcaagaggaagatgaggatgaggagcagcagcgagagagcgaagaaagtgaagattctgagttacgaagacataagaataagaacccttttctcttcggctctaacaggttcgaaactctcttcaaaaaccaatatggtcgcattcgcgtcctccagaggttcaaccaacgctccccacaacttcagaatctccgagactaccgcattttggagttcaactccaaacccaacaccctc

SEQ ID NO: 105735 - DNA, 244 bp, Glycine max
gcagcagagggaggagcggcattaaaaatgcagatcttcgtgaaaaccctaacggggaagaccataaccctcgaggtcgaaagcagcgacaccattgacaatgtcaaggctaagattcaagacaaggaaggcatccctccggatcagcagcgtttgattttcgccggaaagcaacttgaagatggaaggaccttggccgattacaacatccagaaggaatcaacccttcaccttgtctcaggct

SEQ ID NO: 105736 - DNA, 249 bp, Glycine max
tgcacttcgtattaccgatggagctcttgttgtggttgattgtgtggaaggagtttgtgtccaaaccgaaactgttctacgacaagcccttggagaaaggattaggcctgttctgactgtcaataagatggacaggtgcttccttgaactccaggttgacggagaggaggcttaccagacattccagagagttattgagaatgctaatgtgatcatggctacatatgaagatccactctcggtgatgtt

SEQ ID NO: 105737 - DNA, 251 bp, Glycine max
ccgatggtcaacacatcctcaagtttccacaaactcacgtcgtataaagtgagtcagtctgcatggatgactgatgaagaatttgctagagagatgattgctggtgtaaatccctgcgtaattcgtggtcttgaagagttccctccaaaaagtaatctggatcctgcaatctatggtgatcaaagcagtaagataacagcagattcccttgatctagatgggtacacaatggacgaggcacttgtagtcga

SEQ ID NO: 105738 - DNA, 267 bp, Glycine max
ctcgagccgctcatattcctaaattgacatacttgtacttggatcacaatcagttttcagggagaattcctgaacccttttacaagcatccatttttgaaagaaatgtacattgagggaaagcattccggcctggtgtcaaccccattggtttccacaaagtgcttgaagtttctgatggagactacctcgtttaatgaggctctaaatatttatatatatttttttcttcaggaggtgtacttgtataattattgaaacaatcgtt

SEQ ID NO: 105739 - DNA, 272 bp, Glycine max
agaagaacaagtagttgagaactaagaaggagaagcaaatggcttcctcaatgatctcttctccagctgttaccactgtcaaccgtgccggtgccggcatggttgctccattcactggcctcagtccatggctggcttccccaccaggaagaccaacaatgacattacctccattgctagcaacggtggaagagtgcaatgcatgcaggtgtggccaccagttggcaagaagaagtttgagactctttcctacctgccagaccttgatgatg

SEQ ID NO: 105740 - DNA, 269 bp, Glycine max
gaaagttgctcctgctctagctgctggttgtacagcaatattggagccatctgaattggcatctgtgacctgtttggagctggctgaaatatgcagagaagttggccttcctccaggggtataaacattgttactggattaggcaatgaagctggtgctcctttgtcatctcatcctgacgtagacaagatttcctttactggaagctctgcaactggaagcaggattatgacagctgcagcacagctaacgaagcctgtttctctaga

SEQ ID NO: 105741 - DNA, 278 bp, Glycine max
attcaattgagtcgtcatcatcatcgcccatggatcagccgaagcgagtggttgtctgcggcgtcggagtaatccgagtctgcaccgcctactttctggcggagaagggctccgctgtcacgctcatgagaaatccgacgtcgcgtgcgccgcgtccggagaaaccggcggattcctcgccctcgattggtgtcacggaagaccgtttgaagagctatctcgcgccagcttcaatctccaccgttcgctctccgaagaactcgagggtccgcgatcgt

SEQ ID NO: 105742 - DNA, 268 bp, Glycine max
ctgacaccctcccatttgctacaatgggatcaggttcacttgctgcaatgtctgtatttgagtctaagtacaaggaaagtttgagtagggatgaaggcgttaagctagttgttgaggcgaatgtgctggtatatttaatgacctaggaagtggaagtaatgttgatgtttgtgtgataaccaagggacataaggaatatctcaggaaccaccttctaccaaatcctcgtacctatgtcaatccaaaaggctttgatttccccaaaaag

SEQ ID NO: 105743 - DNA, 265 bp, Glycine max
ggcgcacgttagcacaaactatcatggccacggcaacagcagctgccacctcgtcctttatggggacgcgtctcctggaggctcactccggagcggggcgagtgcacgcccgattcggttcggcaagaaaaaggctcccgccccaaagaaagcctccaggggatcgggccgagacaccgacagacccctttggtatccgggcgccaaagcgcccgaatacctcgatgggagtcttgtcggagactacgggttcgatccgtttggg

SEQ ID NO: 105744 - DNA, 265 bp, Glycine max
attgaagttgaagtcttgcccttctctcttcaactccaaacacaagacatcatcatccatggctgcctccgtctccactgtcggagctgtcaacagagctcttttgaaccttcatgggtcggacctggggtttcagctcccagttcatccttctttgggagcagcttgaagaaggttattggctcaagggtccccaacacaaagatttcctctggaagcttcaagattgttgctgtagaagagaagaaagagattgaagagaccc

SEQ ID NO: 105745 - DNA, 265 bp, Glycine max
cggctcgagcgctggtgtcatttctgggctcaacgtgatgcgaattatcaacgagcctaccgcgagtgccattgcttatgggctcgacaaaaaggccactagctctggggagaagaatgttctcatgtgtgatctcggtggtgggacttatgatgtctctcttctcaccatcgatgagggtattttcgaggtgaaggtcactgctggtgatactcacttgggaggtgaagattttgataacagaatggtgaaccattttgttcag

SEQ ID NO: 105746 - DNA, 273 bp, Glycine max
cgcgcttctcttcaccgctccagatgccctccaatacctctctggtgtcatcctctttgaggaaactctttaccagaaaacctccgatgggacagccttttgttgaggtccttcaagagaacaagtcatcccaggcatcaaagtggacaagggtgttgttgagttggctggcacaaatggtgaaaccaccactcagggattcgactctctcggagctcggtgccaacagtactacaaggctggtgcacgcttcgccaagtggcgtgcagtcct

SEQ ID NO: 105747 - DNA, 273 bp, Glycine max
tcctaagggacacaagggcaaggttgaagatgagctttttcacccatccaactcttccaagaaaaacaacaacctcaacaaaaaacatggggacaacaacaacaatgataacaataaggattcaaggctgctggcgacaagagattcaaaacgctgccaccatcagagtctcttcctagggatgaaaccattggaggctatatctttgtttgcaacaatgataccatggctgagaatctcaagagacaactcttcggtctgcctccacgatac

SEQ ID NO: 105748 - DNA, 276 bp, Glycine max
aagaaaatgaaagtccttgtttactttgttgctatagttctagcagcatggcattgccatggctcagaccatgaccatgaccatggccacacctaccaaattttccctctgagaatgaaaactggcatggtggccactacattccggaggtatcatgccaaagttggaggcttggtgtggaagcacacaacgtcattgactggaaaaccgttcctcaagattgcgagggatatattgggaactacatgcttggcgaacaatatagatcagactcca

SEQ ID NO: 105749 - DNA, 269 bp, Glycine max
gaaattgctttgctgtaagtttctgattcctttcttcagaattccaagttttcatttcgttagggacaaaagattgtgagatagagtatggctggaaaaggcgagggtcctgctatcggaatcgatttgggaacgacgtactcttgcgtcggcgtgtggcaacacgatcgtgttgaaatcatagccaacgatcagggtaatagaactaccccatcctacgtggctttcaccgatacagaacggttgatcggcgatgcggcgaagaacca

SEQ ID NO: 105750 - DNA, 266 bp, Glycine max
aggaaatcaatcctcacattccccagtatatgtcttctgcaccttggtatcttaatgctgagagacctagtttgaaacatcaaaggaaatggaaatccgaccccaattacaccaaatctggtatgatagaggtgctaaaatctttcaggcagacaagtatcggaaaggtgcatgtgagaattgtggagctatgacacatgattctaagtcatgcatggaaagacctcggagagtgggagcaaaatggacaaacaaacacattgctc

SEQ ID NO: 105751 - DNA, 261 bp, Glycine max
cacacacaaacacaacaacatatggaggtgctaagggtgcaaaccatagcttccaaatccaaagatgctgccatcccagccatgtttgttagggcagagacagagcaaccaggcatacaaccgttcaaggggtgaaccttgaggtgccaattattgattttagtgacccagatgaagggaaagtggtgcatgagattttggaggcaagtagggactggggcatgttccaaattgtgaaccatgacatacctagtgatgtta

SEQ ID NO: 105752 - DNA, 263 bp, Glycine max
attcaattgagtcgtcatcatcatcgcccatggatcagccgaagcgagtggatgtctgctgcggcggagtaatcggagtctgcaccgcctactttactggcggagaagggcgccgctgtctcgctcatcgagaaatccgacgtggcgtgcgccgcgtccggaaaagccggcggcttcctcgccctcgattggtgtgacggaggaccgttggaagagctagctcgcgccagcttcaatctccaccgttcgctctccgaagaact

SEQ ID NO: 105753 - DNA, 236 bp, Glycine max
tggaagttgatagtaggtttctgaacactggcctcctcgttgtgttcacaatcctagtggtcaagctcatctcagccttcatagtgctcaaatccagaaagagggtacccccaattgtgaacgggtggtccttaattggaggactcatccgtttcctcaaaggtccaatctttatgatccgtgacgagtacgctaagcttggaagtgtcttcactctcaaactcttccatacaaca

SEQ ID NO: 105754 - DNA, 276 bp, Glycine max
tgctgcttccgtagctaacttcagtgtggtttcccttgatgaagaacaaattgcagcaaatttggtccagaatggtcctcttgcagttggtatcaatgcagtttttatgcagacatatattggtggcgtctcatgcccatatatctgcggcaagcatttggatcacggggttcttttggtggggtatggttctggtgcttatgctccaattcgttttaaggaaaagccttactggatcataaagaattcatggggggagagctggggagaagaggg

SEQ ID NO: 105755 - DNA, 260 bp, Glycine max
  unsure (1)..(260): unsure at all n locations
ctccatgctcttagccctcctcgtcttcgccgccgtggccaccgncgcgatggcggtcgccgcgtccgacgccgacgatatgctgatccgtcatgtggtgccagatgttggtgaacgtcagaggaggagaacctgctgaacgccgagcaccacttacgcgagcttcaaggccaagttcgctaagacctacgccagcaaggaggagcacgatcttcgcttcggcgacttcaagtccaacctacgtagagccacgctgcacg

SEQ ID NO: 105756 - DNA, 273 bp, Glycine max
gagaagcaaccatggcaatggcaacccaagcctctctcttaaccccacccctctccggtctcaaagccagcgaccgcgcctccgtgccatggaagcaaaactccagcctctccttctccagcccgagcccctcaagttctccagaacaatcagagcagcagccgccgacgagaccacagaggcaccagcaaaagtagaggctgcaccggtcgggttcaccccaccagaacttgacccaaacaccccttccccgatcttcgggggcagcaccgg

SEQ ID NO: 105757 - DNA, 266 bp, Glycine max
tgttactgagctcataatagcaatatttgcccttagcagtaacaaaattgctgtggtcaagtattctctgttgggttctattctttcaaaccttcttctggttcttgggacctctctatatgtggtggcattgcaaaccttaaagtggaacaaaaatatgacagaagacaagcagatgtgaactcacttatgctgttgttgggattgttgtgctacttgcttccaatgctgttcaaatacagtggtgcctcagctgctctcactgt

SEQ ID NO: 105758 - DNA, 264 bp, Glycine max
agctagcaccacattcacctgaggcttccaaagcaatggcttcccttgcagcatccactgctgctgcttcccttggcatgtcagaaatgcttggaaaccccatcaacttcagtggtgcacaaggccagctccatctgcttctagtcctgcctccttcaagactgtggctctattctccaaaaagaaggctacaccaacacctccaaaaaaagctgctgctgctgctcctgccaatgatgagcttgccaagtggtatggtcctga

SEQ ID NO: 105759 - DNA, 261 bp, Glycine max
ggaaaatctttccaatgtgagcttgtctttgccaagatgggaatcaaccccatcatgatgagtgctggagagttggaaagtggaaatgcaggagagccagcaaaactgatcaggcaagataccgtgaagctgcagacatgatcaagaagggaaagatgtgcgctctcttcatcaacgatcttgatgcaggagctggtcgtcctggtggaaccacacaatacactgtgaacaaccagatggtgaatgccactctcatgaaca

SEQ ID NO: 105760 - DNA, 264 bp, Glycine max
gccagcgtcacaacccaagcctccgccgcgattttccggccatgtgcctcgaaatcgaggtttctgatcggctcttccggtaaactcaaccgggaagtgactatgaggccaatggggtgccctccttctgcctctttcaaggttgaagccaataagggagagtggttacctggcttggcctccccaacttacctcaatggcactcttcctggtgacaatggatttgaccctctgggactagctgaggacccagagaacttgagg

SEQ ID NO: 105761 - DNA, 267 bp, Glycine max
caaacaaattgttggtttccatgttgctggaagcaaaggaagactgggatatgcttcattgataccatatgttgagccagttgtgcaagctcaaagtgctgaagtttactttgacttctccctgtggaggttgatagtcaagagggagttgctcacattggtgaattgaaatctggtgtctatgttccactgcctacaaaaactaatttgatggaaactcccaaggaatggcaactggatctaccttgtgacaaaattcctagtgtc

SEQ ID NO: 105762 - DNA, 256 bp, Glycine max
gaatttttgaatgagataggcatgatatcttgtttgcaacaccctaatcttgtgaaacttcatggattttgcattgaaggggatcaattgatattggtgtatgagtacatggaaaataatacctggctcatgctttattcagctcaaaagatcaacttaaacttgattgggcaacaaggcttaggatctgtattggcatagcaaaaggtcttgcatttctacacgaagaatcaatcctcaagattgtgcatcgaga

SEQ ID NO: 105763 - DNA, 273 bp, Glycine max
attcaattgagtcgtcatcatcatcgcccatggatcagccgaagcgagtggttgtctgcggcggcggagtaatcggagtctgcaccgcctactttctggcggagaagggcgccgctgtcacgccatcgagaaatccgacgtggcgtgcgccgcgtccggaaaagccggcggattcctcgccctcgattggtgtgacggaggaccgttggaagagctagctcgcgccagcttcaatctccaccgttcgctctccgaagaactcgagggtccgcg

SEQ ID NO: 105764 - DNA, 279 bp, Glycine max
ctcatccagatcttgcaaaaaaaaaaaaacataatggcagcgagcgctcccattccacgcgaagagttcgtgtacatggcgaactggcggagcaggccgagcgctacgaggagatggtggagttctggagaaggtctctgcttccgccgaaagcgaggagctgaccgtggaggagcgcaacctcctctccgtcgcctacaagaacgtaatcggcgctcgccgcgcctcctggcgcatcatctcctccattgagcagaaggaggaaacccgcggcaacga

SEQ ID NO: 105765 - DNA, 256 bp, Glycine max
actcgacagatgcagatcttcgtcaataccctcaccggcaagaccatcacccttgaggtggaaagctctgacaccatcgacatcgtcaaggccaagatccaggacaaggaaggaatcccccggaccagcaacgtctcattttcgccggaaagcaacttgaggacggccgtacccttgctgactacaacattcagaaggagagtactcttcacctcgtcctccgtctccgtggtggcatgcagatcttcgttgagac

SEQ ID NO: 105766 - DNA, 259 bp, Glycine max
aatggcaacccaagcctctctcttaaccccacccctctccggtctcaaagccagcgaccgcgcctccgtgccatggaagcaaaactccagcctctccttctccagcccgaagccctcaagttctccagaacaatcagagcagcagccgccgacgagaccacagaggcaccagcaaaagtagaggctgcaccggtcgggttcaccccaccagaacttgacccaaacaccccttccccgatcttcgggggcagcaccggcg

SEQ ID NO: 105767 - DNA, 265 bp, Glycine max
gaacaatgtcctttttgagggtattctccttaagcctagcatggttacacctggagccgagtccaaggacaaggccagtcctcagacagttgctgattacaccctcaagctccttcaaggagaattccccctgctgtccctggaattatgtttttgtctggtggacagtctgaggttgaagctaccctcaatttgaatgccatgaaccaatctccaaacccgtggcacgtgtcattctcgtatgccagagccctccaaaacactg

SEQ ID NO: 105768 - DNA, 266 bp, Glycine max
gaactacctccccaccatcaacacccaaagctgatattctacttaaactacttcttgtcagtacataaaatgatataggacattacaacatttatgtatatcgtacattaaattatttccccaagcatataagcatgtaatatatatctaatgatttaggacatacatttaaactcaactataaattcacaacaacatgtctattctcaaatacattaagataatgcttattagacatatctgtgttattagacatgcaccattaa

SEQ ID NO: 105769 - DNA, 263 bp, Glycine max
aagacaacacagagagaagcgtcttaataaacgctcttctctgaaaaacctgatttcttctcttcttctcttctctttcgtttcgattctcgatctctgaaaatgagagagtgcatttcatccacatcggtcaggccggtattcaggtcggaaacgcctgctgtgagctctactgcctcgaacacggcattcagcctgatgggcagatgccaagtgataagactgttggtggaggtgatgatgcttacacaccttcttcagtg

SEQ ID NO: 105770 - DNA, 272 bp, Glycine max
aatccatggagtccatgacggtgattaaatcaaccttcccaattttcatgaccaataacgccccattttccctctccacaagacctcttagacccatcctgaaggtttccgtgaaaccccccctccagatttcgattacaggcgagagatatcggaggagtcaagagccgccatagccgaatctcacccggagttgcttgacctggctgacaatgggagcttggttttggttcagaagaccaggttcggtcctgtcccttcttggaggacga

SEQ ID NO: 105771 - DNA, 276 bp, Glycine max
acacaactttgcccccttgtgaaacttcttattgtgatgtctaaaagcgaagacttgaagcttttgggaggctggttcagcccatttgccctgagggtgcagattgcccttaacctcaagggtctagaatatgaggttgttgaagagaccttgaatcccaaaagtgacctgcttcttaagtccaaccctgtgcacaagaaaatcccagttttcttccatggagataaagtcatttgtgaatctgcaatcatagttgagtacattgatgaggcttgg

SEQ ID NO: 105772 - DNA, 277 bp, Glycine max
gcagcactagatagtgctgctgacagaacatagttgtacctctgccaccagcactagatagtggggttgcttttatgactgtacatgctctacttctcgctgggtttggaaaacaagagtctaattggtgggcgaaatgatggtgaacattgtcctctggcagcttgcccaacagcaaagggcataattgttgacggttgccctgcaaactagtgattttatgcctatttgaatggtttcattacaatacgacgcatgaaaaacacgtatttatagc

SEQ ID NO: 105773 - DNA, 273 bp, Glycine max
gaggcagaagaacaagtagttgagcattaagaaggagaagcaaatggcttcctcaatgatctcttctccagctgttaccactgtcaaccgtgccggtgccggcatggttgctccattcactggcctcaagtccatggctggcttccccaccaggaagaccaacaatgacattacctccattgctagcaacggtggaagagtgcaatgcatgcaggtgtggccaccagttggcaagaagaagtttgagactctttcctacctgccagaccttga

SEQ ID NO: 105774 - DNA, 175 bp, Glycine max
ctgaaaaggaagatcaagattaacctacaaagattgatacctgattgagacaaagaatagatcctcgatacgatgaggttcaggctcagatggaaacaaatgtgtttaaattgtctctgatgatgttgaagctccaaaaggttctatgtgggaccttaaaattccgcattcaaaa

SEQ ID NO: 105775 - DNA, 257 bp, Glycine max
ggttgctgtaggagataagattgcagtagtgctaagtgctaacacctgcagtgaacaatggcctctgcatcagcatctctgctcaagtcttcacttgttcttgacaagtctgagtgggtgaagggacaaacccttcgccaaccttctgcatcagttgtgagatgcaaccccaccaccccatcaggcctcaccatcagagctggttcctatgctgatgagctcgttaagaccgcgaaaacagtggcttcaccagggag

SEQ ID NO: 105776 - DNA, 260 bp, Glycine max
ggagaagaagctcaaactgtattcctactggataagctcctgttccttccgagtccgatttgctctcaacctcaaagcactcgaaaaattgttgaaagaccatgctaggagatatcaactggagatgaaattttactggcagatttgtttttagcacctcagttagatacagcaattaagagattcaacgttgacatgaaggaattccctactctatcaagattacacgagacatataatgaaatggcagcatttcggaa

SEQ ID NO: 105777 - DNA, 178 bp, Glycine max
ggaagacaaaacaaaattgttgtggagaaaaatgatttcattcaagctgttgaaagatcaatagcaggaatagaaaagaagactgccaagttgaaaggaagtgagaaggctgtagttgccggcatgaagctggtcatgctgtggtaggtactgcagttgcaaaccttcttcctggaca

SEQ ID NO: 105778 - DNA, 269 bp, Glycine max
gaagacactgatacggccaaccccaatgatattgcttatgtcttctctggatatgcaccactcagcattcgactggtccagcatgccattcgatctggatggcgtcctgttgaagaaatttgaagctactgcctggacctcatttggaaatgaagaggggtggattctcaaatagcccatcatttgacactttatcagggattcaatccagcatagccaaagtacctgatggacggcgtgctgtggtgcttgttgtctttgttgggggc

SEQ ID NO: 105779 - DNA, 227 bp, Glycine max
ttcatacaagtctttattctcagcatttgctggtctgacggagcaaattaagttcgaccgctatctgcatccacacttccgttattacatgagggaggtcagaacagttgtttattcccaatttatggaatcttacaagagtgtgacaattgaagccatggcaaaagcctttggagtgacagtagatttcattgatgtggagctatcacgttatattgcagcaggga

SEQ ID NO: 105780 - DNA, 269 bp, Glycine max
caaccacatgccatggcaacagcgtcaatgtgtatgagcttcaatctggcaacagcattcaagggtctctctttatcttcttcttcatcgttcttcggtggaagtagtggttctctccgctcggtcctgcctcggtggtgtcgctgccccggcgctgcccgctgaccatagagaacgcgcacaagaagggggcgggcagcaccaagaacggccgcgactcgcagggcaagcgcctcggagtcaagatttacggcgaccaggtcgccaag

SEQ ID NO: 105781 - DNA, 275 bp, Glycine max
agaagaacaagtagttgagaactaagaaggagaagcatatggcttcctccatgatctcttccccagctgctaacactgtcaaccgtgccggtgccggcatggttgctccattcactggcctcagtccatggctggcttccccaccaggaagaccaacaatgacattacctccattgctagcaacggtggaagagtgcaatgcatgcaggtgtggccaccagttggcaagaagaagtttgagactctttcctacctgccaggcttcgatgatgcac

SEQ ID NO: 105782 - DNA, 277 bp, Glycine max
acaactacaaaggttgctgtaggagataagatattgaagtagtgctaagtgcctaacacctgcagtgaacaatggcctctgcatcagcatctcttctcaagtcttcacttgttcttgacaagtctgagtgggtgaagggacaaacacttcgccaaccttctgctgcatcagttgtgagatgcaaccccaccaccccatcaggcctcacaatcagagctggttcctatgctgatgagctcgttaagaccgcgaaaacagtggcttcaccagggagggg

SEQ ID NO: 105783 - DNA, 283 bp, Glycine max
ctgactttccctcagggcacttcccgaagtgttaagagaatgcctctttctatagggggaggagctggtgcaaagaatgctattctcatgaatatgccaaatgctgttctttcaatgtggagatttcttgttggagatctcgtctttgaagtttctaagatgacttctccctacattaaatgtacagtctctttcttcatagcatttggaaatgtggccgatgacaccatcaattttgaggcttttccccacaagctggtgcagtttggagagattcaggaaa

SEQ ID NO: 105784 - DNA, 282 bp, Glycine max
agacaatttggcttaccaatgaaatcatccacaacctcactgtcaataagcggctagaggagatgaatgttcaaaatattcctctcgaagaaggtggaaaacaatttgatgttgtcaacaagggtgatgtagtcatattgccagcttttggagcggcagtggaagagatgttgactttgagcgagaaaaatgttcagatcgttgatacaacttgcccatgggttgcaaaggtatggaattctgttgaaaaacacaagcaacgagattatacctctgtaattc

SEQ ID NO: 105785 - DNA, 287 bp, Glycine max
gcttttcatcaaggaagtggtgctggagctcaagggtcaaatgttactggaagttatgtgatggacattgcttgtgggggtcggcatagtgttgtgataacagatgctggggcgcttcttacattcggctggggactgtatggccagtgcggacaagggaataatgctgatcagctaagaccaactctagttccttctttattgggaactagagtggaaaaaattgctgctggactttggcatacattgtgtgtttctgtaaatggtcaaatttatgcatttggtgg

SEQ ID NO: 105786 - DNA, 251 bp, Glycine max
ataccattctacttagagtatcttggcaacacaaggacattgcaagcagtttttgagcttgaagctcttgtcctcactggtcatttttctgagaacgatcatgaccctcctcggggacttcagctgatccttgggacgaaaactacaccccatttagttgatacccttgtgatggacaacctgggatattggcaaatgaaagtctcacctggagtttggtacttgcagcttgctcctggaagaagttccga

SEQ ID NO: 105787 - DNA, 227 bp, Glycine max
gcaattgaagttgaagtcttgcccttctctcttcaactccaaacacaagacatcatcatccatggctgcctccgtctccactgtcggagctgtcaacagagctcttttgaacctgaatgggtctggacctggggtttcagctcccagttcatccttctttgggagcagcttgaagaaggttattggctcaagtgtgtccccaacacaaagatttcctctggaagctt

SEQ ID NO: 105788 - DNA, 159 bp, Glycine max
atcccaggagatgccaaggacttcttcaatcaagttgaatctttagctcttctagagaacaacatggtttccatcccattggtactgtcacttcctgcaacggtttattcattatccaaaaaagatcagctcaaggttagggtgaacactgtacttggt

SEQ ID NO: 105789 - DNA, 284 bp, Glycine max
aatggcaacccaagcctctctcttaaccccacccctctccggtctcaaagccagcgaccgcgcctccgtgccatggaagcaaaactccagcctctccttctccagcccgaagcccctcaagttctccagaacaatcagagcagcagccgccgacgagaccacagaggcaccagcaaaagtagaggctgcaccggtcgggttcacccgaccagaacttgacccaaacaccccttccccgatcttcgggggcagcaccggcgggtccttgcgcaagcacaggtgga

SEQ ID NO: 105790 - DNA, 274 bp, Glycine max
gttgcttggcggggataagattaaagattcaacaatggcctacgcttctgctactcttctcaagtcatctcctgttcttgacaagtgcgagtgggtcaacctccagacccttcgccaacctctcgtgagatgtaacccttcctcagcatcagctctcaccatcaaagctgcttcctatgctgacgagctcgtcaaaaccgccaaaacagtggcctcaccggggcgtggtattttggcgatggatgagtcaaatgcaacctgcgggaagcgtttg

SEQ ID NO: 105791 - DNA, 220 bp, Glycine max
agagaatggctcccaagggtttaacctttctggctgtgttaatatgcgtttcagcactgtcactgagtccttctgctgcgggggaagggcaaaataatggccttgttatgaacttctacaaggaatcatgccctcaggctgaagacatcatcacagaacaagtcaagcttctctacaagcgccacaagaacactgcttactcctggctcaggaacatctt

SEQ ID NO: 105792 - DNA, 272 bp, Glycine max
ctcgagccgcgcaatatcttcaactctatctgcaacagccaactttctcgttcgtcgatcacaaaaatggcggcgaaacttcaaatatttacgggattgccccccgcgccatttcaatcttcctcctccactctctgcgtactcaagaagcctctctctacctccttcttcggcactgcacgagtggaagttctgaaacttcgagtgatgaggattgcgaacctgcgcgcggtggaggtgctctcggtgctcgcatgaactctttgacaggt

SEQ ID NO: 105793 - DNA, 217 bp, Glycine max
actgatgagctactggatggcccaaatgcttcacacatcatccctggggccttggacaggtgggagcaacgattcagtgatgttttagaaggtcgaccctatgttatgtatgatgctgccctctcaccgactgtctcaaagtgacccggatgatattcagcccttcagggacatgatcgaagggatgatggtagaccttcgaaagtcaagatacaat

SEQ ID NO: 105794 - DNA, 253 bp, Glycine max
aatcgtcgagaatccaaccttgatgatgtcaagcatgacaggtcagcctcttggagtcaccatggcagagtgaggagtcattcatgcaaatcatctaactgcggactccggtgacccgaaatattctgctttgaaacatcctagatgaaggagtttccacaacctccaaaggctggtggaaagaaagctcaacctttggcaaaaatgaaggaattggctagtcatggccaaaagtttgtgctcccctaaagaa

SEQ ID NO: 105795 - DNA, 290 bp, Glycine max
acttgttcaaccctttgcttctctttcaatctcttttcgcgatgctcgtgttttcactgcaccaaaatgctctcccaccactcactttcctcatcggaatttggttccaactcgagcatcattcatcgctggttccccactgttgattcgaagaaatcatggaaggaatggtgcatgcaaagcaatgcctgtttcaataagatgtgagcaaagtacccaggaagggaacagtttagatgtgtggctaggccggctagccatggttgggtttgcagtagccatcactgttg

SEQ ID NO: 105796 - DNA, 283 bp, Glycine max
  unsure (1)..(283): unsure at all n locations
agcaacttgaggacggccgtacccttgctgactacaacattcagaaggagagtactcttcacctcgtcctccgtctccgtggtggcatgcagatcttcgttaagacactcaccggcaagaccataaccctagaggttgaaagctccgacaccatcgataacgtcaaggccaagatccaggacaaggagggtatccccccggaccagcaacgtctcatcttcgccggaaagcagctcgaggacggccgcaccctcgccgactacanacatccagaaggaatcaa

SEQ ID NO: 105797 - DNA, 284 bp, Glycine max
gtcttcctgaacaagccttttatttggtaggtaatatcgatgaagctactgcgaaagctacgaacttagaaatggagagcaatttgaagaaatgactttaaatctttgtgtactgacccccaatcgaattgtttgggattcggaagtgaaggaaatcattttatctactaatagcggacaaattggagtattaccaaatcatgcgcctattgccacagccgtagatataggtattttgagaatacgtcttcttaaagaccaatggttaacgattcgcctgatgg

SEQ ID NO: 105798 - DNA, 100 bp, Glycine max
attcttatctgccgatctattcaatgctggaatcagacccgctattaatgtaggtatttccgtttccagagttggatcggcggctcaaattaaagccatg

SEQ ID NO: 105799 - DNA, 273 bp, Glycine max
tctcgagccgaatcggctcgagggtgcctctcttccatctccccagccaaaacctctctcagacaaggccacattacgccctaccgtcttcgcaacccttaacactccttcttctccttcctcttcatcttccttcccctctctcattcaagacaggcctgtttttgctgaccctgcccccatgatcaccccaactgtgagagaggatatcgcaaaggagtacgcgatagctattgaagaacttcagaaattgttgagggagaagagtgacct

SEQ ID NO: 105800 - DNA, 275 bp, Glycine max
cttgttcattgacaatatctttcgcttcgtccaagcaggatctgacatatctgccttattgggtcgaatgccttctgctgtgggttatcaatccactcttagtactgatatgggttctttacaagaaagaatcacttctaccaaagaggggtccataacttctattcaagcagtttatgtacccgcagacgatttaaccgatcctgcgcctgctacgacatttgcacatttagatgctactactgtactatcaagaggattagcggccaaaggta

SEQ ID NO: 105801 - DNA, 231 bp, Glycine max
aattcctaattgtctaaactcaattctcatttcttcatcgatctattcttctcctcctaaagatgcagatcttcgtgaaaactttgaccggtaagaccatcacccttgaggtggagtcctccgacaccatcgataacgtgaaagctaagattcaagacaaggaagggatcccacctgaccagcagagacttatctttgcgggtaaacagcttgaggatggtcgaaccttgc

SEQ ID NO: 105802 - DNA, 276 bp, Glycine max
ggtgtattcacggggagatgtggcacagcactagatcatggtgtcgtggctgttgggtatggaacagctaaaggtcatgattattggatcgtaaggaattcatggggttctagctggggagaggatggctacatcagattagaaagaaatcttgctaacagcagatcaggcaagtgtggaattgcaattgagccatcttatccccgtaagaatggtccaaatccccctaatcctggaccatcacccccttcacctgtgaagccgccaaatgtctgt

SEQ ID NO: 105803 - DNA, 278 bp, Glycine max
gaagaactgatgagctagtggatggcccaaatgcttcacacatcacccctggggccttggacaggtgggagcaacgattgagtgatgtttttgaaggtcgaccctatgatatgtatgatgctgccctctcacatactgtctcaaagtacccggttgatattcagcccttcaaggacatgatcgaagggatgagggtggacctgagaaagtcaagatacaataactttgatgagctctacctttactgctactatgttgctgggacagtaggccttatg

SEQ ID NO: 105804 - DNA, 262 bp, Glycine max
gtcgagaactcagaaggagaagcaaatggcttcctcaatgatctcttccccagctgttaccactgtcaaccgtgccggtgccggcatggttgctccattcactggcctcaagtccatggctggcttccccaccagaaagaccaccaatgacattacctccattgctagcaacggtggaagagtgcaatgcatgcaggtgtggccaccagttggcaggaagaagtttgagactctttcctacctgccagaccttgatgatgca

SEQ ID NO: 105805 - DNA, 243 bp, Glycine max
  unsure (1)..(243): unsure at all n locations
gagctacaagagttttagtgaaggtggacttgagttggaagccttgaaaccccagttacatccagccccttgattgcatggtacttatcgaacctccccgcatacaggaccgcagtgagcccactactaagagggatcgaggtgggcctggcccatggctaccttctggcccgnncattcgtgaaggccggagctctgaggaacaccgagatcgccgggcaagcaagctctctcgccgctggt

SEQ ID NO: 105806 - DNA, 196 bp, Glycine max
gtgtcttgcaattgaagttgaagtcttgcccttctctcttcaactccaaacacaagacatcatcatccatggctgcctccgtctccactgtcggagctgtcaacagagctcttttgaacctgaatgggtctggacctggggtttcagctcccagttcatccttctttgggagcagcttgaagaaggttattggctc

SEQ ID NO: 105807 - DNA, 196 bp, Glycine max
ttgatgaatgaggcggctattcttgcagccaggcgtgacctcaaggaaataagtaaagatgagatatctgatgcgcttgaaaggatcatagctggacccgagaagaaaaatgctgtagtctcagatgagaagaagaaattagtagcctatcatgaggctggccatgctctagtgggtgctttaatgcctgaatatg

SEQ ID NO: 105808 - DNA, 266 bp, Glycine max
ttctgagtactggcttcgtcgcgagtagatatggatgggaacctcataaggccccatcaccatttgcatgattggcgccggcagcgtccttgggtcccacctctgcgagaagctcatgtcggagacccctcacagtgtcctcggcttggatgtctacaatgacgagatgaaacacctcttggaacgctacacggtcccttgggcctcgcgattcgagttccatcgcctcatcatcaagcgcgattcgcgtctcgtaggcctcatca

SEQ ID NO: 105809 - DNA, 256 bp, Glycine max
gggagaagagtgaactcaaagcgacactgctgaaaaagtggagcagataacagcttctctagggacatcatcatctgatggcatcccatcatcagaagcctcagacaggatcaaagctggtttcattcacttcaagaaggagaaatacgacaagaatccagctttgtatggtgaacttgccaaaggccagagccccaagttcatggtgtttgcttgctcagactcaagggtgtgcccatctcatgtgctagattcc

SEQ ID NO: 105810 - DNA, 261 bp, Glycine max
cgttttgcagccatggaaacaggcatagcatgctacactcgcgggcctttcttgcctagtgtttcttccaagcactctccaccttccatttctccatcttttggcttgaggagtctgaaatcaagctctttatttggagaatcgctaagagtggcctccaaatcaacaataaaggtttcaaagacaaagaatacttcactcgtgaccagatgtgaaattggtgacagtctcgaagaattcctcacaaaagcaacaccagat

SEQ ID NO: 105811 - DNA, 264 bp, Glycine max
cttctttctctctctaccattgccatggatccctacaagcaccggccatccagcgccttcaattctcccttctggactacaaattctggtgctcctatttggaacaacaactcctctttaatcgttggagctagaggtccaattctgctggaggattatcatcttgtggagaagcttgcaaattttgatagggaacgtatcccagaacgtgttgtccatgccaggggcgctagtgcaaagggtttctttgaggtcacccatgac

SEQ ID NO: 105812 - DNA, 261 bp, Glycine max
ctagttttgtgatgtcctgctctgtcaccaagcaggtcattgctcagcttgagttgtggaaggagaagagtaccggcaagtacgagaagaaagtttacgttttgcccaagcaccttgatgagaaggtggctgcacttcaccttggcaaacttggagctaagctcaccaagcttagcccggcccaggctgattacatcagtgtgcctgttgagggtccatacaagcctgctcattacaggtactaagtaattgagattatca

SEQ ID NO: 105813 - DNA, 259 bp, Glycine max
atcaggtattcttacatgcagtcatggcaaagaagagaaagatgcagttgagatgtcgtgacatggaatggtggatgaggaggaggcagttgccatcgcgattaagacaaagagttcgccattttgaacgtcaaagatgggcagcgatgggaggagaagatgagatggaaatgatcaaagactgcccggaggggctgaggagggacatcaagcgccatctttgcctcgacctcattagaaaggttcctctattccacaa

SEQ ID NO: 105814 - DNA, 221 bp, Glycine max
ggcttatggtggatacctaggcacccagagacgaggaagggcgtagtaagcgacgaaatgcttcggggagttgaaaataagcgtagatccggggattcccgatataggtcaacctttcgaactgctgctgaatccacgggcaggcaagagacaacctggtgaactgaaacatcttagtagccagaggaaaagaaagcaaaagcgattcccgtatagcggcg

SEQ ID NO: 105815 - DNA, 194 bp, Glycine max
  unsure (1)..(194): unsure at all n locations
aggagatgactttaagagtggtcagaccaaaatgaaatcggtgtaggtggatttcctagtaggggccggcatcaagccaacatctatagtgagttacaaccatttgggaaacaatgatggcatgaatctctcagcccctcaaaccttccgctcgaaggaaaatancaagagcaatgttgttgacgatatggtca

SEQ ID NO: 105816 - DNA, 168 bp, Glycine max
ctcgagtcgattcggctcgatgtaggataggtgggacgtgatgacagcatacgaccaatcctgatagaccactctttcgtcaaatgattcctagccgccgcaccgaaaattcgggcggtgacgggacattgctacgtgggctatttatctggggcggatccctcctaa

SEQ ID NO: 105817 - DNA, 252 bp, Glycine max
attcaaagggtatctgggctctggatctgaaactgacgttgcacagtggaatgtactccaatttaatacaggctcgtcctcaccatttataataaaatgtggtgcaaactctaattccgaactagtcattaaagccgacgcacgagttcaggaaccgtaaggtagtgaaattgtgagggttgcccctagaccctccgttttggaaaatatgagcttggaggaaatgaaacaagtatttaatgaactacccga

SEQ ID NO: 105818 - DNA, 238 bp, Glycine max
gggagatccttcacgtgcagggagggcaatgcgggagacagatcggttccaggttctgggaagtggagtgcgacgagcacggcatagattggacggggaagtacgtcggaaactcagatgtgcgactcgagcgcgtgaacgtgaactacaatggagcctcgtgcgggcgcttcgtgcgacgcgcggtgctgatggagctggagcccggaaccatggaagcgtgcggacgggcgtacgg

SEQ ID NO: 105819 - DNA, 249 bp, Glycine max
  unsure (1)..(249): unsure at all n locations
cttcagcgttgcattcttttcgacacaacatcgtcgctgantacaggtcgatatgatggtgtccatcccagaaccacgcgatcttagctacttcactcactcgagcttcgatgatttccaccgccatacttacctcatgaccagctgcaccctcctctggaaggtactctccgaccacttctcctccctcgagcaatacctcagccacaaatccggagcgctcaaacgcaagattcgcaccatcgacaa

SEQ ID NO: 105820 - DNA, 260 bp, Glycine max
  unsure (1)..(260): unsure at all n locations
taataagtagtattgtcaggttacagttggagcgtgtgcagaagagaattgcagatcgtaagatgaaaatccaagttacagaagctgggantcaacttcttggtagtttggggtatgatccaaactacggtgctaggccagtcaagcgagttattcagcaaaacgtggagaatgaacttgctaagggtattcttagaggagagttcaaggaagaagacacaattttagtagacacaggagtcacggtatttgccaatggt

SEQ ID NO: 105821 - DNA, 263 bp, Glycine max
gttttctcttcctcgttcgtttcatttcgtttcgttgaagagcaactgtttactctctgtctctgtacaattctcccttttcttccctcgtagatcgaaagggaatatttctcactggcctccaagcggattctgaaggagctcaaggacctacagaaagacctcccaacctcttgcagtgccggtcccgtagcagaagatatgtttcattggcaagcaactataatgggtcccccagatagcccttatactgggggtgtttt

SEQ ID NO: 105822 - DNA, 261 bp, Glycine max
caaacacaaagacatcatcatccatggctgcctccgtctccactttcggagcttgcaacagagctcttttgaacctgaatggttctggagctggagcttcagctcccagttcagccttctttgggaccagcttgaagaaggatattgcctcaagggtccccaacagcaaggtttccggtggaagcttcaagattgttgctgtagaagagaagaaagagattgaagagacccagcagaccgacaaggacagatggaaggtct

SEQ ID NO: 105823 - DNA, 171 bp, Glycine max
ttttgccagaagaatatccaatggctgctccaaaggttatgtttctgacaaagatgtatcatccgaacattgataagcttggcaggatatgtctttacattctgaaagataagtggagtcctgcccttgggattcgcactgtacttttgagtattcaagctcttctaagtg

SEQ ID NO: 105824 - DNA, 246 bp, Glycine max
atttctcattagaaatgaacttggaggagagttcggtcctttccgtgtagacaaggtgttgcaagggaaaacctttgtgcctttaagtcctcaatgtccaagtcttgcaaagggtttgccatggagctggtcaagtgtctcagtgaatctgattgtgttaaggttgagaagagatcatgttaggaatgtgttggagagaagagtccatgtataccaagtgagtgtgttggactcaggggaactatt

SEQ ID NO: 105825 - DNA, 259 bp, Glycine max
ctgtttatcgcaaacatcagtggattggttgcagctggtgtcatcacatcaccttttgattatgctgatgtagttactaccacaactcacaagtcacttcgaggaccacgtggagctatgatattctacagaaaaggggttaaagagattaacaaacaaggaaaagaggtattgtatgactacgaagacaaaatcaaccaagctgttttccctggactgcaaggtggccctcacaaccacactattactggtttagctg

SEQ ID NO: 105826 - DNA, 258 bp, Glycine max
ttgagagaaaaaatattccatttccagaattagtagcactagtgctctcttttgtttcgaaaaaaatggttcaacaggaagtgcgtaaaggtccttggacagaacaggaagatttcaaattggtgtcctttgttggattgtttggagaccgtagatgggactttatagctaaggtttgaatagaacaggtaagagttgcagattaaggtgggttaattacctacatcctggcctcaagcgtggaaagatgacccccca

SEQ ID NO: 105827 - DNA, 259 bp, Glycine max
cacaaaagcacttgcaaactagttttgttttgggaacatcatcacattacattagattggtggtaatggcagcgtcactacaagcagcagctactttcatgcaacccaccaagttgagcaggagcaacactttgcagcaaaagtctactcagtccatttccaacgcttttggtttggaacctgttggagctaaaaaggtcacatgctcccttcaggctgatattaaggacttggctcacaagtgtgttgatgctaccaa

SEQ ID NO: 105828 - DNA, 261 bp, Glycine max
gcttcaaatgatcaagattgtggtcttactgcttcaaatgagaagatgcaagagaaatatcctgacaacttcaggcttgacttcgctgtgagccgagagcaaacaaacgagaacggagagaagatgtacatccaaacccgaatggctcaatatgcagaagagctgtgggaattactgaagaaggataacacttttgtgtacatgtgtggactaaaaggaatggaaaagggtattgatgacattatggtgtcattggctgcc

SEQ ID NO: 105829 - DNA, 261 bp, Glycine max
caaaactcaccaacacatagatgctcgatcaaagcctaggtttgatggagctgtacaagagcctcgaaagggaatcagaagtggtcatgtacctggtagcaaatgcatcccttttgcccagttgttagatagttcacagacattgttaccagcagatgagttgaagaagcgatttgaacaagaaggcatctctgtgagagagcccagctgtgacttcatgtggaacgggcgtaactgcttgcattcttgcattgggtcttc

SEQ ID NO: 105830 - DNA, 260 bp, Glycine max
agagtttggaaaacagaaggctaagagagaatatggagagtagtgagggaattaggtgtaaggtatgcgtgaccggcggtgctagttacataggctcttgccttgtcaagaagcttctgcaaaagggctacaccgtccactccaccctcagaaactttaaggacgagtcaaagataggccttctgagagggttgcctcatgctaatgatgagagactggtgttatttgaagcagacatatataaaccagacgagtacgac

SEQ ID NO: 105831 - DNA, 268 bp, Glycine max
gtggtaatggcagcgtcactacaagcagcagctacttttctgcaacccaccatcttgagcaggagtaacactttgcagcaaaagtctactcaatccatttccaaggcttttggcttggaacctgttggagctctcaaaggtcacatgctcccttcactctgatcttaaggacttggctcacaagtgtgttgatgctaccaaaattgcaggtatcgcccttgccacctctgccctcgttgtctctggggcaagtgctgaagtgttccca

SEQ ID NO: 105832 - DNA, 263 bp, Glycine max
gctttcctcggttataaccttcaaggtggaaagaaaaacccacccactatcccaattccaataaataccttcctctctatattttcgcacaataccctctctcccttcaacgatgagttactacaatcagcagcaactacccgtcggtgttcctcctccccaaggttacccaccgccggattcttacggaaaggacgcgtaccctcggccagggtacccgccgcaaggaggataccctccgcaggcgtatccagcacaggggt

SEQ ID NO: 105833 - DNA, 256 bp, Glycine max
atcaaattgcatcatttgcctttattttgatccagcttctgggatttatagcagtgatgtctcaagctgcatggcaggttttcgttgtctttatacctgtgatagcaatcagcgtcttgtatcagcaatattatattccatcagcccgagaactatcacgcttagttggagtctgcaaagccccaatcattcaccactttgctgaaacatttctggtactacaactattagaagcttgatcagcagtcaagattca

SEQ ID NO: 105834 - DNA, 239 bp, Glycine max
ggctcgagtgatgaggtatttacaaactggaaggattctccaagaacagtgctcaatatttatcatgaacttattcagatgggattgaggatatgggtgttcagtggtaatacagacgtggtaatacccgtgacatctactcgatgcagcataaaagctctcgaccttcctactgtgagtccttggcgagcatggtatgatgatggggaggtgggaggatggactcaagaatatgctgg

SEQ ID NO: 105835 - DNA, 255 bp, Glycine max
cttcttgaggtgctggcacggtcgcaaagactcccctcttgatgtcagtgccatcaacgacaccggtggcgtgaaacaagcctctcaccttctcaagtacgattcgatcgtcggaaccttcgatgctgatgtcaagcctgttggcagcgacatcatctctgtcgatggaaaggaaatcaaagttgtctctgaccgcaggcctgccaaccttccttggaaggatttggggatagacttggtgattgaaggactggg

SEQ ID NO: 105836 - DNA, 151 bp, Glycine max
agaaatttctgattccagagcacagatcacagctatccaattaataatagggactcttcataggatgcacgtctttggtgttgaaaacagggatactttaactcacaaggccacagggtattcagcaaagcttttaaagaagccagatcaa

SEQ ID NO: 105837 - DNA, 187 bp, Glycine max
aagtagttgagaactaagaagaaggaaatggcttcctcaatgatctcctccccagctgttaccaccgtcaaccgtgccggtgccggcatggttgctccattcaccggcctcaaatccatggctggcttccccacgaggaagaccaacaatgacattacctccattgctagcaacggtggaagagtac

SEQ ID NO: 105838 - DNA, 228 bp, Glycine max
  unsure (1)..(228): unsure at all n locations
attggaatgagtacaatctaaatccgttaacgcggttccattggacnggcaagtctggtgccagcagccgcggtagttacagctccaatagcgtatatttaagcccttgcagttaaaaagctcgtagttggaccttgggttgggtcgatcggtccgcctccggtgtgcaccggtcggctcgtcccttctgccggcgatgcgctcctgtccttaactggccgggtcgtg

SEQ ID NO: 105839 - DNA, 261 bp, Glycine max
ctcgagccgtgtcgttgcagcaactaacagggctgacattcttgactcggccttgttgagacctggccgatttgatagacaggtgacagttgatgttccagatataaggggaaggactgaaatcctaaaggttcatgctagcaacaaaaagtttgatgctgatgtttctcttgaagtgattgcattgagaacacctggctttagtggagctgatcttgcgaatctgttgaatgaagctgctatattagctggtcgccgtgg

SEQ ID NO: 105840 - DNA, 264 bp, Glycine max
ggtaaaagtgttgtcccaaagaaagagcatgtttctcctttctttcatcaccgttggaagagactgagatgggttcaaaaaccaagacttttacctttgaggaggtggctaagcacaatcacaggaaggattgctggattatagtcaaagggaaggtgtatgatgtcaccccatttttggatgatcatccaggaggtgatgaagttttagtgactgcaacagagaaggatgccaccactgattttgaagatatgggcacagtga

SEQ ID NO: 105841 - DNA, 266 bp, Glycine max
tggaagatatattaaggaaagaaaagaaaaggatccagaggttgagattgaagtagcaaccaagtttgctgcactgccgtggagatttggccgtcaaagtgttctcaatgcccttaaagattccctttgtcgactaggactgacttcagtggatctttatcagctacattggcctggagtttggggaaatgaagggtatattgatggtctgggagatgctgttgagaagggacttgtgaaggccgttggagtttcaaactatagtg

SEQ ID NO: 105842 - DNA, 256 bp, Glycine max
gaagacactgatacggccaaccccaatgatattgcttatgtcttctctggatatgcaccactcagcattcgactggtccagcatgccattcgatctggatggcgtcctgttgaagaaattttgaagctactgcctggacctcatttggaaatgaagaggggtggattctcaaatagcccatcatttgacacttatcagggattcaatccagcatagccaaagtacctgatggaaggcgcgctgtggtgcttgttgt

SEQ ID NO: 105843 - DNA, 261 bp, Glycine max
accaaactgaaccaaatcatcacacacacatactaagaagcaacaattcttctacaatggatctcctccttctggaaaagaccctcctagggccccttctccgttgcggtggtcgccatcgccgtctccaccctccgcggccggaaattcaagctccaacggggccaattcccgttccaatcttcggcaatggctccaagtcggcgacgacctcaaccaacgcaacctctacgatttgggcaaaaaattcggtgacatctt

SEQ ID NO: 105844 - DNA, 261 bp, Glycine max
ctcgagccgtgcatgggaacaaagtattaaatcagggagtccaattgacattgattcttccctaaggagctacgagagagaaagaagactacgagttgccattattcatggaatggctagaatggcggctctcatggcttccacttacaaggcatatctgggtgttggtcttggccctttagaattttgactaagtttcgtataccacatcctggaagagttggaggaaggttttttgttgacatcatgatgccttctatg

SEQ ID NO: 105845 - DNA, 261 bp, Glycine max
  unsure (1)..(261): unsure at all n locations
gtgattgattccattacagccccatcatgatgagtgctggagagttggaaagtggaaatgcaggagagccagcaaaactgatcaggcagagataccgtgaagctgcagacatgatcaagaagggaaagatgtgcgctctcttcatcaacgatcttgatgcaggagctggtcgtcttggtggaaccacacaatacactgtgaacaaccagatggtgaatgccactgctcatgaacattgnctgnnnataaccccaccaatgt

SEQ ID NO: 105846 - DNA, 260 bp, Glycine max
attcctgtgcgtggaaaggttcgagaatggtttcgctggaggaatctcgctcgaattcgagccgtttccccttggcgaggagttaccagtaccactcctcggtttcgtccaaaacgcagcgtcaaattggaaggtccatgcgcactatacgctccaatttcttccaagacgacaacagcagcagctgctccttcaccgagaaatccacgtgtctctcggaaaacctcaccgactccgtcgtcgacctccgtctcggcgag

SEQ ID NO: 105847 - DNA, 256 bp, Glycine max
cgcacgaatatcttgttgtttggagcgatccgagaaaaactctgtaaacatgttggtttaccaggacctccttacaggtgatgagcttctctctgactccttccgttacaaggaaattgagaatggaatgctgtgggaagttgaggggaagtgggttgttaaaggagcagtcgatgtagacattggtgcaaacccttctgctgagggtggaggagaagatgagggagttgatgatgccgctgttaaggttgttgac

SEQ ID NO: 105848 - DNA, 260 bp, Glycine max
tgcaattgaagttgaagtcttgcccttctctcttcaactccaaacacaagacatcatcatccatggctgcctccgtctccactgtcggagctgtcaacagagctcttttgaacctgaatgggtctggacctggggtttcagctcccagttcatccttctttgggagcagcttgaagaaggttattggctcaagggtccccaacacaaagatctcctctggaagcttcaagattgttgctgtagaagagaagaaagagatt

SEQ ID NO: 105849 - DNA, 231 bp, Glycine max
gcgacgtaactcggaatcgctcgagtgctctgctgctggaacaatcatgactttgtccacatgggctaattccaatgttgcagaggtggcttcaacaggacctggcattcgctctttccagctacatgtgtacaatgacaggaatgtgggtgctcagcttctgcaaacagctgcaacggctggaatctaagccattaccacctactgcatgatacaccatcactaggacgc

SEQ ID NO: 105850 - DNA, 262 bp, Glycine max
aagtagttgagaactaagaagaaggaaatggcttcctcaatgatctcctccccagctgttaccaccgtcaaccgtgccggtgccggcatggttgctccattcaccggcctcaaatccatggctggcttccccacgaggaagaccaacaatgacattacctccattgctagcaacggtggaagagtacatgcatgcagatgtggccaccaattggaccgaagaagttcgagactctatcctacttgccagacctcgatgatgc

SEQ ID NO: 105851 - DNA, 260 bp, Glycine max
tctcgagccgattcggctcgagggcttttgatgaagctattgctacattggatacactggacgaggagtcatacaaggatacgcactttgatcatgcaactccttcgtgataacctcacactttggacctctgacatgcaggacgatggagcagatgaaattaaagaagcagcaccgaaaccggatgacagtaaaaatattttactgctaattagaattgaactcctcctcaaaatctttttgaagggagaagtgtttgt

SEQ ID NO: 105852 - DNA, 258 bp, Glycine max
acagtgttgagatcaaatcactcaaggaactcactggcaagctcttccaggatatcagcaatctggatcatgcagcaaaaattaagagcagcccagaagcagagaagtactatgctgctactgtatcttctctgaacgatgtccttgccaaacttggttaatgtgattaatttcttgctttcttgtgtaagctttgtgcatcattttctcagacactttgttgactgatattttaagaaaatcaaatgatgagggaaa

SEQ ID NO: 105853 - DNA, 258 bp, Glycine max
gaactctggatcctgtaactgggaaaagaaactactcttacatggatgctgttagagtctatcttggcaataaaaggacatggttggctggttcacttcaatatttgagcttgtatggggttagtactgcttatgtaatttccacagcaacctgtttgagagcaatactgaaatcaaattgttatacaaggaagggcatcaggctccttgtaaatatggggatgcagtatatatgatgctgtttggactagttcagat

SEQ ID NO: 105854 - DNA, 257 bp, Glycine max
gttgcagccatggccacccacgcggctctagcttctacaaggatccccactaacaccaagttcccatccaaggcttcacactctttcccaacccaatgcgtctcaaagagacttgaggtgacagaattctctgggctaagatccacttcatgtgtgacatatgctaacgatgctagagaatcttccgttttgatcttgtagcttcccaactcactcccaagaccaatggatcatcaactcctgtgaggggagagaca

SEQ ID NO: 105855 - DNA, 238 bp, Glycine max
caagtagttgagaactaagaaggagaagcaaatggcttcctcaatgatctcttccccagctgttaccactgtcaaccgtgccggtgccggcatggttgatccattcactggcctcaagtccatggctggcttccccaccagaaagaccaacaatgacattacctccattgctagcaacggtggaagatgcgatgcatgcaggtgtggccaccagttggccagaagaagtttgagactc

SEQ ID NO: 105856 - DNA, 256 bp, Glycine max
accaaagccaatcccaatttctctcttataattcgtggcggctaagtcattctcgctcactccgatcccaccattgagtaccagcattggtataaggatgagttgtagattactatggtgaaggatgtagaggggtgccctgttttctctttgatcatcatggttactggtgaagctgtgaagcctctatcggtgtgactgtcactgttcggctgatagtttacaagctcgactatcttgatgagtctattctatg

SEQ ID NO: 105857 - DNA, 258 bp, Glycine max
gttgctgtaggagataagattgcagtagtgctaagtgctaacacctgcagtgaacaatggcctctgcatcagcatctctgctcaagtcttcacttgtacttgacaagtctgagtgggtgaagggacaaacccttcgccaaccttctgcatcagttgtgagatgcaaccccaccattacatcaggcacaccatcagagctggttcctatgctgatgagctcgttaagaccgcgttaacagtagcttcaccatggagggg

SEQ ID NO: 105858 - DNA, 264 bp, Glycine max
  unsure (1)..(264): unsure at all n locations
ggacaacataatggatggactctacttngctccagcttttatggacaagcttgttgttcacatctcctagaacttcatgaccttgntcaacatcaaggttcctttcattcttggtatttggggaggcaagggataagtaaaatctttccaatgtgagcttgtctttgccaagatgggaatcaaccccatcatgatgagtgctggagagttggaaagtggatatgcaggagagccagcagaactgatcaggcagagatacgtgga

SEQ ID NO: 105859 - DNA, 258 bp, Glycine max
gtccgttaatccttttgtgtttgcactgcgcttcgttttgggtgccttggcagccacatggtatgtgatggttccagtttacatgtggctcaaagatcaagttgttcccaaaggtcagccaatctaagagatattagtagttagtgatccttttgatactttatcagtatcttattcaaagtttctcaaatgtactctcaattaagagagatttgatcaaatgtcaagtagtttattacgtaactgagctcagatttg

SEQ ID NO: 105860 - DNA, 256 bp, Glycine max
ttttcatcccagaattcctcacaaagattggtatcctgaacaccccttcatggtacactgctggagagttggagtacttcacagacaccaccacactcttcatagttgagctctttttcatcggttgggccgagggtagaaggtgggctgacatcatcaagccaggctgtgtcaacactgacccctctttcccaacaacaagctcacaggaactgatgttgggtaccaggtgggcttggtttgaccacttggctgg

SEQ ID NO: 105861 - DNA, 249 bp, Glycine max
gaattcccaaggttcaacaactgctgcaggacttctttaatggaaaagagctttgcaagagcattaatcccgatgaggctgttgcatatggtgcggctgttcaggctgcaatcttaagtggtgagggcaatgagaaggttcaggatcttctcctcctggatgtcacccctctgtctcttggtttggagactgccggtggtgtgatgactgtcctgatccctaggaacactacaattccatcaaagaagg

SEQ ID NO: 105862 - DNA, 259 bp, Glycine max
ctctacttcttactgcagtgtggaattgagttgttcataccttcttgcactaattaatataggcagcatttcaacagtttaccagtgttatttagtgcaagaaggtatgaacaactctacttcttactgcagtgtggaattgagaaggagaacaacttcaagcagcccggagagagataccggtctgggcacctgacaggttcctgttctaaaatatgatatgatcaatgtgaaatgtgtttggtgatgtctaatgttg

SEQ ID NO: 105863 - DNA, 257 bp, Glycine max
ttatgcttagtgttgcacagtagtttattttaggtccttaacaggtcttcatcatccagcgacttggttcctttttaccggagtgtgcagtcatttaactctcatttttgcaggttccttcaacaggaaatctgttctttttggcatccattgccaccttttaaatggctgcatatctgagaactagctaccgggttctggagttaggaatctttgttactggtgttggcacctgatgtttttagctcggctttgca

SEQ ID NO: 105864 - DNA, 257 bp, Glycine max
aaagctgttacctcagtatcctataatccatcggcacccaatctccttgccactggatccatggacaaaacggtaaaactttgggatttgtcgaacaaccaaccctcttgtgtagcatctaaatctccgagagcaggggttatctttaaaatttctttctcagaggacaaccccttcttgttggcataggaggctcaaagggaaaattgcaagtttgggataccttatctgatgctggcatttctcgaagatatggg

SEQ ID NO: 105865 - DNA, 258 bp, Glycine max
aggagatgactttaagagtggtcagaccaaaatgaaatcggtgttggtggatttcctagtaggggccggcatcaagccaacatctatagtgagttacaaccatttgggaaacaatgatggcatgaatctctcagcccctcaaaccttccgctcgaaggaaatttccaagagcaatgttgttgacgtatggtcaacagcaacgccatcctctatgagcctggtgaacatccggaccatgtggttgtcattaagtatgta

SEQ ID NO: 105866 - DNA, 258 bp, Glycine max
gcttcaaatgatcaagattgtggtcttactgcttcaaatgagaagatgcaagagaaatatcctgacaacttcaggcttgacttcgctgtgagccgagagcaaacaaacgagaacggagagaagatgtacatccaaacccgaatggctcaatatgcagaagagctgtgggaattactgaagaaggataacacttttgtgtacatgtgtggactaaaaggaatggaaaagggtattgatgacattatggtgtcattggct

SEQ ID NO: 105867 - DNA, 257 bp, Glycine max
cagcaacatacggttgactatcccagtttcaagcttgtcatcgtaggcgacggaggaactgggaaaaccacttttgtcaagagacacataacgggagagtttgagaagcaatatgaaccaaccattggtgtggaggttcatccactagacttccataccaattgtggaagaattcgcttttactgctgggacactgctggccaagaaaaattcggtggtcttagagatggttattatattcatggacactgtgctat

SEQ ID NO: 105868 - DNA, 252 bp, Glycine max
tcgagcacagactcacttcaagttcccagcttttgccatttttcccactgtttattgagaagaactgcagaacatggcacagattttggctccctctacgcaatggcagatgagaatctcaaaatcctctcccaatgcaactcccattacatcaaacatgtggacttctttattgtggaacaaaataagaaagtttcacctaccagttctgctaaatttagagtgctggtcattaagtctgacaatagcaca

SEQ ID NO: 105869 - DNA, 254 bp, Glycine max
gaagaactgatgagctagtggatggcccaaacgcttcacacatcacccctggggccttggacaggtgggagcaacgattgagtgatgtttttgaaggtcgaccctatgatatgtatgatgctgccctctcacatactgtctcaaagtacccggttgatattcagcccttcaaggacatgatcaagggatgagggtggacctgagaaagtcaagatacaataactttgatgagctctacctttactgctactatg

SEQ ID NO: 105870 - DNA, 259 bp, Glycine max
gtaatagtaatatacataagtaacataaccaatggaagcgcgtgcaggagccaatcagcgtattgcaagaatctctgctcatcttcagcctcctgatttccaggaagggagtgatgttcttcttaagagtgctgagtgcagagcaaagggtggggcacctggattcaaagttgcaattttgggggctgctgggggaattggtcaacccctttctttgctgatgaagatgaacccattggtttcagttcttcatctttat

SEQ ID NO: 105871 - DNA, 259 bp, Glycine max
ttcaccaacaatgtcacttgcaggacggccatgagcaccagttgtgcggaaaaatgcgaggatgctgagaggatcaggaagctagtaaaggagtcctttgagctagctgcgaaattgtgctttggtgatgtgttgggccctttcaaggagttgagtttttgggtgtatgggaaaaaggccatagacatgagcacaaggtacgatgagttgttggaagaggtgctcaaggagcatgaacacaaaagattatcgcgtgcaa

SEQ ID NO: 105872 - DNA, 255 bp, Glycine max
taagaaggtgctcatcactgctcctggtaaaggagatatccccacctacgtggttggtgtcaatgagtatgactacagccctgatgaacccatcatcagcaatgcctcttgcaccactaactgccttgcaccctttgtcaaggtccttgatcagaattcggtatcatcaagggtaccatgaccaccactcactcctacaccggtgaccaaaggcttcttgatgcgagccaccgtgacctgaggcgtgcaagggca

SEQ ID NO: 105873 - DNA, 259 bp, Glycine max
gatgaaactaaaccgtgggcgactaagcttgtttactcggttgatttatggcaagatcaagttcgttgcttcatagaagaggtcattggtgaaccagtctatcttgtgggcaactcactaggaggattggttgcattgtattttgcggcaaacaaccctcatttagtgaaaggtgtcgcattgcttaatgcaacacctttttgggggtttctgccaaatcccataaaaagtccaagactagcgaaaatatttccatggg

SEQ ID NO: 105874 - DNA, 351 bp, Glycine max
cagaaagagaagcattagcaaaagcaagaagaactagtctaagcagaaatggcctcttcagtgatggcatctgtggccctcaaacctgcccctttcactgttgagaagtcctcagttagaggtcttccctccctctcaaggaactcctcttcattcagagttgtggccagtggtggcaagaagatcaagactgacaagccttatggaattaatggtggcatggctttgagggaaggagttgatgcatctggcaggaaaggaaagggaaagggcgtttaccagtttgtagacagatacggtgctaatgtcgatggttacagtcctatctacgacaccaaggactggtctcca

SEQ ID NO: 105875 - DNA, 348 bp, Glycine max
  unsure (1)..(348): unsure at all n locations
ggacaatggattggtcncaattgtggagctagagatcttgcttgttggggagcatggtattgacagaacttttgaagtagcaaaaaaggtctgggcagaggttttcttctaccttgctgagaacaatgtcctttttgagggtattcttcttaagcctagcatggttacacctggagctgagtccaaggacaaggccagtcctcagacagttgctgattacaccctcaagctccttcacaggagaattccccctgctgtccctggaattatggtaatgccaaatgcatcatcattctttgcattcctaacttccctccctttcatgtgctaattaaccatcctgtgcta

SEQ ID NO: 105876 - DNA, 163 bp, Glycine max
  unsure (1)..(163): unsure at all n locations
cgnccattcactggaactgtatctatcagatgcctaattattgctgcaacatgctacagtgctatgatgaccagaactatcattgttcgcaggatctacctccactctgtatagatgtaccagaagtatgagcacaggcactccaacatgcctgctcacatca

SEQ ID NO: 105877 - DNA, 237 bp, Glycine max
  unsure (1)..(237): unsure at all n locations
cgtaggcttgctcgcaatnttatggcaaggccaccacaagagaagcagcgcagcagtagttgcgccacatctgatttttctactgccgagacgccagagattgtgaagactattcaagaagcttgtgacaaagttgaagatanatatgcagtgagttcactggcagttgctggtgtggttgcattggtgggctcagctgggatgatctcagcaattgataggcttcctttaattcct

SEQ ID NO: 105878 - DNA, 123 bp, Glycine max
  unsure (1)..(123): unsure at all n locations
tgaanatggatcgagaatggggatcgaagccgtggagcggaggtgcggcgtcggcgcagaacgaagccatagaccggcgagagcgtctccgttcgatggctctggagaccatagacttggcga

SEQ ID NO: 105879 - DNA, 301 bp, Glycine max
  unsure (1)..(301): unsure at all n locations
tggtgaagatatctgaactgttgaagtatccagttagaggtctcgtctttgagggtggcgatacgctggaagatttatcaaatgttgtttcagatgcctgtatatgtcttcagaacaacaacatacctttcaatgttcttatctctgactgtggaaagcaagtctatctgttaccacagtgttatgcagagaaacaagctcttggagaagtggatgctgagcttcttgacacccaagtgaatcctgctgtgtgggaaattagtgggcacatggttctanagaggaagaaggattatgatga

SEQ ID NO: 105880 - DNA, 124 bp, Glycine max
tgtttgattggaggagatgactttaagagtggtcagaccaaaatgaaatcggtgttggtggatttcctagtaggggccggcatcaagccaacatctatagtgagttacaaccatttgggaaaca

SEQ ID NO: 105881 - DNA, 317 bp, Glycine max
agagagcaaaggtcagttatgacaatgacatggatggtagcaatggaaggaggaacttgatgttcgccgcagcggcggatgctgtttgctctgttgctgggatggcagtggcagatgagcctaaatcaggaaccccagaagccaagataaagtatgctccgatttgtgtcaccatggcaactgctaggatttgtcgcaattgagggactttggtttgtaaattacttctgatgattggaaatgtacgatggggttgttgtaatggcttgatgatttcagttgatcctcagtgtacaagatgttcataaaactatcga

SEQ ID NO: 105882 - DNA, 301 bp, Glycine max
atagagaatggctcaagcaatggcatcaatgactagcttacgtggttgctctcaggctgtgttggaaggtagccttggctccacacgcttgaatgtggggagtggaagcagggtggcctcagtcacacgtgcagggttcacagttagagcacagcaacaacaagtgaatggtggtgaggtacaaagtagccgtagggcagtgctttcacttgttgctggatggttgaccactggctcttttgttcaagctgtgcttgctgatgcccaacctatcaaagttggaccacctcccccaccttct

SEQ ID NO: 105883 - DNA, 121 bp, Glycine max
aacaagtagttgagaactaagaagaaggaaatggcttactcaatgatctcctccccagctgttaccaccgtcaaccgtgccggtgccggcatggttgctccattcaccgggctcaaatcca

SEQ ID NO: 105884 - DNA, 337 bp, Glycine max
  unsure (1)..(337): unsure at all n locations
agatcgtgagacggacggtagcagagattccgtgagtttcaaaaatgaaaacaattctttctgcagagaccatgaacatcccggacggcgtcatagtccaggttaatgccaaggtcatcgaagttgagggcccccgcggaaaattggtgcgagacttcaagcacttgaatctcgattttcagctcatcactgacgaaaacggtanaaggaagctgaaggtggaaggctggttcggttctcgaaaaacatccgccgccattcgcaacgccctgagccacgtggagaatctgatcaccggctgtcacaaaggtgctacgctacaaatgagggttcgtta

SEQ ID NO: 105885 - DNA, 109 bp, Glycine max
aggacttggaaagatggacaaagctgatgactctggacttgcttcatatgttgccggtcaaattgatcgtactcttagctggaaggatgtgaagtggcttcaaacaatc

SEQ ID NO: 105886 - DNA, 272 bp, Glycine max
  unsure (1)..(272): unsure at all n locations
attttgcagccaagagtggcaggatgtgtgcagaggcaattgttgaaggttctgagaatggataaaggatggtggaagaaggggacttgagagagtnattggagaagtgggacaagacttattggccaacttacaaggtcttggatattcttcagaaggtgttttataggtccaaccctgcaaaggaagcgtttgtggagatgtgtgctgatgagtatgtgcagaagatgacctttgatagctatttgtacaagacggtggtgcctggcaat

SEQ ID NO: 105887 - DNA, 323 bp, Glycine max
  unsure (1)..(323): unsure at all n locations
aatttgatgacttcaatcacaatgaaaaagagctaaaggcttatatcttcaactggtgtatgtttacctcattcttgggtgctttgatagccactttaggattggtttacattcaagagaatttggggtggggactagggtatggaatccccactgctggtcttctattgtctttggtcattttctacattggcacaccaatatatcgccacaaagtaagcacaacaanaactcctgctagcgacataattcgtgtgccaattgcagccttcaggaatagacactacaactcctagtaaccctcggatctctatgagcacact

SEQ ID NO: 105888 - DNA, 325 bp, Glycine max
  unsure (1)..(325): unsure at all n locations
gtttttctctcctaagcggagacaatcagtgaaagattctttgggattcaggagcttctttttgatgtttgtgaccgctcttgttggagtcacagcaaatctgaatgcatacgttaaaggtttattttatgcatcctctactgcagctaccgctatgagtaatctgataccagcattaacgtttgtaattgcggcaattgcgggatttgagaaagttgacataagcttaagaagcacggccaagatattagggacagtttgttgcgtcgctgaaaagcttaacatggctttggtcanaggacagagctgttacacacagagttcc

SEQ ID NO: 105889 - DNA, 332 bp, Glycine max
cgcccgagtacctggatgggagccttgtcggagactacggattcgacccatttgggctagggaagcccgtcgagtacctgcagtacgagttggactcgctggaccagaaccttgcgaagaacgtggctggggacatcattgggaccaggaccgagctcgcggacgtgaagtccacgccgttccagccctacagcgaggtgttcgggctgcagaggttccgcgagtgcgagctcattcacgggaggtgggccatgctcgccactctcggagctctcactgttgagtggctcactggtgttcatggcaagacgccggaaaggtggagctagtgg

SEQ ID NO: 105890 - DNA, 322 bp, Glycine max
gctcagggaaccatgttctgggccctctttgttcttggacatgattgtggtcatggaagcttttcaaacaatcctaagctgaatagtgttgctggccacttgctgcattcttcaattctagtaccatatcatggatggccgattagtcatagaacacatcatcaaaaccatggccatgttgaaaacgatgaatcttggcacccgttgccggagaaaattttcaagagcttggataatgtaacacgtattttaagatttacattaccttttccattgcttgcatatcgtattacctgtggagcaggagtcccgggaagactgg

SEQ ID NO: 105891 - DNA, 324 bp, Glycine max
accgtctcgaactcactagtactcagccgccgcaatcaggggggcacgtagctcgagcgcgcgctccacctggcccgacgcgatgcgggccaagtggaagaagcacaggatgcggcggctcaagaggaagcgccggaaaatgaggcagagatctaagtaggcgcatcttgagaccgaggatggcgagcttctcctgcaccatggctgtgacgcgttgggatgattgtctccctttgtagacgtgctttgctgtagacgtaggcgatgtaaaccgtcctttttgattaattctatatgttctgagactgggtttatattgtaatt

SEQ ID NO: 105892 - DNA, 329 bp, Glycine max
ctagagccgaggctcgaggaagttctactgggcaccaacaaggaaagaacgcattggtgtatgcaccggaattttacgcagtgatggtattcatgaacaggacattgtcaagcttgattaatactccctggccaatccattgatttctttggtgcactgagggacagagtatatgatgatgaagtgaggaagtggatttctggtgttggtgttgacagtgttgggaagaagcttgtgaactcaaaagatggacctccaacctttgagcagcccaagatgactctggagaagctcttgtgtatggtaacatgcttagtcaagaacaagag

SEQ ID NO: 105893 - DNA, 258 bp, Glycine max
ttgggaatctctcaagattttgaaattgctggtaatactcttatgccagttttttctgttccacaggctactgccagttcttgtgaaaatgcggaatcctctgcatgatctggaattcgtgtttcctttcgcttgttcgtttgtttaattcaataaaggaaattaggcatgaccctcttgttgagtatgctctgcctatctgaaaatttccacacctcttttaattgtcgtaatgatgtgtgaagtgtgtgttatttt

SEQ ID NO: 105894 - DNA, 321 bp, Glycine max
gttagtctagcagaaacaattagagggtttaaattgattctttctggagaattagatggtgcttcctgaacaagccttttatttggtaggtaatatcgatgaagctactgcgaaagctacgaacttagaaatggagagcaatttgaagaaatgactttaaatctttgtgtactgacccccaatcgaattgtttgggattcggaagtgaaggaaatcattttatctactaatagcggacaaattggagtattaccaaatcatgcgcctattgccacagccgtagatataggtttttgagaatacgtcttcttaaagaccaat

SEQ ID NO: 105895 - DNA, 318 bp, Glycine max
ctcgtgcatgtggatgggcatacggcatgaatgtttttgattaggtccaatggaagaggcaaaacatcactgaggtgtaccacaattggcagaagctgaatcatgatagacaactatggaagttaggaactctgccgccgggtcttataacattctggaaacgcactttccaactgaaccgatcttggcatgtcctgggtcttggctacaaccccaatatcaaccaaaaagaaattgaacgggctgctgttatacactacaatggaaacatgaaaccgtggcttgagatagttttcccaagttccgaggttattggac

SEQ ID NO: 105896 - DNA, 306 bp, Glycine max
ggacgttgtcaagattgttgacaccttccctggccaatccattgagttctttggtgcactgacggccagagtatatgatgacgaagtgaggatatggatttctggtgttggtgttgacggcattgggaagaagcttgtgaactcaaaagatggacctccaacctttgagcagcccaagatgactctggagaagctcttgacgtatggtaacatgcttgtccaagaacaagagaatgtcaagagagtgcaattggctgacaagtacgtgaacgaggctgcacgtggaatgctatcgacgatgctatt

SEQ ID NO: 105897 - DNA, 320 bp, Glycine max
cttcaccccaatcacactttccggtagttgttgcacttagtgtaacacatgagtacgctggatgcaacaaggactgaacttggtcttcttgctttatatttgggcaaggctgaagcaagggccaaaatatgcagggcaatacaatatggttccaaatttttgagtaatggggaacctggtactgctcagaatgtagacaaaacaaccagcttggcacgaaaagtcttccgtctctttaagtttgtcaatgacctacatgctttgataagtccaacaccacaggggacaccctccccctagctctgttgggaaagtccaag

SEQ ID NO: 105898 - DNA, 316 bp, Glycine max
ctgagatgcgggaggatgaatctgaaggagctgacattctcttggtgaagcctggtcttccttacttggatatcataaggctgctcagggataattctcctttgccaattgcagcataccaggtttctggtgaatatgcaatgataaaggctgccggtgctctcaaaatgatagacgaagaaaaggttatgatggagtcactgatgtgcctccgaagggccggtgctgatatcatcctcacatattctgctctgcaagctgccagatgtttgtgtggagagaagagtgaagttctctgattatgtagggcgttgtt

SEQ ID NO: 105899 - DNA, 315 bp, Glycine max
gtacaatgtcctccctgccattacctttctcatggcttgtattcttaggcttgagaaggtacaactaaaaagtatacgcagtcaagcaaaggtggtagggactttagccactgttgtaggtgccatgctcatgaccctgataaagggcccaatacttgatctttttggaacacacgcaagtagtacccaacgtcagcaaaatggtggggtgaatcttcaacatgcaataaagggatcagtgatgatcacaattggctgctttagttgcgcttgtttcatgattctcaagctattaccattgaagcctaccctgct

SEQ ID NO: 105900 - DNA, 322 bp, Glycine max
  unsure (1)..(322): unsure at all n locations
cactcacatatacacatatctgactgtcaggctgacgaggttggattggaggattaggaatgatggatggatcgaaagagaagagactngaaccacagcatcaatccctccaatccaaccacctcagcctcacactcatctatacacatatctgaacgcgtatcgtccctcctatggcttcaaagcgcatcctcaaggagctcaaggacttgcagaaagacccaccaacttcttgcagcgctggtccagtagcttatgacatgttccattggcaagcaacaataatgggtctgctgatagtccttatactggaggtgtattc

SEQ ID NO: 105901 - DNA, 320 bp, Glycine max
cggctcgagttgatggtcttgcgtctcgctcagctgtatactaccagcaaggtgcccgactcgccaaatggcgtactgttgtgagcatccccaacggtccctctgctctggcagtgaaggaagctgcctggggtctagctcgctatgctgcaatttcacaggagaacgggttggtcccaattgtggagccagagatcttgctcattcgtgagcatgggattgacaggacattcgaagtagcccaaaaggtgtggtcagaggtattcttctacctggctgagaacaatgtccgttggaaggtattctcctcaagcctagca

SEQ ID NO: 105902 - DNA, 327 bp, Glycine max
tggaaagactacctcaaattctaccagctaggaacctattggccatacactccttccatacatttgctgtatggtctgagagctgctcttgatctgatttttgaggaaggactcgaaaatgtgatcgcaaggcacagtcgtttaggcaaagcaaccagacttgctgtagaggcatggggtttgaagaattgcacccaaaaggaagagtggtacagtgacactgtgactgctgttcttgttcctgcttacattgatagtactgaaatagttaggagggcatggaagagatacaattgagcttaggtcttggactgaacaaagttgctg

SEQ ID NO: 105903 - DNA, 326 bp, Glycine max
ctcaagtccatggctggcttcgccaccaggaagaccaacaatgacattacttccattgctagcaacggtggaagagtgcaatgcatgcaggtgtggccaccagttggcaagaagaagattgagactctttcctacctgccagaccttgatgatgtacaattggcaaaggaagtagaataccttcttggaagggatggattccttgcttggaattcgagttggagcacggtttcgtgtaccgtgagcacaacaggtcaccaggatactacgatggacgctactggaccatgtggaagctgcctataattggttgcactgatgcttct

SEQ ID NO: 105904 - DNA, 312 bp, Glycine max
agtcagggaacatgttctgggccctctttgttcttggacatgattgtggtcatggaagcttttcaaacaatcctaagctgaatagtgttgctggccacttgctgcattcttcaattctagtaccatatattggatggagaattagtcatagaacacatcatcaaaaccatggccatttgaaaacgatgaatcttggcacccgttgccggagaaaattttcaagagcttggataatgtaacacgtattttaagatttacattaccttttccattgcttgcatatcctatctacctgtggagctagagtccggg

SEQ ID NO: 105905 - DNA, 299 bp, Glycine max
aatctgcatgcacacacttgcatagttgtggaaaccaagaatttttgaagggtagcatcaacaagaagttctggaaatggagatcaccaatgtcagcgagtatgaagctattgcaaagcagaagttgccaaagatggtgtttgactactacgcatctggtgcagaggaccagtgactctgcaggagaacagaaatgccttttccagaattttgtttcggcacgtattctgattgatgtgagcaagatagacatcacaactactgtcctgggcttcaaaatatccatgcgaatcatgctt

SEQ ID NO: 105906 - DNA, 284 bp, Glycine max
cagaagaacaagtagttgagaacttagaaggagaagcaaatggcttcctcaatgacatcttccacatctgttaccactgtcaaccgtgcaggtgccggcatggttgctccattcactggcctcaagtccatggctggcttccccaccaggaagaccctgaatgacattacctcattgctagcaacggtggaagagtgcaatgcatgcaggtgtggccaccagttggcaagaagtagtttgagactctttcctacctgccagaccttgatgatgcacaattggca

SEQ ID NO: 105907 - DNA, 339 bp, Glycine max
agctggagtgatatggttatacaacatagcactctatatccgagctgaccccatcaagtttgtaattcgatatgctttgagtgggagggcttgggagcttgtcattgagcaaaggattgcattcacaaggcaaaaggactttggaaaggaacaaagggaacttcaatgggcacatgcacaaagacaatgcatggattacaaccacctgacaccaagatgttcaccgagcgcccacatttcaacgaactcaaccaaatggctgaagaagctaaaaggagagctgaaattgcacggctgcgagagctgcatacactgaagggtcatgtagaatcagttttg

SEQ ID NO: 105908 - DNA, 302 bp, Glycine max
gaaggagttctaagtgtagaatgtactgtagttgtttctgaatatggagaattgttatgggatctcttggtatcaggggtacgacctgatgatgtatgctcacaggttggtttatgtttcaaaagggctaaatcagagagcaatggaattgagatggtgaccgaaaagggcaaagagagttatcagctaaagatactgctttgtgcacttcctgtcagatgcttgtggtttggattcagaatcaactaaaacaaaagaagaccaaggagatagtattcaactatgtaaatcagctgtgcgag

SEQ ID NO: 105909 - DNA, 321 bp, Glycine max
ctacagttcaggtgcttttgcaaccattaaccatcttcacttccaggcttattacgacatactgcccttcccaattgagaaggcccccactaagaaaattgcaagtttaaatggtggggtgaacacatctgaactgttgaagtatccagttagaggtctcgtctttgagggtgcgatacgctggaagatttatcaaatgttgtttcagatgcctgtatatgtcttcagaacaacaacatacctttcaatgttcttatttctgactgtggaaagcaagtctatctgttaccacagtgttatgcagagaacaagctcttggag

SEQ ID NO: 105910 - DNA, 330 bp, Glycine max
tatcgaccgaatcggctcgagatggccacccaagcggctctccagtctacaaggatccattcaaacacaaggttcccaaccaaggcctctcactccttcccaacccaatgcgccttaaagagacttgaggtgacagaattctctgggcttagatccacttcatgtgtcacatatgtaacagtgctagagaatcttcctactctgatcttgtagcttcccaactcactcccaagaccaatggatcaactcctgtgcagggagacacagtggccaagttgatagtggcaatcaatggattcggacgcattggctagaactccttcgctgctg

SEQ ID NO: 105911 - DNA, 330 bp, Glycine max
tcaaaacatacacactaagatctctttctttgcatccttcctagtgctgcttcttgcagcccttatcctcatgcatatacggcttgctacttactacaaaccaattaagaagccaccattgtacaagcctccagtgtacaagccaccagtgtacaaaccactggtttataagcaaaaccaccggtttacaagccgaaaccaccggtttacaagccaccatataagaagccaccatacaagaaaccaccttatggaaagtaccctccagtagaggacaacacccatgcctacagcaagcaatgaggtctattatctacttaatagataaga

SEQ ID NO: 105912 - DNA, 328 bp, Glycine max
  unsure (1)..(328): unsure at all n locations
aagtagttgagaactaagaaggagcagcaaatggcttcctcaatgatctcttccccagctgttaccactgtcaaccgtgccggtgccggcatggttgctccattcactggcctcaagtccatggctggcttccccaccagaaagaccattaatcatattacctccattgctagaacggtggaagagtgcaatgcatgcaggtgtggcgaccagttggcaagaagaagtttgagactctttcctacctgccagaccttgatgatgcacaattggcanaggaagtagaataccttcttaggcagggatggattcttgcttggaatcgagt

SEQ ID NO: 105913 - DNA, 303 bp, Glycine max
tggatcgtgagatggacggtagcagagattccgtgagttgcaaaaatgaaaacacttgcctcatgcagagaccatgaacatcccggacggcgtgagcgtcaaggttaatgccaaggtcatcgaagttgagggcccccgcggaaaattggtgcgagacttcaagcacttgaatctcgatttcagctcatcactgacgaaaacggtaaaaggaagctgaaggtggaggcctggttcgagtctcggaaaacttccgccggcattcgcaccggcctgagccacgtggagaatctgatcaccggcgtc

SEQ ID NO: 105914 - DNA, 325 bp, Glycine max
  unsure (1)..(325): unsure at all n locations
ctatgtcgaaggtggtttgtgtcaccggagccagtagcaccgttggatcactggtggtcctcatcctccaccacatcggttatacggtccatgccaccgtccaagacatcaagcatgaaaatgagacgaaacatttggacgaaatggaaggagcaaagagtcgtctcaattttttaaaatggacctccttgacatcgactccattgccgctgccataaagggttgctccggcgtaatccacctcgcatgtcctaacatcatcggtcatgtcgaagatcctgagaagcagatactggagccggcgataanaggaacagttaatgtg

SEQ ID NO: 105915 - DNA, 276 bp, Glycine max
  unsure (1)..(276): unsure at all n locations
atcgtgaatgcgtataaaaggaaaataaagaaattagcgtcaaaatgttgggtgtgttcagcagctccatagtgtcgccgccggacgagctcgtggccgccggcagccgtactccgtcgccgaagatgacggcggcggcgctgcggaagcggttcgaggagaagaaccctccgccgtgtcggtggaggtcggagagcatgtccagctcgcttatacccaccacaacgagtcgctgtttcagcncagatcgtttgctgtcaacgatgaggtgttctg

SEQ ID NO: 105916 - DNA, 326 bp, Glycine max
atacatagtcactttacactcactcttgtgtcattgccttcatggccaagccactgctcttgaggtatggaacccaagtggcaaatacagagttgttagcaccaaaccaatgcctggaactcgttggatcaatcttctcgttcaaaatgatgttcgccttgaaatatgaccgagaagaatacgattctgtcagttgaagacatcattgctttgattggtgataagtgttatggagttattggacagctgactgaagactggggagaatagttgttctctactttgagcaaagctcggagcaaagctttcagtaacatggctgttgg

SEQ ID NO: 105917 - DNA, 318 bp, Glycine max
caatctctctctctccaatggccaaagacctcgaaacggagattcacagtgggctccctcacaaggactaccacgacccaccctccgccccattctacgaccccgccgagctcctccagtggtccttcttccgagccctcatcgccgagttcgtcgccaccctcctcctctctacgtcaccatcctcaccgtcatcggctacaaccaccagacagccaccgccgccgagctctgcctctgcgtcggcgtcctcggcatcgcttgggcctttggaggcatgatttctgtcctcgtctattgcatcgcggcatatcaggg

SEQ ID NO: 105918 - DNA, 315 bp, Glycine max
  unsure (1)..(315): unsure at all n locations
gcttgaagaaggttattgcctcaagggtccccaatagcaaggtttccggtggaagcttcaagattgttgctgtagaagagaagaactangttgaagagacccagcagaccgacaaggacagatggaagggccttgcctatgatatctcagaccaacaacaagacatacaagaggaaagggcttggttgactcccatttccaagctccacaggatgctggaagtcactatgcagtcatgagctcctacgagtacctcagcactggacttcgccagtacttggacaacaaaatggactggatctacattgctccagc

SEQ ID NO: 105919 - DNA, 301 bp, Glycine max
gtgataagctacaaaagagccttcatctattccatcatgtcgccacacataaatggctgtgtgggctacaggattccatttcatctctagatgagtatcgttcttcccgcaacatagccatcagcttgttcaggcgatacaggaacttcattgatcgtggtggagccgacatctaaaagagttcatcactgccggggtaaatgcatatgcactaggatgcaccgatgaaggattaaggaaagaacttatggatatgaagaactctgggatcgaaattgatgtaatgcaaagttatggtgga

SEQ ID NO: 105920 - DNA, 294 bp, Glycine max
aggctcgagggtgtttatgcaattggagatgtaattccaggcccaatgttggcacacaaggcagtagaagacggtgttgcttgtgttgagtacatagctggtaaggtgggccatgtggattatgacaaagtccccggtgttgtctatacaatgcccgaggttgcatctgttgggaagacagaggagcaggtgaaggaacttggagttgaataccgtgttggcaagttcccgttcatggctaatagcagagctaaggcaattgacaatgctgaaggactggtgaagatattggct

SEQ ID NO: 105921 - DNA, 285 bp, Glycine max
gggatttcatcttttaacgaaggagacccatccactgccccgtcactgaccttgacgggccgcaagaaggagcccgatcagctccaaactgctgatgggtgggccaagttcaccggaggcttcttcttcggaggcatttcgggtgttattagggcctacttcctcctctacgtcttggaccttccttactacatcaagtgaagaaagtgcttattatctttgtttactttttgttgttattcattctctatgaatggacaatgggtggaaatggatccttatttg

SEQ ID NO: 105922 - DNA, 111 bp, Glycine max
cggctcgaggtgttatgcaatggagatgtattcgcaggcccaatgttgtcacacaaggacgatgaagacggtgttgcttgtgttgatgacatagctggtaaggtgggccat

SEQ ID NO: 105923 - DNA, 306 bp, Glycine max
  unsure (1)..(306): unsure at all n locations
ggcagctgcttctcctatggcaagccaactcaagtccaccttcactanaactcttgtagctcccaagggcctctctgcctcttcaccactccacctcctgccttctaagaggcaatttagcttcactgttagggccatccagtcagaaaagccaacctatcaagtgattcaaccaatcaacggtgatcccttcattggaagccttgaaaccccagttacatccagccccttgattgcatggtacttatcgaacctccccgcatacaggaccgcagtgagcccactactaagagggatcgaggtggg

SEQ ID NO: 105924 - DNA, 285 bp, Glycine max
  unsure (1)..(285): unsure at all n locations
atccttggcatggcaagccgtgaagctgggcccatcggccccagatgatnnnaaggttgagcatgaggactgccgtcaccaagcaggtctcctcaggaagcccatggtacggcccagaccgagtcaagtacttgggcccattctctggcgagcccccgtcctacctaagtggtgagttcccaggcgactacggctgggacactgctgggctttccgcagacacggataccttcgccaagtaccgtgaactcgaagtgatccactccaggtgggccatgctcggag

SEQ ID NO: 105925 - DNA, 114 bp, Glycine max
  unsure (1)..(114): unsure at all n locations
atcaagtgcttgttcatgatggtcagaatgttagcttgttgtactaggtggattgtaaatcacgtatcttgctagagtnctccgcgcggagcgtgaanatgcagagaattacaa

SEQ ID NO: 105926 - DNA, 114 bp, Glycine max
  unsure (1)..(114): unsure at all n locations
acaatacttcctaggactagagaagggtcttggaggttctggtgagccagcttacccaggaggacctttcttcaacccacttggcttttgtaaggangagaagtccttgaagga

SEQ ID NO: 105927 - DNA, 300 bp, Glycine max
tgggggctcaatggttggcagcttcagtgcatctactcaacgtgagccattagttgttgcaaaaccctcaacgtttatcatcgattacttggcaaacaaattcggcatttcgaagtcacagatatgtatggttctcgacagattagacactgatatcttgcttgctcaaaatcgtggatgcaaaactcttcttgtgctctcatgggtcaccacactgtgccagcttcagagccataacaactccatacagccagacttctataccagtaaaatctcagattgtctgaccctgaaagctgc

SEQ ID NO: 105928 - DNA, 213 bp, Glycine max
  unsure (1)..(213): unsure at all n locations
agcagcccgaggaganagccgttaccaagtggaacccatccgtcgaagggtacctgaaatttcttgtggacagtaagctcgtttatgacacgctggagaaaatcgttcatgaggctcctcatcctttttatgctgaattcagaaacactggattggaaaggtctgcaagtttggtagaagatttggattggttcaaggagcaaggttatacca

SEQ ID NO: 105929 - DNA, 167 bp, Glycine max
ctgggacactgctgggctttcggccgacccagcaaccttcgccagaaaccgtgagctcgaagtgatccactccaggtgggccatgctcggggccttgggctgcgtcttccccgaactgttgtcccgcaacggggtcaagtttggagaagctgtgtggttcaaggccg

SEQ ID NO: 105930 - DNA, 240 bp, Glycine max
ggcaacagtgagaacactattgaattttgattctagcaagcagagcttttgtcaattttctattgaccttgcaggtggaggaattttagtggacaaaactggagattggatcaaatgtatacaaaattctccaattagtaacttgttgagagttgctgcttggaagaaaggctgtttaatggttaagattgtgatgtctgggaatgcagcagtcaaaaggagtgattgggcctcattggt

SEQ ID NO: 105931 - DNA, 304 bp, Glycine max
aagcagcatgtcttcctccggctatagttgttgcagatctcggatgttgtaaaattagtgtatgatgtgaagctatgggctggaaaatgtggatgtaggagatttcgggacgaaaggcctcaaaacgcttcgtcgtttgtggttactgagtcctgagtgatcttgtcatccgacctttgccatgacaggtgcgcttgctcggcaggtcaaaatatgttaataaaaaaagttttattggtttagggagagatcgcacgggagttgcccggggtctctctctcgtgtggtgtgtggtgtttgctgt

SEQ ID NO: 105932 - DNA, 291 bp, Glycine max
ctcagacaagccgtgttctttgtaatcgctcaacgcttcaccttttctgcatatgcagcaactcgtgaaatcacaaaccgatgcacatacactgtctgggctgcgtctgtgcctgttggcggtgacgtgcaattaaacccgggccagtcatggtccgtggacgtgcctgcaggaacgaaaggggcccgcgtttggttccgaaccggctgcaacttcgacggttcgggccgcggtggatgccagaccggtgactgcgggggtgtcctcgactgcaaagcttacggtgcgcct

SEQ ID NO: 105933 - DNA, 240 bp, Glycine max
ggactaattggtatataccatgattggtgcggaatcatttggcacttatccaagaacatatgaccttttgcatgctgatcatttgttctcacggctcaaaaacaggtgcaagcagcctgtgaccattgttgtcgagatggaccgtatattacggccaggaggttggtgaattatacgtgacaaagttgaaattctagatccgttggaggaaatattgaaaagtatgcagtgggagattag

SEQ ID NO: 105934 - DNA, 341 bp, Glycine max
gccaaagggtggtggatttggcacacctagtagcaagcaagtggccaggggcagctaaagcagggagtggagacccattggaggaattctgcgagacaaaccctgctgatgaggaatgcaaagtatatgaatagaggagagcgcctttttatgatttgatgattaccattaccagcagcaaaccatttttactctttgccttgtgttaacgtatcatgtgaaaaagaaggaaattgttcgttcagacggtgtctgaggagagattttcaaagtttaacattatctgcagccaataataaattttggcgtgactgaaattcatgaatatcgcccatatatta

SEQ ID NO: 105935 - DNA, 268 bp, Glycine max
gctgagattttcagtaacccaaaggtccaagcagaagttccatggtatggtgtagaacaagagtacaccttacttcaaacaaatgtgaaatggccattaggttggcccgttggtggctatcctggtcctcagggtccttattattgcagcgctgtagcagacaagtcatttggacgtgacatatctgatgctcattacaaggcttgcttatatgctggaattaacatcagtggtaccaatggggaggttatgcctgggcagtgggagt

SEQ ID NO: 105936 - DNA, 336 bp, Glycine max
acacaacaagtgtttctgtaaccatggcatccaccactctatcccctacaaccccttctcagctatgctcaggaaaaagtgggattttcagttcctcacaggcatctcttgtgaagccagtgaagaggcagatgatggggaagagcaagggattgagaattgcatgccaagccaccagcatttccgctgatagagtccctgacatgggcaaaagacagctcatgaatcttcttcttcttggtgccatttcactccccactgctggaatgcttattccctacacctacttctttgtccctccaggttcaggttcttcagctggcggtactgttgcca

SEQ ID NO: 105937 - DNA, 336 bp, Glycine max
caagatggcaggatatcaagcattcgatcatgttacattctatgtgggcaatgcgctccaagcggcgacattctacatcgcgagattcggaatcaccccctaggcatacagtggtttagagaccaactcacgccaagtctgcacacacgtagtcagacagggctcgatcaactttgcattttcctctgctctgaacccagagggcaaggagaccgacgagatcggtcaccatgtctggaaacatggagatggttgcaaagacgtcgcattcaaagtcaatgattgccgtgccatatatgagaaggcatagagagaggcgccaatctgtctccgccc

SEQ ID NO: 105938 - DNA, 318 bp, Glycine max
caactacaaaggttgctgtaggagataagatattgaagtagtgctaagtgcctaacacctgcagtgaacaatgccctctgcatcagcatctcttctcaagtcttcacttgttcttgacaagtctgagtgggtgaagggacaaacacttcgccaatcttctgctgcatcagttgtgagatgcaaccccaccaccccatcaggcctcaccatcagagctagttcctatgctgatgagctcgttaagaccgcgaaaacagtggcttacacagggaggggtattttggccatggatgagtccaatgctacctgtgggaagcg

SEQ ID NO: 105939 - DNA, 335 bp, Glycine max
cttagtgtgctccaccctatttataaacttttgttgcctcactatcgtgacaccatgaacatcaatggactcgcaagacaatcactcatcaatgcaggtggcattattgagcaatcatttctgcctgggccatttgctgtggagatgtcttcggcagtttacaaggggtgggttttcactgatcaagcccttcctgcggatcttatcaagagaggaatggcagtggaggatccatcctctccctatggccttcgccttgtgatagatgactacccttatgctgttgatggactagagatatggagtgctatccagacatgggttaaggactacgt

SEQ ID NO: 105940 - DNA, 164 bp, Glycine max
gattgtttgttgttgtaactcgttcttcttcttttgttgttctgtgtttgtgtttgttttttctctcacctgaaaatgtcttgctgcggtggtaactgtggttgcggaagctcctgcaagtgcggcaacggctgcggaggctgcaagatgtacccagacttgag

SEQ ID NO: 105941 - DNA, 204 bp, Glycine max
  unsure (1)..(204): unsure at all n locations
canaacactcataacacaaagcacaaagcaaagctcatccttgagttaaaaaatggcagcagcttcttccatggctctctcatccccatccttggctggcaaggccgtgaagctgggcccatcagccccagaagtgggaagggtgagcatgaggaagaccgtcaccaagcaggtctcctcaggaagcccatggtacggcccaga

SEQ ID NO: 105942 - DNA, 336 bp, Glycine max
gcagaagaacaagtagttgagaactaagaaggagaagcaaatggcttcctcaatgatctcttccccagctgttaccactgtcaaccgtgccggtgccggcatggttgctccattcactggcctcaagtccatggctggcttccccaccagaaagaccaacaatgacattacctccattgctagcaacggtacaagagtgcaatgcatgcaggtgtggccaccagttggcacgaagaagtttgagactctttcctacctgccagaccttgatgatgcacaattggcaaaggaagtagaataccttcttaggaagggatggattccttgcttggaatt

SEQ ID NO: 105943 - DNA, 275 bp, Glycine max
aaatggacaacgccaataataacaagcaaaacatagatgacaaagacgaagatcctgacagcaagaaatgcagttctaattatgaagcaatgcagaaaaacctgccatttgtagaaaataacgagggactgttaaccatagggcttggacaaggaaagcttaagactcgtcgaacaggctttaaaccctacaaaagatgttccatggaggccaaggaaaatagggttggagcgagcaacaatcaaggtgaagagcaaggttgtaagagaatacgt

SEQ ID NO: 105944 - DNA, 217 bp, Glycine max
aaacgggtggtgcctctcttccatctccccagccaaaacctctctcaggaaggccacattacgcccttccgtcttcgcaacccttaacactccttcttctccttcctcttcatcttccttcccctctctcattcaagacaggcctgtttttgctgcccctgcccccatcatcaccccaactgtgagagaggatatggcaaaggaatacgagaaagct

SEQ ID NO: 105945 - DNA, 224 bp, Glycine max
gtggtgcctctcttccatctccccagccaaaacctctctcaggaaggccacattacgcccttccgtcttcgcaacccttaacactccttcttctccttcctcttcatcttccttcccctctctcattcaagacaggcctgttattgctgcacctgcccccatcatcaccccaactgtgagagaggatatggcaaaggaatacgagaaagctattgaagaacttc

SEQ ID NO: 105946 - DNA, 278 bp, Glycine max
  unsure (1)..(278): unsure at all n locations
gtgagagagagagcgagcagtttcagacacagatagagctagntgggattggagggattgacgctgcgtctcttcctcttctctttcgatccatccctcattcctaatcctccaatccaaccacctcattctcacactcacatatacacatatctgaacgcgtatcgtccctcctatggcttcaaagcgcatcctcaaggagctacaggacttgcagtaagacccatcatcttcttgcagcgctggtccagtagctgaggacatgttccattggcaag

SEQ ID NO: 105947 - DNA, 305 bp, Glycine max
gagagaagttgcgaagagataggcttaatgacaagtttgttgaattgggctccattttggagcctggaaggcctgccaaaacggacaagactgctatcctgattgatgctgtccatttggtgacccaattaaggggtgaagcccagaagttgaaagacactaatcagggtcttcaagaaaagattaaagatttgaaggctgagaagaatgaacttcgcgatcagaaacagaggctcaaggcagagaaggagaagctggagcagcagctgaaatcattgaatggacagcctagtttcatgcctccc

SEQ ID NO: 105948 - DNA, 324 bp, Glycine max
ggcaaacacaaacagcgacaccaaagaagaaagcataaaaatggatgaaagagagacaatacctctcctcacctcatacaagatgggaacttttaatctatcccacaggattgtgttggcaccgttaacacgatcaaggtcttacaacttcgttcctcagccgcatgctgctctgtattattctcaaagaatcactaagggtggcttctcgatcggggaagctactggtgtatctgatacggcaaaggatgggtacctaatacactggcatttggacaagaatcaggtggagcttggaaaccattgtgagcactgtcatgagag

SEQ ID NO: 105949 - DNA, 336 bp, Glycine max
  unsure (1)..(336): unsure at all n locations
attatcaactctttcaaaagggagaagaaaaggaaaggaaacaaaacgcacaaaggattattatagcaatggcagaacaaaaccanaaccagacaactgaagctggaaggcaccaagaggttggccacaagagccttctccagagtgatgctctttaccagtatattctggagaccagtgtcaccacaagagaacctatcaccatgaaagaactgagagagttgacagcaaaacacccatggaacatcatgacaacctctgcagacgaagggcaattcttgaacatgctccttaagctcatcaatgccaagaacaccatggaaattggtgtctaca

SEQ ID NO: 105950 - DNA, 195 bp, Glycine max
cgaagatggatcgagaatggggatcgaagccggggagcggacgtgcggcgtcggcgcagaacgaagccatagaccggcgagagcgtctccggcgactggctctggagaccatagacttggcgaaggatccctatgtcatgcgcaacctcctcggaagctacgaatgcaaactctgactcactccacacaccatac

SEQ ID NO: 105951 - DNA, 215 bp, Glycine max
gaagctcttgctgtatggtaacatgcttgtccaagaacaagagaatgtcaagagagtccaattggctgacaagtacttgaacgaggctgctcttggaaatgctaacgaggatgctattcagaggggaactttcttccagtcttgaattggaggcaaagcaaacttggcaagtaaatatttctgttcgtgaaggttgttgtactaatccaagtgca

SEQ ID NO: 105952 - DNA, 143 bp, Glycine max
ctgatcgctccctgagagagctcgtcgcggcggttgcagaagaagattgcaagatgaagttcaacatcgcgaatcccaccactggatgccagcagaagctcgagatcgacgacgatctgaaactgcgagcattttgggacaag

SEQ ID NO: 105953 - DNA, 302 bp, Glycine max
  unsure (1)..(302): unsure at all n locations
gtttttggcatagaaaaagagatagagataagccgattagaaagctgtggaacttgcaatggattaggggatanaccagggactacaccatccagatgtagcacttgtggaggtcaaggccgggttgtctcatcaacaagaactccattaggcatcttccagcagtcaatgacatgctcttcatgaatattactggagaatttcacaccttgcatacatgttctggggatggtcgggtaaggaatcagtacggataagtctgatggttcnagctgtgtngactctggtagtcgtctaagggt

SEQ ID NO: 105954 - DNA, 326 bp, Glycine max
  unsure (1)..(326): unsure at all n locations
gtttcattcacttcaagaaggagaaatacgaaatccagctttgtatggtgaacttgccaaaggccagagccccaagttcatggtgtttgcttgctcagactcaagggtgtgcccatctcatgtgctagatatccaaccaggagaggcctttgtggtcagaaatgttgccaacattgtcccaccatatgaccagtcanaatacgctggaactggggctgcagttgagtatgctgttttgcatcttaaggtgtcggagattgtggtcattggacacagtgcttgtggtggtattaaggggcttctgtctttcccatatgatggaacct

SEQ ID NO: 105955 - DNA, 139 bp, Glycine max
tcgagcttatgctggatcccaaggtaaaggaacgtgcaatcgaacttgcaaaggccatggaaaatgaggatggagtgacaggagctgtgaaagcattttttaagcagcttcctcaaaaaaaatcagagttggttgcgga

SEQ ID NO: 105956 - DNA, 302 bp, Glycine max
  unsure (1)..(302): unsure at all n locations
canagaaaaaaaaaaacccttagccaacactaccatcatggccacctctgctattcagcaatcagcattgactggtcaaactgctctgaagcagctcaatgagttcgtccgcaagatcggtggcgccggcaaaggtcgcactaacatgcgccgcaatttcaagagtgctcctcagagtatttggtatggccctgaccgtcccaagtacttgggtccattctcggagcagattccatcatacctgaccggagaattccctggtgactaaggatgggacattgctggattatcagtttgaccgg

SEQ ID NO: 105957 - DNA, 308 bp, Glycine max
cctaattctgctgtgaagttcttcagttatgagcaagcttctaaaggtatactgacatctgtataagcagcaaactggaaatgaggatgctcagctgactcctcttttacgccttggagctggagcttgtgctggaataattgctatgtctgcaacttatccaatggatatggttcgaggcagtcttactgtgcagactgaggcatccccatatcagtacagaggaatgtttcatgctttgtctactgtgctcagggaagaaggtgctcgtgctttatataagggttggcttccttcagttattggag

SEQ ID NO: 105958 - DNA, 326 bp, Glycine max
aggcaaagccaagcaaatgcttgaagactaatgaatcggagagctcaccaccacctgctacaactctgattcttcatcgtcaaactcctcattacatggcagctccgacaccatccctttgacccccatcaaggaagtgattacaccaatgcgaacgtggctgttaacccacgcgagaaaatcccatgcaagctcatctccaaaacctccatctctcacgacgttaggcttttcagctttgccctcccctccgacgacctactcatgggtttgccagttgggaagcacatattcctatgtgccaccgttgacgagaaactatgcat

SEQ ID NO: 105959 - DNA, 321 bp, Glycine max
  unsure (1)..(321): unsure at all n locations
tccagataatcctcaggttaaagaaattcgctgcattgtgatgccaccacaatgggggacacatcaacaagttcatctgccatcacgtcttccagagcatgatttcttgaatgatttggagcctttaggatggatgcatactcattcanatgaacttcctcagttgtcgcctcaggatctcacttcacatgccaagatcctagagaacaataagcaatgggatggggagacatgtattatcttgacttgcagctttacatctggttcttacgtcttaactgcatataagctcactcgatctnggtacgaatgggggcgtgt

SEQ ID NO: 105960 - DNA, 267 bp, Glycine max
  unsure (1)..(267): unsure at all n locations
cttctatacaccaagttcgtgtcgttggtgaaatcggatcccgtgattcatccattgcttcctctttcgccaaagggagagatttgtgatgtgaatggtgtgtgtgttgatgctgctgaggatgagtcttcagttgataccaagaagaaagtgactgggaagagatgtgtgagataaacgggatttcgcatttgcattgacagaccgtcagtcttgatgatgtgcatgattgacagcagtctaggatgcagatnctggatgatgcgc

SEQ ID NO: 105961 - DNA, 322 bp, Glycine max
tatcgagccgaatcggctcgaggagttggaaagtggaaatgcagacgagccagcaaaactacatcaggcagagataccgtgcagccgcagacttgatcaagaagggaaagatgtgtgctctcttcatcaacgatcttgatgcaggagctggtcgtcttggtggaaccacccaatacactgtcaacaaccagatggtgaatgccaccctcatgaacattgctgataaccccaccaatgtgcagcttcctgatatgtataacaaggaagagaatccccgtgtgcccatcatcgtcaccggtaacgatttctccacactctatgc

SEQ ID NO: 105962 - DNA, 351 bp, Glycine max
  unsure (1)..(351): unsure at all n locations
cggctcgagggtgtttatgcaattggagatgtaattccaggcccaatgttggcacacaaggcagaagaagacggtgttgcttgtgttgagtacatagctggtaaggtgggccatgtggattatgacaaagtcnccggtgttgtctatacaatgcccgaggttgcatctgttgggaagacagaggagcaggtgaaggaacttggagttgaataccgtggttggcaagttcccgttcatggctaatagcagagctaaggcaattgacaatgctgaaggactggtgaagatattggctgaaagagagacagacaagatatttggagtgcacattatggcacccaatgcaggaga

SEQ ID NO: 105963 - DNA, 354 bp, Glycine max
  unsure (1)..(354): unsure at all n locations
cttcttccttgatgatgtgactggatttgagatctcatatctgataaagattccagagccttttagtttcatcttaacttggtttgccgctattccctttattttgtggctggctcaatcgatcactagggcaattgtacaagattttctgattttaaagggcccttgtcncaactgtggtactgaaaatacctctttctttgggactatactgtcggtttcaagtggcgattccaccaacaaagtcanatgtgaaaactgtgaaactaaaatggtgtatgattcaaaaacaagattgattacattaccagaaggaagtaatgcttaaatggaggcacgcttgatactattgtt

SEQ ID NO: 105964 - DNA, 350 bp, Glycine max
  unsure (1)..(350): unsure at all n locations
gttcattttcctcnctttcactctcgtagacatcacaaaccttccctccattcatcccacgcatgtctgccatgaactctagcgtattggcctgtagctatgccatatcaggtgcagcgtgttcgtagctcaatgggaaggtcacttccgtggcctatgttgcatgctctggctacaagttgccattgatcanagctgaggccagagttcctanagccanagaatctgaaggaggaaggagaggtgcccttgttctcttggcagctacccttttcacctctgcagcttccaattcttctgccaatgctgggatcattgaagattaccttgagaggagcaaggccacaagg

SEQ ID NO: 105965 - DNA, 285 bp, Glycine max
tagaacagcgtcctctttctctctcttcaacgccaacggcgaccatatactactcccttcctctgaacgctactctcagggcaaacacttggttccatgcgctaccaagaactccaataaccggcccttaaccggcgtcgtatttgaaccctttgaagaggtcaagaaggagctcgaccttgttcccactgtcccacaagcttcacttgctcgccagaagtacaccgatgagtctgaggctactatcaaccgacagatcaatgtggagtacaatgttcgtacgtt

SEQ ID NO: 105966 - DNA, 183 bp, Glycine max
  unsure (1)..(183): unsure at all n locations
gtgntttgcaattgaagttgaagtcttgcacttctctcttcaaatccaaacacaagacatcatcatccatggctgcctccgtctccactgtcggagctgtcaacagagctcttttgaacctgaatgcgtctggagctggggtttcagctcccagttcatccttctttgagagcagcttgaaga

SEQ ID NO: 105967 - DNA, 312 bp, Glycine max
  unsure (1)..(312): unsure at all n locations
aatacaacaaagcctttgaagaaaagaagactgaacttagtaatatgatagttgaaatatacgaggcttcatcaactgaaatcaaaagtttggttanagaacccaaggaagctggcttgaagaagaactccacagaagtccagaagttcctagaagagcttgttanaattgattttccgggatcanaggcagcatctgaagcatcttcanagtttggaccagccttggcttcaggctcagtattctctgtgtttgagaaggtgtcaactttcattgtttacagagagaaagatgttgaagcccctcctggag

SEQ ID NO: 105968 - DNA, 258 bp, Glycine max
ttgggaatctctcaagattttgaaattgctggtaatactcttatgccagctttttctgttccacaggctactgccagatcttctgaaaatgcggaatcctctgcatgatctggaattcgtgttttctttcgcttgttcgtttgtttaattcaataaaggaaattaggcatgaccctcttgttgagtatgctctgcctatctgaaaatttccacacctcttttaattgtcgtaatgatgtgtgaagtgtgtgttatttt

SEQ ID NO: 105969 - DNA, 349 bp, Glycine max
  unsure (1)..(349): unsure at all n locations
taacgagcacgagtacaagccagagcttgacattatttccaatgctagctgcacaaccaactgccttgccccgctcgccaaggttatcaatgacaggtttggcattgttgagggtttgatgaccactgttcattccatcactgctacccagaagactgttgatgggccatcagccaaagactggagaggtggaagagctgcttcatttaacatcattcctagcagcactggagctgccaaggctgcttggaaagtcctccctgctttgaatgganaattgactggtatggcattccgtgttcccactgtggatgtctctgttgttgacctcacagtgaggctggagaag

SEQ ID NO: 105970 - DNA, 256 bp, Glycine max
attcttcatcacttcattcaacatttctccccttagcttgtttcaccaatggctgctgcggttagtgctgcagtctcttttccatccaccaagtctacctctcttccaagcaggacctccctcattgccccagagagagttgtgttcaagaaggcttcattgcaaaacagagatgtttctagcagtggacgggtagtttccatcagagctcaagtcaccactgaggcaccagccaaggttgataaagagtccaaga

SEQ ID NO: 105971 - DNA, 326 bp, Glycine max
  unsure (1)..(326): unsure at all n locations
gttgtgagcatcgccaacggtccctctgctctggcagttaaggaagcagcctggggtctggctcgctatgctgcaattgctcaggacaatgggttggtcccaattgtggagccagagatcttgcttgatggggagcatggtattgatagaacttttgaagtagcccanaaggtctgggcagaggttttcttctaccttgctgagaacaatgtcctttttgagggtattctccttaagcctagcatggttacacctggagccgagtccaaggacaaggccagtcctcagacagttgctgattacaccctcaagctcctgtcacagag

SEQ ID NO: 105972 - DNA, 137 bp, Glycine max
  unsure (1)..(137): unsure at all n locations
ctaagaggttcttgganattcaccaattgagggagcgtaagaaagagtatgacttgaagacagcaatatctttggttanagaaacagctaaaaccaagtttgtagaaacagtagaagcccatttccacacaacatac

SEQ ID NO: 105973 - DNA, 206 bp, Glycine max
cgcactcaatgtctggtcccgaaagtggcaagtactcgtgtaaatgtctgcgtatgatgtacgaaaaagtgcggatcatctcaggcgatcacaaccacgtgatggagaacttcctccacatttgtgagacagaaatgtgccgcatgttggagatgacgtgcgagtcccatgatgagtatgttctcagcagccaagtcctgactcac

SEQ ID NO: 105974 - DNA, 338 bp, Glycine max
  unsure (1)..(338): unsure at all n locations
agacaagacattgtcactanaaggaggatactatgactttgttaagggatcttttgagctctggggccttcagtttggccttgcatcctctttctccgtatgaacatcaaccattatcaatgacctcatcttggttccctaagttaaagatgtggccaccattctgcattggaagctataggggccatgaatagaggtcgtgtgtatctgcaatgaagaggcctagccaccttcatcaccatatgatatttataaaaatatatatatatgaaactatgaactgcagttatgcatgtcggaaatcttcttttgataagagttggcaatcctctgtaaca

SEQ ID NO: 105975 - DNA, 255 bp, Glycine max
ggcaacagtgagaacaccattgaattttgattctagcaagcagagcttttgtcaattttctattgaccttctcggtggaggaattttagtggacaaaactggagattggatcacacttatacaaaattctccaattagtaacttgttgagagttgctgcttggaagaaaggctgtttaatggttaagattgtgatgtctgggaatgcagcagtcaaaaggagtgattgggcctcattggtacaagtgtttttaac

SEQ ID NO: 105976 - DNA, 236 bp, Glycine max
  unsure (1)..(236): unsure at all n locations
cagcaacatcctgcgcagaagcatagcagctcttcatatcaagctccgtgccattagtggaaacaagacaanaacaccaggtctcggtgctcaatcagctcttcgagtcgcttgttcgttcaggaatgaaaattggtcgcatagaggatgtgacccccattccttccgatagcacacggagaaagagtggtagaaggggtagaaggctttaagcttcgtatggtatatgactggag

SEQ ID NO: 105977 - DNA, 311 bp, Glycine max
  unsure (1)..(311): unsure at all n locations
tgttggtgtaattggagctggtcgaattagatccgcttatgcaagaatgatggttgaagggttcaagatgaacctaatttactatgatctctaccagtccacacgactagagacccctgtcacagcctatgctacattcttgaaagcaagtggtgaaaccccgtggcttggtanaggcagcaacatggatgaggtccccaggaggcagatatattagtcttcatctgtctggataaaccactatcatcagtcacaaggaagctactaagatgagaagagcattctataaacgcagtagagactgtatgatg

SEQ ID NO: 105978 - DNA, 300 bp, Glycine max
  unsure (1)..(300): unsure at all n locations
cggctcgagcttatgctggatcccaaggtaaaggaacgtgcaatcgaacttgcaaaggccatggaaaatgatgatggagtgacaggagctgtgaaagcattttttaagcagcttcctcaaaaaaaatcagagttggttgcggatctgcatcagactggttttttctctgtaagaagatgtnttggttgttcctgattcaaatgcagtttattaaaccccactttttggtaattaatagtgtanatcacaaatagttactgcatctataggatgtgctggacttgtcaccctgtcatgtga

SEQ ID NO: 105979 - DNA, 334 bp, Glycine max
cctaattctgctgtgaagttcttcagttatgagtaagcttctaaaggtatactgcatctgtataagcagcaaactggaaatgaggatgctcagctgactcctcttttacgccttggaagtggagcttgtgctggaataattgctatgtctgcaacttatccaatggatatggttcgaggcaggattactgtgcagactgaggcatccccatatcagtacagaggaatgtgtcatgctatgtctactgtgctcagggtagaacgtgctcgtgctttatataagaggtggcttccttcagttattggagttatacttatgtaggtctcaatttgct

SEQ ID NO: 105980 - DNA, 162 bp, Glycine max
atcaagtgcttgttatgatgagtcagaatgttagcttgttgtactaggtggattgtaaatcacgtattttgctagagtcatccgcgtaaagcgtgaaaatgcagaaaattacaaatgtctaggctgcgtctgtagtatacctactgccaaccattgttcttt

SEQ ID NO: 105981 - DNA, 291 bp, Glycine max
ggcagaaagcaagctcatcctagagttttaaaaatgtcagcagcctcctccatggctctctctatcccatccttggctgggcaagccgtgaagcttggctcatcagcccccgaagtcgggagggtcagcatgatgaagaccgtcaccaagcaggcctcctccggaatgccatggtacggctcagaccgcgtcaagtacttgggcccattctctggcgagcgccgtcctactcatggcgagtaccagtgactacgctgggacatgctgggcttcggcgaccagaacttcgca

SEQ ID NO: 105982 - DNA, 319 bp, Glycine max
gcgagtggtctaagctccgcgctctatacgctggcaaggaagagattcttgaacgtcaccgtcaccgctacgaagtcaaccccgactacatcgagacgctcgaaaagggtggcttgagcttcgtcggcaaagacgacgctggtgtacgtatggaggttattgaaatcaaggaccacccctggttcgttggtgtccaattccacccggaatacctctcccgcgtcttggacccaagcaggccttacttgggcttcgtcgctgcaagtgccggtatgcttgaagagatcactcgtgactatcagagtggtgcggcgaacgg

SEQ ID NO: 105983 - DNA, 117 bp, Glycine max
ggctcgaggcagaagaacaagtagttgagaactaagaaggtcaagcccactggctcctcaatgatctcttccccagctgttaccactgtcaaccgtgccggtgccggcatggttgct

SEQ ID NO: 105984 - DNA, 334 bp, Glycine max
  unsure (1)..(334): unsure at all n locations
tcttgctgttcattgctgcacgacgtgaacacgaagaaaaatgaagaattctaagaaaactggagtacggaagtaccacaaatcggaaaatccacgcttgcggtggacacctgaactccatgaatactttgttgaagttgtggaaggtcttggtggataaaacaaggcaacaccanagagcattctgcagatgatgcatgtgaaaggactgaggatctctcacattaaaagccatcttcagatgtacaggagcatgaagggacatacgattctcgcatncatgcaacaggagatgggagaaatgtgcatgttaacgaccatcatcaatctgctc

SEQ ID NO: 105985 - DNA, 170 bp, Glycine max
actgatttagctggaccaacttcgggaagcactgcctgtgttgccgttatttaaaacaaccaacttgttgttgcaatgctagtgattcacgatgtgtgatatctcggaaaggccaggcataccatacgactagagaccacaaacctgatcttgagattgagaaggacaga

SEQ ID NO: 105986 - DNA, 316 bp, Glycine max
  unsure (1)..(316): unsure at all n locations
ttccgtactacctttgttggtccgacggcggaggaggtaagttagccgaagatgtgtatcggttcaaggacgcaaggagccctgctttnttcaggtaatgaggggtagagaaggtgcctcgagccaaagtggcggtaccaggcgctacagcgctgaagtaatccatgccatgctctcagganaagctcgaacgacctatcaacaatggggtactgtactcgaaaccgacacaggtggggtagtagagaatactagagggcgagacaatctctctaaggactcggcaaatagcccgtaactcgggagagggtgctct

SEQ ID NO: 105987 - DNA, 238 bp, Glycine max
  unsure (1)..(238): unsure at all n locations
ctcaagtccatggctggcttctgcacaatgcagaacatgaatgacattatctccatagctagcaacggtggtagagtgcaatgcttgcangtgtggccaccagttggcaagaagaagtttgagactctttcctacctgctagaccttgatgatgcacaatttgcaaacgatagtagaataccttcttaggaatggatggatccttgttagatatcattggagcacgttcgtgtacgta

SEQ ID NO: 105988 - DNA, 347 bp, Glycine max
  unsure (1)..(347): unsure at all n locations
tggcgaagttgttttcaatacatcattgacagggtatcaagaaattttgacagatcctagttatgctggtcagtttgtgctcatgacaaatccacatattgggaacactggcataaattttgatgatgttgatactcgtgcaatcacgcgccggttgcgtcgtgatggcagtcttattggtgtcttgaccactgacaattccagaacggatgaggaactgcttcacatgtctaagtcatgggacattgttggtaaggatctaataagcggagtatcatgcgaaactccacatgaatgggttgataaaaccaagcaacaatgggagtntagtaaagtgcctggagaga

SEQ ID NO: 105989 - DNA, 354 bp, Glycine max
cgggcagactctgcactgtgccactcccacatcacaggccgcgtcctcatctggcgcgactaccgcggcgacgtctccgccctcgacgccgaacgcttcttcaccaagactcatcgaaaaacaggccgatccgcgagctcaagatccggctatgcacgacaacggcgtgacctacatgttcatccagcacagcgacttcttcctgatgatagtcaccagacactcatgtactgccgccagcctcgtcgatatccggcaccgcatcgtcgatgtgtataagcactagtttgaagaattggtgcaggagtcgcttcgggacgatatcgtcgtcgtgatagacgtactctgatgaga

SEQ ID NO: 105990 - DNA, 343 bp, Glycine max
  unsure (1)..(343): unsure at all n locations
ttntgctgcaaagtttaaggaggagtacaagatggatgtattccaaaatgccagggcttgtctgaggttgagggctgcttgcgagaagctgaagaaggggcttagtgctaatcccgaggcacctttgaacattgagtgcttaatggatgagaaggatgtcagagtgtttatcaagcgcgatgagtttgagcaactgagtcttccaattttggaacgggtgaagggacctttggagaaggcacttgcagaggcaggtcttacagttgagaatgtacacatggttgaggtggttggttctggatctcgtgtgccagctataaacaanattttgacagagttcttt

SEQ ID NO: 105991 - DNA, 371 bp, Glycine max
ctcgagccgtgatttctggagggtcaattcgttctggttgagcaaaacatctgatagattcaattagcagttgaaagcaaatgcgggaatcttttttcgttgtgtgacagttgatcaatctacggtgacgctatgagagaaggatttgggacgattctgagaaggtacttcagccgggatgccattgcatgccatggttccttggaaaacaacttgctggtcatctctctcttcggctacagcaactggatcttcgttgtgagaccaagacaaaggataatgtctttgtcaacgttgtggcttctattcaatatcgtgccctggcagagaaggccaatgattttttttacaaactgagcaatacaaagacc

SEQ ID NO: 105992 - DNA, 345 bp, Glycine max
gaacattgctgataaccccaccaatgtgcagcttcctggtatgtataacaaggaagagaatccccgtgtgcccatcatcgtcaccggtaacgatttctccacactctatgcgcctctcatccgtgatgggcgtatggagaagttctactgggcaccaacaagggatgaccgcattggtgtctgcactggaatttttcgcaccgattcaattcctgaacaggacgttgtcaagattgttgacaccttccctggccaatccattgatttctttggtgcactgagggccagagtatatgatgacgaagtgaggaagtggatttctggtgttggtgttgacggcattgg

SEQ ID NO: 105993 - DNA, 358 bp, Glycine max
cgtgtatttgatgtatcaattcaaggttttaaatatttgagagattttaacattgcgaaagaagctgggggagttggtaagggaatcactagggagtttaatgttaatgttacagaatgcaccttggaaatccacttatcctgggcagggaaaggaactaatgccattcctataagaggtgtatatggacctctcatatctgctatcactgtgaccccaaactttaaagtttatgcacatgggttctctactggaacaattgttggaattgtagctggggcatgtgtgattgtcatattgatgctctttgctctatggaagatgggtttctttgtcagacagatcaacagaccaagac

SEQ ID NO: 105994 - DNA, 349 bp, Glycine max
  unsure (1)..(349): unsure at all n locations
tgaaggtcttgccattggagttgctttctctcatcctttggttgatggtactgccgctattttcttcatcaaccgatgggcaaagctggttcgaggcgaagaactggatcccaatgaagttccttttcttgatcgaacactactcaaatttccagagccatcagaaccatgtgttgatctcccagagtggaagcctgtaaggttcatgccagacaacattgctgagcaaaacaagataagtgctatattgttgaaactctcatcaagccaagtggagaagctgaagaagaaggctaatgaacaaccttcanaagaaggggtaagccttatagcagtttgaagctatttc

SEQ ID NO: 105995 - DNA, 347 bp, Glycine max
ttttcgagccgattcggctcgacgacgccgtctcgggcaccgccgtggtcggctgcgtgggcgaggtcgtcaaacacgagcgcctcgtcgacgacaggttcttcttagtgtgcaaggggcaggagcggttccgcgtgaacgacgtggtacggacgaagccgtaccttgtggggcgcgtgacgtggctggaagacaggccgtccgagattaatgtcggaggcgatgacgtggaggggctggcgcgtgaggtggaagggtacatgaaggacgtgataaggttgtcgaataggttgggagggaagaagggggagaataaggagattgggaacttgcgacggaatcttttt

SEQ ID NO: 105996 - DNA, 305 bp, Glycine max
tagttttcaatatcatggaatttttttttttctgaaaaatgaaataaaggattctttttttggagcacaaggaatatttcattataaattaaaacataataaccctctcaattctgtaataaatcaatggacaaattggttaaaggatcatttttatctataacacttatctaatagtagatggtccagattagtaccacaaaaatggagaaatagaataactgaatatcgtatagctcaaaataaagatttaaccaaatgctattcatatgacaaaagccaattaattctttacaaagaacaac

SEQ ID NO: 105997 - DNA, 362 bp, Glycine max
gcgtagtaactcggaatcggctcactcgacgaatcggctcgagtgttggtgatgttgctactttacctttgagattatacacgtgcattgagaagagttgagcatgttgatcattctcgcaaatcagctgaacaggctgtgaaggccatcaaggcagctgaggaaggaagaacagttgaggagtatgattaccttccatacttctattcccgttcatttgatctgtcttggcaattctatggcgacaatgtcggcgacacagtactattcggagacaacaatcctgcgtcgtcaaagcctaagtttgggacatactggattaaagatgggaaagctgttggggtctttctggaaagtggaac

SEQ ID NO: 105998 - DNA, 355 bp, Glycine max
  unsure (1)..(355): unsure at all n locations
gtttcggcacaaaactgttgggttcgcaaaggtggtgcttataccggtgaggttagtgctgtcatgcttgttaatttgggaattccttgggttattattggtcactctgaacggaggcagcttttaaatgaatcaaacgagtttgtgggagataaagttgcctatgcacttcaacaaggtctaaaagttattgcatgcattggggagactctcgaacagcgtgaagctggtacaacaacggctgttgtttctgagcaaacaaaagcaattgcagctanaatatcaaattgggacaatgttgtcttggcctacgagccagtttggggcattggaacaggaaaggttgctactcctg

SEQ ID NO: 105999 - DNA, 352 bp, Glycine max
tgtgaagcaacctggtattacctttgtttcacacctggcttgtctggtattgataatgtcaatgctaagcttggtagtgatgatgatgatgacatggatcctttacttggggaggaggagaagtttgatttccttgcctggttcaaagaaactgtgcaatatgctgattttgtggtcctcaagatgaatgcaggcagtgttgaactcaagttcctctctgatatatttgagaatggagctatatgctatgttgatgagttgtttctcaagtgtcccgagaggggaggtgatgccagcaagggaagttgcatggatatttacaaggatctccgaagcaatggtgtctatgtgc

SEQ ID NO: 106000 - DNA, 349 bp, Glycine max
caaagttattaattacttaccaaaagagaccctcttttaagaaaacaatggcagtgaataaggtaacattggttgcttcagtgatggcctgcatgctcataacatgctcttatgctgaatcaaccttgtcatgtgaccaaatcactatatggctcactccatgcataccttatggagtgttaggagggaacgtgtcatccttgtgctgccaaggtgtttactctctcaatgctgcatataagagtgctgaggatcgaagaggtgcatgccaatggcctaaggatagggcggcatgcattcctggcattgactacacgcgtgtcaatcgagttggtccaagatgtggctc

SEQ ID NO: 106001 - DNA, 356 bp, Glycine max
gctcgagccgctcgagccgcactcttgattcaaagaaatcatggaaggaaagctgcatgcaacagcaatccatgttccaataagatgtgagcaaagtacccaacaagggaatggtctggatgtgtggctaggcagactagccatggttggctttgcagtagcgatcactgttgaaatttctactggaaagggactcctagagaacttcggagtcccaactccactgcctacagttgcccttgcagtaacagcactggtgggtgtcttgacagcagtttttatcttccaatcagcctcaaagagctgattacatgtttaggctggttgtgattgttgtaaattcttaagctgggaag

SEQ ID NO: 106002 - DNA, 344 bp, Glycine max
  unsure (1)..(344): unsure at all n locations
caatattgtanaactcaaaatctagtttcatacttttcttctacttcttgaaatggctctccaggctgcttctcttgttcctgcttctttctcggttcttaaagagggaaagagtggtgtgtttctcaaggactccaccttgttcggtctttcattttcagaaccttttatagctaacttcagctcttctgcattgaggtgtaagagggaattcgaacaaaagctctgtgctgtgagggccgaaacagtggctacagcctctccagcagttaccaagtctacaccagaagggacgtcaacattgaggaagggcagtgttgtgataactggggcttcatctggac

SEQ ID NO: 106003 - DNA, 353 bp, Glycine max
  unsure (1)..(353): unsure at all n locations
actctacaaaagggagaagactatgattcacaactctcangacttttnatcgcaatggcagaacaaaaccagaatcatacaactgaagcctcanntancaagaggttggtcacaagagccttctccagagtgatgctctttaccagtatattctggagacaagtgtctacccaagagaacctgaatccatgaaagaactgagagagttgacagcaaaacacccatggattcgcttgacaacctctgcagacgaagggtagttcttgaacatgctccttaagctcatcaatgccaagaacaccatggaaattggtgtctacactgggtattcacttcttgncaccgctctcgct

SEQ ID NO: 106004 - DNA, 290 bp, Glycine max
tggtgctttatcgctgtggttatcatcttcttcttcctctatcttagatctcttctttctctacgccgcacgactttaccatggccggaaaaggagagggtcctgctatcggaatcgatctcggaaccacctactcttgcgtcggtgtgtggcaacatgaacgcgttgaaatcatcgtcaacgaccaagggaacagaaccacgccgtcttacgtcggattcactgacaccgagcgtctcatcggtgatgcggcccagaatcaagtcgccatgaaccccatcacacacgtc

SEQ ID NO: 106005 - DNA, 295 bp, Glycine max
gttaggtttggtgttagagaacatggattgggagcaatctgtaacggtattgctcttcatagttccggattcattccatactgtgcaactttctttgtcttcactgactatatgagagctgccataaggatttctgcactgtgtcgggctggagttatttatgtgatgactcatcattcgattggacttggagaggatggaccaactcatcagccaatagagtatttggcaagcttcagggcaatgcctcacactttgatgcttcgtccagctgatgtatatgaactgctggatc

SEQ ID NO: 106006 - DNA, 317 bp, Glycine max
tcagaattgcatgcttagaggacatctaggcactttttccttctgatagcagtccattctatgctggttttggtaatagggatactgatgaaatcagctaccttaaggttggaattcccctaggaaaaatcttcattattaatcccaggggagaggtggttgtaaaccgtcgtgttgacacaaaatcatatacttctctgcatgctctcgtgaatggaatgttcccccctactagctcttctgagcaggaggagcttaactcatggaatttctggaaactaccccctcctagcatggatatttgaaagggtcccatg

SEQ ID NO: 106007 - DNA, 318 bp, Glycine max
  unsure (1)..(318): unsure at all n locations
cttgtgtttgcgttgcttggaagaggctctccctatactacaggctaggtagatttgtgatgggtggaagttctattggtgatgactgggagctcacttcctcatctaacgagggtcggacagtggtcttagttggacgaactggcaatggcaagagtgcaacaggtaataccattcttggaaggaaggtcttcaagtcaagggctagctcctctgctgtatccacctcatgtgaattgcagacaacagaattaaacgacggacaaattgttagatgtattgacaccccaggattatntgatttgtctgtcggatctg

SEQ ID NO: 106008 - DNA, 351 bp, Glycine max
gatcaatcaagccagtcagacatgagcaaattgttagctgatcaatcctttgtatcttctatccttgcatcgcttcctggggttgacccaaatgacccttctgtcaaggatttgctggcgtccatgcaaaatcagtctgagcctcaacagaagaatgacgacaagccatcaaacgaggaggagaagaagtaatctttaagagccacttttccctgtatgatttttattttgttggtagcattcttcgcggctgttgctaatcggggaactattccaatatgtctctctgcagtttaattggaacccatgcatgtctctcgatgaatatggatgatttttaacttaaaaatg

SEQ ID NO: 106009 - DNA, 352 bp, Glycine max
  unsure (1)..(352): unsure at all n locations
caagtagttgagaactaagaaggagaagcaaatggcttcctcaatgatctcttccccagctgttaccactgtcaaccgtgccggtgccggcatggttgctccattcactggcctcaagtccatggctggcttccccaccaggaagaccaacaatgacattacctccattgctagcaacggtggaagagtgcaatgcatgcaggtgtggccaccagttggcaagcagaagtttgagactctttcctacctgccagaccttgatgatgcacaatttgcanaggaagtagaataccttcttaggacaggatggattcctgcttggaattcgagttggagcacggtttcgtgtacc

SEQ ID NO: 106010 - DNA, 350 bp, Glycine max
attgaatctcagaattctctaaaagagatctttttctcctctttgaagaaagaagggtctttgcttgattttggagctgtctctgctctcagatctcatcaaccttaacctctccgataccaccgagaaggtgatcgcagagtacatatggatcggtggatcaggaatggacctgaggagcaaagcaaggactctcccaggaccagttagcgaaccttcagagcttcccaagtggaactatgatggttccagcacaggtcaagctcctggtgaagacagtgaagtgattttatacccacaagccattttcagggatccattcagaaggggtaacaatatcttggttatct

SEQ ID NO: 106011 - DNA, 346 bp, Glycine max
  unsure (1)..(346): unsure at all n locations
ggataatggttatcgcatcacctcaactgctgcaacatgggatcaagctgcttttgtccttagtgtcncaagaagaaaaccagctgatgaaactcaggagacactccgcacatctgcttttcctagtactcatgtcaaggaaaaatgggctaagaacctctatattgcatctatttgttatgggagcacagtgtcttaaactgctgaaattgagatttctggctgacatcattttgaccactggcacaatcctgcttactcttacatcttctagttgggaaccgagatcctctctgacaattttctgaacaatgcagttcagcattaactcattctacatgactgg

SEQ ID NO: 106012 - DNA, 352 bp, Glycine max
ctaagaaggagaagcaaatggcttcctcaatgatctcttccccagctgttaccactgtcaaccgtgccggtgccggcatggttgctccattcactggcctcaagtccatggctggcttccccaccagaaagaccaacaatgacattacctccattgctagcaacggtggaagagtgcaatgcatgcaggtgtggccaccagttggcaagaagaagtttgagactctttcctacctgccagaccttgatgatgcacaattggcaaaggaagtagaataccttcttaggaagggatggattccttgcttggaattcgagttggaccccggtttcgtgtaccgtgagcacaacag

SEQ ID NO: 106013 - DNA, 352 bp, Glycine max
cttcatgctattcccttgattgtggttgagtcaaggagagaagtagatgaggtgaaggaattaatcatcatagtcaaagaatatgttttgggtttgcagatggagttgaagagaagagaaatgaaggacaatctaactcggcagcaggagcttgcagcttatttcactcactgcaaccttcaaaccccacatttgaggctagctttgttgaatgcaatgactgtgtgcttcaaggcaaagaaccttgcctcagctgctaactttgccaggaggctgcttgagaccaatcctactgttgaaacccaagccaagacagcaagataagtgcttgcagctgcagagacaaatatga

SEQ ID NO: 106014 - DNA, 340 bp, Glycine max
  unsure (1)..(340): unsure at all n locations
acaagcagaaacaagctcatcctagagttttaaaatggcgcatctcctccatggctctctcttccctctccttggctggcaaggccgtgaagctgggcccatcagcccccgaagtcgggagggtcagcatgaggaagaccgtcaccaagcaggcctcctccggaagcccatggtacggcccagaccgcgtcaagtacttgggcccattctctggcgagcccccgtcctacctcactggcgagttcccaggtgactacggctgggacactgctgggctttcggccgacccagaaaccttcgccagaaaccgtgagctcgaagtgatccattccangtgggc

SEQ ID NO: 106015 - DNA, 358 bp, Glycine max
ccaccactgtcatatgcttggatgattaccactctttggacagaactggaagaaaggagaagggtgtcactgcccttgaccctagagccaatgattttgatctcatgtatgaacaagttaaagctcttaaggatggaattgctgttgaaaaaccaatctacaaccatgtcactggtctcttggatccccctgagctcattaaactccccaaaatcttagtcattgaaggtttgcacccaatgtttgattcccgtgtcagagatctcttggactttagcatctacctagacattagcaatgaggtcaaattcgcttggagaattcagagagacatggcagagcgtggacacagtcttga

SEQ ID NO: 106016 - DNA, 308 bp, Glycine max
gaagaacaagtagttgagaactaagaaggagaagcatttggcttcctcaatgatctcttccccagctgttaccactgtcaaccgtgccggtgccggcatggttgctccattcactggcctcaagtccatggctggcttccccaccaggaagaccaacaatgacattacctccattgctagcaacggtggaagagtgcaatgcatgcaggtgtggccaccagttggccagaagacgtttgagactctttcctacctgccagaccttgatgatgcacaattcgtcaatgaagtagaatacttcttaggaa

SEQ ID NO: 106017 - DNA, 313 bp, Glycine max
acaggcttatggtggatacctaggcacccagagacgaggaagggcgtagtaagctcgtttatgacacgctggagaaaatcgttcaagaggctcctcatccttcttatgctgaattcagaaacactggattggaaaggtctgcaagtttggcagaagatttggagtggttcaaggagcaaggttataccattcctgaaccttcttctcctggtcttacctatgcacaatatcttaaggagttatctgtgaaggatccccaagcattcattttgcatctttacaatatctactttgctcattcagctggtggtcg

SEQ ID NO: 106018 - DNA, 336 bp, Glycine max
cagaaagagaagcattagcaaaagcaagaagaactagtctaagcagaaatggcctcttcagtgatggcatctgtggccctcaaacctgcccctttcactgttgagaagtcctcagttagaggccttccctccctctcaaggaactcctcttcattcagagttgtggccagtggtggcaagaagatcaagactgacaagccttatggaattaatggtggcatggctttgatggaaggagttgatgcatctggcaggataggatagggaaagggcgtttaccagtttgtagacaaatacggtgctaatgtcgatggttacagtcctatctacgacacc

SEQ ID NO: 106019 - DNA, 333 bp, Glycine max
cctctttcttcctcttcctcagtagtgcgattctcgattctcttctctgcaactatgcctacccctaaggtcttcttcgacatgaccatcggcggtcaacctgccggccgcatcgtgatggagctctacgccgacgtgactccgagcaccgccgagaacttccgcgcgctctgcaccggcgacaagggcgccgggcggagcggcaagcccctccactacaaaggctcgttcttccaccgcgtgatcccgaacttcatgtgccagggcggcgacttcaccgccggaaacggcaccggaggcgagtcgatctacggcgccaagttcgccgacgag

SEQ ID NO: 106020 - DNA, 331 bp, Glycine max
acttagtcaacagctgaggagcagggcatatccatggcagaaccaccaaagggggatgaggaggacggcggactcgctttcgttctccaatccatcggtgaatggtggcatgcggggtttcacttaacgaccgcaattgttggacccacgatactaaccctgccatacgcgttcaggggattggggtggggacttggatttatgtgcttgacggtgatggggatcgtcaccttctactcttacttcctcatgtccaaagtgctcgatcactgcgaaaaatccggtcgccggcatattcgtttccgggaactagccgctgacgtcttagggt

SEQ ID NO: 106021 - DNA, 344 bp, Glycine max
agcaaatcaccaattcctccgagttcgagcgaccatgtcggggcgtggcaagggcgggaagggtctgggctaaggcggcgccaagcgtcaccgcaaggttctccgcgacaacatccagggcatcacgaagccggcgatccggaggctggcgaggatgggtggcgtgaagcgcatctcggggctcatctacgaggagacccgcggcgtgcttaggatcttcctcgacaacgtcatccgcgacgccgtaacctacacggagcacgcccgccgcaagaccgtcaccgccatggacgtcgtctacgccctcaagcgccaaaggggcaccctctacggattcggcggct

SEQ ID NO: 106022 - DNA, 121 bp, Glycine max
cacacctcttcgttccttcgaatcattccatttcttcgaaaatggccaaagacccagttcgcgtactcgtcactggagccgcagggcaaattggatatgctcttgtccctatgattgctag

SEQ ID NO: 106023 - DNA, 319 bp, Glycine max
gtgaaataggggagaagtatgataaaactccaacacaggtatccctgaactggctggtagcacaaggcaatgttgtgccaattccaggagccaagacagcagaacaagctgaggaattcagaggtgcacttggctggagactaactgatgaagaggtagctgagctgcgtagtgtggcttcagaaattaaacctgttataggttttccagttgaaaaactctagaatatagcatacatctttacatttgatttagaaggtgcatgctatattctaaatcaaatgtaaagatgtatctgtttatggatatagctcttgtt

SEQ ID NO: 106024 - DNA, 150 bp, Glycine max
tagaaacatgaagttcgtgaactcgtcaaaagagctggacttgagattcattcattaaagcgagtacgcattggtgggtttagacttccacagaccttgggttaggaaataattgagtaaataaacgattcacgcatgggtgaaagtata

SEQ ID NO: 106025 - DNA, 340 bp, Glycine max
cgcgtacggactctggttattcagctgcgaaccgggattgccccatttcgctcatttttatggaaaatgttctttgagaaacacgaagattacaagttcaatggtttggcatggctctttttgggtgtcctacaagcagctcattgctaaataaggaggaatttgagaagatgcaagagaaatatcctgacaacttcagcttgacttcgctgtgagccgagagcaaacaaacgagaacggagagaagatgtttatccaaacccgaatggctcaatatgcagaagagctgtgggaattactgaagaaggataacacttttgtgtacatgtgtggactaaaa

SEQ ID NO: 106026 - DNA, 341 bp, Glycine max
gttaaagtctattcgtcaagacctaactgttcaacgaatacgcaatcaattaacagtcaaggtgtatgaaacacatgcccgattggcactggaatttggggacctgtttgagtataatcagtgtcaatctcagttacaaactctgtatgccgaagtgattgaggggtccgatatagaatgcgtgcacacaacgcgctgtgcgacatgcattcaaataataacagcggacttggagcaatcatgggcagggttgttctctcacgacgcaaagagggatgaagctgtaaaacatgcccttgccgttcgtgctgctgtaacttcaggaaattatattgcattct

SEQ ID NO: 106027 - DNA, 342 bp, Glycine max
tgaacaagacattgtcactaaaaggaggatactatgactttgttaagggatcttttgagctctggggccttcagtttggccttgcatcctctttctccgtttgaacatcaaccattatcaatgacctcatcgtggttccctaagttttagatgtggtcaccattctgcattggaagctatagggccttgcttagaggtcgtgtgaacctgcaatgagaaggcttagccactttcatcaccttttgtcattattaaaatttctttatatggaacttttgacctgcgtttatgcatgtcggaaaatcttcttttgataagagtttggaaatcctcttgtaacaa

SEQ ID NO: 106028 - DNA, 308 bp, Glycine max
  unsure (1)..(308): unsure at all n locations
cgggttgattgacncagaaggaatcgaaacactttgtgctgatatggaggtggatcatacagatgtgagggttttgatgcttgcatggaaaatgaaagctgaggagcaaggatattttaccttggatgagtggaggagaggcttaaaagcattaagggccgatacagtaagtaaatagaagaggcacttccagacctagaaaaagaggtcaggaggccatcgaacttcacagatttctattcttatgctttccaatattgtttaacaggggagatacagaaaagcattgatatagagagctttgtgag

SEQ ID NO: 106029 - DNA, 331 bp, Glycine max
  unsure (1)..(331): unsure at all n locations
gactacctcaaggtcaagaagggacgcactaacatgctgcgcagggtggagccatatgtagaataggaatacnccaacctgnaanagcgttagggagttgatctgaaagagaggttacgnggagctgaacaagcagaggattccacttagcaacaacagggtcatcgaggagggcctcgggaagacaatatcatctgcattgaggaccttgtccacgagatcatgacggtgggcccgcacgtgaaggaggccaacaacttcctctggccgttcaagctgaaggcacccctcggcggcctcaagaagaagaggaaccatacgtagaggcggt

SEQ ID NO: 106030 - DNA, 277 bp, Glycine max
  unsure (1)..(277): unsure at all n locations
aggaaattgaggccaaaatcaattcgaggaacaaagattcaagccttagaaaccgtaatggaccggttcagatgccttatactgtgcttcttcctaccagtgaggaaggcttactttcagaggaattcccaacagcatctctatctaaggccagagtggtttatgtgtggttctctttcaaacctacgttacctttctcgttgacgagtaatatgcaacttatgcatgcatataaaattgtctcatgcatcttaagtgtgtatgtnacgttatctag

SEQ ID NO: 106031 - DNA, 336 bp, Glycine max
cttgcaattgaagttgaagtcttgcccttctctcttcaactccaaacacaagacatcatcatccatggctgcctccgtctccactgtcggagctgtcaacagagctcttttgaacctgaatgggtctggacctggggtttcagctcccagttcatccttctttgggagcagcttgaagaagttattggctcaagggtccccaacacaaagatttcctctggaagcttcaagattgttgctgtagaagagaagagagagattgaagagacccagcagaccgacaaggacagatggacaggtcttgcctatgatatctcagacgaccaacaggacatc

SEQ ID NO: 106032 - DNA, 333 bp, Glycine max
gtctcctcttgcctatgacatgtctacagcaattttgaaactctctgagaatggagatctccgtaagatacatgagaagtggttctgtaaaatgggttgtgctgaagataggacaagcaactccaagcctgaccagcttcacttgattagcttttggggtctgtatctctcatgcggtatgtcttgcttgttgcacttgcactgtttctgctgctaatgattcgccaatatgcccgcttcaaacaaagacaaaaagatgttgcttcttcatccacagaaccatcgggcattcattgttcccaggttgttgttaactctttaacttcattgatg

SEQ ID NO: 106033 - DNA, 333 bp, Glycine max
cggctcgagcaaatatcttggagagttcaacgcctgtcgttgatgggaaacagtactacagtttgactgtgttgacaaaggacagctgatggagatgaaggtggcaagcaccagctgattagagcaacagtgaaagatggcaaactatacatttgcaaggctcaagctggagacaagagtggtttaagggagcaagaagatttgtggagagcacagcaagttctttcagtgttgcctaagaacttaattagtggagtgctattctcgcagtaaatcatcttgaaggggtgtgtatgtcttgaattatgtggcacctttttgtccacaagttca

SEQ ID NO: 106034 - DNA, 338 bp, Glycine max
gcaagtgcaccttccaagttagcattgcttaaatttgcctttgtcacatttgccaggaaatacatcttttaagggatcaattattacaggcgctgacttcacggatgtaccactaagagaagatcaacgtgaatacctctgcaaagttgctgatggagtgaacccaacaactggaaatgctcgcgtgatacattgttctgcaattagtattccattgctgaatactcactccaagaccttcaaatgtttgcatagaatggtttcatagctaacaagattccagcaacatgaacggacgtatgtgttagctatgaaaccattctatgcaaacatttgaa

SEQ ID NO: 106035 - DNA, 329 bp, Glycine max
cggttggaccgcaaacatggaaaggataatgaaggcccaagctctaagggacaacagcatggcagggtacatgtcaagtaagaagaccatggagatcaaccctgagaacccaatcatggaggagctcaggaagcgtgctgatgcagacaagaatgacaaatccgtgaaggaccttgtttgttgctgtttgagactgctcttctcacttctggtttcagccttgacgagcccaacacttttggaaacaggatccacagaatgttgaagcttggactgagcattgacgaggatgcaggtgaagctgatgctgaaatgcccccactggagga

SEQ ID NO: 106036 - DNA, 331 bp, Glycine max
  unsure (1)..(331): unsure at all n locations
caatggctcaaaccatgttgctcatgtctagtgtctctagctgttattccgtgcttttgatgatcgaccttttcctccaattgcagagtcacagtttaaggcctaagttctctcaactctcattcaacccacttccaccatcaacttcttctttttcttcaccccgtacattcacaacctggctctcttcaaatctaagacaaaagccggttcttgtaaagactaaggttacaaagccagagcangaggttgaagatggtatctttggcacttctggaggatttggttttactaagcagaacgagctctttgtgggtcgtgttgctatgct

SEQ ID NO: 106037 - DNA, 335 bp, Glycine max
gtgcatattgtcagtcgtattggacccactcatacttttacattccagtgattaatgaagataaaatatgccttcatttggatggagcatcgaagatcactgtctgtgtctgtgttcttcggactttctttgatctattttacattcttcgcataatttttcagtttaagacaggtttcagacccctttttctcgtgtttttggaagggatgagctcattcatgatcctgtgcctataatgataagatacttaacttcacacttcatcattgatattctatcaattattccacttccgcagttcccttggacaatacctcaaaacaagtattaat

SEQ ID NO: 106038 - DNA, 332 bp, Glycine max
aagggtcttgcctatgatatctcagacgaccaacaggacatcacaagaggacagggcttggttgactcccttttccaagctcccacaggatgctggaactcactatgctgtcatgagctcctacgagtaccttagcactggacttcgccagtacttggacaacaacatggatggattttcattgctccagcttttatggacaaacttgttgttcacattaccaagaacttcatgaccctgcccaacatcaaggttcctctcattcttggtatctggggaggcaagggacaaggaaaatcgctccaatgtgagcttgtctttgccaagatggg

SEQ ID NO: 106039 - DNA, 347 bp, Glycine max
  unsure (1)..(347): unsure at all n locations
cggaatggggctcgagctcgagccgctcgagccgcactcttagatcaaagaaatcatggaaggaaagctgcatgcaaagcaagcgctgttccaataagatgtaancagagtacccaacaagggaatggtctggatgtgtggctaggcagactagccatggttggctttgcagtagcgatcactgttgaaatttcactggaaagggactcctagagaacttcggagtcccaactcgactgcctacagttgcccttgcagtaacagcactggtgggtgtcttgacagcagtttttatcttccaatcagcctcaaagagctgattacatgtttaggctggttgtgattgt

SEQ ID NO: 106040 - DNA, 305 bp, Glycine max
acaagccttagccttctctacaactataaacataaagacatatacatccatggctgcctccgtctccactgtcggagctgtcagcagagttctttagaacctgaatggttctggagctggagcttcagctcccacttcagccttctttgcggaccagcttgaagagggctattgcctcagggtccccaacagcaaggtttccggtggtagcttcaagattgttgctgtagaagctcagtgacagatatgaagagactcagcatctcgataatgacagacggaacagtcatgcctatgatatctca

SEQ ID NO: 106041 - DNA, 327 bp, Glycine max
  unsure (1)..(327): unsure at all n locations
agttatagcattagtattgcttataagtttacacacaacaaaatactccaacatggctgcctccgtctccactagatcgagtggncaacagagatcttttgaacctgaatggttctcgagctggaacttcagctcccagttcagccttctttgggaccagcttgaagaaggttattgcccaagggtccccaacagcaaggtttccggtggaagcttcaagattgttgctgtagaagagaagaaagagattgaagagacccagcagaccgacaaggacagatggaagggtcttgcctatgatatctcagcgcatatcaagacatcaca

SEQ ID NO: 106042 - DNA, 336 bp, Glycine max
  unsure (1)..(336): unsure at all n locations
gtggcggggaatggtgctgcnacagtgtactcagctttggcgttgaaggccatgtcgagaanatttcaggtgtttgaaagatgggattttgtcgcagnttcatagcaacaaganaagccancggannccncagacccagntgcaccaggcacaacaaggggcgnancgccaagacttaagtcattgaccaaacactgagacaacaaagggcgtttcagcaaatgagcatnatggaaacacatccttggagaccccaacgtggccttccagagcgtgccgtttcagttcttcgggcttggctctttgaacatttctccatccgtacccaagcgatgt

SEQ ID NO: 106043 - DNA, 328 bp, Glycine max
attgattcggcttggctttgagggttacaaaaatatcatggaaaattgctgggagaatgcaagagttctgaaggaaggaatcgagagaacaggtcggtttaacatcatctccaaggatatcggtgtgccacttgtagccttctccttgaaagacagtagtcaacacacagtgtttagatagcataccatctgagaaaattcgggtggatagttcctgcctatacaatgccaccagatgctcaacacattgctgtccttcgggtggtgatcagggaggatttcagccgcggcttggccgagagactcgccgctgacatagagaagttgt

SEQ ID NO: 106044 - DNA, 321 bp, Glycine max
  unsure (1)..(321): unsure at all n locations
tcaggtttcagttccaatcgttacacctcatagcattactccctcagatgctcatctaaccattcagttctatacaaaaatcctcaaaaactcttcctctctgccatgaccatggaatacagaaccttagaactcaacatcatatccgcaaaggacatcaagaatgttaatctcttcccaagatggacgtatacgccgccgtttcgctctccggtgaccctctctaccctcagggcgccaccacccacgtcagttggccccttgcgaaanaatcacacgtggaactaccccgtgaaattctctgtcaacgaatcgctggcg

SEQ ID NO: 106045 - DNA, 303 bp, Glycine max
ggacgttgtcaagattgttgacaccttccctggccaatccattgatttctttggtgcactgagggccagagtatatgatgacggagtgaggaagtggatttctggtgttggtgttgacggcattgggaagaagcttgtgaactcaaaagatggacctccaacctttgagcagcccagatgactctggagaagctcttgacgtatggtaacatgcttgtccaagaacaagaggtgtcaagagagtccaattggctgacaagtacttgaacgaggctgcacttggaaatgctaacgaggatgcta

SEQ ID NO: 106046 - DNA, 271 bp, Glycine max
  unsure (1)..(271): unsure at all n locations
ctctaatatttttctcactgtcttgtctctccagagaactgtatagagagagatggcagctgcaacatctggtgctgtgttaaatgggttgggatctacagacttgagtggaggaaacaggagccaaacccttctggccactgctattggaggcanagttggtgctgctgctgtactgttagtcctagaagattcattgtggtagctgctgctggcacaaagaagtcatggctccctggtgtcagaggtggtggcaaactcgtcgacccag

SEQ ID NO: 106047 - DNA, 320 bp, Glycine max
caccaggcgcacgttagcacaaactatcatggccacggcaacagcagctgccacctcgtcctttatggggacgcgtctcctggaggctcactccggagcggggcgagtgcacgcccgattcggcttcggcaagaaaaaggctcccgccccaaagatagcctccaggggatcgggcgagacaccgacagacccctttggtatccgggcgccaaagcgcccgaatacctcgatgggagtcttgtcggagactacgggttcgatccgtttgggctagggaacccgcggagtacctgcagttcgagctggactcgctggaccag

SEQ ID NO: 106048 - DNA, 280 bp, Glycine max
cacattattattcatatctctctctctctcccccaagaaattcaacagagttttgattaacttgaaattgttcaacaagacatggagaattcattgggaaagtacggaaaagagcttaatctcgaggctacagagttgaggttggggttgcctggaagcgatgagcctgagaaagttctgctgttagaagcaacaagagatcttcaccagaagcaagtgaagaagagtgcataagcaagggcaacatgaattcttctgatggttctgatatcacaagtga

SEQ ID NO: 106049 - DNA, 326 bp, Glycine max
  unsure (1)..(326): unsure at all n locations
ganataacaagaacataaactatatacgcgtatcacattttgattttccttgttgcaaatatgttcggcaccgtcgagcacgacgaaattcgacgcgcttatcgtaagatggatctgtggtatcctgataggtggatcaaggacccaaagcttgcactagaagctaaaaagaatttcagcgcgttcaagaggcttattcagttttgtccaataaagggaagagaaggatatatgatgctggcttgtttggtctgattggagaggacgatgatagnggatttgttgatttcatgcagacatggtccttcgacgatgcagaaagtgag

SEQ ID NO: 106050 - DNA, 322 bp, Glycine max
ctcgagccgcgtttccacagcacgtggtaggaaatatcccgtgactgtcaacctatggcaaacagagaaaaatgcttttggaatgggctacatctttgaaagcccctcacacagaggatgcaattcgggttactcagtccacagcaaactttttcataagtgaagctaggaaatcacaaacacacctgatgctcaaaaagtgcgagataatctcatctacaattacaaacctacttttggtggaacggctgggaaaggatatgatcaagtgtatctctttgaataattctatctgtaggaggtgtccttgaatttgatttta

SEQ ID NO: 106051 - DNA, 305 bp, Glycine max
cttgcaccattgtttcatctctcagaaatgatcatgtcgactactatgttctgtctgagtccagtctctttgtttatggctaacaagatcatcatcaaaacctgtggtactacaaagctactgcttgcaatcccacccatattgaaatttgctgaaatgctttccctcaatgttaatctgtgaattacaccaggggaagtttcatctttcccggtgctcagccctatccccatcgcaacttttctgaggaagttgctattcttgatggctactttggcaagcttagtgcaggaagcaatgcttat

SEQ ID NO: 106052 - DNA, 299 bp, Glycine max
  unsure (1)..(299): unsure at all n locations
gctgaaagtcatgaccaggccttggttgctgnatagacaattgcattctggttgatggacaaggatatgtatgacttcatggctttagacagaccatcgactcctattatagatcgtggtatagcgttgcacaaaatgattacgcttattaccatgggtcttggtggtgaaggtatctcaatattatggggaatgaattcggccatcctgagtggattgatttcctcaggggtgatcaacatcttcctaatggcgtagtagttccagggaataacaccagttttgacaagtgcaggcgt

SEQ ID NO: 106053 - DNA, 325 bp, Glycine max
caaagggtgcacttaggaaaatccttatatatggatcaggaggtgctttcagagaatggcctgctgaaaagatgaatagtattaagcttgctgatgcattaaagcatcccatatggagtttggggagaaaaataactatggactctgctacccttttcaataagggtatagagtaattgaagcacattacttgtttggagcaagctatgacgatattgagattgttattcatcctcaatctatcatacattccttggttgaaacgcatgattcatctgttattgcacagttagggatacctgacatgcgcttaccgctcctttat

SEQ ID NO: 106054 - DNA, 327 bp, Glycine max
cgctcccatctcttaacgcatcaacatccacacccacgcccgccacatatgccccgccaccgcctccgtccgcttcccctccccgccggcgtgtcgaaggcggcggagtacgtgatctcgaaggttgacgatctgatgaactgggcccggcgcggctccatctggcccatgacttcggcctctcctgctgcgccgtcgaaatgatgcacaccggcgccgcccgctacgatctcgaccgcttcggcatcattttcaggcccagccctcgccagtctgattgcatgatcgtcgctggcactctcaccaacaagatggctcccgctcttc

SEQ ID NO: 106055 - DNA, 307 bp, Glycine max
ctcgcacagaatcggctaggtgagacttccagtaggattatctacaactggaagtaactcttcacattggtcaatcagtggcatggtaaaataaccgttcgtctctctcctgacgatccatcattgccatatacttctgcaatggaacttgctactggcgtacgtgctggacatttactccacctgagtttcttgaggcataactgctgggggaagatgaccacgcaagtagtgggcatccctctcatttcagtgacggccaccctatgtttgaagtggggctctcgcaacagtgtctaaccactgg

SEQ ID NO: 106056 - DNA, 254 bp, Glycine max
gacctaggcacccagagacgaggaagggcgtagtaagcgacgaaatgcgtcggggagttgataataagcgtagatccggggattcccgatataggtcaacctttcgaactgctgctgaatccacgggcaggcaagagacaacctggtgaactgaaacatcttagtagccatatgatcagatagcaaaagcgattcccgtagtaacggcgagcgaaatgggagcagcctaaaccgtgaagtacgggttgtgggag

SEQ ID NO: 106057 - DNA, 278 bp, Glycine max
  unsure (1)..(278): unsure at all n locations
caagatgtcgaagagaggacgcggtggtacggcggggaacaagttccggatgtcgctgggtctgccggtggcggcgacggtgacatgcgccgacaatacgggggcgaagaacctctacatcatatcggtgaaagggatcaaagggcgtttgaaccgtctcacctcggattgcgttggcgacatggtgatggccaccgtgaagaaggggaaacccgatctgagataganagttttgccagctgtcattgttcgccagcgcaagccatggcgccgaaagg

SEQ ID NO: 106058 - DNA, 277 bp, Glycine max
  unsure (1)..(277): unsure at all n locations
ggnaatgaattcaaacgtgaaggttcaggacgtntaactggggagcccaaacngatgaacttgctcaggtaactgatgaggttgcgaatgaaactgaaaagaatttnggtgatgagancgcctgcagttnnagaagatgtagctgatggtaacaaggacngccctactaatgncacnnaaganaaagagcctgaagataaggagatgactctggaggaatatncaaaaagtgttggaagagagaaggaaggcctccaagcactcaagactgaagana

SEQ ID NO: 106059 - DNA, 279 bp, Glycine max
ctcgagccgctttagagagatagagagaggaagaaagaatggcagcttgcaatgtctacttaacacaatctctgagcacaaattgctccatctcaaccccatcagagacgcaactcagttttttccaccaaaagcaggtagttttctggaggaacagctagaagggcagctgcagcagcagaagaagctatgtgataacatgtgcagcaggtgactcacagacagtggtgattggcctggctgcagactcagggtgtcggaagagcaccttcatgagga

SEQ ID NO: 106060 - DNA, 273 bp, Glycine max
cttcaatatttcttctcatcgagaagcttcgcgaacgaaaacaaagaaccctagacagatccattccatagccatgtcaggtgttggccctctatctcaggattgggaacccgtcgtcctccgcaagaaggctcccaccgccgccgccaagaaggacgagaaagccgtcaacgccgcccggcgctccggcgcggaaattgaaaccctaaaaaagtataatgctgggacaaataaagcagcatctagcagcacttcattgaacactaagaggct

SEQ ID NO: 106061 - DNA, 269 bp, Glycine max
atcttatcttatccctctaatcactctagctgttgcaaatttctactatttttcaatggcttctgcagatgttgagtgccgttgctttgttggtgggcttgcttgtgtcaccggcaacgatgccctcgagaaagccttttcaatctacggcgacatcgttgaatcgaaggttatcaacactcgtaatagcggaaggtccagaggattcggatttgtgaccttcgcctcagagcagtcaatgaaagatgcgatcgcaggaatgaacggcc

SEQ ID NO: 106062 - DNA, 277 bp, Glycine max
  unsure (1)..(277): unsure at all n locations
gtcacacgcttcagaagacatggcctcattgggtgggttacaaaatgtgagcggcatcaatttgattatcaaagagggtccaaaagtgaatgcaaagttcgagctgaagccgccaccatatccactgaatggtttggagccggtgatgagccagcagacacttgagtttcactgggggaagcaccacaagacttatgtgganaatctgaaaaaacaagttgttgggacagagcttgatgggaagtcactagaagagattattgtcacatcatacaat

SEQ ID NO: 106063 - DNA, 269 bp, Glycine max
cacagatattactgaaaattattctgaaattgaggtcatcaagtgcattcagattggtttattatgcgttcaacaagaccctgatgctagacctacaatggtgacagttgcttcatatctgactagtcaccctattgaattgccaacaccacaagagcctgcatttttcttgcatggtagaatggatgaacatgcagttgcgaatgaatcaagttccaaccaatcgatcaacacttctacaccattaatattctctaacaatcaaatgt

SEQ ID NO: 106064 - DNA, 272 bp, Glycine max
gcaaaagcaagaagaactagtctaagcagaaatggcctcttcagtgatggcatctgtggccctcaaacctgcccctttcactgttgagaagtcctcagttagaggccttccctccctctcaaggaactcctcttcattcagagttgtggccagtggtggcaagaagatcaagactgacaagccttatggagattaatggtggcatggctttgagggaaggagttgatgcatctggcaggaaaggacagggaaagggcgtttaccagtttgta

SEQ ID NO: 106065 - DNA, 272 bp, Glycine max
atcaacttgaggatggtcgcacccttgccgattacaacatccattaggaatcaatactccatctcgtgcttcgcctcaggggtggcatgcaaatctttgtcaagactttgaccgggaagaccatcacccttgaggtggaatcctcggacaccattgataatgttaaggccaagatccaggacaaagagggcatccctccagatcagcagaggctgattttcgctggtaaacaacttgaggatggaagaacccttgctgattacaacattcag

SEQ ID NO: 106066 - DNA, 270 bp, Glycine max
gcagatcgcagcccttagccaggagattgttaataaggttcttcccactgcttaatatgtctgtgtaatttctgctgctgatggttgccttggacaagatatggttcaccccgcttgggaaattcatggacgagagggacgcggcgatcagggagaagctgagcagcgtgaaggacacgtcggaggaggtgaagcagctggaggagaaggccaatgctgtcatggcggcttctcgaggccgagatagcggcggcgctgaacacgatgaag

SEQ ID NO: 106067 - DNA, 251 bp, Glycine max
gctggtgatttgcagcaaatcaccggtatggcaaaacagatggtaaccacattaggaatgtccaatattggtccttggtcacttatggaagcatcagcacaaagtggggatgtcatcatgagaatgatggcaaggaactcaatgtcagagagacatgcagaagacatcgatgctgccatcaagaggatctcagatgaagcatatgaaattgcactagaccatataaggaacaaccgtgaggcgattgacaa

SEQ ID NO: 106068 - DNA, 260 bp, Glycine max
gtgaggctgtgaggaaacagaggatagcagcaaaagcaatggcatctgcaagagaacaaatgtatttgatggcaatcctccttatattctccccttcaaaattaacgttatcaaatgctggtgcagtaacagggcaaccaattccacctgagtggccgcaccagttccacgcgtttatgttcatgaacgaaagcggaattcttcagaaactggacttgtggtacgactggcccaacggccgaaacttcagcatcattcag

SEQ ID NO: 106069 - DNA, 253 bp, Glycine max
ctggacattcagcacaactggggctttagaagcagcctatgcacaagcatttgggaagagtatctctctttctgagcagcagctagtggattgtgctggccgtttcaacaactttggctgtaatggtgggttgccatcacaagcctttgagtacatcaaatacaatggaggacttgagacagaggaagcatacccctacactggagaagatggtgtatgcaaattctcagctgaaaatgttgccgttcaagtc

SEQ ID NO: 106070 - DNA, 271 bp, Glycine max
taaaacaaagaatcccaggcgatgagaaagatggacgggaaggaccaagatgtgtcgttgggagcgaacaagttccccgagagacacccgattaggactgcggcgcagagccaagacgacggcaaggactaccaggagccggcgccagcgccgctggttgactcgacggagtttacgtcatggtcgttttacagagcacgtatagcagtgtttgtggccacttttcagtgtcgctacatcaacgtcttaaccgttatgggagtcgccgggg

SEQ ID NO: 106071 - DNA, 270 bp, Glycine max
caaagagaaaaaaaaaacccttagccatcacaaccatcatggcaacctctgctattcagcaatcagcattcactgcgcaaactgctctgaagcagctcaatgagttcgtccgcaagaccggtggcgccggcaaaggtcgcactaacatgcgccgcaccgtcatgagtgctcctcagagcatttggtatggccctgaccgtcccaagtacttgggtccattctcggagcagattccatcatacctgaccggagaattccctggtgactacg

SEQ ID NO: 106072 - DNA, 268 bp, Glycine max
catatcgtaacggatcgcaatatagcaagtagcgaacatgatttctttcgtgtcctttccagcgtctcttcccgccgttaacatctccggcaacgccgtggcttctccgtcgtgccgcgtcaaatccaggcctatagttgccttcgccaccgccaccgccaccgcggaagctcgctcttcctggacggagcaaccgagatattcgtatctgaactcctcttgctcttcgctctacgaggttctcggcatccccgccggcgcctctaac

SEQ ID NO: 106073 - DNA, 243 bp, Glycine max
agcgtaggttctggagccatttacgcagcaactaaagctgctattgatcagcttaccaaatattttgcttgtgaatgggcaaaagacaatataaggagcaacggtgttgcaccctggtataccataacttcacttgtggaacctttgcttgcgaacaaacagcttgttagtgagataatatctcgaacgccgataaagcggatggcagaaacacatgaagtttcatccttggtgactttcttt

SEQ ID NO: 106074 - DNA, 263 bp, Glycine max
attgttggtcctccaggaactgggaagacactgttagccaaggctattgctggtgaagctggtgttccacatttctcaatatcaggttctgagtttgttgagatgtttgttggtgttggtgcttctcgtgttcgtgatttgttcaagaaggccaaagagaatgccccttgcattgtctttgttgatgaaattgatgctgttggaagacaaagagggactggaattggtggtgggaatgatgaaagagagcagaccctcaacca

SEQ ID NO: 106075 - DNA, 265 bp, Glycine max
ctttcctacctgccagaccttgatgatgcacaattggcaaaggaagtagaataccttcttaggaagggatggattccttgcttggaattcgagttggagcacggtttcgcgtaccgtgagcacaacaggtcaccaggatactacgatggacgctactggaccatgtggaagctgcctatgtgtggttacactgatgcttctcaggtgttgaaggagcttcacgaggctaagactgcataccccaacggcttcatccgtatcatcg

SEQ ID NO: 106076 - DNA, 266 bp, Glycine max
  unsure (1)..(266): unsure at all n locations
ctctcacagaggctcttcccggtgataatgttggattcaatgttaagaatgttgctgttaaggatctcaagcgtggttatgttgcctcgaactcaaaggatgatcctgccaaggaggctgctaacttcactgcccaggttatcatcatgacccatcctggtcagattggaaatggctatgcccctgttcttgactgccacacttcccacattgncgttcagtttgctgaactcatgaccaagattgacaggcgatctggcaaagag

SEQ ID NO: 106077 - DNA, 124 bp, Glycine max
gatgatgctggggtacaaccgctctccatcttgcaactgggatgcgtctggcccgagtgaggggcacatgagggactgcattccggagattgcacagttggggtatgtgtggcagttgctcaca

SEQ ID NO: 106078 - DNA, 267 bp, Glycine max
tgttgatcgagataactagaaacagtgtgatgaaaatgaaggtccttgttttcttcgttgctacaatattggtagcatggcaatgccatgcgtacgatatgttccctctccgaatgaacactggctatggtgcccgtactccggaggtgaaatgcgcaagttggaggcttgctgtggaagcacacaacatcttaggctttgagaccattcctgaagagtgcgttgaagcaacaaaggaatacatccatggcgaacaatatagatcag

SEQ ID NO: 106079 - DNA, 269 bp, Glycine max
tgctaatataaaacatggcacctcaaatttcaagaggcagagtctctattgttgttttgctagcctctcttgtcctcccactactttttccggaatgttattattcttctgtgttcattgtaagtgcagcagccccagaatcagatgttgatctgttagaatttcccttaaacttagaatacttggaggctgaatttttcttgtctgtcatcttgggttatggattggatgtggttgctccaaatttaactgagggaggacccctccca

SEQ ID NO: 106080 - DNA, 268 bp, Glycine max
gcaaaaatggcatcattcaccatgacagcttccatccttggcagcccagccgtcaccaaccggtcggcagtagcaacgcagaggagatcactcgtagtgaatgctgccaaagctgttgaagcagaaaaggtcagttatgacaatgacatggatggtagcaatggaaggaggaacttgatgttcgccgcggcggcggctgctgtttgctctgttgctgggatggcagtggcagatgagcctaaaccaggaaccccagaagccaagaaaa

SEQ ID NO: 106081 - DNA, 265 bp, Glycine max
cggctcgaggctggtgatttgcagcaaatcaccggtatggcaaaacagatggtaaccacattaggaatgtccaatattggtccttggtcacttatggaagcatcagcacaaagtggggatgtcatcatgagaatgatggcaaggaactcaatgtcagagagacttgcagaagacatcgatgctgccatcaagaggatctcagatgaagcatatgaaattgcactagaccatataaggaacaacccgtgagcgattgacaagattg

SEQ ID NO: 106082 - DNA, 254 bp, Glycine max
gtgcatgcgggtataagaggaattcaagtacaaattgccggacgtatcgccgcggaagagattgcacgtgttgaatggcatcaggttggtagagttcctctacacatcattcgagggaaaatcgattattattgctatacagttcgaactattgatggggttttatggatctaagtttggatatactctacatagagagaaatatattatgcatcatcttgaatgtgctatatgctatcttaaatgtgatatat

SEQ ID NO: 106083 - DNA, 258 bp, Glycine max
tgcgtgagaacgaaaaaagataaaaaaaaccctaacgcactcgagaccctgagatttttcatcttcgtttctcattctctttttgatcatggacgtcgaggtgtggcagatcttcaacaagttcgacaagaacggcgacggaaaaatctcggtaacggagctgaaggacatgctcgcggccctcggatccaaaacgacggacgatgagttgaaacgcatgatggaggagctcgaccagaacggcgacggtttcatcga

SEQ ID NO: 106084 - DNA, 258 bp, Glycine max
agaagttctactgggcaccaacaagggatgaccgcattggtgtctccactggaatttttcgcaccgattcaattcctgaacaggatcttgtcaagattgttgacaccttccctggccaaaccattgatttctttggtgcactgagggccagagtatatgatgacgaagtgaggaagtggatttctggtgttggtgttgacggcattgggaagaagcttgtgaactcaaaagatggacctccaacctttgagcagccca

SEQ ID NO: 106085 - DNA, 268 bp, Glycine max
gctacaaggaagaatcttggatggccatacgagcctttccatgtgccagaagatgtcaagaagcattggagtcgccatacacctgagggtgctaaacttgaagctgagtggaatgccaagtttgtggaatatgagaagcaatacagtgaggaagctgcagagctgaaggctattattactggcgaattaccagcaagttgggagaaagcacttccgacatacacaccagaaagccctgctgatgctacaagaaatctgtctcagcaaa

SEQ ID NO: 106086 - DNA, 218 bp, Glycine max
aagcattctacaagggggttgctcctctctgcgatggacagataccatacaccatgatgaagtttcgctgctttgaacgtactgttgaagcactgtacaagtttgtggttcctaagccccgcagtgaatgttcaaagccagagcagctggttgtaacatttgtagcaggttacatagctggagtcttttgtgcaattgtttctcaccctgctgattct

SEQ ID NO: 106087 - DNA, 149 bp, Glycine max
tgttgacgtgctcctcgagcaaaacattgttcccggtattaaagtcgacaagggtttggtacccttgctggatccaacgatgagtcatggtgccaagtcttgatggcttgctctcgtcggctgatatacacaagtgccgtcgccaatgg

SEQ ID NO: 106088 - DNA, 140 bp, Glycine max
ggcagaaagcaagctcatcctagagttttaaaaatggcagcagcctcctccatggctctctcttccccatccttggctggcaagccggaagctggccatcagcccgaagtcggaggcacatagagacgcacaacagctct

SEQ ID NO: 106089 - DNA, 276 bp, Glycine max
ctcaagaccaatggatcatcaactcctgtgaggggagagacagtggccaagttgatggtggcattaatggtttcggacgcattggtagaaacttccttcgctgctggcacggtcgagaagactcacgccttgatgtcgttgttgtcaacgacagtggtggtgtcaataatgcttcgcacctgcttaaatatgattccatgctgggaactgctaaagcagatgtgaagatactggacgatcgaaccatcactgttgatggtacgcccatcaaggttg

SEQ ID NO: 106090 - DNA, 353 bp, Glycine max
gtgcattgcagccttccgggtgactatggatttgaccctctgggactttcggaccctgaaggaacaggagggttcattgagccgaaatggctagcatatggtgagataatcaatggtcgttatgcaatgttgggtgcagttggtgcaatagcacctgaaattctaggcaaggctggtctgatccctcaggagacagcactcccatggttcagaaccggtgtgttcccacctgcaggaacctacaactactgggcagactcctacacactgttcgtgtttgagatggcactgatgggatttgcagagcacagaagattccaagctgggcacaaccagctctatgggcaaacata

SEQ ID NO: 106091 - DNA, 342 bp, Glycine max
  unsure (1)..(342): unsure at all n locations
tgttgggtaggtgaattccaatttcaacgtttcaaattgcatactgttcttctcttcctctcggtgtctccactgactccatgtcatcgataacgggcatccagggccaacctcttgaggttacggtggtttcgtgctccaacttgaaggacacagaatggatttcaaggcaagatccgtacgtttgtgttgagtatggcagcacaaagttccgaaccagaacctgcatagacggcggaaaaaatccggtattccaagtaanattcatcttccccctacattgaagccttcgggagctcaatgtccttgtttggaacagcatactctcaccttggacgattt

SEQ ID NO: 106092 - DNA, 331 bp, Glycine max
  unsure (1)..(331): unsure at all n locations
cgtcactcgaatctcaaggccgctcgtcaaatattaggaaatgccattggaaaggctcctaaagataagatttttaagaagtatatagagatagaactgcagcttggtaatatagatcgatgcagaaagctgtacgannaatatctggagtggtcgcctgaaaattgttatgcttggagcaagtatgcagaactggagagatctttatctgagactgatcgagctcgagcaatttttgagcttgcaatcgctcaaccagctttggacatgcctgagctgttgtggaaggcatacattaactttgagactgctgagggtgaatttgagagag

SEQ ID NO: 106093 - DNA, 323 bp, Glycine max
  unsure (1)..(323): unsure at all n locations
gtctcatggtggtgacttcacacgccataatggcactggtggcaagtccatctatggggtgagattttaagatgagaacttcatcctaaagcatacgggtcctgttatcttgtccatgagcaatgctggactcaacacaaatgtttcccagtttttcatctgcactgacaaatagnatggttggatggcaagcagtgattttggcaagtgaaagaagcatgatttgtggaggcatggacgctttggtccagaatgtcagaccagcaaagatcacattctgactgggacaatcgataagttgactgtgtgtatctaccacagtc

SEQ ID NO: 106094 - DNA, 352 bp, Glycine max
  unsure (1)..(352): unsure at all n locations
aattttgatttccttctctctttcaccaatcaacacaaactaagttcttccttctgttgaaagcgatagcaatggccacgaatccaatcgaagcggggaacggcgacgctgctcccaaccctaacgcgactaccanatcctccgtgtacctgcaagactcggaggagctgaagcgagtcttcagccgcttcgacgccaacgggacggcaagatctccgtctcggagttggacaacgtcctccgctccctcggatccggcgtcccgccggaggagctccagcgtgtcatggaagaccttgacaccgatcacgacggcttcattaacctctcggagttcgccgccttctgccgc

SEQ ID NO: 106095 - DNA, 347 bp, Glycine max
  unsure (1)..(347): unsure at all n locations
aagatcaccaaagtacttgtgagtgtatacccaacacaaactaagatcaacatggactactacacccgcgtttcagaagttgagagggaacctatcatggagtattccacacctcgaccaatgttgggcaactaccaccaccctaatgctcaccgtgtcctcaacgagaagattgtttatgaggaggatgtgattggaggatcccgccacaaccacatgtctcaccaccaccctgagactcatgagagagtcaaggtggtggagtatgaacaagttcctgagaggcgcgttgtctatgaagagaaagttgcttatgacnacgatcgttactactctccaaggtattg

SEQ ID NO: 106096 - DNA, 297 bp, Glycine max
  unsure (1)..(297): unsure at all n locations
gcccgtcgtgcccggaccctgtcgcaccacgaggcgctgtcggcgagtcgggttgtttgggaatgcagccccaatcgggcggtaaattccgtccaaggctaaatactggcgagagaccgatagcgaacaagtaccgcgagggaatttgatcgtgttcttgcacctgaggggattgaacttattggcattaacaaccgtaatcttgaaacatttgagctggatatcagcatcacaaagaagcttctggaaggagagcgaggcaanataatccgtgagagaggcataactatggttgga

SEQ ID NO: 106097 - DNA, 357 bp, Glycine max
  unsure (1)..(357): unsure at all n locations
tgagagtgtgagagggagcacagtgaagaagagaacgaaggaacgaagatggagactcctcctccgcaacaaggcgtggtgaagaagaaggagacaaggggccgaaaacccaagccgagagacgaacacgccaaggcgttgaaggaagggagaacaacacagcaacaacaacatgatcagcagcaaaaataaaacagcacatcaaccttcggtggacgagaaatacacgcagtggaagtcccttgttcctgtcctctacgactggctcgcctaccacaacctcgtctggccctctctctcttgccggtggggccctcagcttgaacaagccacttacaagaatcgtcnaagactcta

SEQ ID NO: 106098 - DNA, 345 bp, Glycine max
  unsure (1)..(345): unsure at all n locations
aaagtttcttcctttctctgctctttgccttctctgacacatttggtngcttgtagagcgtgttttggcaggaaggaggtatggcgaaggacgttgaggttgctgagcgtggctccttctctgggaaggactcccaggaccctccaccagcaccactcattgatgctgaggagctcacaaagtggtccttttacagggctctcatctgctgaatcattgccactttgctcttcctctacattactgtgctcacagtcatagggtacaagcaccagactgacctccagganaatggtcgaatctgtggtggggttggcattcttggcattgcatgggcctttggtg

SEQ ID NO: 106099 - DNA, 343 bp, Glycine max
  unsure (1)..(343): unsure at all n locations
gccaattaattctttacaaagaacaacaagtaaacgcattaaaaaaaaaaattagaaaacaatatagatttgatcttttatcctataattttatcaattatgcagataagttggactcatatatttatggatatagatccctatttcaagtaaanaaaaaccaagtgatttcttctaattacaacacgtatacaaaagaattattggatatcatagataatctctttatcaagaattatatatcggaagatgcgattctagatatggaaaacaatagtatagaaagattttgattggtgggaatcatagagtatactaatcgttcctatcgaatcagatttgg

SEQ ID NO: 106100 - DNA, 298 bp, Glycine max
  unsure (1)..(298): unsure at all n locations
gctgcagatgcactttcaaagttttattaccctccagttgctgcagtttccatatcctatccanaagaagctattagatcagaatgcttgatagatggtgagttgaagggggttggtcaattgcatccacgtagacaaggagtggaaacattaggaactatatacagctcatcactattccccaaccgagcaccacgacggaaggttctactcttgaattacattggaggagcaactaatactggaattttatcgaagacggacagtgaacttgtggaaacagttgatcgagatttga

SEQ ID NO: 106101 - DNA, 354 bp, Glycine max
  unsure (1)..(354): unsure at all n locations
cacgcttcagaagacatggcctcattgggtgggttacaaaatgtgagcggcatcgatgttcttatcacagtgggtccanaagtcaangcantggtcnanctggnngccgccaccatatccactgaatggaatttgggcggtgatgagccagcagacatgtgagtttcactgggggaagcagcacaagacttgcgtgganaatctgaaaagacaagttgttaggacagagcttgatgggaagtcactagaagagattattgtcacatcatacgatacgggtgacattctgccagctttcaacatgcagcacaggtatggaaccatgattcttctgggagtgctgaaaccggtggg

SEQ ID NO: 106102 - DNA, 326 bp, Glycine max
ccttattcctcttggctatggactaactccaactggttgatcaagctgttcaactcttctgaaccaagtcattggtagttgacctttgaagtcatgatctccaaatatgacatctgtgattccctgtgcttcagtacctggcaaccatgcagcaacaagagcatctatcttttatcctaccatgtaccattcatgcatgtatgatactgtcagttaccctatttgaaatttgtataactaatgaactttgaggatggccataattgattgtatgtattgaatattctcaagcttcttgactgacctagcagatcttataatgttgc

SEQ ID NO: 106103 - DNA, 351 bp, Glycine max
  unsure (1)..(351): unsure at all n locations
cgctgctatagattttcattttctcttcttacagatccaaacatggccgaagaacaccgatgccaagctcccgaaggtcacagactctgctccaacaactgcgngttcttcggtagccccgccacaatgaatctctgttccaaatgctacagagacatccgtttgaaggatgaagaacaagccaaaactaaatccacaatcgaaaccgctctttctggatcttcctccgccaccgtcgccgttgcctccgccgtggattctcttccggcgccggttgaatccctccctcaaccgtcggtggtcagttcgccagatgtggcccaccggttcaggcgaaccggtgcggcgcgt

SEQ ID NO: 106104 - DNA, 341 bp, Glycine max
  unsure (1)..(341): unsure at all n locations
cgtacgtagctcggcatcggtcgaggaggagcatgctatgctggtgtactcatgtcttccattatcgagagaggttatggtgttggtgatgttatctctcttatgtggtttaaacgaagccttccccgttactgtactcaatttattgagatatgcatcatgctatgtgctgaccatggtccttgtgtctctggtgctcacaatactattgtgacagcaagggcaggganagacctagtntccagtctcgtatcaggtctgctaacaattggtcctcganttgggggtgccatcgatgatgctgctcgctacttcaaggatgctcatgacagggcacttac

SEQ ID NO: 106105 - DNA, 315 bp, Glycine max
gtccacagcaaactttttcataagtgaagctaggaaatccacaaacacacctgatgctcaaaaagtgcgagataatctcatctacaattacaaacctacttttggtggaacggctgggaaaggatatgatcaagtgtatctctttgaataattctatctgtaggaggtgtccttgaatttgattttatgcacaataaattatgaactggggatgtagtttgaagaaataaaaatttgtgcacagtgatgtttgtaagatgcttaatttcagggcaatgctctgcttatcaatgtgttatatcttgttattgcccc

SEQ ID NO: 106106 - DNA, 205 bp, Glycine max
  unsure (1)..(205): unsure at all n locations
caagtttgctgaactcatgaccaagattgacaggcgatccggcaaagagcttgagaaggagcccaagtttttgaagaacggtgatgctggttttgttaagatgattccaaccanacccatggttgttgaaactttctccgagtatcctccacttggtaggtttgctgttagggacatgcgtcaaactgttgctgtgggagtcatc

SEQ ID NO: 106107 - DNA, 357 bp, Glycine max
  unsure (1)..(357): unsure at all n locations
gttcctcggacacgtcggcagcaagacctcttgtggttatggagtggctaccggaggacctttggcctggggtctttgttacaaccatgaaatgagtcctatgcagtcatactgtgatgactacttcaaactcacatacccctgtacacctggtgctgagtactattgtcgtggagctattcccattttctggaactacaactatggtgctgttggagaagctttgaagatcgacctactcagccatccagaatacatagagcaaaatgccacccttgctttccaggctgctatttggagatggatgacaccaatgaanaagtcacagccctctgcgcatgatgcctntgtcggcaa

SEQ ID NO: 106108 - DNA, 338 bp, Glycine max
acctggttcagtgcattcagaacaagcccctgtattttgctgatcggctgtatgactccatgaaggccaaggggacgcgagataaggacctgatcagaatcattgtctaccgcagtgaagtggacatgttgaaaattaggtctgaattcatgagaaagtacggcaagtccctgtactattatatccagcaagacacttcgggcgactaccagaaagcgctgctgtacctgtgtggtggagatgactgaagcccgacacggcctgagcgtccagaaatggtgctcaccatgcttccagctaacaggtctagaaaaccacttgcgaataaagtcccgtgg

SEQ ID NO: 106109 - DNA, 352 bp, Glycine max
acaaggcagaaagcaagctcatcctagagttttaaaaatggcagcagcctcctccatggctctctcttccccatccttggctggcaaggctgtgaagctcgggccatcagcccccgaagtcgggagggtcagcatgaggaagaccgtcaccaagcaggcctcctccggaagcccatggtacggcccagaccgcgtcaagtacttgggcccattctctggcgagcccccgtcctacctcactggcgagttcccaggtgactacggctgggacactgctgggctttcggccgactcagaaaccttcgccagaatacgtgagctcgaagtgatccactccaggtgggccatgctc

SEQ ID NO: 106110 - DNA, 278 bp, Glycine max
cacaacaacaataacaatggctgcctcactacaagctgcagctaccttcatgcaacccaccaaggttggcatagcctctcgcaacctcaaatctacacaatgcatttctaaggcttttggcttggaacctgctgcagctaaatcacttgctcccttcagcctgatctcaaagaatttgctcaaaaatgtgtcgacgctaccaaaattgcaggattcgcccttgccacctctgctctcgttgtttctggagcaagtgcagaaggtgttccaaaaacgct

SEQ ID NO: 106111 - DNA, 274 bp, Glycine max
atcttgacaaaatggccgtaacagaagcaaacctaaagaaggctggcttccacacattggagcagtgaattctcaaggatccacatcttatcactccaaatgcactttcatacaaatcagcaatgagagagaatctgttaggcagggatacagaattgttggaatcattggagaccaatggagcgatctgcttggagaccacagaggcgaaagcaggacctttaagcttcctaatcccatgtactacattgagtagtaccttcacctctctcaa

SEQ ID NO: 106112 - DNA, 274 bp, Glycine max
gtggtaatgagcatggaggcaggcattggagtgatgggcaccaagttgggtatgatgagctatttcgaatccgacggagaggttgttcctgtcactgtcgtgggtttcaaagaaggcaacatcgtcacccagattaaaacgaggccaccgatggatacgacgccgtccaggtttgttaccgaaggttcgagatcgcaaattgaccaaacccgaaatcggtcatctccagaaggtcggcgccattcccatgcgccatcttcaggagttccgtctt

SEQ ID NO: 106113 - DNA, 275 bp, Glycine max
  unsure (1)..(275): unsure at all n locations
tgcaattgaagttgaagtcttgcccttctctcttcaactccaaacacaagacatcatcatccatggctgcctccgtctccactgtcggagctgtcaacagagctcttttgaacctgaatgggtctggacctggggtttcagtcccagttcatccttctttgggagcagcttgaagaaggttattggctcaagggtcnccaacacaaagatttcctctggaagcttcaagattgttgctgtagaagagaagaaagagatttcagagacccagcaga

SEQ ID NO: 106114 - DNA, 264 bp, Glycine max
gtgaaagcaagcaggctgttgagaactccccattcttggagaaattgaagtatagagggtatgaggatcttttcatggttgatgccattgatgaatatgctgttggccagctcaaggaatttgagggcaataagctttctctgccaccaaggatggtctcaaacttgacgagagtgaagatgagacgatgaagcaagaggcgttgaaggagaagtttgacaacctatgcacggtgatccaggatgttttgggtgacaatgttga

SEQ ID NO: 106115 - DNA, 270 bp, Glycine max
gctcaagctggcaaaggaagcaaacacaatcctgtttgattaccgaatcccaacatcggggtacgagacgtgcggatccggtgtggagagtccactgcaaatgaatggactcccaataagcgtgtacgcgcccgaaacgttgggtgcgtggtggttgaccgggagggccggtgcgcggcagcaacatccacgggagggctgatgaacaaaatgaccgggcgcatcggtgattcgccgctgataggcgccgggacctacgcgtgcgacgtg

SEQ ID NO: 106116 - DNA, 275 bp, Glycine max
aagaaatttaagtgaggagctagagaatgatgatgaagtctgctatgtgtgcagtggtggttgtagcacttcttcttctggcggaggtggggcccatggctgaggctgtgacatgcaccccaacagagttgagtccgtgcttccagcaatcacttccggtgctaaaccttccaatgcttgttgcacgaagctgaagcagcaaaaaccatgcttatgtggctacctcaaaaacgctagcttgaagcagtatgttaactctcctaatgcccgaaaaa

SEQ ID NO: 106117 - DNA, 245 bp, Glycine max
ccaaggaggagtgataactccaaatattatgatattctcgggatttccaaaaatgccagtgaagatgaactcaggaaggcctatagaaaggcggctatgaagaaccatccagataagggaggagatcctgaaaagtttaagagttaggtcaagcatatgaagttttaagtgatcctgagaagaatgaactgtatgaccagtatggtgaagatgcccttaaagaagggatggggggaggaggctcg

SEQ ID NO: 106118 - DNA, 205 bp, Glycine max
cttgcaaactagttttgttttgggaacatcatcacattacattagattggtggtaatggcagcgtcactacaagcagcagctactttcatgcaacccaccaagttgagcaggagcaacactttgcagcaaaagtctactcagtcatttccaaggcttttggtttggaacctgttggagctaaaaaggtcacatgctcccttcagg

SEQ ID NO: 106119 - DNA, 279 bp, Glycine max
caactttgcccccttgtaaaacttcttattgtgatgtctaaaagcgaagacttgaagcttttgggaggctggttcagcccatttgccctgagggtgcagattgcccttaacctcaagggtctagaatatgaggttgttgaagagacttgaatcccaaaagtgacctgcttcttaagtccaaccctgtgcacaagaaaatcccagttttcttccatggagataaagtcatttgtgaatctgcaatcatagttgagtacattgatgaggcttggactaatg

SEQ ID NO: 106120 - DNA, 272 bp, Glycine max
ccaagaacttcatgaccctgcccaacatcaaggttcctctcattcttggtatctggggaggcaagggacaaggaaaatctttccaatgtgagcttgtctttgccaagatgggaatcaaccccatcatgatgagtgctgagagttggaaagtggaaatgcaggagagccagcaaaactgatcaggcagagataccgtgaagccgcagacttgatcaagaagggaaagatgtgtgctctcttcatcaacgatcttgatgcaggagctggtcgtc

SEQ ID NO: 106121 - DNA, 268 bp, Glycine max
gtggagcgttttgttgggcatggtgtgggaacagtgtttcattctgaaccaattattatacacaatcgcaatgagaaggcaggccgcatggttgaaggtcaaacatttacaattgagccgattctttcaatgggagcattgattccattacatggccagacaactggacaacactaacagctgatggtagtccggctgcacagtttgagcataccattttgataactaagactggagccgaaattttgactacatgttgacatggtaa

SEQ ID NO: 106122 - DNA, 268 bp, Glycine max
ccttcacaagattctcacaaacaactcttgagaaagatagaatggctgccaacacattgatgagttctgccatctcagccttcccatactctcctttcctcctcaaaatccagatttgccgcagcagttcctctttcagctttgttgtcaccaatgcctcttcttctcgcttttccatgagtgctgactggatgacatgccagcctagacccccctaccttgatggttcagcacctggtgactttggattcgaccctcttcgtcttgg

SEQ ID NO: 106123 - DNA, 274 bp, Glycine max
cacaaggcagaaagcaagctcatcctagagttttaaaaatggcagcagcctcctccatggctctctcttctccatccttgtctggcaaggccgtgaagctgggctcatcagcccccgaagtcgggagggtcagcatgagaagaccgtcaccaagcaggcctcctccggaagcccatggtacggcccagaccgcgtcaagtacttgggcccattctctggcgagcccccgtcctacctcactggcgagttcccaggtgactacggctgggacact

SEQ ID NO: 106124 - DNA, 281 bp, Glycine max
tttagaaaaaaaaaaagacaataaacaaataagacgtatcattttatgtatagtagtggggaattatgggacaaaaaataaatccgcttggtttcagacttggtacaactcaaagtcatgattctatttggtttgctcaaccacaaattattccgagaatatacaagaagataaaaaaatacgagattgtatcaaaaattatatacaaaaaaatataagaatatcctctggtgttgagggaattggacagataaagattcaaaaaagaattgatcttattc

SEQ ID NO: 106125 - DNA, 267 bp, Glycine max
ccaatatagcccaagccctatacaaccaaaccctatccacacacccatttgattcagtttccatggctagcctcaaggttgcatttttggctgcagtgctctgcatggttgtggtgagtgcacccatggcacatgagctatcacgtgcgggcaggtgacgaatagcctgatcaattgcatcggttacctccagaacggaggaacgccgccgtcgggatgctgcaacggagtgaagagcctcaatgccgccgccaagaccaccgccga

SEQ ID NO: 106126 - DNA, 263 bp, Glycine max
tccgaatcgaaaggtgaggttagtaagtaacaatggtggtgaaggccaagtctaggaaggaggaggttgtcactcgagagtacaccatcaacctccacaatcgcttgcatggctgcacatttaagaagaaggccctaaagcaattaaggagataaggaagtttgctcagaaagcgatggggacgaatgatgtaagagtggatgtgaagctcaacaaggctgtgtggagccatccgatccggagcgtcccaaggaggattaggg

SEQ ID NO: 106127 - DNA, 266 bp, Glycine max
tcaaagtttttcaaaaattgatgggtggcacagaaaatcagctggatatgatccttgtgcatccgattatactgaagcgtacctaaataggccagaagtccaaaaggcattacatgccaatgtcaccaaaattcatatccatggactcattgcagcgataatatcacattttggaatgactcaccacagtccatgcttcctgtcatcaagaagcttattgctggtggtattcgcatttgggtttacagtggagataccgatggaag

SEQ ID NO: 106128 - DNA, 265 bp, Glycine max
gttgggcatttggcttgtcagctactgtgatccaagggttgctgggcatgctagtggaggggggtgcagacaatgtcaatcagtgtttcttggaggcttcacgttttggcagtacagaacttgtgcgcatactttgcagattgctcaaagaaacagcttggatgttgatgttgacttggcgttgggttttgcctacccattatggcaagataggaactatggagtgcttggtggaagagggaaatgccatagcctttttgggccc

SEQ ID NO: 106129 - DNA, 251 bp, Glycine max
caggcagaggcacatcagggttgggagacaggtggtgaacatcccatcgttcatggttagggttgattcgcagaagcatcttgacttctcactgaccagtcctcttggtggtggtcgtccaggacgcgtgagcgaaagaaccaaagggctgctgctaagaagtccgctggtggagacggagatgaggaggatgaagattagattattaatggcttctgatatttatatagcttgtgctcgtttttctatct

SEQ ID NO: 106130 - DNA, 263 bp, Glycine max
tagggaagcaatacaagaagatgttccaaatgaatggggtaaagctacattttacagaaaatgctctaagatcaattgccagaaaggcaatatctaaaaatactggtgctcggggattacgatcgatactaaaaatgtgttggtagatgccatgtatgagattcctgatattagaacagacgatgatgttatagatgctgttgtcgttgatgaagaggccgttggaggtgaggggcgtgggagaggggctaaaatcctgtatg

SEQ ID NO: 106131 - DNA, 262 bp, Glycine max
aaaactcaagacaagtatggctgtcggaaagaacaaacgcttgactaagggcaagaagggtggaaagaagaaagtcgtcgacccgttcacgcgcaaggactggtacgatgtcaaggcccctgctatcttttggagcgcaactgcggcaagactctggtaaaccgtacggctggcaccaagattgcgtcggaaggactccgcggccgtgtgtttgaggtttgccttgctgaccttaacaaggacgaggaccaggcttttcgca

SEQ ID NO: 106132 - DNA, 259 bp, Glycine max
ctccctctaatcactctagctgttgctaatttctactatttttcaatggcttctgcagatgttgagttccgttgctttgtcggtgggcttgcttgggtgaccggcaacgatgctctcgagaaagcctttgcatctacggtgacatcgttgaatcgaacgttatcaacgagcgtgagactggaaggtccagaggattcggatttgtgaccttcgcctcagatcagtcaatgagagatgcgatcgcaggtatgaacggtca

SEQ ID NO: 106133 - DNA, 264 bp, Glycine max
ctgtgattcgggtaatggccaccagtggaggcgatgaggggcagaacaaccctgccctcgacccggatttggatgctccggatgacccggatcacgagttcgctgagttcgggtcgggttgcttctggggtctgagttggcctttcagcgagttgtgggtgtggtgaagactgaggttggttacactcagggtcacactccggatccgaattacaaactggtttgcaccggaaccactaaccacgttgaagtggttcgggtcca

SEQ ID NO: 106134 - DNA, 250 bp, Glycine max
cacattcgtgagacagatggcatctgggctgttttagctagattttctattattgcacatcgcaacaaagacaagaatcccggggagaaattgatctccgtatctgacgttgtgatggagcactgggcacttatggaaggaatttcttctctagatatgactacgaggaatgtgaatctgaaggtgccaataagatgatagaatacctacgagatattttgtctaagagcaagcctggtgatcagtatgg

SEQ ID NO: 106135 - DNA, 260 bp, Glycine max
agcagttcatattgcagctaataaaaacactgttcctggagatgtgtctgccatggttcctggtggcatcaggatgggaacccctgctcttacttctagaggatttgttgaggaggattttgtcaaggagcagagttttttgatgcagcagtgaagatagctgtgaagattaagggagagtgcaaaggaacaaagctgaaggacttcttggccacaattgagtcatcttctacctttcaatcggagatagcaaagctccg

SEQ ID NO: 106136 - DNA, 259 bp, Glycine max
gtggaaatgcaggagagcctccatcactgatcaggcagagataccgtgaagctgcagacatgatcaagaagggaaagatgtgcgctctcttcatcaacgatcttgatgcaggagctggtcgtcttggtgaaccacacaatacactgtgaacaaccagatggtgaatgccactctcatgaacattgctgataaccccaccaatgtgcagcttccaggtatgtacaacaaggaagagaacccccgtgttcccatcattgtc

SEQ ID NO: 106137 - DNA, 264 bp, Glycine max
tgaagatcctggatgaagagtttggaattgtgaagggaaccatgacaaccacacattcctacacaggagaccagtggcttttggatgcttcacaccgtgacttgcgaagagccagggctgcagcactgacattgtcccagccagcactggagctgccaaggctgtgtctctagtgttgccacagctgaagggcaagcttaatggaatagcgctccgtgtgcctacacccaatgtttcagttgttgaccttgttgtgaatgttga

SEQ ID NO: 106138 - DNA, 268 bp, Glycine max
ctctgctcgtgcctctagggttatcatatctccattaccatttcctctctctcagtttccaagaatcttaagctatcggaaagtcttacccaaccgtgagcgctgattaccagaaggccgttgagaaggcgagaagaagctcagaggcttcatcgctgagacgagatgcgctacctctaattgtccgtttggcatggcactctgctggaacttacgacgtgagctcgaagaccggtggtcccttcggaaccataaagcacccctccga

SEQ ID NO: 106139 - DNA, 267 bp, Glycine max
attgtttgttgttgtaactcgttcttcttcttttgttgttctgtgtttgtgtttgttttttctctcacctgaaaatgtcttgctgcggtggtaactgtggttgcggaagctcctgcaagtgcggcaacggctcggcggctgcaagatgtacccagacttgagctacactgagtcaaccaccaccgagaccttggtcatgggagtggcacctgttaaggctcaatttgagggtgctgaaatgggtgtgcccgctgagaacgatggctg

SEQ ID NO: 106140 - DNA, 258 bp, Glycine max
gttctttcgtcgtcgtcacaagtcacaactcgcaaaccacaatgcctaagcagatccacgagattaaggattttcttctgacggcgcggaggaaggatgcgaggtcggtgaaaatcaagaggagcagggatgtcgttaagttaaggttcgatgctccaagtacttgtacacgctttgtgtccttgaccctgagaaagccgataagttgaagcaatctcttcctcccggtttgagtgttcaagacctgtagagctgttg

SEQ ID NO: 106141 - DNA, 262 bp, Glycine max
gcctcggctagggttcggaaacgaagaagggttctgtgttcttttcgcgatgagggccaagtggaagaagaagcgtatgaggaggctgaagaggaagcgccgaaagatgagacagagatccaagtagtgcgttaaactagtttgtttccgttgcttttacaattgcttatgttgtcaaataggacacccagttgttagtggcactggtctctcctttttgatgttttgatacattttgttggattttatttcgtcttatgtt

SEQ ID NO: 106142 - DNA, 262 bp, Glycine max
tctctctccacccaaaccctaactcacgaccctacgaccctctcgtatccgtcatgaaaggaggaaagtccaagaccacatctaagagagccgatcccaaacttagtgtgaataagaagggagccgccaccaaggctggaaacccgccggcaaggggaaggcagcgaaagaccctaacaagccaaagaggcctccaagtgctttcttcgttttcatggaggagttcaggaaggtattcaacaaagaacatcctgaaaacaaa

SEQ ID NO: 106143 - DNA, 259 bp, Glycine max
agaagaaggtggtaggcattcacctttctttgcagggtataggcctcagttttacatgaggaccaccgatgtgactgggaaggttacgtctatcatgaatgataaggatgaggagtccacgatggtgctgcccggtgccgtgtcaagatggtggtggagcttattgttcctgtggcttgcgaacagggaatgaggtttgctattagggaaggtgggaagaccgttggtgctggtgttatccaatccattattgagtgaa

SEQ ID NO: 106144 - DNA, 261 bp, Glycine max
cttctgcagttgctgcacatcaagcattagccatgatcacaaggctgcaggaagcaaaggcaacattacatatggaagcgcttgcagcacttaagaatgatggatgaggagtctgagtacgaaacaggagctttgcaaaagctaatgaccttcttgttgagaaggagaaagagatagaagagttggaagctaagcttgagctctataggaagaagttccctgatgaatctgtgctgaaaaacatggtggatacaacctctg

SEQ ID NO: 106145 - DNA, 260 bp, Glycine max
atttcatcgtgcattcaatggccaccacagcagctctatccggaaccatggtgagcacctccttcatgaggaggcaacctatgaccaccacaagcctaaagacattccccaacgttggtgaagctctttttggtctgaaagtggacgaggtggtcgtgtcacttgcatggcctcgtacaaggtgaagctcataaccccagaaggagaagtggagtttgaatgcccagatgatgttttcattgttgacaaggcagaggacg

SEQ ID NO: 106146 - DNA, 165 bp, Glycine max
attttacttctcagcagcttcggctagggttcagaaacgaaaaagggttcggtgttctgttcgcgatgagagccaagtggaagaagaagcgtatgaggaggttgaagaggaagcgccgtaagatgagacagagatccaagtgtgcgttaaacctagtttgtttct

SEQ ID NO: 106147 - DNA, 272 bp, Glycine max
gttcaggcacctctcaaatctttgacattatagggcattttgctcaggccaatcgcggtgcagtcctgccaaagacaccaattgtttgcaagccatcagaaaatgccattgaattggccatcaagatagccaaccttaaccccaaagaactttgttctttgaggacagtacccgcaacatacaagctggaaaacgtgtggggcttcacactgtgctggttggtacatcacaaagatgtaaaggagcagattatgccttggaaagcattcaca

SEQ ID NO: 106148 - DNA, 258 bp, Glycine max
ggaagagtgcaatgcatgcaggtgtggccaccagttggcaagaagaagtttgagactctatcctacctgccagaccttgatgatgcacaattggcaaaggaagtagaataccttcttaggaagggatggattccttcttggaattcgagttggagcacggtttcgtgtaccgtgagcacaacaggtcaccaggatactacgatggacgctactggaccatgtggaagctgcctatgtttggttgcactgatgcttctc

SEQ ID NO: 106149 - DNA, 263 bp, Glycine max
ctaaggttgctgtaggagataagattgcagtagtgctaagtgctaacacctgcagtgaacaatggcctctgcatcagcatctctgctcaagtcttcacttgttcttgacaagtctgagtgggtgaagggacaagccctcgtcaaccttctgcatcagttgtgagatgcgaccccaacaccccatcagggctcaccatcagagctggttcctatgtggatgagctcgttgagaccgcgaaaacagtggcttcaccagggagggg

SEQ ID NO: 106150 - DNA, 242 bp, Glycine max
gctggagagttggaaagtggaaatgcaggagagccagcactactgatcaggcagatataccgtgaagccgcagacttgatcaagaagggaaagatgtgtgctctcttcatcaacgatcttgatgcaggagctggtcgtctggtggaaccacccaatacactgtcaacaaccagatggtgaatgccaccctcatgaacattgctgataaccccaccaatgtgcagcttcctagtatgtataac

SEQ ID NO: 106151 - DNA, 269 bp, Glycine max
gagagcgaaacagattctctgtgatatccaaatggataataaaatcacgaaggaactcactgaggaggagctaatcacactcagggacgaggtctccaaatacatgattgaaggcgacctgagacggttcaatgcggtaatataaagagactgaaggatattcagtgctacagaggaataaggcatattcaggggcttccttgcagaggccagcgaaccaagaataattgcagaaccttgaagggtaagaaggctgccattgccggtaa

SEQ ID NO: 106152 - DNA, 266 bp, Glycine max
gcaattgaagttaaaagccttagccttccctacaactccaaacataaagacatcttcatccatggctgcctccgtctccactgtcggagctgtcaacagagctcttttgaacctgaacgagttctggagctggagctcagctcccagttcagccttctttgggaccagcttgaagaaggttattgcctcaagggtccccaacagcaaggtttaccggtggaagcttcaagattgttgctgtagaagagaagaaagagattgaagag

SEQ ID NO: 106153 - DNA, 263 bp, Glycine max
aagaagggaaagatgtgtgctctcttcatcaacgatcttgatgcaggagctggtcgtcttggtggaactacacaatacactgtcaacaaccagatggtgaatgccaccctcatgaacattgctgataaccccacaatgtgcagcttcctggtatgtacaacaaggaagagaacccccgtgtgcccatcatcgtcaccggtaacgatttctcaacactgtatgctcctctcatccgtgatgggcgtatggagaagttctactgg

SEQ ID NO: 106154 - DNA, 260 bp, Glycine max
cagctcaagaaaaatctgcaaagaataaaacaagaggaggaaatgcaacttacttgttgatataaacttcatcacagagcgagttgttgtaaagctagccttgttgcagccatggccacccacgcggctctagctctacaaggatctccactaacaccaagttcccatccaaggcttcacactctttcccaacccaatgcgcctcaaagagacttgaggtgacagaattctctgggctaagatccacttcatgtgtgaca

SEQ ID NO: 106155 - DNA, 249 bp, Glycine max
ctctcgctgcttcattactcctattcaagaaaccagttctgaggagcaacattgctgctcggtaatccccgggtatatttagtctacacagtaatgggcttacccagaaaaggttcacgcgtcacatgaattttatactaggaataagattactgtcgtacatgccgtggacattccagtacaaccagctccttaggcaactgtggagtatagataactcctagctgcagagctacggtttcaggcaag

SEQ ID NO: 106156 - DNA, 190 bp, Glycine max
gtaattgaagttgaagtcttgcccttctctcttctactccgaacacaagacatcatcatccatgactgtctccgtctccactgtcgtagctgtcaacagagctcttttgaatctgaatgggtctagacctgaggttcagctcacagttcatccttctatctgatcagcttgaagaacgttattggctcaa

SEQ ID NO: 106157 - DNA, 263 bp, Glycine max
  unsure (1)..(263): unsure at all n locations
ttcaaccaggatgagtttgangcactgctccangngttnaagactgnctacaaccagacacactttgtcaggnacaangagttcaaggaagccgctgacaaacttgagggtcccctcagacagatctttgtggattccttgagaggtcctgcactgctgaattctctggcttccttctctacaaagagcttggaaggaggctaaagaaaaccaaccctntggtggctgagattttctcactgatgtctaagnatgaagccagg

SEQ ID NO: 106158 - DNA, 257 bp, Glycine max
aattgaaattttaaaaatgactgggataaacttaaaaattcaattattgaaattgaataagtaaacaatttaattggattggtcgaatggtatcaaaaaaatggagtactaactcccatttcttatttattttgaattaaccgatcaacttgctttgttatcgaacatttctttttgatttcaaaaattttccggaaaaaatttgaatctatttttatatgcgaatcaatcctactacttctggtcctgaggtttct

SEQ ID NO: 106159 - DNA, 243 bp, Glycine max
gttacatcgagactgttgacatggatgttccagcagctgagcatgatgggaagtgcaagtgtggcactaactgcacttgcacggactgcacttgtggccattaaggaatatgtatgaaaatgtaattgccatggtgtggcaatacaaatctccaaataatgtaatcttcgtatgaataaatgtgtgctgttatcctaaaaaaaaaaaaataaaaaagtaaaaaaaaacaaaaaaaagagaaaa

SEQ ID NO: 106160 - DNA, 262 bp, Glycine max
atggtggatacctaggcacccagagacgaggaagggcgtagtaagcgacgaaatgcttcggggagttgaaaataagcgtagatccggggattcccgatataggtcaacctttcgaactgctgctgaatccacgggaggcaagagacaacctggtgaactgaaacatcttagtagccagaggaaaagaaagcaaaagcgattcccgtagtagcggcgagcgaaatgggagcagcctaaaccgtgaaaacggggttgtgggaga

SEQ ID NO: 106161 - DNA, 261 bp, Glycine max
agaccttcatgattcaattgctgctggtaactatcctgagtggaaactgttcgttcagacaatagatcctgagcatgaagagaaatttgactttgaccctcttgatgttactaagacttggcctgaggacatatacccttgcagcctgttggtcgcttggtcctgaataaaaacatagataatttctttgctgagaatgaacaacttgcattttgccctgccattgtggttcctggtgtatactactcagatgataagatg

SEQ ID NO: 106162 - DNA, 260 bp, Glycine max
gtttcttacaaggctctactctactgcttcaccttctgctctagaaaattcagtggtgatacatggcttcggctactctctctgtagcctaaccagcccttcaggcaaatgggcaaggcttctctgaattcctggcctccgcagctcatcaggcttccttcccttttctagaaaatcttcagaggatttccattctgtcattgccttccagacctatgcagttggaagcagtggaggatacaagaagggtgtgacagaag

SEQ ID NO: 106163 - DNA, 162 bp, Glycine max
cttccttgttggaacatcatggcttgcgcgcaacagtggctgatgcacgtttctgcaagccattggaccgttctcttattcttagccttgcccaatcgcacgaggttttgatcactgtggaagaagggcaataggaggattcggatctcatgttgttcagtt

SEQ ID NO: 106164 - DNA, 256 bp, Glycine max
attctgtgattcgggtaatggccaccagtggaggcgatgaggggcagaacaaccctgccctcgacccggatttggatgctccggatgacccggatcacgagttcgctgagttcgggtcgggttgcttctgggtgctgagttggcctttcagcgagtagtgggtgtggtgaagactgaggttggttacactcagggtcacactccggatccgaattacaaactggtttgcaccggaaccactaaccacgttgaagtg

SEQ ID NO: 106165 - DNA, 262 bp, Glycine max
ggcttatggtggatacctaggcacccagagacgaggaagggcgtagtaagcgacgaaatgcttcgggcgagttgaaaataagcgtagatccggggattcccgatataggtcaacctttcgaactgctgctgaaccacgggcaggcaagagacaacctggtgaactgaaacatcttagtagccagaggaaaagaaagcaaaagcgattcccgtagtagcggcgagcgaaatgggagcagcctaaaccgtgaaaacggggttgt

SEQ ID NO: 106166 - DNA, 257 bp, Glycine max
ctaaagtgatgcaggtggataagtcagaatggatgactgatgaagaatttgcaagagaaacgattgctggtttaaatccaaatgtcattaagattatagaggagttcccactaagtagcaagctagatactcagcctatggtgatcatacctgtataatagcaaaagatcatttggagcctaacttaggtgggctcactgttgagcaggctatccaaaacaagaagttgttcatcttagatcaccatgactatctca

SEQ ID NO: 106167 - DNA, 256 bp, Glycine max
cgagatatggcgatggcaatggcgcttcgcaggctttcaacttcaattgacaagcatttgcgggctctcttcaatgccggttccctctactacaagtcgtctttgtctgatgaagctgtttacgacaaggaggacccggagttacatggccgaagcagttgaatgctccacttgatgtcgtggatcctgagattgctgatattattgagcttgagaaagctaggcaatggaaggggctagaattgataccgtcaga

SEQ ID NO: 106168 - DNA, 259 bp, Glycine max
gctggaattgagcctgaagatgttgcaaagcgcctcatggactacggttttcatgcaccaacaatgtcatggcctgtgcctggcacactcatgattgagccaactgagagtgaaagcaaggctgaactagcaggttctgtgatgctcttatttccattagacaagaaattgctgagattgagaaaggaaatgctgacattaacaacaatgtacttaagagcgcccctcatccaccatcactgctcatggctgatgcatg

SEQ ID NO: 106169 - DNA, 163 bp, Glycine max
ctattatcaatccttattgttggcgtaggaggagctgatttcaaagaaatggagattttggatgctgacaaaggagagaggcttgaaagttcatctggtcgcgttgcttcacgtgatatagtccagtttttccattccgtgacgttcaaagtggagaaatttc

SEQ ID NO: 106170 - DNA, 254 bp, Glycine max
caatttttgagttattgtcagaggctcttggccttaatccatcttatctaaaagaaatgaattgtgctgaaggacttttcattcagggtcattactatccaccttgccctgaacctgaattaactttggcacgtccaagcacactgatagttccttcatgacaatagttctacaaggccaactgggtggtcttcaagttcttcatgaaaaactatggtttaatgttccacctgtgcatggagctcttgttgtaa

SEQ ID NO: 106171 - DNA, 252 bp, Glycine max
atcattttatatcttatcctgggaattgctgcaggctatgtcagcgttcgtgtttggaggaccattaagggaacaacagaagggtggagatcaatttcctggttagccgcatgtttttatcctggattgctttcattattcttacagtgctgaattttattctatggagcagtaacagtactggcgccataccgatttccttgtattttgagctgttctttctctggttttgcatttctgtacctcttaccc

SEQ ID NO: 106172 - DNA, 243 bp, Glycine max
acaaggcagaaagcaagctcatcctagagttttaaaaatggcagcagcctcctccatggctctctcttccccatccttggctggcaaggccgtgaagctgggcccatcagcccccgaagtcgggatggcagcatgaggaagaccgtcaccaagcaggcctcctccggaagcccatggtacggcccagaccgcgtcaagtacttgggcccattctctggcgagcccccgtctactcattggcga

SEQ ID NO: 106173 - DNA, 257 bp, Glycine max
ttcagggttaagcggtgagatttgcgaatctgagaaatggcggattcttctcgggaggagaacgtttacatggcgaaattggcggagcaggccgagcgttacgaggagatggttgagttcatggagaagttgcaaagactgtggaggttgaggagttgacggtggaggagaggaatctcctctctgtggcttacaagaacgtgattggtgcgaggagggcttcgtggaggatcatatcctccattgagcagaaggag

SEQ ID NO: 106174 - DNA, 236 bp, Glycine max
gcatcagcagctgtctctattttcagactcacgcgtgaccagctcaacacactgaaagccaaatccaaagaagatggcaacacaatcagctatagttcttatgagatgttggcggtcacgtgtggcgaagtgtaagcaaagcaagagcacttcctgatgatcaagaaaccaaattgtacattgcaactgatggaaggtcaaggttgcagcctcctaccccacccggttactttggc

SEQ ID NO: 106175 - DNA, 269 bp, Glycine max
ggaactcactatgcaatcatgagctcttatgagtaccttagcactggacttaaacagtataacttggataacaacatggacggtttttacattgctcctgcttttatggacaagcttgttgttcacatcagcaagaacttcatgacctgcccaacatcaaggttcctctcattcttggtatctggggaggcaaaggtcaaggaaaatccttccaatgcgagcttgtctttgccaagatgggaatcaaccctatcatgatgagtgctgga

SEQ ID NO: 106176 - DNA, 147 bp, Glycine max
cactgactatatgagcagctgccataaggatttctgcactgtgtgaagctggagttcatttatgtgatgactcatgattcgattggacttggagaggatggaccaactcatcagccaatagagcatttggcaagcttcagggcaatg

SEQ ID NO: 106177 - DNA, 184 bp, Glycine max
gctggactacttgaggcaacccaaggcttcgtccacgcccagagcatgcctcgtcatctgggctaccaagttatcctaatgggtgctgttgagggttatcgtattgctggtgggctcctcggtgaggtcactgacccgatctaccctggtggcagctttgacccattgggccttgctgatgacc

SEQ ID NO: 106178 - DNA, 265 bp, Glycine max
ctcgaagtgatccactccaggtgggccatgctcggagccttgggctgcgtcttcccggagttgctgtcccggcacggggtgaagttcggagaagccgtgtggttcaaggccgggtcccagatcttcagcgagggtgggctcgactattgggcaacccaagcctgatccacgcccagagcatcctcgccatctgggccacacaagttatcctaatgggtgccgttgaaggttaccgtattgctggtggcccctcggtgaggtcact

SEQ ID NO: 106179 - DNA, 149 bp, Glycine max
aagactgcataccccaatggcttcatccgtatcattggatttgacaacgttcgccaagtgcagtgcatcagcttcatcgcctacaagcccccaggcttctaagtcattgaaaaatttgcaaagcatctgtagcaaccccatttggttgt

SEQ ID NO: 106180 - DNA, 265 bp, Glycine max
tcacgacctgtaagtcatgaaatttataaatgtaatgagaaatgcatgtgaggaaattcagcagatgtacatatatactgatgcttagttttatattcctgtgtggtggagatggtactattgggcatgtcctgtggcttgtagcttatacggtttggttgcatctcagtttggggatgtaacaagtgcagttgagttaaatgagacagtgaaagagttttttagaagatactttggttatagagatgattttgtaggagttgct

SEQ ID NO: 106181 - DNA, 262 bp, Glycine max
cagaagaacaagtagttgagaactaagaaggagaagcaaatggattcctcaatgatctcttccccagctgttaccactgtcaaccgtgccggtgccggcatagttgctccattcactggcctcaagtccatggctggcttcccaccaggaagaccaacaatgacattacctccattgctagcaacggtggaagagtgcaatgcatgcaggtgtggccaccagttggcaagaagaagtttgagactctttcctacctgccaga

SEQ ID NO: 106182 - DNA, 264 bp, Glycine max
aagggaagaaaaacttagctactaagcaaggatcaaagagaatggctcaagcagaggcatcaatggctggcttgcgtggttcctctcaggctgtgttggaaggtagccttcaggtgagtggctccacacgcttgaatgtgggagtggaagcagggtggcctcagtcacacgtgcagggttcacagttagagcacaacaacaacaagtgagtggtgaggtacaaagcagccgtagggcagtgctttcacttgttgctgctggttt

SEQ ID NO: 106183 - DNA, 266 bp, Glycine max
cccccatccccaccccaacttgtatattgtgcataatatctatctgcattctctctcttcagggagtgaatccatggattgaagtagatggtggagttggtccagcaaatgcttacaaggtgattgaggctggagccaatgctctggttgcaggctctgctgtgtttggagctaaagattatgccgaagctataagaggaatcaaaaccagcaaaagacctgaagcagttgctgtgtgaaatgcccatgtggttcaatattcaccg

SEQ ID NO: 106184 - DNA, 212 bp, Glycine max
tatcaaagatgttgattggttctctgcttaaacaggcgtcctaagatcaaggggactgtagtattgatgaccaagaatgtgttcgacgtcaacgacttcatggcgactactaggggcggaccagccgctgttgccggcgacatcttcggtgccgccaggacattgttggtggaatagttgctggtgctacgggcatcttcagccgtaacatt

SEQ ID NO: 106185 - DNA, 108 bp, Glycine max
caaagttcaagcttgttcacaagaggaggttaacaaggtcatggacttggcaaaatctgcccaaaagttatgggcaaagaccccactatggaaacgtgctgaacttct

SEQ ID NO: 106186 - DNA, 257 bp, Glycine max
aaatgtttgagggaatgctaagatggacaaaagaagtgttgatgatgttgtccttgttggtggttctaccagaattcccaaggttcaacaactgctgcaggacttctttaatggaaaagagctttgcaagagcattaatccgatgaggctgttgcatatggtgcggctgttcaggctgcaatcttaagtggtgagggcaatgagaaggttcaggatcttctcctcctggatgtcacccctctgtctcttggtttgga

SEQ ID NO: 106187 - DNA, 259 bp, Glycine max
ctttgcgataatgctggatttgatgccactgacgttctcaataagctgaggcagaaacatgcatctggtgaaggtgctaattatggtgtagacataaacactggcggaattgctgattcctttgcaaactttgttgggaacctgctgttgtaaagatcaatgctataaatgctgcaaccgaagcttcctgccttattcttagtgtcgatgagacagtgaaaaaacccaaagtcggagagcgcacaaggtgaggctgctg

SEQ ID NO: 106188 - DNA, 256 bp, Glycine max
tggtgttctgtttgtgctgccggattcgtatgttgatcctgagaacaaggactatggtgctgaattatttgtgaatggagagatcgtccagagatcacctgaaagacagagaagggtggaaccacagccacaaaggatcaggacagaccacgatacaatgatagaacaaggtatgtccggcgcagagaaaacatgcagtgaaggaccaatttgagatagggagagggatgtgatgtacatacactatggaagtact

SEQ ID NO: 106189 - DNA, 167 bp, Glycine max
agctgggtccatcagccccagaagtgggaacggtgagcatgagcgaagaccgtcaccaagcaggtctcctcaggaagcccatggtacggcccagaccgagtcaagtacttgggcccattctctggcgagcccccgtcctacctaaccggtgagttcccaggcgacta

SEQ ID NO: 106190 - DNA, 259 bp, Glycine max
tcgccctggaactgttgctcttcgtgagattaggaaataccagaagagcactgagctcctaatcaggaagcttcctttccagaggttggttcgtgaaattgcccaggatttcaagactgatctgcgtttccagagcctgctgtgcttgcattgcaagaggctgctgaggcataccttgttgggctctttgaggacactaacttgtgtgccattcacgccaagcgtgtgactattatgcccaaggatattcagctggcaa

SEQ ID NO: 106191 - DNA, 259 bp, Glycine max
gtaatagtaatatacataagtaacataaccaatggaagcgcgtgcaggagccaatcagcgtattgcaagaatctctgctcatcttcagcctccaaatttccaggaagggagtgatgttcttcttaagagtgctgagtgagagcaaagggtggggcacctggattcaaagttgcaattttgggggctgctgggggaattggtcaacccctttctttgctgatgaagatgaacccattggtttcagttcttcatctttatg

SEQ ID NO: 106192 - DNA, 260 bp, Glycine max
gatggtattagagtaagagtctatcttagattcattatcggaccacctgtatttgctacgctccaagctggtagtgttgggtgaggagtgttacaaagccgccttaattgcggtcacccttagcttgccttgttgtggttctttggggttgccttaattgcaacctcaagggtggcggtttagtctcacatcaactagagatatgacttaaatagagcttatattcggtagtccttacttagttactttacaagctggtt

SEQ ID NO: 106193 - DNA, 190 bp, Glycine max
ccactgacctcggggcccgtcaacgagcgcggcttgcttcgctgatccgccgtcgtctatcaccaccagagcaagccatacccgcggctcccgacgccccagcagcctgcaccgagcctcttgtgtaccacctggtcgccatccaccgcgactacaggcacgtccacccgatggtgactcggcgcgccgc

SEQ ID NO: 106194 - DNA, 255 bp, Glycine max
gacaaaagcaaaaggaaagaatatcaacaaggtaaagtagattccttactagacatggcgttgaaggacacattctacatatctcatggatcaccaactttgtccattgatgaatccattcaggccaggaagtccttcagtcatggaagaaggacgtgtttcctcaaagaccctcttcaattcttgtcatctctggtcattgggaaaccgcagttcccacggtcaacgtcgttgactacatcaacgacaccatct

SEQ ID NO: 106195 - DNA, 253 bp, Glycine max
gaagggctatatagcataaacatttgagtcttcattgcacaatgtcgacctcttccattaacgggtggtgcctctcttccatctccccagccaaaacctctctcaagaaggccacattaggcccttgctgtctcgcaaccgttagcactccttcttctccttcttcttcttcttcttcttccttcccttctctcattcaagacaggcctgtctttgctgcccctgcccccatcatcaccccaactgtgagaga

SEQ ID NO: 106196 - DNA, 254 bp, Glycine max
cacattgatattgattctgctgagattggaaagaataagcaggcgcatgtgtcggtttgcgcggatttgaagctggccttgcaggggattaatatgattttggagaaaaaaagagtggggggtggtaagcttatcttggaggctggagggaagagattaatgtgcagaaacacaagtttccattgggttacaaaacattccaggacgccatttccccgcagcatgctattgaggttcttgatgagttgacaaat

SEQ ID NO: 106197 - DNA, 188 bp, Glycine max
cagcatggtgagggtcagtgtgctcaacgatgcgctcaagtccatgtacaacgctgagaagattggcaagaggcaggtcatgatcaggccgtcatccaaggtcatcatcaagtacctgacggtcatgcagcgccatggctacattggagagttcgagtacgttgatgaccaccgatcgggcaagattg

SEQ ID NO: 106198 - DNA, 255 bp, Glycine max
ggctcaagcaattttcttaagcttgttcattacagtaaagagctttaagggtgattgctgagcatttgacggtagaagaagctgccgggctaaaagagggattccaggttatggatacaaacaacagaggcaagttaacattgatgaattacgagtagggttgcataaacttggtcatcaagttcccgaatcagatgtccaagctcttatggatgctggtgatgtagacggggatgggcacctagattatggaga

SEQ ID NO: 106199 - DNA, 189 bp, Glycine max
tgtagaagagaagaaagagattgaagagcacccagacagaccgacaaggacagatggaagggtcttgcctatgatatctcagacgaccaacaagacatcacaagaggaaagggtttggttgactcccttttccaagctccacaggatgctggaactcactatgcagtcatgagctcctacgagtacctc

SEQ ID NO: 106200 - DNA, 258 bp, Glycine max
tgccacacgcttcagaagacatggcctcattgggtgggttacaaaatgtgagcggcatcaattttcttatcaaagagggtccaaaagtcaatgcaaagttcgagctgaagccgccaccatatccactgaatggtttggagccggtgatgagccagcagacacttgagtttcactgggggaagcaccacaagacttatgtggaaaatctgaaaaaacaagttgttgggacagagcttgatgggaagtcactagaagaga

SEQ ID NO: 106201 - DNA, 259 bp, Glycine max
tttcgagatcgtgaccctgcttgtttgtcgtattgctccgcgcttttgtatatgaagggttatcatgctctgcaagtacatcgggtagcccatacattatggcaccaggggcgcaaagtcttggccctagctttgcaaagtcgtgttagtgacgtttttggtgtggacattcatccagctgcgaaaattggggatgggattttattagatcatgcgacaggtgtggttattggtgaaactgctattgttgaaacagagt

SEQ ID NO: 106202 - DNA, 215 bp, Glycine max
cccacttggatcttgtacaatgaagctgaatgcaacaactgaaatgatgcctgtgacatggcccagctttagtgatattcacccttttgcaccagttgaccaggctcaaggttatcaggaaatgttcaacaatttgggtgaactgttgtgcaccatcactgggttcgactccttctctttgcaaccaaatgctggtgctgctggagaatatgctg

SEQ ID NO: 106203 - DNA, 255 bp, Glycine max
ggctatgttggacttaagaaccagggagctacatgttaaatgaattctctactccaaactttgtaccatattccttattttcgaaaggctgtataccacatgccaacaccagagaatgacatgccctctggaagcatccctttggctttgcaaagtttattctacaagctcctgtatagtgacaccagtgttgcaacaaaggagctcactaaatcttttggatgggatacatatgattctttcatcagcatgatg

SEQ ID NO: 106204 - DNA, 255 bp, Glycine max
cgcacggcctttgtgccggcgacgcatgattcaaatttctgccctatcaactttcgatggtaggatagtggcctaccatggtggtgacgggtgacggagaattagggttcgattccggagagggagcctgagaaacggctaccacatccaaggaaggcagcaggcgcgcaaattacccaatcctgacacggggaggtagtgacaataaataacaataccgggctcattgagtctggtaattggaagagtacaatc

SEQ ID NO: 106205 - DNA, 254 bp, Glycine max
cactgatggtgcaagcaaaggagtgatgcagatattaaatactatcatcaggggtcaagacgatgggattttggttccagtcccacaatacccactctactcagcaataattgctctgcttggtggtacccttgttccatactaccttgaagagacagcaaattggggtcttgatgttaatgaacttcgtcaatcagttgaacaggctcgctttaaaggaataactgttaaagcaatggtgatctaaatcctgg

SEQ ID NO: 106206 - DNA, 85 bp, Glycine max
ttaaccggtggagctcatattaaaaaaatgatgtttatactttctcccttctcaagtgctctataaataccaaaatattcttggc

SEQ ID NO: 106207 - DNA, 255 bp, Glycine max
agaaagtaaagggcaacaatcatttttgtttaacataagtaaggacaccatcgctgacataataacctatataagaaacgctgacatgaataaaaaaggaatggttcaaataccatttactaacataacagaaaacattgtaaaaatacttttacgcgagggttttgttgaaaacgtcagaaaacatagagaaaacgacaaatattttttagttttaactctacggtatagaagaaatagaaaagatcatataaa

SEQ ID NO: 106208 - DNA, 255 bp, Glycine max
gcagttggaagcagtggaggatacaagaagagcatgaaaagcgtgcatggagtgttgatttttcaagaacagatccctctatgcttgtatctggtagcgatgactgtaaggtcaaaatttggtgtacaaatcaggaagctagtgttctaaatatagacatgaaagcaaacatatgctgtgtcaaatataatcctggatctggcaattatattgcagttggatcagcagaccatcacatccattattagatttgag

SEQ ID NO: 106209 - DNA, 252 bp, Glycine max
cacaattgcacattttcatcacttattaattgtgttaagaaatttaagtgaggagctagagaatgatgatgaagtctgctatgtgtgcagtggtggttgtagcacttcttcttctggcggaggtggggcccatggctgaggctgtgacatgcaccccaacagagttgagtccgtgtcttacagcaatcacttccggtgctaaaccttccaatgcttgttgcacgaagctgaagcagcaaaaacatgcttatg

SEQ ID NO: 106210 - DNA, 251 bp, Glycine max
tgggatttggtctgcttgtggaggtgagaggatcattgttttcacgacgaattatgtggagaaacttgacgctgctttgattaggagagggaggatggatctgcacatagagatgtcttattgttgctatgatgcattcaaggtgctggccaagaactacttggatgttgagtctcatcatttgtttggtgcaattgggggattgttggaagaaacagatatgtccccggctgatgttgctggaatctgat

SEQ ID NO: 106211 - DNA, 253 bp, Glycine max
caattgggctagagaacactgaagctaaccgccaggcataccgtaccctcctcgtgacagttccaggccttggtcagtacatctctggtgccactctctttgaggccacactctaccaatccacaactgatggcaggaagattgttgacgtgctgcttgagcaaaacattgttcctggtattaaagtcgacaagggtttggtgccccttgcaggttccaacgacgagtcatggtgccaaggttggatggtcta

SEQ ID NO: 106212 - DNA, 252 bp, Glycine max
agataacattaccaaccttgggagctggcgaacaagcatacgatgttaattttgaatgggacagtgacttcggaattcccggtgcattttatattaagaacttcatgcaaaatgagttctacctcaagtctctaattctcgaagacattccaaaccacggaaccatacacttcgtatgcaactcctgggtttacaattcaaaaaactacaagactgatcgcattttctttgccaacaatacattcgtccaag

SEQ ID NO: 106213 - DNA, 252 bp, Glycine max
atcgagataactagaaacagtgtgatgaaaatgcaggtccttgttttcttcgttgctacaattttggtagcatggcaatgccatgcgtacgatatgttccctctccgaatgaacactggctatggtgcccgtactccggaggtgaaatgcgcaagttggaagcttgctgtggaagcacacaacatctctggcttagagaccattcctgaagagtgcgttgaagcaacaaaggaatacatccatgcgaacaat

SEQ ID NO: 106214 - DNA, 253 bp, Glycine max
aaagcacaaagcaaagctcatccttgagttaaaaaatggcagcagcttcttccatggctctctcatccccatccttggctggcaaggccgtgaagctgggcccatcagccccagaagtgggaagggtgagcatgaggaagaccgtcaccaagcaggtctcctcaggaagcccatggtacggcccagaccgagtcaagtacttgggcccattctctggcgagcccccgtcctacctaaccggtggttcccaggc

SEQ ID NO: 106215 - DNA, 251 bp, Glycine max
caatcatcttttgtttgttcttcagtactttagtgtgtgatttcattccaagattttgagaatgtctagctgtgggtgtggaagtagctgcaactgtggcagcaactgcggttgcaacaagtactcttttgacttgagctatgttgagaagacaaccacagagactcttgttttgggtgttgggtctgtgaaggcccaattggagggtgctgaaatgggtgttgcagctgagaacggtggctcaactgtgg

SEQ ID NO: 106216 - DNA, 254 bp, Glycine max
gtccaaaatccagtgaggagctgctagtgacactgcagagagtgcttgaggaaagttcccctgttcttgttgcggctaggcttgatgcagaagaaagaagaaataatatgaccttaagggaggagcaagatgctgcatacagggctgcacttgaagctgatcaagctagggaacgacagagaagagaagaagaagaacgtcttgcaagggaagctgctgaagctgagagaaagcgcaaggaagagaggaggctc

SEQ ID NO: 106217 - DNA, 254 bp, Glycine max
tgcctgtatatgtcttcagaacaacaacatacctttcaatgttcttatctctgactgtggaaagcaagtctatctgttaccacagtgttatgcagagaaacaagctcttggagaagtggatgctgagcttcttgacacccaagtgaatcctgctgtgtgggaaattagtgggcacatggttctaaagaggaagaaggattatgatgaggcatctgaaggcaatgcttggaggcttcttgcagagtgtccctctc

SEQ ID NO: 106218 - DNA, 255 bp, Glycine max
caagcctctactatactgcttcaccttctgctctagaaaattcagtgctgaaacatggcttcggctactctctctgtagccaaaccagcccttcaggcaaatgggaaaggcttctctgaattctctggcctccgaagctcatcaggcttccttcccttttctagagaatcttcagaggatttccattctgtcattgccttccagacctatgcagtatgaaggagtggaggatacaagaagggtgtacagaagcaa

SEQ ID NO: 106219 - DNA, 251 bp, Glycine max
gaaagttgctcctgctctagctgctggttgtacagcaatattgaagccatctgaattggcatctgtcgactgtttggagctgtctgaaatatgcagatgaagttggccttcctccaagggtattaaacattgttactggattaggcacatgaagctggtgctcctttgtcatctcatcctgacgtagacaagatttcgcttactggaagctctgcaactggaagcaggattatgacagctgcgcacagcta

SEQ ID NO: 106220 - DNA, 253 bp, Glycine max
  unsure (1)..(253): unsure at all n locations
tcaagcgcctttgctggcaccagagagaaatgtnttggatgncagcaaccacagtctatccaactgagagggtcactgttaacaacactatgnaccacaagagctgcttcaagtgctgccatggagggtgcaccatcagcccttctaactacattgcgcacgangggaagctgtactgcaagcaccaccacatccagctgatcaaggagaaggggaacttcagccagcttgagaatgaccacggaagacatca

SEQ ID NO: 106221 - DNA, 250 bp, Glycine max
ggaactcactatgcaatcatgagctcttatgagtaacttagcactggacttaaacagtacaacttggataacaacatggacggtttttacattgctcctgcttttatggacaagcttgttgttcacatcagcaagaacttcatgaccctgcccaacatcaaggttcctctcattcttggtatctggggaggcaaaggtcaaggaaaatccttccaatgcgagcttgtctttgccacgatggaatcaaccc

SEQ ID NO: 106222 - DNA, 252 bp, Glycine max
tgatctgttgctgtaacaagatggatgccactacccccaattactctaaggctaggtatgatcgaaatcgtgaaggaagtctcttcttacttgaagaaggttggttacaacccagacaagattccctttgttcccatctctggttttgagggtgacaacatgattgagaggtccaccaaccttgactggtacaagggatcaactctccttgaggctcttgaccaaatcaatgagcccaagaggcctccgaca

SEQ ID NO: 106223 - DNA, 247 bp, Glycine max
cgatgaggctgttgcatatggtgcggcttctcccgctgcaatcttaagtggtgagggcaatgagaaggttcaggatcttctcctcctggatgtcacccctctgtctcttggtttggagactgccggtggtgtgatgactgtcctgatccctaggaacactacaattccaacaaagaaggaacaagttttctcaacatactctgacaaccagcctggtgtgcttatccaggtctttgaggggacagag

SEQ ID NO: 106224 - DNA, 253 bp, Glycine max
gcacaacccacaggcacgctgagcatggaacacagaaccctagaactcaacctggcttcagcaaaggatctcaaagacttgaatatattctcaaagatggatgtatatgctgtgctttcactctccggcgatcaaaagaccaagactcccgtccacagaaacggcggcatcaacccaacatggaattttccggtcaagttcacttttgatgaatcggtggcgcggcagaaccgtttggccctcgaatcaagat

SEQ ID NO: 106225 - DNA, 254 bp, Glycine max
ggctggtgtgctcggtatctacgggctcatcatcgccgtcatcatcagcactgggatcaaccccaaggccaagccctactacctttttgatggctacgctcacctttcgtccgggcttgcctgtggccttgctgggcttgcagctggcatggccatcggcattgttggtgatgctggagtcagggcgaatgcacaacagccgaagctttttgtgggcatgatcctcatcctcattttcgcagaacgcttgctct

SEQ ID NO: 106226 - DNA, 247 bp, Glycine max
tctcgagccgattcggctcgaggttgattcaattatatcacatggacgcttcttgaataattccttcatagagcacagtgttagttggaatcagatccagaataaactcaaatattcacttaaaggatacagtgatgcttggtgctgattattatgaaaccgatgcagaagtggcagcactcttagctgaaggaagagttccaattggaataggagaaaatacaaaaatcaaggactgtattattac

SEQ ID NO: 106227 - DNA, 249 bp, Glycine max
  unsure (1)..(249): unsure at all n locations
ggttgttgctgctgttgctttctctgtggacctatcttctgagcttactgatccttctaaggctacggctccgtatacacgctcatttcggggcgtatgatatctatgntggtttttcagatgtcactgcagccaagtccctggaggagtagctcaaatcttccgggatatcatatgaagttcacatataccctggatgttcgcttgccttcatgaacacttcgcctgaggcactcaagggaagaaggg

SEQ ID NO: 106228 - DNA, 250 bp, Glycine max
gaaagcatggcttccctggcggcttccaccgcggctatgtcagaaatccttggaaaccccgttaacctcagatgcgcaaccaggtctgctccatcaccaactacacctgccaccttcaagaccgtcgcacttttctccaagaagaagccagctccacctccaaagaccaagcctgccgctgtatcccccgccaatgaggaactcgccaagtggtatggtcctgacagaaggatcttcttgctgagggtct

SEQ ID NO: 106229 - DNA, 248 bp, Glycine max
gcacaatccttgattttgaaattggaggagggaggcgaatatcagaatttagtactgtaaggatgatgtataacataggcattcagggcgtatcttggaagtttgagttacatcgtgctggtcaaaagttaatcatcccagtcttgctttcaactgatttaaatgccatatttgttaccagtgcatttgctattccttcaacactgtattttctacttcagacatatgttgtaaagcctactacctta

SEQ ID NO: 106230 - DNA, 249 bp, Glycine max
agcgggcacgagtgctccccactctcatcttcttctctcttctccaaaccttctctttggacccaacaatcccaaaagcgcgtttcaattaccattgcgaactcaatagcaatagccaatgcgcagaacaaagagagagcgaggcttaagacactcttcgaagaagcctacgagagatgccgcaatgctccaatggaaggtgcatccttcaccatcgttgacttcactgctgctctggacaatacgact

SEQ ID NO: 106231 - DNA, 249 bp, Glycine max
atgtgtagatgcaaatctttgttaagacactcactggaaagacaatcacccttgaggtggagagttcagataccatagataatgtaaagtccaagattcaagacaaggaagggatcccaccagaccagcaacgtctcatttttgctggcaagcagcttgaggatggacgtacacttgctgattacaacattcaaaaggagtccactctacacttggtgctccgtctccgtggtggaatgaaatctttgt

SEQ ID NO: 106232 - DNA, 247 bp, Glycine max
ctccaacaagcagcgttcatgaagtgggatacttcgacctcgtcgttaaggtttacttcaaaggggtgcaccctaagttccccaacggtgggatcatgtctcaacacttggactctctccccattggttctgtcttggacgtgaaaggcccacttggccacattgaatacactggcagatgaaacttcctcgttcatgggaaaccaaggtttgccacgaggctagccatgttggctgtggcacagga

SEQ ID NO: 106233 - DNA, 248 bp, Glycine max
gattcataggcccaagagcaaagaaactaagaagattttgagcacaatggcatccacacaatgcttcttgcaccaccatgccctcaccactccaaccagaggctcatcacagcgcttagttgtgagcaccaaaccaaaccacattgtttgcaaggcacaaaagcaggttgtccaagagggtgaggacactactaacattgtctctcgcaggttggccctcactgttctcattggtgctctgctgttgg

SEQ ID NO: 106234 - DNA, 248 bp, Glycine max
ctgtttcccgccatatatccaataagctctaaccatgtctgcctttgttggaaagtacgcagatgagcttatcaagaatgccaagtacatagccacacctgggaagggcatcttggcagcagatgagagcactggcaccattgggaagcgcctatcgagcattaaacgttgagaacattgaggccaaccgccaagctcttcgcgagcttctcttcaccgctccagatgccctccaatactctctggtg

SEQ ID NO: 106235 - DNA, 248 bp, Glycine max
atttggggaggcaaaggtcaaggaaaatccttccaatgcgagctcgtctttgccaagatgggaatcaaccccatcatgatgagtgctggagagttggaaagtggaaatgcaggagagccagcaaagttgataaggcaaaggtaccgtgaagctgctgatataatcagcaaggggaagatgtgctgtctcttcataaacgatcttgatgcaggagctggtcgtcttggtggaaccactcatacactgtg

SEQ ID NO: 106236 - DNA, 249 bp, Glycine max
aaatccaatggcttcagagaagaaactttcgaacccaatgagggagataaaagtgcagaagctcgtcctcaatatctctgttggcgagagtggagatcgtctcaccagagccgccaaggtgttggaacaacttagtggccaaaccccagtgttttccaaagcaaggtacactgttcgttcctttgggattagaagaaatgagaagattgcatgctatgtcactgtcagaggtgacaaggaatgcaactt

SEQ ID NO: 106237 - DNA, 248 bp, Glycine max
  unsure (1)..(248): unsure at all n locations
ctcgagccgtttggtggaactcaaaggtactggtgaactatatgcaatgaaggcaatggaaaagtctgtgatgctaaatcgtaataagtgtttccgctcatgcattgagagagagattatatcattattggatcatccttttcttccaacactatacagctctcgancagactcctacacatgtatgtttgattactgacttctttcctggaggagagttgtttgcactgcttgacaacaaccaatga

SEQ ID NO: 106238 - DNA, 253 bp, Glycine max
ccctcgagccgattcggctcgagcttgcaaaagagttaggtgtagtcattccagttagcttactttgaggaggcaaacaatgcacattataactcaatagccataattgatgctgatggaactgatcttgggatttatagaaagtcccatattccatctggaccaggttatgaggaaaagttctattttaatccaggtgacactggattcaaggttttccagactaaattagcaaaaattggcgttgctattt

SEQ ID NO: 106239 - DNA, 251 bp, Glycine max
atgaaaacgtgaagaagagtcaatatgctgtcagaggtgaattataccttcgagcttctgaacttcagaaagagggcaaaaagattatctttactaatgttggcaacccgcatgcattgggacagaaaccactgagcttccctcgccaggttgttgctttgtgccaagctccattcctacttgatgatcctaatgttggactgctattccctgctgatgcaattgcaagagctaaacactatctttcattg

SEQ ID NO: 106240 - DNA, 248 bp, Glycine max
tcaagatgggtatttctagggattccatgcacaagaggcgtgccactggtggcaacaaaaaggcttggagaaagaagagaaagtatgagcttgggcgtcaggcagcaaacaccaagttatcaagcaacaagacaatcaggaggattcgtgttagaggtggcaatgttaaatggagggcattgaggctggatactggcaattactcatggggtagtgaagcagtgactcgcaagactcgtattctagat

SEQ ID NO: 106241 - DNA, 246 bp, Glycine max
gcaaagcaacctttccaaacaaaatcaggcttttgtggtaccgtagtcagaaatgcagaactcaaggttgttgaccctgaaactatacgttctcttggctacaatcaacccggtgaaatttgcatccgagggcaacagatcatgaaaggatatctgaacgatgaggcagcgacagcatcgaccatagattcagagggttggcttcacaccggtgatgttggctacgtagatgatgatgacgaaatt

SEQ ID NO: 106242 - DNA, 247 bp, Glycine max
cctcaagggtgagggccttccatggcttccgcttgtgcttcctctgcaattacagctgttgccatctctacgccgagttccgggcagaagaatggatcaggaggttgttttcttagtggaaggaaattgagggtgaaaaaggagagagcagcaattggaggacgatcgatgggcactacagtgtgcgcagttgctgagcctgacagacctctatggttcccaggcagcacccctcctccatggcttg

SEQ ID NO: 106243 - DNA, 247 bp, Glycine max
gaatctttgaagtagttttgggaaacaagttccagagtaaactgcttgagattatagatgagagtgagctgccagaatttcttggtggcagttgcacttgtgtagatcaaggtggttgtatgaggtctgataaagggccatggcaagacccaaacattttaaagatggttcttagtggtgaagtgggatgttctaaacaaatagtaacagtttctaacgacgaggggagggtgattgaatgtgacaa

SEQ ID NO: 106244 - DNA, 243 bp, Glycine max
ctcaagggtgagggccttccatggcttccgcttgtgcttcctctgcaattacagctgttgccatctctacgccgagttccgggcagaagaatggatcaggaggttgttttcttagtggaaggaaattgagggtgaaaaaggagagagcagcaattggaggacgatcgatgggcacgccagtgtgcgcagttgctgagcctgacagacctctatggttcccaggcagcacccctcctccatggc

SEQ ID NO: 106245 - DNA, 240 bp, Glycine max
ggcagagcgtggacacagtcttgaaagcatcaaggctagcattgtagcaaggaagcctgattttgaagcatatattgatccacaaaagcaatacgctcatgcagtgatagaagtgttgccaacccaactcattccagatgacaaaaaaattaaaatattgagagtgaggttgatacagaaagaaggggttaagtactttagcccagtttacttatttgatgatggctctaccatttcatg

SEQ ID NO: 106246 - DNA, 244 bp, Glycine max
caacaagttatacgaggaaaagttgccaaacagttcttgcagctcatctcctttccattgtgagaataatagcaccaatattgccccatttagctgaggatgtgtggcagaatcttccttttcagtatataactcaagatggttctattgctgaatatgtatttgaatctagatggcccatctcgaatgaaagaaggcttgccctccctgttgaagaaattaatttctgggagaatattcttga

SEQ ID NO: 106247 - DNA, 242 bp, Glycine max
gtcaagcagttgaacgaccttcttacagagaagaacaaggacactgggtgggacgtgcctatccacgtcgacgccgcgatcggagggttcatagcgcctttcctctaccctgagctcgagtgggacttcaggctgcctctggtgaagagcatcaatgtcagcgggcacaagtacggcctcgtctaccctggtgttggctgggtcatctggcggagcaaggatgatctgcctgaggagctcat

SEQ ID NO: 106248 - DNA, 246 bp, Glycine max
aacactcataacacaaagcacaaagcaaagctcatccttgagttaaaaaatggcagcagcttcttccatggctctctcatccccatccttggctggcaaggccgtgaagctgggcccatcagccccagaagtgggaagggtgagcatgatgaagaccgtcaccaagcaggtctcctcaggaagcccatggtacggcccagaccgagtcaagtacttgggcccattctctggcgagcccccgtccta

SEQ ID NO: 106249 - DNA, 246 bp, Glycine max
cacaagaactctccaaggatcctccttcccacgaaattcatttggtgggctaatccaagaagagggtggaatttcaagccagggaagatggattatttcaatgcaccaggaagaaaccatctctttgttccggggccggttaacatcccggaccagatcattcgggccatgaacagaaacaatgaggactaccgttctccagcaattccagctatgaccaaaacactgcttgaggatgtcaagaag

SEQ ID NO: 106250 - DNA, 243 bp, Glycine max
gttgttcaaggatggcaatttgtaagaaagatgtttggagagttgaatgtggaatcccttctggatttccgctcacagttatttgcaatcagcatttttaagtggatgctcattagatatagctatgaaaaattactgcgccaggctaaagctccaagtatgtttttacaatccttcaaaaattttgtttctttgtgtgtgtatggtgatgataacttaattagtgttcatgaatatgtcaag

SEQ ID NO: 106251 - DNA, 241 bp, Glycine max
cacgagcaggattgcatcgacccgcgctcccgcgttcaccaacaccatccgaagctacgccgccgatgcgaaggcctccccgtccgaggtctcctccatcttggagcagaggatccgtggagtccttgaggagaacagcctcgctgagactggacgtgtgcttaccgtcggtgacggtattgcccgcgttcacggcatgaacaatgtccaggccgaggagctcgtcgagttcgcctctggt

SEQ ID NO: 106252 - DNA, 239 bp, Glycine max
gacaagtccagttctttccaaatgcttcagttgatgttgacaattctcccagctttgttgccatcaatgtcagtcctattgagtatgggcatgttttgctgattccgcgcattttcgagtgcttgcctcaaaggattgaccgtgagagcttcctccttgcacttcacatggcagtggaagctgataatccatattttcgattgggttacaacagtttgggtgcttttgcaaccattaac

SEQ ID NO: 106253 - DNA, 240 bp, Glycine max
  unsure (1)..(240): unsure at all n locations
ggtggacttgcctatgacacttcagatgaccagcaagatatcactagagtgatgggaatggtggacactctcttccaagctcccatggaaagtagtactcactatgctgtcatgagttcctatgatactatcagtgccggacttcgccagtacaatttagacaacaccatggattgatacnatagtgctcctgcatttatggacaagattgttgttcacatcaccaagatatttttgaac

SEQ ID NO: 106254 - DNA, 244 bp, Glycine max
gcttgaacagctctggagctggagcttcagttcccagttcagccttctttggcaccagcttgaagaaggttattgcctcaagggtccctaacgtcaagatttcttctggaagtttcaaaatcgttgccgcggaaaaagagattgatgagaaacaacagacagacaaggacagatggaaaggtcttgtctatgatgtttcagacgaccagcaagacatcacaagagggaagggtttggttgattc

SEQ ID NO: 106255 - DNA, 243 bp, Glycine max
atgtgctgttggatgatgctcttaaggagcaatatgatctcattctgttacctggaggtctgggtggtgcagaagcatatgcaaaatctgataaactaatggatctgatcaagaagcaagctgaggctcatagattgtatggagctatatgtgcctccgctgcgattgctcttgaaccacatggcctactaaagggaaagaaagttacatcctatcctgctatgtggaacaaacttgcagacc

SEQ ID NO: 106256 - DNA, 240 bp, Glycine max
cgttgttgtcaacgacagtgcgtggtgtcaagaatgcttcgcacctgcttaaatatgattccatgctgggaacttttaaagcagatgtgaaaatactggacggtgaaaccatcactgttgatggtaagcccatcaaggttgttttcagcagggaccctcttaagcttccttgggctgaacttggaattgacattgttattgagggaaccggagtgtttgtggatggccctggggctggta

SEQ ID NO: 106257 - DNA, 236 bp, Glycine max
ttgatattagtcacaggtaccatcctgatatacctgcctgggcatccaaggatagccttgggcagtttttgtagcttaccagcagcatggccaatggttctctggctaacttctcccaattcaagctccccgctcacagcggcacccatgacgatgctcccggacatgtttgcgatcactatttccattctggctttgatgtcgactctctcgatctactactccttaatggccct

SEQ ID NO: 106258 - DNA, 238 bp, Glycine max
gtttgagactctttcctacctgccagaccttgatgatgcacaatcggcaaaggaagtagaataccttcttaggaagggatggattccttgcttggaattcgagttggagcacggtttcgtgtaccgtgagcacaacaggtcaccaggatactacgatggacgctactggaccatgtggaagctgcctatgtttggttgcactgatgcttctcaggtgttgaaggagcttcaagaggct

SEQ ID NO: 106259 - DNA, 238 bp, Glycine max
taacgctggcgtaatggtcgtttcttttaccggtttccagatggagaatccgcggctgatgtatatgatagaataacaggattcagagaaacgctgagaacagatattaatattggacggtatcagccacctggggagaagaaaacagacatgaacttggtcattgtgtctcacggtctaacacttcgagtttttctcatgaggtggtacaaatggacggttcaacagttcgagggtc

SEQ ID NO: 106260 - DNA, 237 bp, Glycine max
ggttcttgttgacgagtaccagtgaggtttatggagatcctctgcagcaccctcagaaggagacttactggggcaacgtcaacccaattggtgtccgaagctgctacgacgagggaaagcgtacggccgagacgttgaccatggactaccaccgaggtgccggcgtcgaggttagaattgctagaatctttaacacctacgggcctagaatgtgcttagatgatggtcgtgttgtta

SEQ ID NO: 106261 - DNA, 260 bp, Glycine max
ttcggctcgcgtgacgttcgaggccatggagatcactaaaactcctttatctgccactgtggcaggagatgtaaccaacatagcactagatcctttattcatgtctgtattccgcttgggtgtcagtggtgcagccatcgcccatgttatatctcagtacctaatttcagttattctcttgtggaggttgttggaacaagttgaccttatacctccaagcataaatcatctgcaattagaccgatttcttaaaaatggtt

SEQ ID NO: 106262 - DNA, 237 bp, Glycine max
ggccaattcagcttgctttggattgatcagcagcaacgcctgaagttcaatgttgatgttgttgagagtgaatggggccatggtgctaagcttgatgttctggaatcaaagattgcttcagatacttcacacactataaaggcaatttgcattgttcacaatgagactccaactggggtcaccaatgacttggccaaagtgagacaaattcttgattcctaccagcatccagccctc

SEQ ID NO: 106263 - DNA, 233 bp, Glycine max
tgcagcaccggatcctctcatttctccggcgataactctcccttttccggcgaattcaccgcttcctcgatatgaatcccgtgtatgactatctgttcaagctccttctgattggagactctggtgttggtaaatcatgcctccttctaagatttgctgatgattcatacattgagagctacataagcaccatcggagttgattttaaaattcgcactgttgagcaggatggg

SEQ ID NO: 106264 - DNA, 237 bp, Glycine max
atctccaacaagtgtttctgtaaccatggcatccaccactctatcccctacaaccccttctcagctatgctcaggaaagagtgggattttcagtccctcacaggcacttcttgtgaagccagtgaagaggcagatgatggggaagagcaagggaatgagaattgcatgccaagccaccagcattcctgctgatagagtccctgacatgggcaaaagacagctcatgaatctgcttct

SEQ ID NO: 106265 - DNA, 233 bp, Glycine max
cggctcgagggttcattggccaaatttacatccccataattaactggtttctgatgatcatgtgcatagttgtggtttccatcttccaaagtccaactgatattgcaaatgcatatggcattgctgaagttggtctcatgatggttagcaccaccttggtgacccttgtgatggttttaatttggcagaccaacttatttttggcattttcttttgcccttgtatttggtaca

SEQ ID NO: 106266 - DNA, 237 bp, Glycine max
cattttaatcacgcgcacatcagcacaacacagcaattcactaagctaaaatcacttcatcatggcttcctcgtgtgcttcctctgccattgcagctgttgccatctccacaccaagttcccagaagaatggatcactcttgggaagcacaaaagcttcttttcttagtgggaggaaactgaaggtgaacaactttacagcaccagttggagcacgatccagcactacagtttgcgc

SEQ ID NO: 106267 - DNA, 238 bp, Glycine max
caacggtggaagagtgcaatgcatgcaggtgtggccaccagttggcaagaagaagtttgagactctttcctacctgccagaccttgatgatgcacaattggcaaaggaagtagaataccttcttaggaagggatggattccttgcttggaattcgagttggagcacggtttcgtgtaccgtgagcacaacaggtcaccaggatactacgatggacgctactggaccatgtggaagctg

SEQ ID NO: 106268 - DNA, 238 bp, Glycine max
gggctatatagcataaacatttgagtcttcattgcacaatgtcaacctcttccataaacgggtggtgcctctcttccatctccccagccaaaacctctctcaggaaggccacattacgcccttccgtcttcgcaacccttaacactccttcttctccttcctcttcatcttccttcccctctctcattcaagacaggcctgtttttgctgcccctgcccccatcatcaccccaactgt

SEQ ID NO: 106269 - DNA, 236 bp, Glycine max
atttcatcgtgcattcaatggcccccacagcagctctatccggaaccatggtgagcacctccttcatgaggaggcaacctatgaccaccacaagtctaaagacattccccaacgttggtgaagctctttttggtctgaaaagtggacgaggtggtcgtgtcacttgcatggcctcgtacaaggtgaagctcataaccccagaaggagaagtggagtttgaatgcccagatgatgtt

SEQ ID NO: 106270 - DNA, 233 bp, Glycine max
gaagcatctaagtgagatacacagtagttaggtagcaagcataagtgtctaaccttagaaacatatctgctacatatcgtgtgcattttggaattgtgccactaaaattctattcatctatggctgcctcatcttatgctatgcaatcaatccttgcaaaccctatgatccgcatttccagcgggtctagggagaaccattttggtgttcctgcttatcacatgagaaggaat

SEQ ID NO: 106271 - DNA, 233 bp, Glycine max
gaatgggcgttccaccagtgagggcagatcagaaacgggctacttatcgcagcactctttgctgggcagcacaccagctctatcacctcaacctggactggagcatacatgcttcggttcaagcagtacttcacagaggctgtcgaggagcagcaggatgtcatgacacggcacggcgacaagattgatcatgacatcctcgcggagatggacgtcctctaccggtgcatcaa

SEQ ID NO: 106272 - DNA, 266 bp, Glycine max
cttaaaagagcctttgcttgttctttaggcctttccgaattaagtacttgtttcatttgctctcgaagcaagaaaaatgttcatcgagagtttcaaggttgagagtcctaacgtgaagtacacagagactgagattcagtccgtgtacaactatgaaaccactgaacttgttcacgagaacaagaatggcacttatcagtgggttgtcaagcccaaaactgtcaaatatgaatttaaaaccaacacccatgtcactaaactagggg

SEQ ID NO: 106273 - DNA, 267 bp, Glycine max
ctggctgtacagtgtggtaacctatatccctcttgatttactcaaatttgctatccgctatattctaagtgggaaggcttgggataatcttttggagaacaagactgccttcactacaaagaaagactatggtaaagaagagagggaagctcaatgggcggctgcacacaggacacttcacggtcttcagcctccggaaacttccaaccttttcaatgacaaaaatagctacagggagctttcagagattgcagaacaagccaagag

SEQ ID NO: 106274 - DNA, 264 bp, Glycine max
gaagaaagagatgataccttgaggatccaaaggctcaggaagaaattttacttccactttcaagattatgttgatttgattatctggaaggtgcaattcttggaccgacaccatttactaatcaagtttggtagtgtagatggaggggtgtcccgaaatgctgatcaccacccagcttttgttgctgtatataacatggatacaactgaaattgtatcattttatcagaattcaccagacgagctttatctgttgtctgagcag

SEQ ID NO: 106275 - DNA, 262 bp, Glycine max
ggaatggctgtggcggatccaaatgcaccacatggcctaaagctaacaattgaagattaccctttcgccaatgatggtctccttatatgggatgccatcaaagaatgggtatctgagtatgttaaccattactatccaatctcaagcacaatagagtttgaccaagagctccaagcatggtggacagaaattagaacagttggtcatggagacaaatctcaagaaccatggtggccaaatcttaaaacaccaaaggacctta

SEQ ID NO: 106276 - DNA, 260 bp, Glycine max
ggcagaaagcaagctcatcctagagttttaaaaatggcagcagcctcctccatggctctctcttccccatccttggctggcaaggccgtgaagctgggcccatcagcccccgaagtcgggagggtcagcatgaggaagaccgtcaccaagcaggcctcctccggaagcccatggtacggcccagaccgcgtcaagtacttgggcccattctctggcgagcccccgtcctacctcactggcgagttcccaggtgactacgg

SEQ ID NO: 106277 - DNA, 266 bp, Glycine max
caaccccatcatgatgagtgctggagagttggaaagtggaaatgcaggagagccagcaaactgatcaggcagagataccgtgaagctgcagacatgatcaagaagggaaagatgtgcgctctcttcatcaacgatcttgatgcaggagctggtcgtcttggtggaaccacacaatacactgtgaacaaccagatggtgaatgccactctcatgaacattgctgataaccccaccaatgtgcagcttccaggtatgtacaacaagga

SEQ ID NO: 106278 - DNA, 262 bp, Glycine max
cacaacaacaataacaatggctgcctcactacaagctgcagctaccttcatgcaacccaccaaggttggcatagcctctcgcaacctcaaatctacacaatgcatttctaaggcttttggcttggaatctgctgcagctaaactcacttgctcccttcagcctgatctcaaagaatttgctcaaaaatgtgtcgacgctaccaaaattgcaggatttgcccttgccacctctgctctcgttgtttctggagcaagtgcagaa

SEQ ID NO: 106279 - DNA, 260 bp, Glycine max
acaactacaaaggttgctgtaggagataagatattgaagtagtgctaagtgcctaacacctgcagtgaacaatggcctctgcatcagcatctcttctcaagtcttcacttgttcttgacaagtctgagtgggtgaagggacaaacacttcgccaaccttctgctgcatcagttgtgagatgcaaccccaccaccccatcaggcctcaccatcagagctggttcctatgctgatgagctcgttaagaccgcgaaaacagtg

SEQ ID NO: 106280 - DNA, 258 bp, Glycine max
ctcacttccttgcctactacacattcttcatcacttcattcaacatttctccccttagcttgtttcaccaatggctgctgcggttagtgctgcagtctcttttccatccaccaagtctacctctcttccaagcaggacctccctcattgccccagagagagttgtgttcaagaaggcttcattgcaaaacagagatgtttctagcagtggacgggtagtttccatcagagctcaagtcaccactgaggcaccagccaa

SEQ ID NO: 106281 - DNA, 256 bp, Glycine max
atacactgtgaacaaccagatggtgaatgccactctcatgaacattgctgataaccccaccaatgtgcagcttccaggtatgtacaacaaggaagagaacccccgtgttcccatcattgtcaccggtaacgatttctcaacactctatgcacctctcatccgtgatgggcgtatggagaagttctactgggcaccaacaagggaagaccgcattggtgtttgcaccggaattttccgcactgatggtattcctgaa

SEQ ID NO: 106282 - DNA, 258 bp, Glycine max
aaaagccttagccttccctacaactccaaacaccaagacatcatcatccatggctgcctccgtctccactgtcggagctgtccccagagctcttttgaacctgaatggttctggagctggagcttcagctcccagttcagccttctttgggaccagcttgaagaaggttattgcctcaagggtccccaacagcaaggtttccggtggaagcttcaagattgttgctgtagaagagaagaaagagattgaagagaccca

SEQ ID NO: 106283 - DNA, 263 bp, Glycine max
gttgtagttgtgttgcgtgtgtgcgtgacaaaagcaaaaggaaagaatatcaacaacgtaaagtagattccttactagacatggcgttgaaggacacattctacatatctcatggatcaccaactttgaccatagatgagtccattcaggccaggaagttccttcagtcatggaataaggacgtgtttcctcaaagacccacttcaattcttgtcatctctggtcattgggaaaccgcagttcccacggtcaacgtcgttgac

SEQ ID NO: 106284 - DNA, 263 bp, Glycine max
gcttcggcttgttgggcgagaacggtgccgggaaaacgacgacaatatccattgtaactggactgatcacgcccacgtccggtaccgccactgtcgtgggacacgacatccgtacagatatcggacaagtccacctcaacatcggaatctgcccacaattctccgtgctttgggacggtttgaccgtggaggagcacttgttgttctacgccagactcaaaggaattccaagaagcaccgagaaatcacacgtggaccactgt

SEQ ID NO: 106285 - DNA, 261 bp, Glycine max
ctacaagctgcagctaccttcatgcaacccaccaaggttggcatagcctctcgcaacctcaaatctacacaatgcatttctaaggcttttggcttggaacctgctgcagctaaactcacttgctcccttcatcctgatctcaaagaatttgctcaaaaatgtgtcgacgctaccaaaattgcaggattcgcccttgccacctctgctctcgttgtttctggagcaagtgcagaaggtgttccaaaaaggctaaccttcgac

SEQ ID NO: 106286 - DNA, 259 bp, Glycine max
aaatgagtggtttttgagcagaagcagttaagagagaaagggattcagcgaagatgacatccgttagtgtggcaccaacttcgggtttgagagaagccagtgagcatggagcagcaggagttgatagattgccagaggagatgaacgatatgaagattagggcagatagagaaatggaagccacagttgttgatggcaatggaacggagacaggacatatcattgtgcctaccattgggggtagaaatgtacagcccaa

SEQ ID NO: 106287 - DNA, 259 bp, Glycine max
gccaagatatcaattattcctcgtagctacatgttcatattcaggcattaaagcacccactagagcatggccagcctcatgataggctactaatttctagtgggtgctttaatgcctgaatatgaccctgtagccaagatatcaattattcctcgtggccaagctggtggtctcacattttttgctcccagtgaagagaggcttgagtctggattgtacagtaaatgttaccttgaaaatcagatggctgttgccttgg

SEQ ID NO: 106288 - DNA, 258 bp, Glycine max
gtgcaaagaaggttattatttctgcccccagtaaggatgcccccatgtttgttgttggtgtcaacgagcacgagtacaagccagagcttgatattatttccaatgctagctgcacaaccaactgccttgccccacttgccaaggttcacaatgacaggtttggcattgttgagggtttgatgacacctgttcattccatcaccgctacccagaagactgttgatggaccatcagccaaggactggagaggtggaagag

SEQ ID NO: 106289 - DNA, 253 bp, Glycine max
actcgagccgaatcggctcgagccacgaggctagccatgttggcacgtggcacaggaatcaccacccatttaccaagtggatcaagccattctaaaggatccagaggactgcaccgagatgcatgtggtttacgcgaaccgaaccgaggatgatatattgctgaaggaagagcttgatgagtgggctaagaagtatgataggttgaaggtgtggtacgtgatacaagaaagcataagagaagggtgggaatac

SEQ ID NO: 106290 - DNA, 255 bp, Glycine max
ctccgccgccgctcccgctccgccccagcgcatcgcccgccgccacagcgtaccgcgatcacatcgatcaccttcagctttcaatcatggccgacgtcgatgtcgaaccggaggcagccgccggcgctcccaagaagaggacgttccgcaagtacagctaccgcggcgtcgacctagatgcgcttctcgacatgtccacggacgacctcgtccagctcttccccgcgcgcgccaggagaaggttccagaggggtc

SEQ ID NO: 106291 - DNA, 257 bp, Glycine max
atccggataacacaaatcctacttataacacgaaaaatggaatctacaaagaaggaattggactagacaatgttgtgatgtcatggggacatgatgagtatatgtatttggtgagtttgcatatagctcatcacatatagatatattcattttttttttgtttttaatttcctctatattctaattaatagcaccttccttataacatatgatcaacggtacactcgattctgcaggttgtacaggaaaacggcacc

SEQ ID NO: 106292 - DNA, 253 bp, Glycine max
tcttcttctcttaaaagagcctttgctttttctttaggcctttccgaattaagtacttgtttcattttctctcgatgcaagaaaaatgttcatcgagagttacaaggttgagagtcctaacgtgaattacacagagactgagattcagtccgtgtacaactatgaaaccactgaacttgttcacgagaacaagaatggcacttatcagtgggttgtcaagcccaaaactgtcaaatatgaatttaaaaccaac

SEQ ID NO: 106293 - DNA, 79 bp, Glycine max
ttttctccgcactgctgttgctaatcccgtgtcgtaataataagagatgttttaagcggctgaacacacggtggtgtaa

SEQ ID NO: 106294 - DNA, 253 bp, Glycine max
aaaacaaagaaaaaaaaaaacccttagccaacacaaccatcatggccacctctgctattcagcaatcagcattcactggtcaaactgctctgaagcagctcaatgagttcgtccgcaagaccggtggcgccggcaaaggtcgcactaacatgcgccgcaccgtcaagagtgctcctcagagcatttggtatggccctgaccgtcccaagtacttgggtccattctcggagcagattccatcatacctgaccgg

SEQ ID NO: 106295 - DNA, 251 bp, Glycine max
tggaactggcgcaatcatggccgtcggtgcatcagaaccgacagttgttggtacaaaagacggtagaatcgggatcaagagccaaatgcaggtaaatgttaccgctgatcatcgggttatttatggagctgaccttgctgcttttctgcaaacacttgctaagataattgaggatcccaaggatcttacattttaaaagtccctgagtgattgtttttaaaagttcctgagacattgtttttccttgagcc

SEQ ID NO: 106296 - DNA, 251 bp, Glycine max
cagtgaaagagaatccgaggcgaagagaagagaaaaattaagatggaggggaaggagcaggatgtgtcgctgggagcgaacaagttcccggagagacagccgattgggacggcggcgcatagccaagacgacggcaaggactaccaggagccggcgccggcgccactggttgacccgacggagtttacgtcatggtccttttacagagcagggatagcagagtttgtggccacttttctgtttctatacat

SEQ ID NO: 106297 - DNA, 249 bp, Glycine max
ctctccctgatattaaaacaagaagacgcattttccagatacacacatcaaggatgacattagctgatgatgtcaatttagaagaatttgttatgaccaaggatgagttctctggagctgatataaaagcaatatgtactgaagctggcttacttgctttacgagaacgccgaatgaaggtgacgcatgccgactttaagaaggcaaaggataaagttatgtttaagaagaaagaaggagtgcccgaag

SEQ ID NO: 106298 - DNA, 254 bp, Glycine max
acgatacccaagctcgtttaggccaggaatcatcagatgcaaaacaattggaactgaaggagaagattgtgacagaaatacttccagcaaagaggttttacaaagcagaggaataccatctacaatatctggagaagggtggaggtcaaggcaacaaactatccgcagaaaaaggctgcactgatcccatcaggtgctatggctgatgaatgatgatcactttcttgctgcacacttcaccatgtctggcttct

SEQ ID NO: 106299 - DNA, 255 bp, Glycine max
acgatacccaagctcgtttaggccaggaatcaaaagatgcaaaacaattggaactgaaggagaagattgtgacagaaatacttccagcaaagaggttttacaaagcagaggaataccatcaacaatatctggagaagggtggaggtcaaggcaacaaacaatccgcagaaaaaggctgcactgatcccatcaggtgctatggctgatgaatgatgatcactttcttgctgcacacttcaccatgtctggcttcta

SEQ ID NO: 106300 - DNA, 253 bp, Glycine max
cgtaggcttgctcgcaattttatggcaatggccaccacaagagaggcagccgcagcagaagttgccgccacaactgacctctctattgccgagacgccagagattgtgaagactattcaagaagcttgggacaaagttgaagataaatatgcagtgagttcactggcagttgctggtgtggttgcattggtgggctcagctgggatgatctcagcaattgataggcttcctttaattcctgggcttcttgagg

SEQ ID NO: 106301 - DNA, 251 bp, Glycine max
cgattttctacatcgtgatgcaatgcttgggtgctatttgtggcgctggcgtggtgaagggtttcgaggggaaaacaaaatacggtgcgttgaatggtggtgccaactttgttgcccctggttacaccaagggtgatggtcttggtgctgagattgttggcactttcatccttgtttacaccgttttctccgccaccgatgccaaacgtagcgccagagactcccacgtccccattttggcacccttgcca

SEQ ID NO: 106302 - DNA, 259 bp, Glycine max
ggttgctgtaggagataagattgcagtagtgctaagtgctaacacctgcagtgaacaatggcctcctcatcagcatctctgctcaagtcttcatttgttcttgacaagtctgagtgggtgaagggacaaacccttcgccaaccttctgcatcagttgtgagatgctaccccaccaccccatcaggcctcatgatcagagctggttcctatgctgatgagctcgtaaagaccgcgaaaacagtggcttcaccagggaggg

SEQ ID NO: 106303 - DNA, 259 bp, Glycine max
cgcagaaaaacaagtagttgagaactaagaagaaggaaatggcttcctcaatgatctcctccccagctgttaccaccgtcaaccgtgccggtgccggcatgactgctccattcaccggcctcaaatccatggctggcttccccacgaggaagaccaacaatgacattacctccattgctagcaacggtggttcagtacaatgcatgcaggtgtggccaccaaacggcaagaagaagttcgagactctttcctacttgcc

SEQ ID NO: 106304 - DNA, 249 bp, Glycine max
aattgcttcgtcgcgactagatctggatgggaaccccataaagcccatcaccagttgcatgattggcgccggtggcttcatagggtctcacctctgcgagaagctcatgtcggactaccatcacagtgtcctcgccttggatgtctacaatgacaagatcaaacacctcttggaaccccacacgctcccttgggcctctcgcatccagttccatcgcctcaacatcaagcacgattcccgtctcgaagg

SEQ ID NO: 106305 - DNA, 250 bp, Glycine max
aattgtggagccagagatcttgcttgatggggagcatggtattgatagaacttttgtagtagcccaaaaggtctgggcagaggttttcttctaccttgctgagaacaatgtcctttttgagggtattctccttaagcctagcatggttacacctggagccgagtccaaggacaaggccagtcctcagacagttgctgattacaccctcaagctccttcacaggagaattccccctgctgtccctggaatt

SEQ ID NO: 106306 - DNA, 278 bp, Glycine max
cttcattcaacatttctccccttagcttgtttcaccaatggctgctgcggttagtgctgcagtctcttttccatccaccaagtctacctctcttccaagcaggacctccctcattgccccagagagagttgagttcaagaaggcttcattgcaaaacagagatgtttctagcagtggacgggtagtttccatcagagctcaagtcaccactgaggcaccagccaaggttgaaaaagagtccaagaaacaggatgaaggtgtggttgtgaacaagttta

SEQ ID NO: 106307 - DNA, 276 bp, Glycine max
ccatttcagaaatgtcgttgatatcttgtcataacgcatgaataaatcagaagttttgaatctggacttgcttaatgtcacgcaaatgtcaatacatagaagagatggccatccatctatttactatcttggaccaggcagcccatcctctatgtggcggcaagactgtagtcattggtgcctacctggcgttcctgattcacagaacgaaattctttatgcacttcttctcaagcgggaggattttttcgaacggagacagcatacaacaaaagt

SEQ ID NO: 106308 - DNA, 274 bp, Glycine max
gttcttcctcttccggagagctcaatgcgggcccggtgggcctagcgggatgggtgggcccatggactttggacggaacaagtccaagttccaggatagtccccgaaaccggtgtgagcttcgctgacgttgcgggcgctgaccaagcgaagttagagctccaagacgttgttgattttctgaagaatcccgataagtacaccgcgttgggcgcgaagattccgcaggggtgtcttttggtggggccaccgggaactgatagaccttctggcga

SEQ ID NO: 106309 - DNA, 274 bp, Glycine max
gatcaagaatgggaggttggccatgttggctgtgatgggggcatggttccagcacatttacactggcactggtcctattgacaacctctttgctcaccttgcagatcctggtcatgctactatttttgctgctttcactcccaagtgagaagggttggaacaactctatgattgcaagccttggagaaacattgggaaacttgtttaactaagttgtaaggcttaaatgtctttaggggggagtttttatgttggtgaaagcttgtaaaatggt

SEQ ID NO: 106310 - DNA, 276 bp, Glycine max
ggaagagaacccccgtgttcccatcattgtcaccggtaacgatttctcaacactctatgcacctctcatccgtgatgggcgtatggagaagttctactgggcaccaacaagggaagaccgcattggtgtttgcaccggaattttccgcactgatggtattcctgaacaggacattgtcaagcttgttgacaccttccctggccaatccattgatttctttggtgcactgagggccagagtatatgatgatgaagtgaggaagtggatttctggtgt

SEQ ID NO: 106311 - DNA, 273 bp, Glycine max
tcgctctctctcttatctcctctgttcccgcattttattgctccatggccgtcggaggtttcaccaacgccgccggtggcgccgatttcgaggcctaaatcactcccatcgtcatcatttcatgtatcatggctgccaccggaggtctcatgtttggctacgacgtcggtctttcacgtggtgtgacgtctatgcccccgttcttgaagaagttttttccgacggtatacagatagacagtggaagagaaaggactggatagtaattactgca

SEQ ID NO: 106312 - DNA, 275 bp, Glycine max
cggctcgaggcataacccttcgaagtcgccgtttgttttcttttcgttcgcatcttctctctctctcagaaagatgaaggtggtccccgcgtatttgctcgccgtcctcggtggcaacaacagcccctccgccgatgtcatcaaggaaatccttggctccgttggagtagaagcagatgaagataggattgaatcgtttttgtctgaagttaagggtaaggatatagttgagcttattgctgccggtagggaaaagttggccacggttccttctg

SEQ ID NO: 106313 - DNA, 275 bp, Glycine max
gcgttggccatggcaaacatgattgtggcttccaccaaacctctggttccagtctgcaccagttcccgttcccccacacccaaagtccccattctccaaatttcactccccaaagccccaaccttgaaactgaaactcccgatttcaaagccccagatgctgtccctccttggagggatagcaccactggtcttggccagaccctccctcgcagaagaaattgagaaagcagcactctttgacttcaacctcacccttcccataataatggtgga

SEQ ID NO: 106314 - DNA, 269 bp, Glycine max
actcgagccgattcggctcagggctcgagggagagttcaacgactgtcgttgatgggaaccagtactacagtttgactgtgttgacaaggacagctgatggagatgaaggtggcaagcaccagctgatcacagcaacagtgaaagatggcaaactatacatttgcaaggctcaagctggagacaagaggtggtttaagggagcaagaagatttgtggagagcacagcaagttctttcagtgttgcctaagaacttaattagtggagtgc

SEQ ID NO: 106315 - DNA, 274 bp, Glycine max
ccgaagctcatcaggcttccttcccttttctagaaaatcttcagaggatttccattctgtcattgccttccagacctatgcagttgcaagcagtggaggatacaagaagggtgtgacagaagcaaaactgaaggttgccataaaccggtttggaaggattggaaggaacttcttgaggtgctggcacggtcgcaaagactcccctctcaatgtcattgccatcaacgacaccggcggcgtgaaacaagcctctcaccttctcaaatacgattcc

SEQ ID NO: 106316 - DNA, 269 bp, Glycine max
ctctgcaggcgatagatcgtaagaaacgccaggacaagatgatctgccgcaaatgctatgcacgactgcactctagggctgtcaactgccgcaagaagaagtgtggtcacagcaaccagctgagggccaagaagaagatcaagaactgaggtgctgctcctagtcagtttcatggacaatgttgggctgtattgctgtgtggttgttgaacggtgtttgtttacccaacatttgggccttctgttatgttttcccttgttgtcgatgac

SEQ ID NO: 106317 - DNA, 271 bp, Glycine max
cgtaaacgccgatggttgacctcaacaatatcgtgaacggttctgtggccaatattgctgcgcacttagagattatgtgagcactgttgtagtgtcgaggacaggattggttttagtatgatatatgatgctgagcagagaggagctataccacctgggaagagtatattggtggaacctactagtgggaacacaggaattggtcttgcctttatagcagcttcaagaggatataagctaattttgacaatgcctgcttcaatgagtttag

SEQ ID NO: 106318 - DNA, 271 bp, Glycine max
agaaagtactctccgtcgtacggcagattcggccggagattgtcaccgtcgtcgagcaagaagcgaaccacaacagactgagttttgtcgaccggttcacggagtcactgcactattattcaaccctattcgactcgctggagggttcgcctgtgaaccctaacgataaggccatgtcggaggtttacttagggaagcaaatctgcaacgtggtggcgtgcgagggaatggaccgcgtggaaaggcacgagacgctgaaccagtggcggaa

SEQ ID NO: 106319 - DNA, 269 bp, Glycine max
cccagatgcgaatgaattggacctagtcctccacaccctctcttcttttcccccaatcgtcttcgccggcgaggcgaggaatctggaggagaagctcgctcaggctgccatcgggaacgcttttctccttcagggcggtgattgcgccgagagcttcaaggaattcactgccaacaacatccgtgacaccttccgtgtcatccttcaaatgggtgtggtcctcatgttcggtggccaaatgcccgttatcaaggtggggagaatggcag

SEQ ID NO: 106320 - DNA, 268 bp, Glycine max
gttgcatcaccgcaagtccacatcatggctgccattgccgctgcaggcatagcttccttgttttcttcttctattaacagtgtcaaatgtcttcgttcctctaagaactgctccattatagacccccttataaccacagtgccctcaaaccgtggcatgtttgtgtcacacttggtggaacctttgtccattgggggtgccattaattcgcacaagttgtgggggcctagaatttctgctgctgttgcacaagaagaggctgttgttg

SEQ ID NO: 106321 - DNA, 267 bp, Glycine max
cagcacaggagctgccaaggccgtgtctctatgtgttgccacagctgaagggcaagctcaatggaatagcgctccgtgtgcctacacccaatgtttcagttgttgaccttgttgtgaatgttgagaagaagggtcttactgctgaagatgtgaatgcagcattcagaaaggcagctgaggggccgctcaaaggtgtattggacgtgtgtgatgttccacttgtgtctatcgacttccgctgctctgatgtttcctctactattgact

SEQ ID NO: 106322 - DNA, 268 bp, Glycine max
cattaatcgaagcccatgttgatgtcaagacaaccgacaactacatgttgcgtttgttctgcatcggcttcacgaagaggcgcccaaaccaggtcaagagaacctgctatgctcaggtcatcccagatccgtcagatccgccgtaagatggttgagattatgatcaaccaggcttctacatgtgacctgaaagaacttgtttcgaagctcattccagaagttattggtaaggagattgagaagtctacctccagcatcttcccacttc

SEQ ID NO: 106323 - DNA, 267 bp, Glycine max
agaaagcataagccaaattttgagtaaactagtgtgcacactatcccatgcctagtggaagtagggatcctctcgttgttgggggagtaattggggatgtattggatccttttgaatattctattcctatgagggttacctacaataacagagatgtcagcaatggatgtgaattcaaaccctcacaagttgtcaaccaaccaagggtaaatatcggtggtgatgacctcaggaacttctatactttgattgcggttgatcccgatg

SEQ ID NO: 106324 - DNA, 264 bp, Glycine max
ggagttgacaacatatgctcctcttaccattgtttgtgctggttgcttctcaaacttacgccgttctctttgtaatcctaaggtggatattccctcatgttttgttggtttagttttagagaactgtgaacttccatgtgcaaatcatggccatgtcatactgggagactcttcgccgattctattctatcctatcagtagtacagagattcgctgtctggtcgatgtacctggtcagaaggttccttctatatcaaacggtga

SEQ ID NO: 106325 - DNA, 271 bp, Glycine max
  unsure (1)..(271): unsure at all n locations
cccgctgcagctaaactcatttgctcccttaagcccgatctcaaagattttgctcaaaaatgtgtcgacgatcancaaaattgcaggattcgcccttgccacctcagctctcgttgtttctggagcgagtgcagaaggtgttccaaagaggctaaccttcgacgaaatccagagcaagacatacttggaagtgaagggaactggaactgctaatcagtgcccaaccattgaaggtggagtggactcatttgccttcaaggcagggaaatac

SEQ ID NO: 106326 - DNA, 271 bp, Glycine max
gccgtcgatggtggcacacaagaaaatgtgtttctttgatctactcatcaaggtgtacttcaaaggtgtgcatcccaagtttccaaatggaggactcatgtctcaacatttggactctctacccattggatccatgttggacgtgaagggcccattaggtcacatagaatacaccggaagaggcaacttcatggttcatggaaaaccaagattcgccaagaggttggccatgttggctggtggaactgggatcacgcccatttaccaagtg

SEQ ID NO: 106327 - DNA, 268 bp, Glycine max
ctttccgcgatcaaaaccgagctagggttttaggtccgggggagagggtgaggagcggacggaggcgcgccatggacaaccccgagatgcagcggttccttcagcaagagcagcaaaaggcgatgatgaacgagatggttggcaagctaacgagcgtgtgctgggacaagtgcatcactagcgctcccgggagcaagttcagttccggggaatcaacctgcctgaccaactgcgcccagaggtttctcgacatgagcgtgatgattgc

SEQ ID NO: 106328 - DNA, 266 bp, Glycine max
atgaagcaaatattatggacaaatgaaggcaacagtgctggtgaagagagtgtaaatcttttcctcagggccattggacttagggagtactcacgctatctttgtttcaactttcctttcacccatgagaaagcacttctgggacacttaaagttttttccttggaatcctgatgctgatatctttaagaattggagacaaggtaggactggctttcctttggttgatgcaggaatgagagaatttgggcaatggctggattcaca

SEQ ID NO: 106329 - DNA, 265 bp, Glycine max
cacaaggcagaaagcaagctcatcctagagttttaaaaatggcagcagcctcctccatggctctctcttccccatccttggctggcaaggccgtgaagctgggcccatcagcccccgaagtcgggagggtcagcatgaggaagaccgtcaccaagcaggcctcctccggaagcccatggtacggcccagaccgcgtcaagtacttgggcccattctctggcgagccccgtcctacctcactggcgagttcccaggtgactacggc

SEQ ID NO: 106330 - DNA, 266 bp, Glycine max
gttccaagctagtgatctgggtctgcttgttgaactcacctcagttgagcagcttggtttggctaggaaaattaccatctccaaggattctaccactgtcattgctgatgctgcgacaaaggatgagttgcaagccagggttgctcagttaaagaaggagctgtctcagacagactcagtatatgatactgagaaactggctgagaggatagctaaactgtctggtggagttgcagtcatcaaggttggtgctgctacagagactg

SEQ ID NO: 106331 - DNA, 263 bp, Glycine max
ggatattgctcttgctgatctggctccaacccaccccatcaggctcgggcttgctctcaacttctcagtgttctactacgagatcctcaactctactgaccgtgcttgcaaccttgcaaagcaggcctttgatgaggcaatctccgagctagacagcctgggagaggagtcctacaaggacagcactctgatcatgcagctcctgcgtgacaacttgaccttatggacttccgacaccaacgaggaccgcggggatgagatca

SEQ ID NO: 106332 - DNA, 253 bp, Glycine max
gtgaaataggggagaagtatgataaaactccaacacaggtatccctgaactggctggtagcacaaggcaatgttgtgccaattccaggagccaagacagcagaacaagctgaggaattcagaggtgcacttggctggagactaactgatgaagaggtagctgagctgcgtagtgtggcttcagaaattaaacctgttataggttttccagttgaaaaactctagaatatagcatacatctttacatttgattt

SEQ ID NO: 106333 - DNA, 264 bp, Glycine max
attttgcagccaagagtggcaggatgtgtgcagaggcaattgttgaaggttctgagaatggaaaaaggatggtggaagaaggggacttgaggaagtacttggagaagtgggacaagacttattggccaacttacaaggtcttggatattcttcagaaggtgttttataggtccaaccctgcaagggaagcgtttgtggagatgtgtgctgatgagtatgtgcagaagatgacctttgatagctatttgtacaagacggtggtgc

SEQ ID NO: 106334 - DNA, 264 bp, Glycine max
cgagaagggaatgcgctatgcaatgccaaatgctagagtaatgattcatcaacctcaaggtggatctgagggtaatgtggaggaggtgaggcgacaggttggagaaaccatctatgctcttgataaagttgataaaatgtttgctgctttcaccgggcaaccacttgacatggtgcagcagtggacagagagggatcggttcatgtcttcttcagaggccatggatttcggattgcttgatgctttactggaaacaagatacta

SEQ ID NO: 106335 - DNA, 260 bp, Glycine max
ggatatagcgcatgccgatctggctccaacccaccccatcaagctctcgcctgctctcaacatctcagtgctctactacgagatcctcagcacccctgaccgtgcttgtaacattgcaaatcaggcctctgatgaggcaatcgccgcgctagacatcccatgagaggagtaccacaaagacagcactccgatcatgcagctcctgcgtgacaatataactgatggagtgccgacaccaacgaggacggcagtgatgacat

SEQ ID NO: 106336 - DNA, 260 bp, Glycine max
gggcaattttagagcaagtgttgatttgcagcgcagtcatcgtattaaaggaatgatttaaatggtggccacagttggtattcctgagaatacaggtatagcattagcctgtgctatgaatagttcttttagggggcgtgacagttctgatatttacaccatctgctctcaagactgtgaattatggaatcctgcttgcacaaaagcaatgactatgtcatttgatccaaacccgtgttctgatgcatggagtttggaat

SEQ ID NO: 106337 - DNA, 263 bp, Glycine max
aaaaggttcctaagcaaaaaagaagagggaggccacaaaaactgtttaaggatgactttgatgaagaagaaattgaggaaatattagaagaggatgcctgtggtggtgacaacgttaagaatgtagtgtctagcaaagagatgaaaaatttgaatactacaaaacatgggagaaaaagaaaacgaaatttacaggagaaaatagaaccaattgatgagaaaattaatgttgttgtaaacggatcaaatactgatgagttgaca

SEQ ID NO: 106338 - DNA, 261 bp, Glycine max
  unsure (1)..(261): unsure at all n locations
tgcaattgaagttaaaagccttagtcttccctacaactccaaacagaaagacttagacatcgctngctgcctccgtctccactgtcggagctgtcaacagagctcttttgaacctgaatggttctggagctggagcttcagctcccagttcagccttctttgggaccagcttgaagaaggttattgcctcaagggtccccaacagcaaggtttccggtggaagcttcaagattgttgctgtagaagagtagacagagattg

SEQ ID NO: 106339 - DNA, 219 bp, Glycine max
tgacttctcaacattgtatgctcctctcattcgtgatggacgtatggagaagttctattgggcacctactcgggatgacaggattggtgtctgccgaggcattttcagaacagatggtgttctaaaggaggatattatcaagcttgttgacaccttccttgggcaatctattgacttctttggtgccttgagggccagagtctatgatgatgaattagg

SEQ ID NO: 106340 - DNA, 268 bp, Glycine max
cagaagaacaagtagttgagaactaagaaggagaagcaaatggcttcctgaatgatctcttccccagctgttaccactgtcaaccgtgccggtgccggcatgcggtgctccattcactggcctcaagtccatggctggcttccccaccagaaagaccaacaatgacatcgcctccattgctagcaacggtggaagagtgcaatgcatgcaggtgtggccaccagttggcaagaagaagtttgagactctttcctacctgccagacctt

SEQ ID NO: 106341 - DNA, 261 bp, Glycine max
ctcgagccgcaagtcaaaggcacaccagagtaggtgaacttaagaaacttgtggaagggggtaaagtgaggtatattgggttatctgaacctagtccatgtacaataaggagagcacatgcagttcatcccatcactgctgtacaaatggagtggtccttatggagcggtgacattgaggacgaaataattcctctgcagcttggcattggaattgtactatatagtcctcttggtcgaggctttttcggtggcaaaggag

SEQ ID NO: 106342 - DNA, 262 bp, Glycine max
gtgggtcttgggacacccaagagggacttgtcactcatttttgacactggcagtgatctcacttggactcagtgtgaaccttgtgctcgttcttgctacaagcagcaagatgtaatatttgatccatccaagtctacatcatattccaatattacatgtacatctgccctctgaatcagctctctactgctacaggaaacgatccaggatgttccgcatccaccaaggcatgcatatacggcatccagtacggcgacagttc

SEQ ID NO: 106343 - DNA, 262 bp, Glycine max
aagaaggttgtcatctctgctcctagcaaggatgcccccatgtttgtcgttggtgtcaacgagaaggcgtacaagtctgacattaacattgtctccaatgctagctgcacaaccaactgccttgctcctcttcgtaaggtcatcaatgacaagttcggtatcgttgagggtctgatgaccactgtccatgtcatcactgctacccagaagactgttgatgggccctcgtctaaggactggaggggtggaatggctgctagtt

SEQ ID NO: 106344 - DNA, 255 bp, Glycine max
cttgggaccatctggtccatccgcttcacctcggatggccagttcatgtacatggctgaatgtgctgactttgtgcacatctacgacgtgatgagtgactacgacaaaaggcatgagcttgacttctttgtcgagatatccggcacatcggtcagcccatacactgacacgcttttcgttggtgtgtgggataggatgtatgggggcctgctacagtttcgccgcctgtacaactactcgtatcttgactccctg

SEQ ID NO: 106345 - DNA, 263 bp, Glycine max
ttgttactatgattttgtatgaggttcttagattataccctccatgagttggtggtcctcgaaaagttatcaaagatgtgaaacttggaaacctatcatttcctgatggagtggagattttcatatcaacaattttggttcaccatgatagtgagctctggggtgatgatgctaaggagttcaaacctgagagattttctgatggagttctgaaggccacgaatggtagattttcatttttcccctttggaggaggtcctaga

SEQ ID NO: 106346 - DNA, 188 bp, Glycine max
gaaaccttgagggaccctcgaggttttgccgtgaagttttacaccagagagggtaactttgaccttgttggaaacaaccttcccgtgctctttgtacgtgatggcatgaagtttccagatatggttcatgctcttaaacccaatcccaagaaccacatccaggagaattggaggatccttgacttctt

SEQ ID NO: 106347 - DNA, 264 bp, Glycine max
attgaagttaaaagccttagccttccctacaaatccaaacctaaagacatcaaaatccatggctgcctccgtctccactatcggagctgtcaacagagctcttttgaacctgaatggttctggagctggagcttcagctctcagttcagccttctttgggaccagcttgaagaaggttattgcctcaagggtccccaacagcaaggtttccggtggaagcttcaagattgttgctgtagaagagaagaaagagattgaagagac

SEQ ID NO: 106348 - DNA, 267 bp, Glycine max
acacagttatccattcacatttcacagttagcacttagcagactctgctgcagtgaggtgaggggaggtttgtttgttgtttcgtttttcctttcctttccgccagaatccgttgagaatggcgttgccggtagtcgtcgatgcagagtacctcaaggaggtcgacaaggctcgccgcgatctccgcgcactcatcgctaacaggaactgcgctcctctcatgctccgattagcctggcacgatgccggaacttacgatgctaagac

SEQ ID NO: 106349 - DNA, 267 bp, Glycine max
actcgagccgaatcggctcgagagataacagaacttacaccaacaggaggatttgcagctgacgtttgctgctgcctctgtgcttctgtttgcttcaaagctgggactacccatctctgcaacccacactctagtcggtgcagtaatgggcgttggatttgcaagaggacttatgagtgttagatcagaaactgtgaaggagattgtggcttcatgggtggttactattccagttggagctactctatcagtcctctacacatggat

SEQ ID NO: 106350 - DNA, 258 bp, Glycine max
  unsure (1)..(258): unsure at all n locations
atgggaacaatgtggatttgggcactgcatgtggcaaatattacagagtgtgctgccttagcattattgatcctggtgattcggatatcatcaagacactgcctggcgaacagtaaagtattcttgaagttccttgcttgttattttctggttttagttgttgattcaaactttgaaagaatatagaattnagttgtagacattggtgtaaggtgcaaggtttttgggtattccagctgagcatctagtaattttgac

SEQ ID NO: 106351 - DNA, 260 bp, Glycine max
gtggaagacagtgagactacctggccagcacgagccgttgaggtttattgtggttcagtttgtaaatcgtggagggccgttacgaaagagattgttaagactcctgaacaatgtggaaggctcacatttcccatttcattgaagcagcctggtcctcgtgattctccaatacagtgttttatcaggaggaacagagaaacttcaacatatctgttgtacattggcctggtaccatcggagaacgagactgataagttgtt

SEQ ID NO: 106352 - DNA, 258 bp, Glycine max
  unsure (1)..(258): unsure at all n locations
ctcgagtcgaacgtcatctgtcaagacctatgcactcgcagatgatgaacggcgtactcaacgtacaaaagagaagnganttgaaaataagcgtagatccggggattcccgatataggtcaacctttcgaactgctgctgaatccacgggcaggcaagagacaacctggtgaactgaaacatcttagtagccagaggaaaagaaagcaaaagcgattcccgtagtagcggcgagcgaaatgggagcagcctaaaccgt

SEQ ID NO: 106353 - DNA, 260 bp, Glycine max
ccaaaaccaatcggatcgtttcctctgcggagtcagaaatccatggatccctacaagaatcggccatcaagcgccttcaattctcccttctggactactaattccggtgctcccatctggaacaacaactcatcgctgactgttggatctagaggtccaattctgctggaagattaccatctggtggagaagcttgcaaactttgacagggaacggatccccgaacgtgttgtccatgctcgtggagctagcgcaaaggg

SEQ ID NO: 106354 - DNA, 262 bp, Glycine max
caagagcatacaccgtggaattcggtagttgcaagttccctgagaacttcactggttgccaagatcttgccaaacaaaagaaagtgccattccttagtgacgatttggagcttgaatgcgaaggaaaggacaaatacaagtgcggttctaatgttttctggaaatggtgaaaggaggcaatcttttatgcccaactgcgaattattcgctttgcgatgtacctaacctgcttgaatatataccatatttttctgcattgctt

SEQ ID NO: 106355 - DNA, 171 bp, Glycine max
gagaaccaaaggatggtcctccccgatatagaagcagcaccatttttgaacgtgctaccctggagatggtgatggacttgttttgggatgacgagttccgaacgagatgggatgacatgcttgcaagctcttcaatcattgaagagtgtcccactactggtactatgaaag

SEQ ID NO: 106356 - DNA, 257 bp, Glycine max
  unsure (1)..(257): unsure at all n locations
cctggacctagtcatgaaaacagggcttatcactgggattcagtccctcacagnaggtattgcagtaggaaggacatttgcagctctcaaaaactacaaagtggatggaaataaggaaatgatggcaattgggtttatgaatgttgttggctccttcacttcctgctatgttacaacaggtgctttctctcggtcagcagttaacaacaatgcaggcgcaaaaacagctgtgtcaaatgtagttttgtctgtgacag

SEQ ID NO: 106357 - DNA, 260 bp, Glycine max
aaaaaacaactgcttgattggtgcagacgacttcaagagtggacagaccaagatgaaatctgtcttggtcgattttcttgttggtgctggaataaagcgcacctcaatcgtgagctacaaccacttgggaaacaacgccggcatgaacctgtctgcccctcaaacattcaggtccaaggagatctccaagatcaacgtggtggatgacatggtctcgagcaatgccatcctctatgagcccggcgagcatcccgatcatg

SEQ ID NO: 106358 - DNA, 258 bp, Glycine max
cgcacatgaactccttccgccagtacaagaagaccaccagccacatgagcgccgttttctcggggcagcaagtgttgccgctcgacaacgacctagtctcagagttgaaccaagacaagagtggtggggtgtacgagatcgatgtgaagctctacttcaggattaggttcaggatcggggatgtcaaaacccgtcgcttcaagcccgaggtcaaatgtgatatcagggttcccttgaggaccaatggcagcgtaactt

SEQ ID NO: 106359 - DNA, 257 bp, Glycine max
gttggaaagtggcatcatggatctcagcctcttccacagtcggacgagttactcaagggattgatacaactcgccctcacaggcatcgtcacaggagcaataagtggccttggtctggagatcatactcagacttgcatttcgcggtgtccatgttgttattgcagtaaggagtctggatagtggtatgaatgtcgtagtaacaatacttaacgaaatccctcggctaaaattgatgtcatggagttagatctaagc

SEQ ID NO: 106360 - DNA, 252 bp, Glycine max
aaaaagaagaaacagaaaagtcaagaggagccaatgtttatggcagaaccaatgagagcatcaaattcttttgttggcacggaagagtacattgctccggaaattataactggttcaggtcacacaagtgctgtggattggtgggctctaggtattctaatatatgaaatgctttatgggtatacgccattccgggggaaaacaagacaaaaaacatttgcaaatattcttcacaaggaccttaaatttccc

SEQ ID NO: 106361 - DNA, 258 bp, Glycine max
ctcgttcttcttcttttgttgttctgtgtttgtgtttgttttttctctcacctgaaaatgtcttgctgcggtggtaactgtggttgcggaagctccggcaagtgcggcaacggctgcggaggctgcaagatgtacccagacttgagctacactgagtcaacgaccaccgagaccttggtcatgggagtggccctttaagggctcaatttgagggtgctgaaatgggtgtgcccgctgagaacgatggctgcaaatgtg

SEQ ID NO: 106362 - DNA, 263 bp, Glycine max
acctcttccattaacgggtggtgcatcaggttccatctgcccagccaccgtctctctcaagaaggccacattaggcccttctgtcttcgcaaccgttagcactccttcttctccttcttcttcttctcgttcttccttcccttctctcattcaagacaggcctgtctttgctgcccctgcccccatcatcaccccaactgtgagagaggatatggcaaaggaatacgagcaagctattggagaactccagatattgttgaggg

SEQ ID NO: 106363 - DNA, 261 bp, Glycine max
cgggcttccaatggcagtgttcatatcagtggaaactccatgccagcagttaaccgtgggcactccaaagtaaatgacaatgttagtcctgttgtaatgggcaacaaaatggtcgagagggtaataaatatgcgaaaactagcacctccaatgattgaagacaaaaactctccccatagtaatctgtctggcaagtcagcttcatctccagatagctcaggttttggaagaacactttcaaagaagtccttggatatggct

SEQ ID NO: 106364 - DNA, 253 bp, Glycine max
ggcagggtgaggttgaagtcaaagagtgctgctgatggttgccttggacaagatatggttcaccccacttgggaaattcatggacgagagggacgcggcgatcagggagaagctgagcagcgtgaaggacacgtcggaggaggtgaagcagctggaggagaaggccaatgctgtcatggcggctgctcgagcggagattgcagcggcgctgaacaccatgaagaaggagacgcaggctgaggtggagcagaag

SEQ ID NO: 106365 - DNA, 256 bp, Glycine max
cggctcgagcacattttagaagaataccccctcttttgctgcatcagaggagttgtaaattaagaagatggctgcacaagctcttgtatcatcatcttctcttaccttctcagcggaggctgcaagacaaagtcttggaccaagatcactccaatctccatttggcttctccagaaaagcctcctttcttgttaaggcagctgctaccccccctgtcaagcaaggatcagacagacctttgtggtttgcatcaaag

SEQ ID NO: 106366 - DNA, 250 bp, Glycine max
tctcgagccgaatcggctcgaggaaaatgacttgaatgagcatagagcggacctgctttcgaagccagagaacatcagagaaaaaattgttgatggaaggatctcaaagaggcttggggagcttgctcttctagagcagccttttattaaggatgacagtgttttagtgaaagacttggtgaagcaaactgtagctgcactcggagagaacattaaagtgcgccgttttgttcggtttacgcttggggaa

SEQ ID NO: 106367 - DNA, 255 bp, Glycine max
gtggaactaacagcatcacgaggccatcatcacggcagctgcttctcctatggcaagccatctcaagtccaccttcactggagctcttgtagctcccaagggcctctctgcctcttcaccactccacctcctgccttctaggacgcaatttagcttcactgttagggcgctccaatcagaatatccaacctggcgagtgattcgaccagtcaacggtgatcccttcattggaagccttgaaaccccagttacatc

SEQ ID NO: 106368 - DNA, 247 bp, Glycine max
cttaatgtacaatacatatcactgagatattaagtaagattggagaaaaacatgaagatgaatgatttatagagctggagctctctcagcagatccagaaatgacagtgagcaagttgttgccaaaagggtcactgagatgttttgcaaggttctcaacaggaccttctccagtgacataagcttggaagtagaaaccaagcatggcaaacatagcaagtcttccatttttggatctgctgagagag

SEQ ID NO: 106369 - DNA, 259 bp, Glycine max
ctccgtcgccgaccgcctcgcccgcatgaaggtcgactacatgagagaaggaatgcgtacaagtgttgaagcaatcctattggtgcaagagcacaaccaccctcacatactgctcctgcaaatcggaaatgcattctgcaaacttcctggtggacggttgaagcctggagaaaatgaaatcgaaggtttgaaaagaaagctgtgcagcaaacttgctgtgaactcgccttccttcccacctaactggcaggttggagag

SEQ ID NO: 106370 - DNA, 240 bp, Glycine max
  unsure (1)..(240): unsure at all n locations
gcggggataagattagagattcactgtatngnctctgcttctgctactcgtctcaagtcatctcctgttcttgacaagtgcgggtgggtcagaggccagacccttcgccaacctctcgtgagatgtaacccttcctcagcatcagctctcaccatcaaagctgcttcctatgctgacgacgtcgtcaaaaccgccaaaacagtggcctcaccggggcgtggtattttggcgatggatgag

SEQ ID NO: 106371 - DNA, 254 bp, Glycine max
gctgccgcaccatggggctcagcactcatattgccaatctcttacacttacatagccatgatgtgttctaaaggactcaccgatgcatcaaagatagccattttgaatgcaaactacatggcaaaacgattggagaattattatcccgttcttttccgtggagtcaatggaacagttgctcatgaattcatcattgacctgagaggctttaagaatactgctggaattgagcctgaagatgttgcaaagcgcct

SEQ ID NO: 106372 - DNA, 249 bp, Glycine max
ggagattctcaacattgtgaaggaaaactttgatttcaggcctggtatgatctccatcaaccttgatctcaagaggggtggaaataacaggtttttgaagactgctgcctatggacactttggaagagaagaccctgacttcacatgggaagtggtcaaacccctcaagtgggagaaggcctaagtaattcattccactgctctatgctggaagttttttgagcgttgcccttataatatgtctaatat

SEQ ID NO: 106373 - DNA, 253 bp, Glycine max
cagaatctgatctagctgatcctgcaaacaataattatgtgcatgacgtaacaaatgttgtgtctgagttgcagtccagagttgtaacaatttcagcacaggttgaggcagagcttactgaactaccagttgaagaacgacaagaatatttgcgatctcttggtcggacgtgaaagtggtcttggcaacctaataagggcaacatatgaccttctgggtctcagaacttactttacttctggtgagaaggaga

SEQ ID NO: 106374 - DNA, 253 bp, Glycine max
ctctcttccatctccccagccaaaacctctctcatgaaggccacattacgcccttccgtcttcgcaacccttaacactccttcttcttcttcctcttcatcttccttcccctctctctttcaagacaggcctgtttttgctgcccctgcccccatcatcaccccaactgtgagagaggattttgcaaaggaatacgagaaagctattgaagaacttcagaaattgttgagggagaagagtgaactcaaagcga

SEQ ID NO: 106375 - DNA, 253 bp, Glycine max
acgtgtggtgcctctcttccatctccccatccaaatcctctctcaggtcggtacacttacgcgcttccgtcttcgcaacccttgacactgcttcttctccttcctcttcacattacttcccgtctctcattcaagacaggcctgtttttgctgcccctgcccccatcatcaccccaactgtgagagaggatatggcaaaggataccgagaaagctattgaagaacttcagaaattgttgagggagaagagtga

SEQ ID NO: 106376 - DNA, 257 bp, Glycine max
aaactgccctccttctcattaccactaacacatttggaattgttgtggagtcaatttacctttctatcttcctaatttatgccccaaggaagccaaggcttacaaccatcaagcttcttctcttactgaatgtgtttggattcggggccatgcttctatcaactctctacctgtcaaagggagcaaagcgtcttgctatcataggatggatttgccttgttttcaacatcagtgtctttgctgcacctctcttcatt

SEQ ID NO: 106377 - DNA, 275 bp, Glycine max
  unsure (1)..(275): unsure at all n locations
ctgagtcttgccattgaagtataagtcttgnccttctctcttcaactccgaacattagagatcatcatctatggctgcctcagtttccactgtcggagctgtcaacagagctcttttgaacctgaatgggtctggacctggggtttcagctcccagttcatccatctttgggagcagcttgaagaaggttattcgctcaagggtcctcaacacaacagatttcctctggaagcctcaagactgttgctgtagaagagaagttagagattgaagag

SEQ ID NO: 106378 - DNA, 252 bp, Glycine max
cttggcaagtaaatatttctgttcgtgaaggttgttgtactaatccaagtgctagaagttgtgatggaacttgcgtgtaacattcttagcattctcaatgtcttaggtgcaaagagaagatgctaagtttgagatgatcttactatatttttcatattggaccgtcttcctctataattttgagttacagtgtccacttaaattgaatttggtgccttttccttttgtcctatattcttgatttattttttt

SEQ ID NO: 106379 - DNA, 279 bp, Glycine max
ctcgagccgtgcagagtcaatgggtcttaaggtccattctcgcaattacaaggtgaggcttgaaggcgtttctgcaaacagggttggacaatttgcagtggtcttggaggtgtttgaagttgcgccatcccttttcatggttgatgttcggaaggccactggggatacttttgactaccacaagttttacaagaatttttgtggcaaactaggaaacattatttggagaccggcagggactatgccaaattctaatctgcgcaacaaatgactttataa

SEQ ID NO: 106380 - DNA, 278 bp, Glycine max
tgtgtctcagggtctgtgacacacacagactcacttcaagttcccagcttttgctatttttcccactgtttattgagaagaactgcagaacatggcacagattttggctccctctacgcaatggcagatgagaatctcaaaatcctctcccaatgcaactcccattacatcaaacatgtggagttctttattgtggaaacaaaataagaaagtttcacctaccagttctgctaaatttagagtgctggcaattaagtctgacaatagcaccatcaaca

SEQ ID NO: 106381 - DNA, 266 bp, Glycine max
gtccagattagtaccacaaaaatggagaaatagaataactgaatatcgtatagaacaaaataaagatttaaccaaatgcaattcatatgaaaaaagccaattaattctttacaaagaacaacaagtaaacgcattaaaaaaaaaaataattaaacaatatagatacgatcttttatcctataattttatcaattatgcagataagaaagactcatatatttatggatatagatccctatttcaagtaaaaaaaaaccaagtgattt

SEQ ID NO: 106382 - DNA, 268 bp, Glycine max
ggataagctcaagaatcaacaccgcgagaagcagtcgatgaaaccttaccgtggaataaggatgcggaagtgggggaagtgggtggcggagatcagagaacccaacaaaaggtcgaggatatggttgggttcttacacgacacccgtggccgccgcacgtgcctacgacaccgctgtcttttacctccggggtcccaccgcgcgccttaacttccccgaactcttgttccaggacgacgaccaggagggcagtgattcggtgcagcac

SEQ ID NO: 106383 - DNA, 273 bp, Glycine max
atgggaacaatgtggatttgggcactgcatgtggcaaatattacagagtgtgctgccttagcattattgatcctggtgattcggatatcatcaagacactgcctggcgaacagtaaagtattcttgaagttccttgcttgttattttctggttttagttgttgattcaaactttgaaagaatatcttgttgagttgtagacattggtgtaaggtgcaaggtttttgggtattccagctgagcatctagtaattttgacttcaaatttttcatg

SEQ ID NO: 106384 - DNA, 275 bp, Glycine max
  unsure (1)..(275): unsure at all n locations
acgccggatctgctaaaatacgcttgatccatatgggcctcctcgaccacttgtgggacgacaccgtcgacagnccaaggccggaaaacggtctcggcaagctccggaaacaccacaccttcactttccgacctagctccggcaaggaagcggagggcgggagcgtgagatcgtacggtgacgaatcgtcggaggccccgactagagtgaccccgccgtatcatgatcgtgaaaccgccagggtaccagagtggatcgcctccggtttctcctgc

SEQ ID NO: 106385 - DNA, 273 bp, Glycine max
gataccgtgaagccgcagacttgatcaagaagggaatgatgtgtgctctcttcatcaacgatcttgatgcaggagctggtcgtcttggtggaaccacccaatacactgtcaacaaccagatggtgaatgccaccctcatgaacattgctgataaccccaccaatgtgcagcttcctggtatgtataacaaggaagagaatccccgtgtgttcatcatcgtcaccggtaacgatttctccacactctatgcgcctctcatccgtgatgggcgta

SEQ ID NO: 106386 - DNA, 276 bp, Glycine max
  unsure (1)..(276): unsure at all n locations
ccagtctcctgtggagcttggaactcactatgcagtcatgagctcttttgagtaccttagcactggacttaaacagtataacttggataacaacatggacggtttttacattgctcctgcttttatggacaagcttgttgttcacatcaccaagaacttcatgaccctgcctatcatcaaggttcctctcattcttggtatttggggaggcaaaggtcaaggaaaatccttccaatgcgagctcgtcttcgncaagatgggaatcaaccccatcat

SEQ ID NO: 106387 - DNA, 268 bp, Glycine max
caaataagaaggagatcttttgtgatgagaagctgaagaccatttttgaggggaaagataaggttgggttcacagagattgctaaattgctgtctaaccattttgtgaaatcagtctgatattttgctttgatggtactgttaatgatggtaactggttctagtacattaataggtcattttgtcttcaagtacatggtctgtgaccaaccgctaagaaacatggaaatttgttgtatcagacttagtttttttatttttattttttt

SEQ ID NO: 106388 - DNA, 272 bp, Glycine max
atgatgatgaagtgaggaagtggatttctggtgttggtgttgacagtgttgggaagaagcttgtgaactcaaaagatggacctccaacctttgagcagcccaagatgactctggagaagctcttgctgtatggtaacatgcttgtccaagaacaagagaatgtcaagagagtccaattggctgacaagtacttgaacgaggctgctcttggaaatgctaacgaggatgctattcagaggggaactttcttccagtcttgaattggaggcaaa

SEQ ID NO: 106389 - DNA, 274 bp, Glycine max
tacaaaggttgctgtaggagataagattgcagtagtgctaagtgctaacacctgcagtgaacaatggcctctgcatcagcatctctgctcaagtcttcacttgttcttgacaagtctgagtgggtgaagggacaaacccttcgccaaccttctgcatcagttgtgagatgcaaccccaccaccccatcaggcctcaccatcagagctggttcctatgctgatgagctcgttaagaccgcgaaaacagtggcttcaccagggaggggtattttgg

SEQ ID NO: 106390 - DNA, 259 bp, Glycine max
tctatatcaggttctgagtttgttgagatgtttgttggtgttggtgcttctcgtgtacgtgatttgttcaagaaggcgatagagtatgccccttgcattgtctttgttgatgaaattgatgctgttggaagacaaagagggactggaattggtggagggaatgatgaaagagagcagaccctcaaccaacttttgacagaaatggatgggtttgagggtaacacaggtatcattgtcgttgcagcaactaacagggctg

SEQ ID NO: 106391 - DNA, 265 bp, Glycine max
cggctcgaggtagaggtctctacgtcaaagacaggcaagcatggacatgcaaagtgtcactttgttgcaattgatatttttaatgggaaaaagcttgaagatattgttccatcatcccacaactgtgatgttccacatgtgaatcgcactgactatcagcttattgatatctctgaagacggctttgtgagtctgttgactgataatggaaataccaaggatgatctgaagcttcctactgatgaggcattgcttgctcagatta

SEQ ID NO: 106392 - DNA, 267 bp, Glycine max
atgatgctcgcgattcagactctaaccataacaatcttcctattctcagtgatcgctgcctctccctttcccctctttccaaagatgctgcgatgtcgctggtgctgagtgctgcaacgggcagaggatggaccacgggttcagggatggaaggcccctctgttcctgcagttggtagggatagcgaatctgggacggggaacatctccactttcccatggtccctcttcacaaaatcccctaggagaaggatgctggtggctttta

SEQ ID NO: 106393 - DNA, 272 bp, Glycine max
ggaatcttgagaaatggcaggggacagcaagagcaagcctcctgttcattcgagggactggttacatcggaaaattcatcgtggaatccagcgccaaagctggccacccaactttccttttggtgagggagtccactctctccaaccccgcaaaatcacccctcatcgacaatttcaaaggcctcggtgtcaaccttgttctaggagatctatacgatcaccaaagtttggtgagtgctataaagcaggtcgatgtggtaatttctactgta

SEQ ID NO: 106394 - DNA, 271 bp, Glycine max
caaggcagaaagcaagctcatcctagagttttaaaaatggcagcagcctcctccatggctctctcttccccatccttggctggcaaggccgtgaagctgggcccatcagcccccgaagtcgggagggtcagcatgaggaagaccgtcaccaagcaggcctcctccggaagcccatggtacggctcagaccgcgtcaagtacttgggcccattctctggcgagcccccgtcctacctcactggcgagttcccaggtgactacggctgggaca

SEQ ID NO: 106395 - DNA, 272 bp, Glycine max
tgatagttgatagaggagaattgaagcaatggcaggatgttctttcacaacaggcactgtgagcaaggagagggcagagcagtacaaagggagagtcactgcttatgtcatcatctcttgcattgttgctgccacaggaggggctctctttggctatgatattggaatttcacgtggggctacatccatggatgagcttgcttatagagttcttcccctcagtatacagactgaaaaagcatgctcatgcagactaatactgcaagtatgac

SEQ ID NO: 106396 - DNA, 265 bp, Glycine max
accagatgcggatgtagaagaaattaaagttgcttatcggaaattgtcaaaggagtatcatcccgacacaacttccctgcctcttaaaactgcctcagaaaaattcatgaaattaagagaggtttacaacgttcttagcaatgaagagagtcgaaagttttatgattggacccttgctcaagaggctgcaagcgccacgcagagaagatgaaatgaaattagaagatcctcgccagcaacaactcaagaactgggaacctgttcc

SEQ ID NO: 106397 - DNA, 261 bp, Glycine max
atgaagcaaatattatggacaaatgaaggcaacagtgctggtgaatagagtgtaaatcttttcctcagggccattggacttagggagtactcacgctatctttgtttcaactttcctttcacccatgagaaagcacttctgggacacttaaagttttttccttggaatcctgatgctgatatctttaagaattggagacaaggtaggactggctttcctttggttgatgcacgaatcagagaactttgggcaactggctgg

SEQ ID NO: 106398 - DNA, 248 bp, Glycine max
ctcgagccgtgagtatattgacatggctgaaacacttcaccaaaattcgtgccctaggagctttcagattggatcccgctaaatggggagtgaacgtgcagcctctgtcagggtctcctgcaaatttccacgtttacactgcaatgcttacacctcatggaagaatcatggcacttgatcttcctcatggtggccatctgtctcacggatatctgactgatacctaacagatatttgccgtctcgata

SEQ ID NO: 106399 - DNA, 268 bp, Glycine max
gtggaactaacaacaacacaaggccatcatcatggcagctgcttctcctatggcaagccaatttaagtccaccttcactaaaactcttgtagctcccaagggcctctctgcctcttcaccactccacctcctgccttctaagaggcaatttagcttcactgttagggccatccaatcagaaaagccaacctatcaagtgattcaaccaatcaacggtgatcccttcattggaagccttgaaaccccagttacatccagccccttgatt

SEQ ID NO: 106400 - DNA, 266 bp, Glycine max
gaagtgagatacactaagttatcctcataaatacactctaattaggtggcaagataagtgtctaaccttagtaacattgccacatattgtgttcattttggaattgtgccactaaaattctattcaattcatctatggctgcctcttcttatgctatgcaatcaatcctggcaaaccctttgatccgcatttccagcgggtctagggtgaaccaatttggcgttcctgctttgcacatgagaaggaatgttggcctgagagttagg

SEQ ID NO: 106401 - DNA, 268 bp, Glycine max
ctttgtggtcagaaatgttgctaacattgtcccaccatatgaccacgtcaaaatacgctggaactggggcagcagttgagtatgctgttttgcatcttaaggtgtctgagattgtggtcattggacacagtgcttgtggtggtattaaggggcttctgtctttcccatatgatggaacctactctactgattttattgaggagtgggtcaaaattggcttgcctgcaaaggcaaaggtgaagacacaacatggggatgcaccttttgc

SEQ ID NO: 106402 - DNA, 273 bp, Glycine max
ctcgagctgctcgagccgcttctttctctctctaccattgccatggatcactacaagcagcggccatccagcgcattcaattctcccatctggactacaaattctggtgctcctatttggaacacataactcgtctttaagcgatggagctagaggtcaattctgcctggaggcttatcatcaccatggagaagcttgcaaattttgatagggaacgtatcccagaacgtgttgtccatgccaggggcgctagtgcaaagggtttctttgagg

SEQ ID NO: 106403 - DNA, 258 bp, Glycine max
aagcgcatgtgtgaaaagtccatgataaagaagcgatacatgcactcgacggaggagtttctgaaagagaacccgaacatgtgcgagtacatggcgccatcgctggacgtgagacaagacgtactggtgatggaggtgccgaagctgggaaaacaagccgcaacgaaagcggttaaggagtggggtcaaccaaagtcaaagatcacacaccttgtgttctgcaccacttcaggcgtggacatgcccggagcagattac

SEQ ID NO: 106404 - DNA, 261 bp, Glycine max
tgtcttgcaattgaagttgaagtctttcccttctctcttcaactccaaacacaagacatcatcatccatggctgcctccgtctccactgtcggagctgtcaacagagctcttttgaacctgaatgggtctggacctggggtttcagctcccagttcatccttctttgggagcagcttgaagatggttattggctcaagggtccccaacacaaagatttcctctggaagcttcaagattgttgctgtagaagagaagaaaga

SEQ ID NO: 106405 - DNA, 261 bp, Glycine max
caaagccaaagcaaaaggttgaagatggtatctttggcacttctggaggatttggttttactaagcagaacgagctctttgtgggtcgtgttgctatgcttggttttgcagcatcactgttgggtgaaggaataactgggaaaggaattctagcacaattgaatctggaaactggaattcccctttatgaagcggagctcttcttctgtttttcatcctcttcaccctgctaggagccattggaggtttaggtgaccgtgg

SEQ ID NO: 106406 - DNA, 264 bp, Glycine max
ggagattctcaacattgtgaaggaaaactttgatttcaggcctggtatgatctccatcaaccttgatctcaagaggggtggaaataacaggtttttgaagactgctgcctatggacactttggaagagaagaccctgacttcacatgggaagtggtcaaacccctcaagtgggagaaggcctaagtaattcattccactgctctatgctggaagttttttgagcgttgcccttataatatgtctaatatgcataactttccacg

SEQ ID NO: 106407 - DNA, 267 bp, Glycine max
tcaattcttagactttagtctccaaatgggatgttataacttgtacgaattccagatgagcttatcatgaatgccaagtacatagccacaccagggaaggggatcctggcagcagatgagagcacgggcaccatcgggaagcgcctagcgagcattaacgttgagaacattgaggccaaccgccaagcccttcgcgagcttctcttcaccgctccaaatgccctccaatacctctctggtgtcatcctctttgaggaaactctttac

SEQ ID NO: 106408 - DNA, 266 bp, Glycine max
aaaacactcataacacaaagcacaaagcaaagctcatccttgagttaaaaaaatggcagcagcttcttccatggctctctcatccccatccttggctggcaaggccgtgaagctgggcccatcagccccagaagtgggaagggtgtacatgaggaagaccgtcaccaagcaggtctcctcaggaagcccatggtacggcccagaccgagtcaagtacttgggcccattctctggcgagcccccgtcctacctaaccggtgagttcc

SEQ ID NO: 106409 - DNA, 135 bp, Glycine max
caaaaaggtaaactttttgcaacaaccatggttgcaatggcagcagcaacagcatccacccagttgattttctcaaagccttgttccccttcacgtctatgccccttccaactatgtgtctttgacactaaacaa

SEQ ID NO: 106410 - DNA, 281 bp, Glycine max
ctgttgcttccatttctgctgggaatgatgagttgattgggcaaatgattgcggaagcaattgataaggttggacctgatggtgttttgtccattgagtcttcgtcttcatttgagaccacagttgaagtggaagaaggaatggagattgacagagggtatatctcgcctcaatttgtgataaaccctgaggaagtgaatggtggaatttgagaatgcgagagtgtttatcacggatcagaagatttcagcaataaaagatattataccactgttggagaa

SEQ ID NO: 106411 - DNA, 266 bp, Glycine max
cggcaaaccaagtggtggctatggcgccgctggtggtggtggtgtgtaccctgacactaccactgatggtgggtacagcaaaacaagtggtggtgggtatgatgatgaggttgactataagaaggaagagaagcaccacaagcatcttgagcaccttggtgagttaggtgctgcatctgctgctgcttacgccttgcatgagaagcacaaggcagagaaagacccagagcatgctcacaggcacaagatagaagaggaggttgcag

SEQ ID NO: 106412 - DNA, 287 bp, Glycine max
cgtggaactaacaacaacacaaggccatcatcatggcagctgcttctcctatggcaagccaactcaagtccaccttcactaaaactcttgtagctcccaagggcctctctgcctcttcaccactccacctcctgccttctaagaggcaatttagcttcactgttagggccatccaatcagaaaagccaacctatcaagtgattcaaccaatcaacggtgatcccttcattggaagccttgaaaccccagttacatccagccccttgattgcatggtacttatcgaac

SEQ ID NO: 106413 - DNA, 281 bp, Glycine max
ggcttatggtggatacctaggcacccagagacgaggaagggcgtagtaagcgacgaaatgcttcggggagttgaaaataagcgtagatccggggattcccgatataggtcaacctttcgaactgctgctgaatccacgggcaggcaagagacaacctggtgaactgaaacatcttagtagccagaggaaaagaaagcaaaagcgattcccgtagtagcggcgagcgaaatgggagcagcctaaaccgtgaaaacggggttgtgggagagctatacaagtgt

SEQ ID NO: 106414 - DNA, 272 bp, Glycine max
gtctcaaacctcttcgttccttcgattcattccatttcttccaaaatggccaaagacccagttcgcgttctcgtcactggagccgcaggcaaattggatatgctcttgtccctatgattgctaggggagtgatgctgggtcctgaccagcccgtgatcctccacatgcttgacattcctccagcagcagagtacatgaatggggttaaaatggaattggtggatgctgcattccctcttcttaaaggtgttgttgctacaaccgatgtggtt

SEQ ID NO: 106415 - DNA, 268 bp, Glycine max
acttcacaccctcttcaacatcctcagcaagtacaagaacaagaatgaacattgtcttgctccaatctcacaatgttggtgtcctcaatacctttcctttccgatccctctcatctctccttccgctctgtcctcaacccttttcagctcccttcacaaaacccaacttcatgcactccttcacgctcctcaaccacccaaattcagtgtggtctgagagaactcagaacccgcattgattccgtgaagaacactcagaaaatcaccg

SEQ ID NO: 106416 - DNA, 257 bp, Glycine max
caatttttcggcctcaagttatctcattcttctgtttcatctatcccttcatcttcttcactcaaaggcaccattttcgccaaggtgaataaaggttcaaagccaccgaattttacgctgaaagatcagaatgggaagaatgtgagcctctccaacttcaaaggaaaaccagtaattgtgtatttctaccctgctgatgagacccctggctgtaccaaacaggcttgcgctttcagggattcatacgagaagttcaa

SEQ ID NO: 106417 - DNA, 268 bp, Glycine max
gatttcgagagaagaaccctgccactgcagttgcatcccccgtggttgttccaccaaggcctcgaagatacaatccttgttaggcatggagagagtgaaggaaacgtggatgagagcgtgtacacaagaatacctgatccaaagatatccctcactgagaaaggaaaggtccaagcagaggaatgtggcaacaggataaagcaaatgatagaaaatgaccatgaccaacattggcaggtttacttctacgtctctccatatagaagga

SEQ ID NO: 106418 - DNA, 273 bp, Glycine max
aggactcgaagtattggcggttgtttgccacgttataaatgcgcaacaaagttagaatttgatagacaaaactttacagaagtatggaaagatagatgttgttgtatccaatgctgccgtttatccttctgtagatcccattttgcaaacacaagaatcgatccttgacaagctgtgggagataaatgtcaaatccactatacttcttctcaaggatgcagctcctcacttgaagaagggttcttctgttgttctcattgcctcacttgttgc

SEQ ID NO: 106419 - DNA, 284 bp, Glycine max
tcgatcctggctcaggatgaacgctggcggcatgccttacacatgcaagtcggacgggaagtggtgtttccagtggcggacgggtgagtaacgcgtaagaacctacccttgggaggggaacaacagctggaaacggctgctaataccccgtagctgaggagcaaaaggaggaatccgcccgaggaggggctcgcgtctgattagctagttggtgaggcaatagcttaccaaggcgatgatcagtagctggtccgagaggatgatcagccacactgggactgaga

SEQ ID NO: 106420 - DNA, 277 bp, Glycine max
caggaggagtcatgactgtgttgattcccagaaacacaaccattcccaccaagaaggagcaggtgttctcaacctactctgacaaccagcccggtgtgttgattcaggtctatgaaggtgaacgaacgaggactcgtgacaacaatttgcttggcaaatttgagttatctggaattcctcctgctcccagaggtgttcctcagatcactgtttgcttcgacattgatgccaacggtatattgaacgtgtctgcggaggacaaaaccactggacagaa

SEQ ID NO: 106421 - DNA, 265 bp, Glycine max
ggaaatggcttcctcaatgatctcctccccagctgttaccaccgtcaaccgtgccggtgccggcatggttgcgccattcaccggcctcaaatccatggctggcttccccacgaggaagaccaacaatgacataacctccattgctagcaacggtggaagagtacaacgcatgcaggtgtggccaccaattggcaagaagaagttcgagactctttcctacttgccagacctcgatgatgcccaattggcaaaggaagtcgaatac

SEQ ID NO: 106422 - DNA, 261 bp, Glycine max
cgaagtattgtggtgcaaacaaacaataaaccctaattctcgaatatcagatcggcgatcggaggaagaatctgacgttgggcgaagatggttctcgcggagttacgatggagcacttcgcgtgctcttcagtagatgagcaatgcgacgatcatcgacgagaaagtcctcaacgattgcctcaacgacatcacgcgcgcgcttctccaatccgatgttcagttcaagctcaaccgcgacatgcagaccaacatcaagaac

SEQ ID NO: 106423 - DNA, 267 bp, Glycine max
ccttttgtttgctcttcaaatcagtgcaagagacagccagttcttcagaaaagtcacccattttgacaaaaacagtgtcaaagagacagaacttcccaacatagaagcaccagaagtgaacaagccagagcaacaaccacctttcattccggagactgaaaacagctatggcctatatggtcatcatgatgagtataaccaagtcccttccaccaccaccaaccccacttcttaccacccctacaagaccgagtttgagaactccaa

SEQ ID NO: 106424 - DNA, 265 bp, Glycine max
gggaaagagaagccacttccaatttcacacacgctcagatatgaactgcactgtgtggaaagtaagcatggcaagagtggtggacctccaacagtaccaactatctttctctcccttagcttcctctctttttgacttcagtggaaccagacttcaaactcaacttcagttcaagagaaaactatgccatccaaaagggtctttctacgtctcggcatcgagcaccaagaaaatcctaataatgggaggcaccaggtttattggt

SEQ ID NO: 106425 - DNA, 283 bp, Glycine max
tgccactacaactatttgttgtttatccagtagagcagatattagaagatggcagacgctgatgatattcaaccccttgtttgcgtcaatggaacaggaatggttaaggcaggatttgcaggagatgatgccacacgtgctgtgtttcctagcattgttggtcgtcctcgtcacactggtgtgatggttggtatgggccagaaagatgcatatgttggtgatgaagcacagtctaaacgtggtattctgactctcaagtatccgattgagcatggtattgtta

SEQ ID NO: 106426 - DNA, 254 bp, Glycine max
ggcctcgtgtctatataggttgcatgaaatcgggcgaggtgttctctgacttaacccacaagtggtacgaatcagactggtggaaaagtggtgatgggaaatcgtactttcgacacgcttctggtgaaatgtttgtcatatccagggccatagctcagttcatttctataaacaagtccgctctccggacatatgcccatgatgatgttagtgttggatcgtggatgattggccttgccgtgaatcatgtaaat

SEQ ID NO: 106427 - DNA, 275 bp, Glycine max
tcagttcgaattttatgaccccaagattcccatttacacatctccaggattcttaccaccaacaaagattgacaaatgccggattgtggatgctattatctcccatggatgtttcctgcgggaatgcacagttcaacactccattgtgggtgaacgttcacgcttggattatggcgttgaggtcctggacactgtaatgatgggagcagactattaccaaactgaatccgaaattgcttctctgctggcagaggggaaggtcccaattggtattg

SEQ ID NO: 106428 - DNA, 272 bp, Glycine max
cctcaccatcataatcaccatccctttccttattcttcttctgtttcatccctctcaccattttctcgctctcgtttcttttcctctactcctttctccatggcttctgattcccctttccctgtcaccgctcaaaacatcaaccccaaggttctgaaatgtgagtatgctgttagaggagaggttgtcacacttgcccagaatttgcaaaaggatttacaggccaatccaggttctcacccatttgatgagatactttactgcaacattgg

SEQ ID NO: 106429 - DNA, 266 bp, Glycine max
caacaccacagggcactcccctccccctaattctgttgggaaagtccaagaatgcactactctccactttcttgtttcttgatcaatttgtgtggcttggcagaacaggcatctaccaggttggaaataataatttttttctttagcatcatgtttgtttctgtattattatattgaaataccatatagtggtacaagagttttgtgtttaattacagaataaagagcgcactgaactaattggccggatatctctttactgttgg

SEQ ID NO: 106430 - DNA, 261 bp, Glycine max
gtcagatatagcctgttttccacaagaaggcaaaaacaacaaagaagattgtgctaaagctgcagtgccagagctgcaagcactaatataaacacccgatcaagaggtgcaagcactttgagatcggtggtgacaagaaaggcaagggaacctctctgttctaagcgtatcataaacttgctcagggtctcaagtatctgtcagaatttaccattacaaacaccctgtgcttagcttctgcatatgttcttttgtcacatc

SEQ ID NO: 106431 - DNA, 261 bp, Glycine max
attaaccagagggagaaacatactctttatcctgttgaaattactgatgttccttctgatacaaaggacaaagatgatattcttgagagcgaattctttgacactagacaggcatttctgagtctctgccagggaaatcattaccagtatgatacactaagacgggccaagcattcctcaatgatggttctctatcatcttcataatccaacggctccagcatttgtgacaacttgcaatatatgttatcttgacatagaa

SEQ ID NO: 106432 - DNA, 265 bp, Glycine max
gtggcaccactgtcaacgttggtggaaaaggaagcggaagcgtaaacctgcaattcaggcactaagggaaacccagtgcaatgtatctagttggctcaaagtctccatttgattacgtctacgccgccacggaaactcaattacacgatgaccccaacgtggcactcttcttcttggaaaaggacttgcattctggaacaaagttggacttgcacttcaccaggagtacatctaatcaagccacgttcttgtcacgccaagttgc

SEQ ID NO: 106433 - DNA, 272 bp, Glycine max
  unsure (1)..(272): unsure at all n locations
ctatctagcactcgagatatactccagagatcactggagccaaagtgtccgtagcctgacgctgaatgtccgcaagatcttctctgatcgggattctgcattttttgagaggangcgatcagaggttcagtgacgaggagctcaagcaggaggaatctgattcgaagcgagaagccctatggatgcgcttggaggaaatggccgcctcaaaacctcgcgaaaacagtcccttaggcgcaccgaatggcaaacccagccaagctgctggctag

SEQ ID NO: 106434 - DNA, 271 bp, Glycine max
tgcgataatgggacaggaatggttaaggctggttttgctggagatgatgctccgaaggcagtgtttccaagcattgttggtcggccacgtcacaccggtgtgatggttgggatggggcaaaaggatgcatatgttggggatgaggctcagtccaagcgtggtatactaactctgaaatatcccattgagcatggtattgtcagtaactgggatgacatggagaaaatctggcatcacactttctacaatgaactccgtgtggcgccagagg

SEQ ID NO: 106435 - DNA, 269 bp, Glycine max
caaacctgtggcttccatctctcaaaagctcaacaaccacatgccatggcaacagcgtcaatgtgtatgagcttcaacctggcaacagcattcaagggtctctctttatcttcttcttcatcgttcttcggtggaagtagtggttctctccgcgcgggtcctgcctcggtggtgtcgctgccccggcgctgcccgctgaccatagagaacgcgcacaagaagggggcgggcagcaccaagaacggccgcgactcgcagggcaagcgcct

SEQ ID NO: 106436 - DNA, 267 bp, Glycine max
attaattattgccctttcagttcgccatcggcagccgagcaccatgagctccacaggcggcgacgatggcgccaagaagtcttggccggaagtggtcgggctcagcctggaagaagccaagagggtgaagatgtgcgacaagcccgacgacgacatctgagtgctgcccgtcggcacgccggtgaccatggatttccgccccaaccgcgttcgcatcttcgtcgacaccgtcgcggaggcaccccacatcggctgagaatcaaatct

SEQ ID NO: 106437 - DNA, 264 bp, Glycine max
gtggaactaacaacaacacaaggccatcatcatggcagctgctcctcctatgggaagccaactcaagtccaccttcactaaaactcttgtagctcccaagggcctctctgcctcttcaccactccacctcctgccttctaagaggcaatttagcttcactgttagggccatccaatcagaaaagccaacctatcaagtgattcaaccaatcaacggtgatcccttcattggaagccttgaaaccccagttacatccagcccctt

SEQ ID NO: 106438 - DNA, 261 bp, Glycine max
agcgcgtgcaggagccaatcagcgtattgcaagaatctcaggtaccaatcaggctccaaatttccaaggaaggagtgatgttcttcttaagagtgctgagtgcagagcaaagggtggggcacctggattcaaagttgcaattttgggggctgctgggggaattggtcaacccctttctttgctgatgaagatgaacccattggtttcagttcttcatctttatgatgttgtcaacacccctggtgtcactgctgatgttag

SEQ ID NO: 106439 - DNA, 256 bp, Glycine max
cccaatgtttcagttgttgaccttgttgtgaatgttgagaagaagggtcttactgctgaagatgtgaatgcagcattcagaaaggcagctgagggggcgctcaaaggtgtattggacgtgtgtgatgttccacttgtgtctatcgacttccgctgctctgatgtttcctctactattgactcctccttgactatggtcatgggagatgatatggttaaagtggttgcttggtatgacaatgaatggggttacagcc

SEQ ID NO: 106440 - DNA, 279 bp, Glycine max
ctcgagcattagcctccaagcccttattaccaacccaaacccctaaacaccacaccccattttgatttcagtttccatgggtagcctcaaggtgcatttttggctgcagtgctctgcatggttgtggtgagtgcacccatggcacatgcagctatcacgtgcgggcaggtgacgaatagcctgatcaattgcatcggttacctccagaacggaggaacgccgccgtcgggatgctgcaacggagtgaagagcctcaatgccgccgccaagaccaccgcc

SEQ ID NO: 106441 - DNA, 117 bp, Glycine max
cgattgctagaatggaatttcgatgctcagtcatctcttttaccattctcttctctctgctctgcaggagagagcatgtccatgcatcctactgggagattatggactgtgcacact

SEQ ID NO: 106442 - DNA, 270 bp, Glycine max
ctcgagcgtgaagttaaaagccttagccttccctacaactctaaacagaaagatatcatcatccatggctgcatcggtctccactgtcggagctgtcaacagagctcttttgaacctgaatggttctggagctggagctgacagctcccagttcagccttctttgggaccagcttgaagaaggttattgcctcaagggtccccaacagcaaggtttccggtggaagcttcaagattgttgctgtagaagagaagaaagagattgaagaga

SEQ ID NO: 106443 - DNA, 261 bp, Glycine max
gtcaacaaccagatggtgaatgccaccctcatgaacattgctgataaccccaccaatgtgcagcttcctggtatgtataacaaggaagagaatccccgtgtgcccatcatcgtcaccggtaacgatttctccacactctatgcgcctctcatccgtgatgggcgtatggagaagttctactgggcaccaacaagggatgaccgcattggtgtctgcactggaatttttcgcaccgattcaattcctgaacaggacgttgtc

SEQ ID NO: 106444 - DNA, 261 bp, Glycine max
  unsure (1)..(261): unsure at all n locations
caagcagatcaatctctctctcactctcaaccataatagtcatgggtttgaaggaggattttgagcagtatgctgagaaagcaaagactttgccaccgactcaatcaaacgcagacttgcttatcctttatggattgtacaaacaggccaccgttggacctgtccacaccagccgtcctggaatgttcaacatgagggacagagctanatgggatgcatggaaggctgttgaaggganatccaaggacgaagcaatgggtg

SEQ ID NO: 106445 - DNA, 261 bp, Glycine max
  unsure (1)..(261): unsure at all n locations
caacaagaagaagaagaagaaacaatgtcttactccaatctgacaatgttcgtgtcctcaaaaccttccctttccgacctacatcanctctccttccgctctgtcctgaacccttttcagctccctacacaaaacccagcttcatgcaccccttcacgttcctcaagcacccaaattcagtgtggtctgagagaactgagaacccgcattgagtctgtgaacgaacacgcaganaatcacggaggcaatgaagcttgttgc

SEQ ID NO: 106446 - DNA, 262 bp, Glycine max
caagcagatcaatctctctctctctctcaaccacaatagtcatgggtttgaagtaggattttgagcagtatgctgagaaagcaaagactttgccaccgacccaatcaaacgaagacttgcttatcctttatggattgtacaaacaggccaccgttggacctgtcaacaccagccgtcctggaatgttcaacatgagggacagagctaaatgggatgcatggaaggctgttgaagggccatccaaggacgaagcaatgggtga

SEQ ID NO: 106447 - DNA, 266 bp, Glycine max
ggcatatcttcatcttgtggacttagatctagctgagatggatattaagaaagcccttgagattgagccaaacaacagggatgtgaagatgtagtacaaaattttgaagcagaaggtgagagaacacaacaagaaggacgcacagttttacggcagcatatttgcaaaaatgaataaactagaacaagcaagatcagcaacagcaaagcaggagccggtgccaatgactattgacagcaaagcttaaatttaaatttgagagatat

SEQ ID NO: 106448 - DNA, 274 bp, Glycine max
tttgaacatgtgtaaccgacagtctgcctgggccacagccctctcaccctggtactgcatgcacgcaatgctagctgcccctttcccgtcctgggcaccccgagtctcccccgatcccgggttccaggtatgctcccacctccacctgccccactcaccacctctgctagttccagacacctccacgcccacctggtcctctcccatcgcccacaaaagggggggcacgagggacgagcttagctgagctgggaggagcagggtgagggtgggc

SEQ ID NO: 106449 - DNA, 248 bp, Glycine max
  unsure (1)..(248): unsure at all n locations
ccaaaattcacaaaagctgaatctgaaggtctaaaaaattccatagattttcttggtgtgaattactacaccacttattatgcggaacatgctgaacctgtcagtgccaaccgaaccttctacacagacatactatttagtctcagtacggaaaggaatggtctacatgttggatccccgactgatttgaattggctctttatctttccatagggaattcactctanggggggacacataaaggataa

SEQ ID NO: 106450 - DNA, 257 bp, Glycine max
ctgcttcaagctctgtccccttcttccacatccacactcccctctcaggtttttgtggataagattgagctataatggctgccaggagaccgggtttgattgctttgtttgatgttgatggaactcttacagctcccaggaaggtggtcacaccggagatgttgacattcatgcaagaactgcggaaggttgtaactgttggagttgttgggggttctgaccttataaagatatcagagcaacttggcagcacagtt

SEQ ID NO: 106451 - DNA, 257 bp, Glycine max
aaggagcgttctggattcgagggtccctggacctctaatcctcttattttcgacaactcatacttcaaggagttgttgagtggtgagaaagaaggcctccttcagctaccttctgactaggcacttttgtctgaccctgtgttccgccctcttgttgagaaatatgcatcggacgaagatgccttcttcgctgattacgctgaggctcaccaaaagctttctgagcttgggtttgctgaagcctaagcaacgttttg

SEQ ID NO: 106452 - DNA, 253 bp, Glycine max
cccaagtctctcgaagcatctttctttctcttcctgcagaagctatccgtgttacttgttcccaagtctccaacaagcaaagtacatggttgatttggaaatccaggtccccagcgcattcgacccgtttgccgaggcgagagaatcagatgcccccggggcaaaggagtatgtgcacatacgaattcagcagaggaatggaaagaagagtctgacaacagtgcaagggctgaagaaggagttcagctacgag

SEQ ID NO: 106453 - DNA, 254 bp, Glycine max
atctttcaagtaacttaaggtttcaaacctaggaagttggaagtcatggcagcaacattgatggcagcaacaacaagttctggtactcttaaagcaactcctttccttggccaacgcaagggtgccaatgccaatgctcttagggatgttgtctccatgggaactgggaagtacaccatgggcaatgatttgtggtatggaccagacatggtgaaatacttgggacccttctcagctcagaccccttcatactt

SEQ ID NO: 106454 - DNA, 259 bp, Glycine max
  unsure (1)..(259): unsure at all n locations
cctggaggcccgtggcaatttattggccgattgtctcactttgacccactcangcatgatagtgcagaaacaatacggagggcactaaaccttggagtcaatgtcaaaatgattacaggggatcagctagctataggccaggagacaggtcgtcgcttgggaatcggtaccaacatgtatccttcatcagctttacttgggcaggccaaggatgaatccattgttgccttgccaattgatgaactaatagagaaggctg

SEQ ID NO: 106455 - DNA, 255 bp, Glycine max
tccaattgagattttaaaaatgattgggataaacttaagaattcaattattgaaattgaataagtaatcaatttaattggattggtcgaatagtattaaaaaaatggagtactaactcccatttcttatttattattgaattaaccgatcaacttgctttgttatcgaacatttctttttgatttcaaaaattttccggaaaaaattggaatctatttttatatgcgaatcaatcctactacttctggtcctgag

SEQ ID NO: 106456 - DNA, 254 bp, Glycine max
ggagtttgtaacatggctgctctaccaacggcggagcttagtgacgcaaatgcaacacatgtagcaagttgtgatgtgagggtgttgcatccagtgttcaaggtttacgttggggccactgcgttctccggccccgttgtcaccgtgaaggtgtttgaagacaacgtgttggtgagggagcttcttgagacgaaaggcgaaggaagagtattggttgttgatggaggaggaagcttgaggtgtgcattggtggg

SEQ ID NO: 106457 - DNA, 244 bp, Glycine max
cacacactttgcctactctagtgtctgattcataggcccaagagcaaagaaactaagaagattttgagcacaatggcatccacacaatgcttcttataccaccatgccctcaccactccaaccagagcttcatcacagcgcttagttgtgagcaccaaaccaaaccacattgtttgcaaggcacaaaagagtgttgtccaagagggtgaggacactactaacattgtctctcgcaggttggccc

SEQ ID NO: 106458 - DNA, 237 bp, Glycine max
ataaaaaaaaaaaaagattctatataaatataaaaataatatatataaggtacaaatagtaaatcgaggtacccattttatgataaactttccttccatttttgttcctctagtaggcctaggatttccggcaatttcaatggctcctttatttcttcaggttcaaaaaaacaagattttttagatacggaatctcaaataaaattctggggtttttaatcccccaattataatact

SEQ ID NO: 106459 - DNA, 247 bp, Glycine max
  unsure (1)..(247): unsure at all n locations
gttaaaagccttagccttccctacaactccaaacataaagacatatacanccanggctgcctccggctccactgtcggagctgtcaacatagctcttttgaacctgaatggttctggagctggagcttcagctcccagttcagccttctttgggaccagcttgaagaaggttattgcctcaagggttaccaacagcaaggtttccggtggaagcttcaagattgttgctgtagaagagaagaaagag

SEQ ID NO: 106460 - DNA, 249 bp, Glycine max
ctcgagccgttcgagaagaggctggaaatatcctttttccagccggcactatttgctgaccctgaggtcatgggtttaagagctcttgcaaagtcccagttggatgagatacttacacacgctgcttgcaccattgtttcatctctcagaaatgatcatgtcgactcctatgttctgtctgagtccagtctctttgtttatgcctacaagatcatcatcaaaacctgtggtactacaaagctactgctt

SEQ ID NO: 106461 - DNA, 259 bp, Glycine max
gctcgagctcgaccgcaaaatcaaccaagctgttttccctggactgcaaggtggccctcacaaccacactattactggtttagctgttgcgttgaagcaggccactactcccgaatatagagcatatcaagagcaagttctcagcaacagctttaaatttgcacaggctctgagtgagagaagctatgagcttgtctctggtggaaccgagaatcacctggttttggtgaatctgaagaataagggtattgatggctcc

SEQ ID NO: 106462 - DNA, 174 bp, Glycine max
caagaatgtaatgaagtatatcacatctgagattcaagttatggatgataagaatgtcaggcgacgatttcgagcctcaaatttgcaagctgtcactcgggtaaagccctatatgtgcactatggcactgagaatggatgatgggtggtatccaatccacaggtcaacctggct

SEQ ID NO: 106463 - DNA, 252 bp, Glycine max
cctaatatcaccaccgtcaccgacgctcaagccaaggccgccggcgggcgtggccgtgcctacgtcaccttcctcgtcggaaacggtgactatgtgaaaggtgtcgttggcttggccaaaggtctgaggaaggtgaaaagcatgtaccctctggtggttgcagtgttacccgatgttccagaacatcaccgaaacattctcacctcccaaggttgcattgttagagaaattgaacccgtgtaccctcctgag

SEQ ID NO: 106464 - DNA, 242 bp, Glycine max
tgtaaattaagagcatggctgcacaagctcttgtatcatcatcttctcttaccttctcagcggaggctgcaagacaaagtcttggaccaagatcactccaatctccatttggcttctccagaaaagcctcctttcttgttaaggcagctgctaccccccctgtcaagcaaggatcagacagacctttgtggtttgcatcagagcaaagtctttcttacttggatggcagccttccgggtgac

SEQ ID NO: 106465 - DNA, 223 bp, Glycine max
ccaatcttgaattggaggcaaagcaaacttggcaagtaaatatttctgttcctgaaggttgtgctgatccaagtgctagaagttgtgatgggacttgcgtgtaacattcttagaattctcaatgtcttaggtgcaaagagaagatgccaagtttgagatgattttactatatttttcatattggactgtcttcctctataattttgagttaaagtgtccactt

SEQ ID NO: 106466 - DNA, 245 bp, Glycine max
aaagactttgccaccgactcaatcaaacgaagacttgcttatcctttatggattgtacaagcaggccaccgttggacctgtcaacaccagccgtccgggaatgttcaacatgagggacagagctaaatgggatgcatggaaggctgttgaagggaaatccaaggacgaagcaatgagtgattacatcaataaggtgaaagagctgctggaagcaccggcatgcctgcttgataacattgtcatgc

SEQ ID NO: 106467 - DNA, 244 bp, Glycine max
ggcttcattgcaatacagagatgtttgtagcagtagaagggtagtttccatcagagctcaagtcaccactgaggctccagccaaggttgaaaaagagtccaagaaacaggatgaaggtgtggttgtgaacaagttcaaacccaagaccccttacgttggtagatgcctgctcaacacaaagatcactggggatgatgctccaggagaaacttggcacatggtcttcagcaccgagggagagatt

SEQ ID NO: 106468 - DNA, 247 bp, Glycine max
ccctgccaaccttccttggaaggatttggggatagacttggtgattgaaggaactggggtgtttgtagacagagaaggtgcagggaaacacattcaagcaggagctaagaaggtgctcattactgctcctggtaaaggagacatccccacatatgtggttggtgtcaatgagtatgattacagccctgatgaacccatcatcagcaatgcatcttgcaccactaactgccttgcaccctttgtcaag

SEQ ID NO: 106469 - DNA, 248 bp, Glycine max
aagggacaaggaaaatctttccaatgtgagcttgtgcttaccaagatgggaatcaaccccatcatgatgagtgctggagagttggaaagtggaaatgcaggagagccagcaaaactgatcaggcagagataccgtgaagctgcagacatgatcaagaagggaaagatgtgcgctctcttcatcaacgatcttgatgcaggagctggtcgtcttggtggaaccacacaatacactgtgaacaaccagat

SEQ ID NO: 106470 - DNA, 251 bp, Glycine max
tgggaatcaaccccatcatgatgagtgctggagagttggtaagtggaaatgcaggagagccagcaaaactgatcaggcagagatatcgtgaagctgcagacatgatcaagaagggaaagatgtgcgctctcttcatcaacgatcttgatgcaggagctggtcgtcttggtggaaccacacaatacactgtgaacaaccagatggtgaatgccactctcatgaacattgctgataaccccaccaatgtgcag

SEQ ID NO: 106471 - DNA, 250 bp, Glycine max
ctcgagccgcgccaagaaccgtgaactcgaagtgatccactccaggtgggccatgctcggacccttgggctgcgtcttcccggagttgctgtcccgcaacggggtgaagttcggagaagccgtgtggttcaaggccgggtcccagatcttcagcgagggtgggctcgactacttgggcaacccaggcctgatccacgcccagagcatcctcgccatctgggccacacaagttatcctaatgggtgccgtt

SEQ ID NO: 106472 - DNA, 247 bp, Glycine max
gttggattcaatgttaagaatgttgctgttaaggatctcaagcgtggttatgttgcctcgaactcaaaggatgatcctgccaaggaggctgctaacttcactgcccaggttatcatcatgtaccatcctggtcagattggaaatggctatgcccctgttcttgactgccacacttcccacattgctgtcaagtttgctgaactcatgaccaagattgacaggcgatctggcaaagagcttgagaagg

SEQ ID NO: 106473 - DNA, 242 bp, Glycine max
attgtgtgaccctgataatccaatcgtgctcgagcggatggacttccctaatcctgttattaaggttgcaattgaaccgaaaactaaagctgatgttgacaagatggcaactggtttaatcaaacttgcacaggaagacccttctttccacttctgccgtgatgaagagataaaccagacagtaattgaaggaatgggagaattacatcttgaaatcattgttgatcggctcaaaagagaat

SEQ ID NO: 106474 - DNA, 247 bp, Glycine max
attcaaacatttttaaatggaccgctcttatcaagggaccctctgagactccttttgagggtggtgtgtttcagcttgccttttctgttccggagcagtatcctctacagccacctcaagtccggtttttgactaaaatatttcaccctaatgtgcattttaagactggagagatttgcctagatatcttgaaaaatgcttggagcccggcttggacgcttcaatctgtctgtagggctataattgc

SEQ ID NO: 106475 - DNA, 243 bp, Glycine max
cgagaataatgatcacaagcctgttacgagcagtagtggacgatttggaacatcctgtcaaatggcacattataaaggatgttccaaatcctcaactacggcatataatactcgagaataatgatcacaagcctgttacaagcagtagagacacacaagaggtgagttttccccaaggtgttgaaatgctcaacatttttaagaattatgtggctagaacttccatattggatgactttgaat

SEQ ID NO: 106476 - DNA, 241 bp, Glycine max
cttaatgtacaatacatatcactgagatattaagtaagattcgtgacaaacatgatgatgaatgatttatttatttttatctctcttagcagatccagattttatagttagctagttgttgccaaattgttcactgatatgtttttctaggttctcaacaggaccttctccagttacataagcttggaagtagaaaccaagcatggcaaacatagcaagtcttccatttttggatctgctg

SEQ ID NO: 106477 - DNA, 243 bp, Glycine max
cactcttattgttttcttcatatcttccttgtcactgcccgtgtgtcgccgccatggccaccgtcaccacccaagcctccgccgcaattttccggccatgtacctcgaaatcgaggtttttgaccggctcttccggtaaacttaaccgggaagtgactatgcggccaatggggtgccctccttctgcctctttcaaggttgaagccaagaagggagagtggttacctggcttggcctccccaa

SEQ ID NO: 106478 - DNA, 247 bp, Glycine max
acaaggcagaaagcaagctcatcctagagttttaaaaatggcagcagcctcctccatggctctctcttccccatccttggctggcaaggccgtgaagctgggcccatcagcccccgaagtcgggagggtcagcatgaggaagaccgtcaccaagcaggcctcctccggaagcccatggtacggcccagaccgcgtcaataacttgggcccattctctggcgagcccccgtcctacctcactggcgag

SEQ ID NO: 106479 - DNA, 274 bp, Glycine max
actctagcaaattcggctcgcacgagaaactgtaaagcaattagcactccaggaaggcttgctggtgggaatttcttcaggagctgcagctgcagctgctttagaaggttggaaagaggcctgagaatgcaggaaagcttattggggttgtcttcccaagctttggtgaaagatatttgtcaactattcttttccagtcaatacgggaagaatgcgagaaaatgcaacctgagccatgaattgactttgcttgttaatgtttcatactcatttt

SEQ ID NO: 106480 - DNA, 246 bp, Glycine max
  unsure (1)..(246): unsure at all n locations
attgaagctaaaagccttagcctaccctacaactcaatacataaagacatcctcanccatggctgcctccgactccactgtcggagcactcagcagagcacttttgaacctgaatggttctcgagctggagcttcagctcccagttcagccttctctgggaccagcttgaagaaggtgattacctcaagtgnacccatctgcaagcgctccggtggaagcctcaagattgttgctgtagaagagaa

SEQ ID NO: 106481 - DNA, 237 bp, Glycine max
caactagtaacaaagatccaacaagcagatcaatctctctctctgtctcccaatcaaaacagacatgggtttgaaggaggattttgagcagtatgctgagaatgcaacgactttgccaccgactcaatcaaacgaagacttgcttatcctttatggattgtacaagcaggccaccgttggacctgtcaacaccagccgtccgggaatgttcaacatgagggacagagctaaatggga

SEQ ID NO: 106482 - DNA, 241 bp, Glycine max
gtgctttgacattgatgccaatggtattttgaacgtctctgccgaagataagaccactggccagaaaaataagatcactatcaccaatgacaatggtagacataaaaaggaagatatcgagaagatggttcaagaggctgagaagtacaaatctgaggatgaagagcacaaaaagaaggatgaggccaagaatgttgtggaaaactatgcatacaacatgaggaacactgtgaaggatgac

SEQ ID NO: 106483 - DNA, 275 bp, Glycine max
gcttcaactctgcttcccctggcaaccttcttcttagttctctccgcttcttatctccagattgctggggcgaaagcacaaccgttgactagtctcaagcttaactctccgatccttcaggagtctattgctaaagagatcaatgaaaatcctgaggcaggatgggaggctgctataaatcctcatttctccaattatacagttgaacaatttaagcgccttcttggagtcaaaccaacgcctaagaaggaactgagaagtacacctgctatatc

SEQ ID NO: 106484 - DNA, 264 bp, Glycine max
aagcatttgtagccgccaccccactttgtttgtttgtacttaaactacattcccatttgtttttgctttttgagatttcatcatcctgtatttttggtttctgttttcggacttcaatggaaattaatggatgagaactaatgaataaaaaaaaaaaaaaaaaaaaaaaaaaaaaaaagggggggcccccgaaaaataaccccttcacccgggaaattaattccggccgggaacttaggggggtacaattttccccaaagggga

SEQ ID NO: 106485 - DNA, 243 bp, Glycine max
gaagagaacgattctgtcagttgaagacatcattgcgttgattggtgataagtgtgatggagtcattggacagctgactgaagactggggagaacaattgttcttcactttgatcaaagccggatgcaaagcttttagtaacatggctgttggttataacaacgtggatgttgatgctgcagacaagtatggtgttgctgtttcaaatactgctggagtgctcactgagacaacagctgagtt

SEQ ID NO: 106486 - DNA, 266 bp, Glycine max
ggtagtgtagagttggatttgagaggttctgccctcagttctccgccacgctctgtgctcctggtggaccatgtgttgcatgtagcacgaccatctgtgtcagactgggacgctgctttctcgaactacctttgtccatctggtatggcggtactcagagtgcacggatcgacttattgaattcaggtccaggctggtgagccggtgaatatgtgacgagagctttcagtcaccccactaggtgttgccacctagcgcgtgtatga

SEQ ID NO: 106487 - DNA, 276 bp, Glycine max
gaaagatggaggtctcccttggattcagatgatggatcgttctacccctaccatgagttacaaagcatggcgtagagaaccaaaggatggtcctccccaatatagaagcagcactatttttgaagatgctacccctgagatggtgagggacttgttttgggatgacgagttccgaccgagatgggattacatgcttgcaagctcttcaatcattgaagagtgtcccactactggtactatgaaagtgcagtggatacggaagtttccctttttctg

SEQ ID NO: 106488 - DNA, 268 bp, Glycine max
gctatggaggaatcatatgttgatttggcagaaaagttagctgggtcaggagtgaaggttgcaaaattcagagcggatggagaccagaaggaatatgcaaagactgaactgcagttgggaagcttccccacaatactactcttccccaaacactcttctcaaccaattaagtacccttcggaaaagagagatgttgattcattgacggcattcgtgaatgctttacggtgatggttaattgagtatcttgctcaatgttccgtcgtac

SEQ ID NO: 106489 - DNA, 267 bp, Glycine max
ctcctctcgcgcctgttgcttgaggacttggaaaaatccgattacccttcaaagcgcttgatcatcgttggttcaataacagggaacacaaacacattggctggtaatgtacctcccaaggctaaccttggtgacttgaggggacttcagggtggtttgaatgggctaaacagctcagccatgattgatggtggagagatcgatggtgccaaggcgtacaaggacagcaaagtctgcaatatgctcacaatgcaagaattccacaga

SEQ ID NO: 106490 - DNA, 256 bp, Glycine max
gtaaggcttatggtggatacctaggcacccagagacgaggaagggcgtagtaagcgacgaaatgcttcggggagttgaaaataagcgtagatccggggattcccgatataggtcaacctttcgaactgctgctgaatccacgggcaggcaagagacaacctggtgaactgaaacatcttagtagccagaggaaatgaaagcaaaagcgattcccgtagtagcggcgagcgaaatgggagcagcctaaaccgtgaaa

SEQ ID NO: 106491 - DNA, 258 bp, Glycine max
ctacacaggacaccataaaatctccaccatcggaagcaaagacaatgaagaagtctgctaagataagtattggagtaaccacaacattttatatgctttgtggtttcatgggctatgctgcttttggagattcagcacctgggaacctgctcacaggatttggtttttttaacccatattggctcatagatattgctaatgctgctatcgtaattcatcttgtgggagcataccaagtttatgcccagcccctctttg

SEQ ID NO: 106492 - DNA, 272 bp, Glycine max
ctctatgctgctcttcgccttcctcacacttcaaccctcctatgctgcacttgctgcttcttctgacttctccactatatttggggatattggtgacttaagcagatgcgtttctgctaatatttttctctgaactgggagacaagacctttttcattgcagcgctactagcagctaggaactcagctggtgttgtttttattggaacatttggcgcacttgcggcaatgactctgatatctgttgtccttggacgaacctttcattatgtt

SEQ ID NO: 106493 - DNA, 205 bp, Glycine max
attcggctcgagataggttttaagaactcaatcagttggaattgttttccaggcaaaatgttttgaaagtggcgaaacagtggccatgaaaaatgttttacaggacagaagatacaagaatcgttaactacagttaatgggtgtgttggatgatccaaatgtgatgtcgctggaagcattgattgctttcaactacaagtacaga

SEQ ID NO: 106494 - DNA, 264 bp, Glycine max
ggggaacaaaattaaacataccatacttctaattagtgattgaacttcccttgtgtaatgttttcaaagggagaaggtgtttaatgctaatctcggtgttactgagattttgggcattcatgttcttcgttatgaattgtggatgtactgggctattttagtttgtccttccattagtacgcgtttctgaactgcctattttcataatgacactgaaatttccattataatgctgtttagaatattaagatattgttctctagc

SEQ ID NO: 106495 - DNA, 261 bp, Glycine max
  unsure (1)..(261): unsure at all n locations
ccctcctcttcacacattttcttagccctctccaacaatccctctcgttcacactttcagattgtgtgaagatccgggctggtggccgaactgctgttcctcctgccaacaggaagtcagaggctgaccctttgaagcgggtaccatttgaaaaacctcagtttagtctcagccagattaagaaggccattccacctcactgtttcctccgntctgttctccgctcattctcctatgttgtttatgacttcacaaggcttc

SEQ ID NO: 106496 - DNA, 265 bp, Glycine max
atcaacatcagtggaattaatggagaagtgatgcccggtcagtgggaattccaagttggaccttcagttggaatctcagctggtgatgagatttgggcagctcgttacatcttggagaggatcactgagattgctggtgtggtggtttcctttgaccccaagccaattaagggtgattggaatggtgctggtgctcacacaaactacagcaccaagtccatgagagaagatggtggctatgaagtgatcaaagcagcaattgaca

SEQ ID NO: 106497 - DNA, 266 bp, Glycine max
gctaggaactacaaggggctacaagataagatcaatttgatccctattaacctttcagacaggccagcttggtctaaggagatagtctaccctgaaaattaggtgccatctctggagcacaatggcaaggtgttgggagaaagtcttgatttgatcaaatatgtagatgcaaactttgaagggatacctttgtttcccagtgatcctgccaagaaagagttcggtgagcaattgatatcccatgttgatacattcagcaaagacct

SEQ ID NO: 106498 - DNA, 201 bp, Glycine max
  unsure (1)..(201): unsure at all n locations
cggagcaattacttcctttgtgcagaggactactaataagaagggtcaagttgttgacgtagctgataaacttacctcaatccttggacttggcataaatgaaccatgggtcgagtacttgtcanacaccaaattttaccgagctgatagggaaaaactcagaaccttgttcgatttcttgggagaatgtttgaagttggt

SEQ ID NO: 106499 - DNA, 253 bp, Glycine max
atctgcttcgcgccatatatccaataagctttaaccatgtctgcctttgttggaaagtacgcagatgagcttatcaagaatgccaagtacatagccacacctgggaagggcatcttggcagcagatgagagcactggcaccattgggaagcgcctatcgagcattaacgttgagaacattgaggccaaccgccaagctcttcgcgagcttctcatcaccgctccagatgccctccaaatacctctcttggtgt

SEQ ID NO: 106500 - DNA, 262 bp, Glycine max
caagttttatgaagccttctctaagaacctgaaacttggtattcatgaggattctcagaacaagacaaagctagctgaattgctcaggtatcactccactaagagtggtgatgagatgaccagcctcaaggactatgttaccaggatgaaggaaggacagaatgacatctactacattactggtgaaagcaagaaagctgtcgagaattcccccttccttgaaaagcttaagaagaagggatacgaggttctctacatggtt

SEQ ID NO: 106501 - DNA, 265 bp, Glycine max
gttatcagaaacattggccatccctgcagtactccttgtaatactcattttgattctatcctctgtcttgttcaatcttcaagatgaaagtacaaatccaccaggtcctaaacccctcccaattattggtaaccttcacatgctggggaaactcccacatcgttcccttcaagcccttgccaaaaattatggacccataatgttcataaagttgggacaagtcccaaacgttgtagtttcctcccctgatactgcagagctattc

SEQ ID NO: 106502 - DNA, 264 bp, Glycine max
ctctcagaaaagccgtgttctttgtattcgctcaatgcttcaccttttccgcatatgctgcaaggtttcaaatcacaaaccgattcacatacactgtctgggctgcgtctgtgcctgttggcggtggcgtgcaattaaacccgggccagtcatggtccgtggacgtgcctgcaggaacgaaaggggcccgcgtttgggcccgaaccggctgcaacttcgacggttcgggccgcggtggatgcctaaccggtgactgcgggggtg

SEQ ID NO: 106503 - DNA, 269 bp, Glycine max
aagaggttatgcctggctactttgcctttattggaatacagaatccctcacatgaaaaactggagcaagtacactcaccctatttcaagatcaatgaagatgtgcttccttatggggctgcacttcatgcctcattagctgttagttatcttctaaaacatccgcaggatgtaccgtctgcagaggggaaacatcatgatgaattgtaataggactgttatttttttaatagaaaacacaggcgtgaaatttttttaataattttagaa

SEQ ID NO: 106504 - DNA, 271 bp, Glycine max
cttcaaaacactcataacacaaagcacaaagcaaagctcatccttgagttaaaaaatggcagcagcttcttccatggctctctcatccccatccttggctggcaaggccgtgaagctgggcccatcagccccagaagtgggaagggtgagcatgaggaagaccgtcaccaagcaggtctcctcaggaagcccatggtacggcacagagcgtgtctagtagggcgcatctctggcgagccccgtcctacctaaccggtggagttcccaggcg

SEQ ID NO: 106505 - DNA, 261 bp, Glycine max
  unsure (1)..(261): unsure at all n locations
gtttcttacaagcctctactatactgcttcaccttctgctctagctcattcagtgctcatcgttggctttctgatactctctgtgtagacgaaccagaccttcacgcagatgggatatngctctctgaattctctggcctccgaagctcatcaggcttcctttcctcttctagaaaatcttcagaggatttgcattctgtcattggcttccagacctatgctattggaccgagtggaagattctaaaaggtgtgatagaag

SEQ ID NO: 106506 - DNA, 258 bp, Glycine max
cttgttccatactaccttgaagagacagcaaattggggtcttgatgttaatgaacttcgtcaatcagttgagcaggctcgctttaaaggaataactactaaagcaatggtgatcataaatcctggaaaccctactggtcaatgccttagtgaagctaatctaagagaggttttgcaattctgttatcagagcaatttagccttgcttggagatgaggtttaccagacaaatatatatcaggatgaacgacccttcatt

SEQ ID NO: 106507 - DNA, 261 bp, Glycine max
ggaataactgggaaaggaatcctagcacaattaaacctggaaactggaattcccatttatgaagcggagctcttcttctgtttttcatcctcttcaccctgctaggagccattggaggtttaggtgaccgtggaaaatttgtcgatgacgaacctactactggaggtgttattccttcaggcaaaggcttcagggaagcccttgggctcggttcaggtcctttattcggattcacgaaagcgaacgagctatttgtgggaa

SEQ ID NO: 106508 - DNA, 255 bp, Glycine max
  unsure (1)..(255): unsure at all n locations
gttaaaagccttagccttccctacaactccaaaaatcaagacatcancatccatggctgcctccgtctccactgtcggagctgtcaacagagctctttacaacctgaatggttctggagctggagcttcagctcccagttcagccttctttgggaccagcttgaagaaggttattgcctcaagggtccccaacagcaaggtttccggtggaagcttcaagattgttgctgtagaagagaagaaagagattgaaga

SEQ ID NO: 106509 - DNA, 262 bp, Glycine max
gaagaaaacgattctgtcagttgaagacatcattgctttgattggtgataagtgtgatggagttattggacagctgactgaagactggggagaacagttgttctctactttgagcaaagccggaggcaaagctttcagtaacatggctgttggttataacaacgtggatgttgatgctgcaaacaagtatggtgttgctgttggaaatactcctggagtgctcactgagacaacagctgagttgacagcttcattgtctttg

SEQ ID NO: 106510 - DNA, 253 bp, Glycine max
acggaacaaacagggaatataagagagaaaaagatgggtttcataatggaattcgcggagaacttggtattgaagttgatggaggatccgaaggaaagggatcggacgttccgggagcacgtttatagagtgaaggacaggtgcgagaagacgaaggagatgtggagctaccctatgcgaccctatgggttttgggatttcgaacgccacaattctcagcttgcttgggatgcacagattagccaagtggctg

SEQ ID NO: 106511 - DNA, 257 bp, Glycine max
gtcgaatgacaggtgatggtgtcaacgatgctcctgcattaaagaaagcagacattggaattgctcgtgctgatgctacagatgctgcaagaagtgcttctggcattgtcctcactgaacctggtctgagtgtcattattagtgcagtgctaaccagcagggcaattttccaaaggatgaagaattatactatctatgcagtgtcaatcaccattcgtatagtatttggtctcatgtagattgcgttgatttggaaa

SEQ ID NO: 106512 - DNA, 270 bp, Glycine max
gttgagactggaaagcaattagtactcgaggaatgcttgatggtaggaatttcttcagtagctgcagctgtacgtgcttaggaaggttggaaacaggcctgagaatggaggaaagcttattgcggttggcatcccaggctttggtgtcatatatttggcaactatacttttgcagtcaatacgggcaggttgcgagttaatgcaacctgagtcatagattgactccgcttgctaatgtttcagacacatgtgccacaagtatctgtatgg

SEQ ID NO: 106513 - DNA, 262 bp, Glycine max
aggtgacctgcacaagctttttgttgatgtagctgggaatttgcttggtatcaataaagttgacactaatatggaacaagacatggctgctgaagactttgcgtataatcaagaggtcatacctggctactacttcacgcttggaatgaagaatgcttcttcatttgaaccggttgcgccattacactcaccctatcttgtaatcaatgaagatggacttttatggggctgcacttcatgcatcattggccactggttatct

SEQ ID NO: 106514 - DNA, 260 bp, Glycine max
aggggttccagagtctgttttgaagaagcagaagagagaggaggaatgggcgttggccaagaagcaagacctcgaggctgcgaagaagaagagagccgagagccgcaaactcatctacaacagagctaagcagtacgctaaggagtacgatcaccaggagaaggaattgattcggttgaaacgcgaggccaagctgaaaggtggattctatgtcgatccaggctaagctcttgtttattgttcgcatcgtggtattaatg

SEQ ID NO: 106515 - DNA, 262 bp, Glycine max
atggaatgacgagaagcagctccaggacatgtatcttagcagaaagtcttttgcttttgattctgatgctccttgtgctggcatgactgagaaaagaaaagtctttgagatggctctgagcacagcagatgccacattccaaaaccttgattcatcagaaatttccctcactgatgtcagtcattactttgactaggacccgactaatctggttcaaaatcaggaaagatggcaagaagcctagtgcatacatgctgataca

SEQ ID NO: 106516 - DNA, 258 bp, Glycine max
cagaagaacaagtagttgagaactaagaaggagaagcaaatggcttcctcaatgatctcttccccagctgttaccactgttaaccgtgccggtgccggcatggttgctccattcactggcctcaagtccatggctggcttccccaccagaaagaccaacaatgacattacctccattgctagcaacggtggaagagtgcaatgcatgcaggtgtggccaccatggcaagagaagagtgagactctttcctacctgcca

SEQ ID NO: 106517 - DNA, 256 bp, Glycine max
gaaatttaagtgaggagctagagaatgatgatgaagtctgctatgtgtgcagtggtggttgtagcacttcttcttctggcggctcgtggggcccatggctgaggctgtgacatgcaccccaacagagttgagtccgtgccttccagcaatcacttccggtgctaaatcttccaatgcttgttgcacgaagctgaagcagcaaaaaccatgcttatgtggcactcaaaaagctagcttgaagcagtatgttaactct

SEQ ID NO: 106518 - DNA, 254 bp, Glycine max
ggagaaaattatgctggctaggcaaacaggcttgaccagaaaccaggtggccaattggttcatcaatgcaagggtgcgtctctggaagccaatggttgaggaaatgtacaaagaggagtttggagactccgagatgaactgcaacctttcatctgagaacaacacggtcaaatgtaaaaaagatgaacatgttcaagagtctgataacattaacaacaatataaatgggaagagacacaggacaatttagtaac

SEQ ID NO: 106519 - DNA, 260 bp, Glycine max
gaggctcgagcaattctgggcatcctttgcttcccaaatagagagatcataacaagcaatgggtagccttgaagcggccagaacagcagtaggattggcagcaagagacccttcagggattctcaccccaaacacctacaatctaagaaacacaggacctgatgatgtttacataaaagttcactactgtggaatttgcgattctgatctcgaccagattaaaatgatcgtggcatgtccaactataccatggtcccagg

SEQ ID NO: 106520 - DNA, 263 bp, Glycine max
cagcaactatgcctaaccctaaggtcttcttcgacatgaccatcggcggtcaatctgctggccgcatcgtgatggagctctacgtggacgtcactccccgcaccgccgagaacttccgcgcgctttgcaccggcgagaagggcgtagggcggagcggcaagcccctccactacaagggctcgtccttccaccgagtgatcccgagtttcatgtgtcagggtgcgacttcaccgccggaaacggaaccggcggcgagtcgattt

SEQ ID NO: 106521 - DNA, 263 bp, Glycine max
ataggtttcaaacctaggaagttggaagtcatggcagcaacattgatggcagcaacaagttctggcactcttaaagcaactcctttcctaggccaaggcaagggtgccaatgccaatgctcttagggatgttgtttccatgggaactgggaagtacaccatgggcaatgatttgtggtatggaccagacagagtgaaatacttgggacccttttcagctcgaccccttcatacttgaaaggagaattcccaggggattatgga

SEQ ID NO: 106522 - DNA, 261 bp, Glycine max
  unsure (1)..(261): unsure at all n locations
gtgcagtccggaagaagccaccatagtcgccgtcgtgagcgaagatccatatcaatacagttacaaattacgtgaacacactcctcgttcgatcgtagccagaagaatgggaagtttgggagcgattctgaagaatccagatgacttttaccctctgctgaagctganaaatggcggcgagaaacgccgagaagcagatcccgccggagccacattgggcgtctgctacacaatgctccacaaggtttctcgaagtttcgc

SEQ ID NO: 106523 - DNA, 261 bp, Glycine max
tatcgagccgattcggctcgagtctctccactggttcttcatctacttgcacacagttgcatagttttggaaaccaagaaatcctgaagatgggtagcatcaacaagcagttctgaaaatggagatcaccaatgtcagtgagtatgaggctattgcaaagcagaagttgccaaagatggcgtttgactactacgcatctggtgcagaggaccagtggactcgcaagagaacagaaatgccttttccagaattttgtttcgg

SEQ ID NO: 106524 - DNA, 259 bp, Glycine max
gggaatgcatactgttagatattttgatgggaaaacatacaaatgggttggtctaagccagcagcctaatataataggaaaagtgaaacgcacattaggccaattcacaccagctcagtgggacaaagacgagtggcatccattgcttggtccttggcgtttcattcaagttcttagtctttgcattgtatttttgacagtagagctcaacacattcttttgaagttttgcgcgtggatacctcctcgaaattcggttg

SEQ ID NO: 106525 - DNA, 263 bp, Glycine max
gggctatgttggacttaagaaccagggagctacatgttatatgaattctctactccaaactttgtacgatattccttattttcgaaaggctgtataccacatgccaaccctagagaatgacatgccctctggaagcatccctttggctttgcaaagtttattctacaagctccagtatagtgacaccagtgttgcaacaaaggagctcactaaatcttttgatgggatacatatgattctttcatgcagcatgatgttcaaga

SEQ ID NO: 106526 - DNA, 258 bp, Glycine max
agcgcaagatcacctccgttgcgctgtcgacacgtgtcgacgcgctccaatcagagtcgtccgctctacgcgccgaactcgccgctaggaaccggctcatcgccgagctccagtctcaggaggagtccatcgacgccgctctctccgaagccgccgataagctagcccgagccgaccaagacaaggagaatttgctgaaggagaacgcttcgctttccaaccatgagaaactcaccagagatgtctccaagttggaga

SEQ ID NO: 106527 - DNA, 223 bp, Glycine max
cgaggcttatggtggatacctaggcacccagagacgaggaagggcgtagtaagcgacgaaatgcttcggggagttgaaaataagcgtagatccggggattcccgatataggtcaacctttcgaactgctgctgaatccacgggcaggcaagagacaacctggtgaactgaaacatcttagtagccacagggtacaaagcgcatgtaaaacaaaacagggcccc

SEQ ID NO: 106528 - DNA, 262 bp, Glycine max
cgagcgcacaagcaggtctgttgccgaggagagagccggaaggaagttgggtggcctcagggttctcaattcatactgggtgaatgaggactccacttacaaatatattgaggtcattctggtggatgttgcccacactgctgtaagaaatgatccaagaatcaactggctctgcaatccagtccataaacacagggaactgcgtggcctcacttctgctggaaaagcaataggggtttacgtggcagacgacatctctacc

SEQ ID NO: 106529 - DNA, 264 bp, Glycine max
gagcaagaatctaatgaagtatttcacatttgagattcaagttttggatgataagaatgtcaggcgacgatttcgagcctcaaattttcaagctgtcactcgggtaaagccctacatgtgcactatgccactgagaatggatgaggggtggaatcaaatccacagtttaacctggctgatttcaccaagagagcatatggtactaattatgtggagacacgcaagttcaggtacatgcaaactgtcgcctgagaaggatttact

SEQ ID NO: 106530 - DNA, 264 bp, Glycine max
gaggtaattgctggtaatactcttatgccagctttttctgttccacaggctactgccagatcttctgaaaatgcggaatcctctgcatgatctggaatttgtgttttctttcacttgttcgtttgtttaattcaataaaggaaattaggcatgaccctcttgttgagtatgctctgcctatttgaaaatttccacacctcttttaattgtcgtaatgatggtgaagtgtgtgttattttaaaaaaaaaaaaaaaagggcggccg

SEQ ID NO: 106531 - DNA, 264 bp, Glycine max
ggcgtgcgctgctcgcccgccgccacggttccgtcaagccgacagaagcctccataccggaggccagcgagtgtgagcacggcctcgacaagagctttggctttgctaagcagttttcggctcattatgagctcagtgacgaagtcggccgggggcattttaggtatacctgctccgctaaaggcaagaaaggggcgttcaagggcttaaatgttgctgtaaagtcattcctaaagccaagatgaccacagcaattgctataga

SEQ ID NO: 106532 - DNA, 263 bp, Glycine max
gaggcaaaaaatggcttctagttcagaatctcaatctcagtctaaatcgctccaagaccgagttgcaatcgtcaccggctcgtcccgcggaatcggccgagaaatcgcgcttcacctcgcctcactcggcgcgcgactcgtcgtcaactacacctccaactcggcccaagccgactcagtcgcggcgctgatcaacgccggttccgccaccacgacaccggcgccgtcgtggtccaagccgacgtgtccgatccggctcaggt

SEQ ID NO: 106533 - DNA, 260 bp, Glycine max
gaggacagccacaccaagccttatgttcgagcaaagggaaggaagtttgagagggctagaggaaggaggaacagcagaggatttagggtctgatgtgataaatagtgttctattctctgaaattcaaaatttccttatatcttagacggttgaagcagttttcttgttatttgtgttctgataatatgattttcagtttgaagttgtcattcttggctctttattctcccagtgaagtaagtgtctgtttgtgctttaac

SEQ ID NO: 106534 - DNA, 258 bp, Glycine max
gagaattattattattaaacatgaggccgattctgatgaaaggccacgagaggccactgacgttcctcaagtacaacagtcacggcgatctacttttctcctgcgccaaggaccacaaccccaccgtctggttcgccgacaacggcgaacgcctcggcacctaccgctgccacaacggcgccgtttggtgctgcgacgtctcaagagattcgggtcggctctaacgggaagtgcggatcagaccgccaagctatggaa

SEQ ID NO: 106535 - DNA, 260 bp, Glycine max
gagcaaggaagagaatccccgtgtgcccatcatcgtcaccggtaacacattctccacactctatgcgcctctcatccgtgatgggcgtatggagaagttctactgggcaccaacaagggatgaccgcattggtgtctgcactggaatttttcgcaccgattcaattcctgaacaggacgttgtcaagattgttgacaccttccctggccaatccattgattctttggtgcactgagggcagagtatatgatgacgaatga

SEQ ID NO: 106536 - DNA, 262 bp, Glycine max
atgcagaagaacaagtagttgagaactaagaaggagaagcaaatggcttcctcaatgatctcttccccagctgttaccactgtcaaccgtgccggtgccggcatggttgctccattcactggcctcaagtccatggctggcttccccaccaggaagaccaacaatgacattacctccattgctagcaacggtggaagagtgcaatgcatgcaggtgtggcacagttggcaagaagaagtttgagactctttcctacctgcca

SEQ ID NO: 106537 - DNA, 257 bp, Glycine max
caaagctgcacaacaagcttctgaagagtggtaccggaaagcacaacttgctcttcataaaggtgaagaagtacttgctcgtgaagcacttaagaggcgtaaatcttatgcggataatgccagttctttgaaggctcaacttgatcaacaaaagactgttgttgagaatcttgtctctaatacaaggcttttggagagtaagatacaggaggcaagtcgaagaaggatactctcaaagcaagagctcaatcagcaaa

SEQ ID NO: 106538 - DNA, 260 bp, Glycine max
tgcccgtgtgtcgccgccatggccactgtcaccacccaagcctccgcggcaattttccggccatgtacctcgaaatcgaggtttttgaccggctcttccggtaaacttaaccgggaagtgactatgcggccaatggggtgccctccttctgcctctgctcaaggttgaagccaagaagggagagtggttacctggcttggcctccccaacttacctaatggcactcttcctggtgacaatggatttgaccctctggggct

SEQ ID NO: 106539 - DNA, 256 bp, Glycine max
ctagaatactgatcacattgttgtttgtaacaaaacgtcatccatatatatcatgacacttcaaggacaggttgtgaagagcttctcatctggtaaaagagaaggcggagactttgttgcagcctgtgtttcacctaaaggagaatggatttactgtgttggtgaagacaggaatatgtactgcttttcctatcaatctggcaaattggagcatcaatgaaggtccacgagaaggaagttataggtgtcactcatc

SEQ ID NO: 106540 - DNA, 261 bp, Glycine max
taacggatttggcgtagtgctacttgaaatactgacaggcatgcgggcacttgacacaaaacggccaacagggcagcagaacctagttgaatggaccaagcctcttctctcttccaagaaaaagttgaaaacaataatggatgctaagatagtgggtcaatattcaccaaaggcagcgtttcaagcagcacaacttactgtaaaatgtctagaacatgcccaaacaagtccttccatgaaagaagtgcttgagggattgga

SEQ ID NO: 106541 - DNA, 257 bp, Glycine max
gacagccacaccaagccttatgttcgagcaaagggaaggaagtttgagagggctagaggaaggaggaacagcagaggatttagggtttgatgtgataaatagtgttctattctctgaaattcaaaatttccttatatcttagacggttgaagcagttttcttgttatttgtgttctgataatatgattttcagtttgaagttgtcattcttggctctttattctcccagtgaagtaagtgtctgtttgtgctttaac

SEQ ID NO: 106542 - DNA, 263 bp, Glycine max
ttcgagttgtcaataatggttctgattctgctctttgaagcaggaactgtcgttgcttgagtttggagtcctcgctgctctcagatgtcatcctcctgaatgtctccgttagcaccgttgaggtcgaatgcagatgtagcatttggatcggtggatcaggaatggacctgaggagcaaagcaaggactctcccaggaccagttagcgacccttcagagctcccaagtggaactatgatggttccagcacaggtcaagctcctg

SEQ ID NO: 106543 - DNA, 258 bp, Glycine max
ggcttcattgcaatacagagatgtttgtagcagtggaagggtagtttccatcagagctcaagtcaccactgaggctccagccaaggttgaaaaagagtccaagaaacaggatgatggtgtggttgtgaacaagttcagacccaagaccccttacgttggtagatgcgtgctcaacacaaagatcactggggatgatgctccaggagaaacttggctatggtcttcagcaccgagggagagatttcctacagagaagga

SEQ ID NO: 106544 - DNA, 253 bp, Glycine max
acaaggcagaaagcaagctcatcctagagttttaaaaatggcagcagcctcctccatggctctctcttccccatccttggctggcaaggccgtgaagctgggcccatcagcccccgaagtcgggagggtcagcatgaggaagaccgtcaccaagcaggcctcctccggaagcccatggtacggcccagaccgcgtcaagtacttgggcccattctggcgagccccgtcctacctcactggcgagttcccaggt

SEQ ID NO: 106545 - DNA, 245 bp, Glycine max
atttccttcacgtaccgaagcatctattcaaagaaagccatgactgatatggacagtaccaatatctatgcctacatttccatcattgctctaattgtgtgtataccacctgccgtaattttggaagggcccacactgttgaagcacggcttcaatgatgctatggctaaagtaggtttggtcaagttcgtctcagatctcttctgggttggagttttacctctctacaaccaggtggctaccaa

SEQ ID NO: 106546 - DNA, 241 bp, Glycine max
ggctcgagaaattggaaggtatagctccttctcctgaagacacaatattgcctagagacttgtttcttttgcaatggaatggttgagaatgctgttggcacctgtgctgatgttatatctgtctccaattgatgcttcctttgctgttaatgcccccctcctaccttctggatttcgcatcattcctcttgaatctggaaggaagcttcttccccaatcgcacacttgaccttgcatctgc

SEQ ID NO: 106547 - DNA, 253 bp, Glycine max
ctctgtcgtagggtttctccacctacagggaaatggctcccaaaccgcctagtacgggtctgtatgttggactgaacaagggtcacgtcgtcaccaagaaggaattgcctccacgcccctcagatcgtaaggggacaacaagcaagagggtgcactttgtgaggaacctcataagagaggtagccggttttgcaccctatgaaaagcgtataactgagttgctgaaggttgggaaggataagagggcactgaa

SEQ ID NO: 106548 - DNA, 250 bp, Glycine max
ctcgcaataccagcaccgttcgattcttcttccaaaatgggtatctctcgggattccatgcacaagaggcgcgacaccggggctaagaagaaagcttggagggagaagagatagtatgagcttgggaggcagccaggaaacacaaagctatcaagcaacaagacggttcggaggattagggttcgcggtgggaatctgaagtggcgcgcttcgaggcttgatactcggtactactcttgggggagtgagg

SEQ ID NO: 106549 - DNA, 257 bp, Glycine max
ggccacccacgcggctcttgcttctacaaggatcccttcaaacacaaggttcccatccaaggcctctcactctttcccaacccaatgcgccttaaagagacttgaggtgacagaattctctgggcttagatccacttcatgtgtcacatatgctaacagtgctagagaatcttccttttttgatcttgtagcttcccaactcactcccaagaccaatggatcaactcctgtgaggggagagacagtggccaagttga

SEQ ID NO: 106550 - DNA, 239 bp, Glycine max
gatgaaatgggtcagattctacaggaccaaaccttgtgggagttaaggaatgatggaagaaaagaaataaaaaaaagtaaataaaaatgcagtagaagagtcctgattccaaacgggaaaattcaaacttgattgaaaaggatctttctgattattgaagaatgggacaaaaggattgatcgtgaaaaagattgcttgttcttattagaagatcgtgattggatccacagatgtttggt

SEQ ID NO: 106551 - DNA, 250 bp, Glycine max
atgacatttatgggctgcgcttgattgttgacaaggaagaagactgttacaaagctttgacagttgttcatcgattatggtctgaggtgcctggaaagctgaaagattacatatgtcgtcccaagttcaatggatatcaatctctgcatactgttgtgatgggtgaaggcaaggttccccttgaagtacaaattcggaccaaagatatgcatttacaagcagaatttggatttgctgctcattggagata

SEQ ID NO: 106552 - DNA, 250 bp, Glycine max
caaaggttgctgtaggagataagattgcagtagtgctaagtgctaacacctgcagtgaacaatggcctctgcatcagcatctctgctcaagtcttcacttgttcttgacaagtctgagtgggtgaagggacaaacccttcgccaaccttctgcatcagttgtgagatgcaaccccaccaccccatcaggcctcaccatcagagctggttcctatgctgatgagctcgttaagaccgcgaaaacagtggct

SEQ ID NO: 106553 - DNA, 250 bp, Glycine max
catcttcacaaactagtaatattattcttcgaatccattttattattcataatgggtattttcacatttgaggatgaaaccacctcccctgtggctcctgctaccctttacaaagctctagttacagatgccgacaacgtcatcccaaaggctgtcgaagccttcaggagtgttgaaaaccttgaggggaacggtggccctggaaccatcaagaagatcactttcgttgaggatggagaaagcaagtttg

SEQ ID NO: 106554 - DNA, 257 bp, Glycine max
aaagaagtcaatcagcaggttggtcttgacaaaggaaaatcttcatctgataaatcaactaagtttcaaggtcgacgcagagttgatcatgttatttttgaccttgcaaaattcattggcaggggaaagataccctcaaaggtgctgaaagaagtgggagaattgataaatctcactctaagtcaggctcagagccatcaccaattatctggctcaacaattttcaatcgcatcgaaataccagcttcgtttgatcc

SEQ ID NO: 106555 - DNA, 250 bp, Glycine max
gaaggaactcaagaacggacgattggccatgttctctatgtttggcttctttgttcaggccattgtcaccggaaagggtccattggagaacctcgccgatcaccttgctgaccctgtcaacaacaacgcctgggcctatgccaccaacttcgtccccggaaagtgagcgtcaaagaacgaaatgacttttgagagtttttagatttgtgtttggtgaagtacttcagataatgtgaattatcttgtgtat

SEQ ID NO: 106556 - DNA, 252 bp, Glycine max
ggagggtatccccccggaccagcaacgtctcatcttcgccggaaagcagctcgaggacggccgcaccctcgccgactacaacatccagaaggaatcaacccttcacctcgtcctccgtctccgtggtggcatccagatcttcgttaagaccctcaccggcaagactattaccctagaagtcgaaagctccgacaccatcgacaacgtcaaggctaagattcaggacaaggagggaatccccccagaccagca

SEQ ID NO: 106557 - DNA, 256 bp, Glycine max
ctaacgcaaaacatggcttctagttcagaatctcaatctcagtctaaaccgctccaacaccgagttgcaatcgtcaccggctcgtcccgcggaatcggccgagaaatcgcgcttcacctcgcctcactcggcgcgcgactcgtcgtcaactacacctccaactcggcccaagccgactcagtcgcggcgcatatcaacgccggttccgccaccacgacaccgcgcaccgtcgtggtccaagccgacgtgtccgatc

SEQ ID NO: 106558 - DNA, 257 bp, Glycine max
ggcaacaaaggagttgtaaattaagagcatggctgcacaagctcttgtatcatcatcatctcttaccttctcagccgaggctacaagacaaagtcttgaccaagatcactccaatctccatttggcttctcaagaaaagcctcctttcttgttaaggcagctgctactccccctgtcaagcaaggatcagacagacctttgtggtttgcatcaaagcaaagtctttcctacttggatggcagccttccgggtgacta

SEQ ID NO: 106559 - DNA, 256 bp, Glycine max
cgatacccccatcgtctccggctccgcactcttagccctagaagcccttatggcgaaccctgccatcaaacgcggcgacaacgagtgggtcgacaaaatctacaaactcatggacgaagtcgacgactacattcccatcccccagcgccagaccgacctcccattcctcctcgccgtcgaagagttgttctccatcaccggccgtgggaccgtcgccaccggccgcgtagagcgtggcaccgtcaaagtaggggaa

SEQ ID NO: 106560 - DNA, 248 bp, Glycine max
ttgaaaacaagtccacagtacttttttatggtggtggggctttagttgctgtttggctatcgtcgattcttgtgagcgccatcaactctgttcccttgcttccaaagattatggagttggtggggctagggtacactggatggtttgtctaccgataccttctgtttaagtctagcaggaaggagctagctacagacattgagtcactgaagaagaaaattactggaactgaatagagtggtgttagc

SEQ ID NO: 106561 - DNA, 248 bp, Glycine max
cggctcgagcggctcgagacaaggtgtacatcctcactcagtttaactcagcctctctcaacaggcacattactcgcgcttacaactctggtaatggagtcacctttggagatggctacgtagaggttcttgcagcaacccaaactccaggggaggcaggtaaaaagtggtttcaaggtactgctgatgcagtgaggcagtttcactggctctttgaggatccaagaagtaaggatattgaggatgtc

SEQ ID NO: 106562 - DNA, 247 bp, Glycine max
gcaataactggctctcagaaggccctttcccttcccactgggataggtattgtggttgcaggacctagagctattgaggcctcaaaacatgctaaatcacttcgagttttctttggctggaaagactacctgaaattctaccagctaggaacgtattggccatacactccttccatacatttgctgtatggtctgagagctgctcttgatctgatttttgaggaaggacttgaaaatgtgattgcaa

SEQ ID NO: 106563 - DNA, 250 bp, Glycine max
gctttggaagtttcgacaaacttgacacaaggacaccatcaacatcttgaagagctcgctgtgttgttcgttccttttggccccttcaacgaaattgtactaatctaagatttgctcttttttgttcaaattaaaatgtccatggaagctcaacagattctttccagattctgtccaaaaccatcttcagtgccatctattccaattgtgaaacaacaattctctccaaagttccctcgtttaccttctt

SEQ ID NO: 106564 - DNA, 253 bp, Glycine max
ctcgagccgattcggctacgagggaagccacatagagacacaatacagagtgagttgttgctccttcgccacaactctctgccaacatgggtatctccagagattctatgcacaagaggcgtgccactggtggcaagaagaaggcctggaggaaaaagagaaagtatgagcttggtcgccagctatataacactaagctgtcaagcaacaagacagtcaggaggatccgtgttagaggtggaaatgtgaaatg

SEQ ID NO: 106565 - DNA, 253 bp, Glycine max
gatcattcttgaagatgacatggaaatagcacctgatttctttgattattttgaagctgcagcgactctccttgacaaggataaatccattatggctgtttcctcatggaatgacaatggacaaaagcagtttgtacatgatccatatgaactttatcgctcagacttctttcctggattaggatggatgctggccagatctacatgggatgagctatcaccaaaatggccaaaagcttactgggatgattgg

SEQ ID NO: 106566 - DNA, 257 bp, Glycine max
cacaaagcacaaagcaaagctcatccttgagttaaaaaatggcagcagcttcttccatggctctctcatccccatccttggctggcaaggccgtgaagctgggcccatcagccccagaagtgggaagggtgagcatgaggaagaccgtcaccaagcaggtctcctcaggaagcccatggtacggcccagaccgagtcaagtacttgggcccattctctggcgagcccccgtcctacctaaccggtgagttcccaggc

SEQ ID NO: 106567 - DNA, 256 bp, Glycine max
tcagaaggcacttcatgccaatgtaactgggattccttattcatgggcaggatgcaatgatgttattgtggaaaattggggtgattctccgctatctgtgcttccaatatatcaagaacttattgaaggtggtatcagaatatgggtattcagtggagacactgattcagtagttcctgtaaccgcgtctcggtattcaatccgtgccttgaacctatctaccatcatcaattggtacgcttggtatgataatgac

SEQ ID NO: 106568 - DNA, 248 bp, Glycine max
ccataaaagcatatactttcttagttggaaagagcagggtgctcaattgagcttattagccaaggattttggttctcttggttgttttgcgacggaatttttgattgatggaagtactcttagtctcatggtttcagatgataatagaaacatccagattttttactatgcaccaaagatgtctgagagttggaaaggacagaagcttctttcaagagctgaatttcatgttggtgcccatgtgacta

SEQ ID NO: 106569 - DNA, 246 bp, Glycine max
gttctctaacccaatagatgccaaacggcaggcataccgtaccctacttgtgacagtatctggtcttggtgaatacatctctggtgccattctctttgaggaaactctctaccaatccactgtcgatggaaggaagatcgtcgacgtacttgttgaccaaaacattgttcccggtatcaaggtcgacaagggtttggtgcccctagctggttcgaacgatgagtcatggtgccaaggtcttgatgg

SEQ ID NO: 106570 - DNA, 253 bp, Glycine max
aaccacgatatttgcctccctctaagatgcttgatgctgatgtcactgatagtgttattgctgaaggatgtgtgattaagaactgcaaaattcaccattctgtggttgggctgcgatcttgcatatcagaaggtgcaattattgaagacacgttattaatgggggcagattattacgagacggaggctgataagaggtttctggctgccaaaggcagtgttccaattggtataggcaggaactctcatatcaa

SEQ ID NO: 106571 - DNA, 247 bp, Glycine max
gtccatcacaacgacatatttatattcggcatagataacaccgtactctctaatatcccatactatgaaaaacatggatatggggtggaggaatttaatgaaaccttatatgatgaatgggttaacaagggcgacgcaccggcattgccagagactcttaaaaattacaacaagctgttgtctcttggcttcaagattgtattcttgtcaggaagatatcttgacaaaatggccgtaacagaagcaa

SEQ ID NO: 106572 - DNA, 247 bp, Glycine max
gtctccactgttggagctgtcaacggagctccactgagcttgaacagctctggagctggagcttcagttcccagttcagccttctttggcaccagcttgaagaaggttattgcctcaagggtccctaacgtcaagatttcttctggaagtttcaaaatcgtcgccgcggaaaaagagattgatgagaaacaacagacagacaaggacagatggaaaggtcttgcctatgatgtttcagacgaccagc

SEQ ID NO: 106573 - DNA, 246 bp, Glycine max
gaagtgagatacactaagttatcctcataaatacactctaattaggtggcaagataagtgtctaaccttagtaacattgccacatattgtgttcattttggaattgtgccacttaaattctattcaattcatctatggctgcctcttcttatgctatgcaatcaatcctggcaaaccctttgatccgcatttccagcgggtctagggtgaaccaatttggcgttcctgctttgcacatgagaagga

SEQ ID NO: 106574 - DNA, 247 bp, Glycine max
ctgcgacgccgcattcgctgttcaacaaatagccgacatagcagacggcgacaaccgcggactggcactgttgctgcccataatcccagcaatagggtgggttctgttcaacattctgcagccggcgctgaaccagctgaaccgaatgcgcacaccaaaggcgtgatcattggcttggggcttggcggcttggctgggttggcggctgcgcgcatgcgtgggcggcggcttctgaagctgcggctgc

SEQ ID NO: 106575 - DNA, 274 bp, Glycine max
agaaaaacaagtagttgagaactaagaagaaggaaatggcttcctcaatgatctcctccccagctgttaccaccgtcaaccgtgccggtgccggcatggttgctccattcaccggcctcaaatccatggctggcttccccacgagtaagaccaacaatgacattacctccattgctagcaacggtggaagagtacaatgcatgcaggtgtggacaccaattggcaagaagaagttcgagactctttcctacttgccagagctcgatgatgccca

SEQ ID NO: 106576 - DNA, 275 bp, Glycine max
tgaagattttgataacaggatggttaaccattttgttcaggaattcaagaggaagcacaagaaggacatcaatggaaaccctagggctcttaggaggttgaggactgcctgtgaaagggcgaagaggaccctatcatctactgcacaaaccacaattgagatagattctctttatgagggtgttgacttctacaccacaatcaccgtgccaggtttgaggagctcaacatggatctcttcaggaagtgtatggagcccgttgagaagtgtttgag

SEQ ID NO: 106577 - DNA, 264 bp, Glycine max
ggccacctctgctattcagcaatcagcattcgcaggtcaaactgctctgaagcagctcaatgagttggtccgcaagaccggtggcgccggcaaaggtcgcaccaacatgcgccgtaccgtcaagagtgctcctcagagtctttggtatggccctgatcgtcccaagtacctgggtccattctcagagcagattccgtcatactgaccggagaattccccggtgactacggatgggacactgctggactatcagctgacccggaa

SEQ ID NO: 106578 - DNA, 276 bp, Glycine max
gtctttgccaagatgggaatcaaccccatcatgatgagtgctggagagttggaaagtggaaatgcaggagagccagcaaaactgatcaggcagagataccgtgaagccgcagacttgatcaagaagggaaagatgtgtgctctcttcatcaacgatcttgatgcaggagctggtcgtcttggtggaaccacccaatacactgtcacaaccagatggtgaatgccaccctcatgaacattgctgataaccccaccaatgtgcagcttcctggtatgt

SEQ ID NO: 106579 - DNA, 275 bp, Glycine max
ggcctgatttctgctttgcaacacccttgtttagttaagctctacggctgttgtatggaagaggatcaattgttactgatttatgaatacatggaaaacaatagtcttgctcatgctttatttgccaaaaatgatgactctgagaaatgtcaattgagattggattggcaaacaaggcataggatttgtgttggtatcgctaaggtttggcttaccttcatgaagagtccaaactgaagattgttcatagggacatcaaggccaataatgtgttg

SEQ ID NO: 106580 - DNA, 274 bp, Glycine max
atgttgtaatatttattctgctgttactcatggcttcttttctttcctctcaggctgctgcattgaagggttcagatcatcgccgtgcaacaaatgtcagtgccagactggattctcaacaaaagaagctcaaccttccaatccttccaaccaccactattggatccttccctcagactgtagaactgaggagggtacgccggaattcaaggctaacaagatctccgaggaagagtatgtaaagtcaattaaggaggatattcgcaaagttgtt

SEQ ID NO: 106581 - DNA, 272 bp, Glycine max
tatttctactgcttgatcagatacgaattgggacaaatcaaaggtactacagtacaatccaatttttcacaagtgatgcacattagtattcagttcgtcactcggtttatgcagtgtgctaacattgtacttatgctacagatgctgattctttcactcataacattaaagctcttgaaagcattcttcgatgctgctgattcagagttcatacttggtcaagcaatccccatcactttgtggctgtcactggctcctgttgttattggcgt

SEQ ID NO: 106582 - DNA, 269 bp, Glycine max
gaacactacaattccaacaaagaaggaacaagttttctcaacatactctgacaaccagcctggtgtgcttatccaggtctttgagggtgaaagagcaaggaccagagataacaatttgttgggcaaatttgagctatctggcattcctcctgcacccaggggtgttcctcagattacagtgtgctttgacattgatgcaatggtatcttgaatgtctctgccgaagataaaaccactggccagaaaaataagatcactatcaccaatga

SEQ ID NO: 106583 - DNA, 268 bp, Glycine max
agtctccgcattctgtcgtgcttacgccatcgtatgtgccctcttcgcatttcccagcaattgttaccaaatagtgcttggctgagtctgatgcgcaagccttgtgctcattctagaaagtagtcttaatggggggcttacatgatgatagaatcaagcgacaagttatgagaacagcatctggtctttcaggggttgaatcagtttctattgacatgaaagacgagaaaatgaccttattagggaacattgatccagtgaatgcagt

SEQ ID NO: 106584 - DNA, 159 bp, Glycine max
atggatttttccgttctaatactctatctgatagttatcaatatttatcaaatctgttcctatctaacgaagcgctattggatcaaatgacaaagacattgttgagaaaaagatggcttttcccagatgagatggttgttgctatctgctccaataacg

SEQ ID NO: 106585 - DNA, 201 bp, Glycine max
ccagaatcaaatgcttcatcagagagcatttataatgctgcattggctctaggcattgcaaatcaactttccaacatacttagagatgttggagaagatgctagaagaggaagagtatatctccctctttatttgtcccttcatgaatttccgccatttgtctgtaactcttccgcggaaaatgtcatcatctgaaaggca

SEQ ID NO: 106586 - DNA, 268 bp, Glycine max
cactttcttttttcccgcagtcatgggcaaggtcaagatcggaatcaacggatttggaagaattggccgtttggtggccagggtggctctgcagagagacgatgttgaactcactgccgttaacgatcctttcattatcaccgattacatgacatacatgtttaaatacgacagtgttcacgggcactggaagcatcacgatgtcaccgttaaggctgagaagacccttctcttcggtgacaagccagtcactgtttttggacacagg

SEQ ID NO: 106587 - DNA, 271 bp, Glycine max
atttgatgaatgaggcggctattcttgcagccaggcgtgacctcaaggaaataagtaaagatgagatatctgatgcgcttgaaaagatcatagctggacccgagaagaaaaatgctgtagtctcagatgagaagaagaaattagtagcctatcatgaggctggccatgctctagtgggtgctttaatgcctgaatatgccctgtagccaagatatcaattattcctcgtggccaagctggtggtctcacattttttgctcccagtgaagag

SEQ ID NO: 106588 - DNA, 271 bp, Glycine max
accaggcgcacgttagcacaaactatcatggccacggcaacagcagctgccacctcgtcctttatggggacgcgtctcctggaggctcactccggagcggggcgagtgcacgcccgattcggcttcggcaagataaaggctcccgccccaaagaaagcctccaggggatcgggccgagacaccgacagacccctttggtatccgggcgccacgctgccgaatacctcgatgggagtcttgtcggagactagcgcctcgatccgtttgggct

SEQ ID NO: 106589 - DNA, 226 bp, Glycine max
atggaagcccaagtttaccattgagaaagaaaaacagaaggctgaagttgaggctgcaactggttcagctggtattgcaggcttccagaagaaggtatttgacctcttgtacaagattgcagacattcccttcctgagcgaccacaaatctaagatatacgatctcattgagaaagctgagaaacagccagatctcctattggaattcttgtagcggttgtgggtg

SEQ ID NO: 106590 - DNA, 265 bp, Glycine max
ctagcgcttatgcacgtctctatgattatgaacgtgtacgcaaggtttgcgataaacagaaagctatactattggcagatatggcacacatcagtggattggttgcagctggtgtcatcccatcaccttttgattatgctgatgtagttactaccacaactcacaagtcacttcgaggaccacgtggagctatgatattctacagaaaaggggttaaagaaattaacaaacaaggaaaagaggtattgtatgactacgaagacaa

SEQ ID NO: 106591 - DNA, 265 bp, Glycine max
  unsure (1)..(265): unsure at all n locations
cggctcgagcaaaggttgctgtaggagataagattgcagttcatgctaagtgctaacacctgcagtgaacaatggcctctgcatcagaatctctgnctcagtcttcacttgttcttgacaagtctgagtgggtgaagggacaaacccttcgccaaccttctgcatcagttgtgagatgcaaccccaccaccccatcaggcctcaccatcagagctggttcctatgctgatgagctcgttaagaccgcgaaaacagtggcttcacc

SEQ ID NO: 106592 - DNA, 268 bp, Glycine max
gttggagtctggtgttgtgggatgttgcaaatcagggccaggacttgctaccccactggaagccatgtctggtccaagatagtctcttatttatgtaactgctgtctacacaggaacaggaatagagaagccggactatttggccacagtggacatagatccaaactctccaacttattccaaagtcatccataggtctcgtttccttatttaggtgacgaattgcatcacactggttggaattcatgcagctcttgccatggagacc

SEQ ID NO: 106593 - DNA, 255 bp, Glycine max
ggctcgagcgggctctaccgtggtttcaacagtctcattgttggaatcatcgtgtatcgtggtctgtactttggattgtatgattctgttaaaccagttgtcctcacagggtcattgcaggatagcttttttgccagctttgcccttggatggctcatcaccaatggtgcaggtcttgcatcatacccaatagacactgttagaagaagaatgatgatgacctctggtgaagctgtcaagtacaagagctccttg

SEQ ID NO: 106594 - DNA, 270 bp, Glycine max
gtgacagatggaagttcgaagaggataagctattggacaactgatgttgaaactgccaagactgaaaatgatgcaaagataatacttgggttgagccctggtgagctttcagtggtgaatcctaacaagaaaacctctgttggaaatgatgtgggataccgtttgattccagcaatcccagctcatcctcttctcacaatgacgattatccacaaatacgtggcgcttttaccaatttcaatgtgtgggtcactccatacaataggactg

SEQ ID NO: 106595 - DNA, 268 bp, Glycine max
gtttcaccgcacgaatatcttgttgtttggagcgatccgagaaaaactctgtaaacatgttggtttaccaggacctccttacaggtgattagcttctctctgactccttccgttacaaggaaattgagaatggaatgctgtgggaagttgaggggaagtgggctgttaaaggagcagttgatgtatacatcggtgcaacccttctgctgagggtggacgagaagatgagggagttgatgatgcagctcttaaggttgttgacattgtt

SEQ ID NO: 106596 - DNA, 248 bp, Glycine max
ggctcgaggaactggtgtcaggtccagacatgggagtggaattggacgacatccttcgcaaaattgatgatgatggtcgtttggttggaattgtgaatggcatggatgttcaggagtggaatccaaccactgacaaatatatagctgtcaaatacgatgtttcaacagtattggtagcaaggctcttttgaaagaagccctccaagcagaagttggattgccggtcgacagaaatattcctcttattg

SEQ ID NO: 106597 - DNA, 268 bp, Glycine max
  unsure (1)..(268): unsure at all n locations
ggagagtttgaagactcggctcctttcagcttgcccttcatgtctgctctcctatccattcaatcagcactccactagtccctcncgcctccgatttacctgttgaaggtttggtgtgttgatcaaaaaggattgctacatgatattaatgaaatcctgtgcaaccttgaacttattattcagagagtcaaagcgatgccaaccccagatggaagggtgttagacatgttctttatcactgctgggatgcaattgcttcacaccaaaa

SEQ ID NO: 106598 - DNA, 262 bp, Glycine max
ctttggtccttcgctttgtgaagcagctcatgccaaaaattgtggtcacattggatagaagttgtgatcgaactgatgcaacatttcctcagcatctgatttttgcacttcagtcttattcagggctgcttgagtcacttgatgcggttaatgttcacccagatttccctcagatgattgagaagtattatcttcagccatcaatggagaagcttgtcttgggtcgacatggtttgcaggaaagagcacttccttggaaaaa

SEQ ID NO: 106599 - DNA, 214 bp, Glycine max
gtgacagaattctctgggcttagatccacttcatgcgtcacatatgctaacagtgctagagactcttcctatagtgatcttgtagcttcccaactcagtcccaagaccagtggatcgactcctgtgaggggagagagagtggccaagttgaaggtggcaatcaatggtgtcggacgcattggtagacacttcctcgctgctggcacggccgaaa

SEQ ID NO: 106600 - DNA, 264 bp, Glycine max
caacacctcacttcgggatctgatgctttctatcactgtttatttttttggcagtttcaattcgacactttcctcgcttcaaagattaagcgaacaatatggttgtccttgctgcatccattgtgagcaaatctggcaaagtgctagtttctagacagtttgtggatatgactcgcataagaattgagggtctctagcagcatttcccatattggtagggactggaaaacagcacacgtatgttgattaagagaatgtgcgcta

SEQ ID NO: 106601 - DNA, 268 bp, Glycine max
gcagatagcaagctcatcctagagttttacaaatggcagcacggctcctccatggctctctcttccccatccttggctggcaaggccgtgaagctgggcccatcagtccccgaagtcggcgacggtcagtcatgaggaagatcgtcaccaagcaggcctcgctgccggaagcccatggtatggcccagaccgcgttcagtacttgggcccagtctctggacgagccgccgtcctacctcactggcgagttcccaggtgagtacggctg

SEQ ID NO: 106602 - DNA, 267 bp, Glycine max
acacagttatccattcacatttcacagttagcacttagcagactctgctgcagtgaggtgaggggaggtttgtttgttgtttcgtttttcctttcctttccgccagaatccgttgagaatggcgttgccggtagtcgtcgatgcagagtacctcaaggaggtcgacaaggctcgccgggatctccgcgcactcatcgctaaaaggaactgcgttcctctcatgctcggattagcctggcactatgcggtgaattccgatgctaagac

SEQ ID NO: 106603 - DNA, 265 bp, Glycine max
gtgcatacagaaacagttcaattgatgattgtccctagcagacctatcatggaaaccaaggcgaacttcgctataagggcattggggatgctcacatgtgtatattctctgatccatcatcatgttgaagtcactagaaatcttcctcttccggatgaaatctaggtttgtgacaacatctcccttcattggatgagaaagttgctgaattggcatccttcccctcattctctccatcccgaggtttgatggaagaagatggtca

SEQ ID NO: 106604 - DNA, 267 bp, Glycine max
gcgttgccattctcatcctcttctttctctctctaccattgccatggatccctacaattaccggccatccagcgccttcaattctcccttctggactacaaattctggtgctcctatttggaacaacaactcctctttaaccgttggagctagaggtccaattctgctggaggattatcatcttgtggagaagcttgcaaattttgatagggaacgtatcccagaacgtgttgtccttgccaggggcgctagtgcaaagggcttctt

SEQ ID NO: 106605 - DNA, 264 bp, Glycine max
tgtagcttgtctagacattatgtgctggtgtctagctgcgatttagtgtcttcttgctcgggcagaaatgagaagtatgaataaatcggtttcgggaaccggtgttgttaccctgttaggagcattaagcttttttttgttgtctcttctgtgtaggggatggagtttttggattattatatacttgctgatgtactcggctctttgttgattctgattgcagacatttttgccccccaaaaaaaaaaaaaaaaaaaagaaaaa

SEQ ID NO: 106606 - DNA, 259 bp, Glycine max
ctcgagccgctcgagccgtgggtttcataggaagagttgggagatatttgggctatggccactgggaaagcggttatgtgttcgctgagccagttgcgtccgctaacatgcgcatcgacgtcagcgtcacgattagtgccccagccacccgacctcatcaagtgggtaaccagagaaggtggcttcgtgcaccgcgccgtcaagataacacaactcgactcctccaacggactgggcctggtggccagggaagaaattc

SEQ ID NO: 106607 - DNA, 259 bp, Glycine max
ctcgagccgggaagattgttgacgtgctcctcgagcaaaacattgttcccggtattaaagtcgacaagggtttggtaccccttgctggttccaacgatgagtcatggtgccaaggtcttgatggtcttgcctctcgctcggctgcatactaccagcaaggtgcccgtttcgccaaatggcgtactgttgtgagcatccccaacggtccctctgctctggacattaaggaagcagcctggggtctggctcgctatgccgc

SEQ ID NO: 106608 - DNA, 262 bp, Glycine max
ggagaaactgcaattaagtgatgatcttcctaggactggaatgaaagtgatagggaagctgaaccctgaagatggcactatctttctcaaagtgcaaatttctgataaggatggttctgctagaaatgtattttttccctttgacatattatctgacacacctattgatgttgcaaccgagatggtgaaagagttggagattgcagattgggagccttttgagattgcgaatatgattgacagagagatatctgctctgcta

SEQ ID NO: 106609 - DNA, 221 bp, Glycine max
caatatagcccaagccctatacaaccaaaccctaacacacacccatttgattcagtttccatggctagcctcaaggttgcatttttggctgcagtgctctgcatggttgtggtgagtgcacccatggcacatgcagctatcacgtgcgggcaggtgacgaatagcctgatcaattgcatcggttacctccagaacggaggaacgccgccgtcgggatgctg

SEQ ID NO: 106610 - DNA, 191 bp, Glycine max
atctacctgaagcacctgagaaggcaacccgtcgtcctccactccctgttgatccttacttaagatatgggcccaaagccgatatagctcacttattcagggctccagaaaagcgaccacaccgcgaactctctcttactttcttgggcttgacccatctgccattaattggctttacggtcgggctgtta

SEQ ID NO: 106611 - DNA, 263 bp, Glycine max
acctgcttgtctgtctcaattccgtacgtgctctgaatgaaccatcttggtcctggaagcatgatatatcccatttgattagcgagattaaatctagactcctgtctctcaagacaaatatcacgggctcaaacagtatcataacgacgaatttgtaacgtagtgttgtagtgcatgtattgcatatttatagtgtattgagaaaaaatgtcaatatccttcccttgtatatctgtaggcttcttttaatcccagagaattga

SEQ ID NO: 106612 - DNA, 255 bp, Glycine max
ccctacaacacaacagaaagttatggatgagattttaggagcagttagcatgttagctcaggatcagtatggcaactacgttgttcagcatgtgctggaacatgggaagcctcatgagcgttcttctataataaaggaattagcagacaagatagtgcaaatgagtcaacagaagtttgcctccaatgttgtggcgaaatgtttgacctttggaggtccttctgaacgccaattactagtgagtcagatgcttgg

SEQ ID NO: 106613 - DNA, 262 bp, Glycine max
gtcttcctgaacaagccttttatttggtaggtaatatcgatgaagctactgcgaaaggtacgaacttagaaatggagagcaatatgaagaaatgactttaaatctttgtgtcgtgacccccaatcgaattgtttgggattcggaagtgaaggaaatcattttatctactaatagcgaagaaattggagtgataccaaatcatgcgcctattgcgagagccgtagatataggtattttgagaatacgtcttcttaaagaccaa

SEQ ID NO: 106614 - DNA, 103 bp, Glycine max
ccctgcttgtctgtctcaattccgtacgtgctctgaatgaaccaaattggtcctggaagcatgatatatcccatttgattagcgagattaaatctagactcct

SEQ ID NO: 106615 - DNA, 221 bp, Glycine max
cggctcgagagagacaacctggtgaactgaaacatcttagtagccagaggaaaagaaagcaaaagcgattcccgtagtagcggcgagcgaaatgggagcagtctaaaccgtgaaaacggggttgtgggagagctatacaagtgtcgtgctgctaggcgaacagcagagaatgctgcaccctagatggcgagattccagtagccgaaagcttcactagctta

SEQ ID NO: 106616 - DNA, 201 bp, Glycine max
aacatatacaaattctctgtgttgtgttgtgtacttgtgttaattgtgttgttgttgtaggaaattttagtgcagagagaatgatgatgaagtctgctatgtgtgcattggtgcttgtggcactggttgtggttgaagtggggcccatggctgaggctgcggtgacttgcaacccaacacagttgactccttgtcttccgg

SEQ ID NO: 106617 - DNA, 260 bp, Glycine max
ggtgaagatttattatctattgcagcagaccagcccttccgatttcctgctacattcacatttgttgttagagccttctcagtgttggatggcattggaaaggggcttgacccacgttttgacatcactgaagttgccaaaccttatgccctggagttgctcaggtttcgtgaagctggggttgaagttgtcctaaaggacttcaggaagagatgggatagacaatctcaagcattttacaacttaatcagacaggctga

SEQ ID NO: 106618 - DNA, 92 bp, Glycine max
ggcagagaacccccgtgttcccatcattgtcaccggtaacgatttctcaacactctatgcacctctcatccgtgatgggcgtatggagaagt

SEQ ID NO: 106619 - DNA, 242 bp, Glycine max
gatttctcaacactctatgcacctctcatccgtgatgggcgtatggagaagttctactgggcaccatgcaagggaagaccgcattggtgtttgcaccggaattttccgcactgatggtattcctgaacaggacattgtcaagcttgttgacaccttccctggccaatccattgatttctttggtgcactgagggccagagtatatgatgatggagtgaggaagtggatttctggtgttggtg

SEQ ID NO: 106620 - DNA, 256 bp, Glycine max
ctcgagccggttatctgtttcccgccatatatccaataagctttaaccatgtctgcctttgttggaaagtacgcagatgagcttatcaagaatgccaagtacatagccacagatgggaagggcatcttggcagcagatgagagtactggtaccattgggaagcgcctatcatcggattaacgtagagaacattgaggccaaccgccaagctcttcgcgagcttctcttcaccgctccagatgccctccaatacctc

SEQ ID NO: 106621 - DNA, 253 bp, Glycine max
cttgttccactttcttacattgctggtttgctaactggcagacccaactccaaagctgttggaccttctggagaagtacttaacgcaaaagaagcttttgaattggctagcatcaactctgagttctttgaattgcaacccaaggaaggtcttgcccttgttaatggcactgctgttggttagggattagcttctatggtactctttgaggctaatatactagctgtgttgtctgaagttctaccagctattt

SEQ ID NO: 106622 - DNA, 196 bp, Glycine max
agaggagatgaggaagaacttgccaaggaaaacaataaaagtgcctcatcatccaagggcaaaatcaccttgagtgtcaccaagaccaagcctgagacgggtgaggttatcggtgtgttcgagagtgttcaaccatctgacatgatttgggagcaaaggctccaaaggatgtcaagatccagggcatctggtatgc

SEQ ID NO: 106623 - DNA, 134 bp, Glycine max
cacaaaaatgagggatttgatgaggtacttactgctcagcagagtcctgagaatcctaattggttccaaggtacttcacatgctgtcaggcagtcttagtaggctttatggagtgaacaatgttgtggaattct

SEQ ID NO: 106624 - DNA, 146 bp, Glycine max
agaacgtgatgcaccattttgggaaccctagattcgagctcatccgacacgacgtcgttgagcctctcctgctcgaagttgatcagatctaccatctggcttgccctgcttcccctgtccactacaagttcaaccccgtcagacta

SEQ ID NO: 106625 - DNA, 108 bp, Glycine max
cccagctgttaccactgtacaccgtgccggtgccggcatggttgctccattcactggcctcaagtccatggctggcttcccaccagaaagaccaacaatgacattact

SEQ ID NO: 106626 - DNA, 189 bp, Glycine max
agtggcgtactgtttggtgagctgggccgtgggccttccaaagcgtgctcctatagactccaacctactgaagttgctcattccagtggctgtgtgtcatgcattaggccatgtgaccagcaatgtctcatttgctgcattgctgtttctttcactcataccattaaagctcttgaaccattcttcaat

SEQ ID NO: 106627 - DNA, 182 bp, Glycine max
cgagatcgcaaaagagttcgaattggtttacaattccttgaccgacacggagctggcggtggtgacgtcggtggtgaagctggagtcgcagcacctggcgcagatcgcgaagagggttcagaagctcactgggacgaaaacgtgaggattaagacgctacttgaccctagtttggtcgcggg

SEQ ID NO: 106628 - DNA, 217 bp, Glycine max
caaaaatggcatcattcaccatgacagcttccatccttggcagcccagccgtcaccaaccggtcggcagtagcaacgcagaggagatcactcgtagtgaatgctgccaaagctgttgaagcagaaaaggtcagttatgaaatgacatggatggtagcactggaaggaggaacttgatgttcgccgcggcggggctgctgtttgctctgttgctggga

SEQ ID NO: 106629 - DNA, 91 bp, Glycine max
gctgaattaaatgcagaataagtgatttatcctgatagtgatgatgaattggatggcgtcatgcggaatagtgaattatttctaaccatag

SEQ ID NO: 106630 - DNA, 163 bp, Glycine max
aagagatctgcctcctttttatcaaatctatctcttcttcaagaatagttgaaaatggggctgtctttcaccaagttgttcagccgactgtttgccaagaaagagatgcgtatactgatggtgggtctcgatgctgcggtaagaccacagttctgtacaagct

SEQ ID NO: 106631 - DNA, 190 bp, Glycine max
ggcaggtactcggtgaagcggttcaggaaggcgcaatgctccattgttgagaggctgaccaactctctcattatgcacggtagaaacaatggcaagaaactcttggctgttaggatcatcaaacatgctatggagattattctgtgttgactgaccagaaccccattcaggttattgttgaagctgtagt

SEQ ID NO: 106632 - DNA, 173 bp, Glycine max
atgggagtgcattaggtgctaaagaagtggatgctacaaggaagaatcttggatggccatacgagcctttccatgtgccagaagatgtacaagagcattggagtcgccatacacctgagggtgctaaacttgaagctagtggaatgccaagtttgtggaatatgagaagcaat

SEQ ID NO: 106633 - DNA, 170 bp, Glycine max
caacttcagttctctggggatattttgcttacatggccattgatagtcttccaggaaatcaattctgggaaaggatcctacttctttttgtaacacctagtaggtggtacaagttgctagaaggggatcatgcttccttgttgagtcggtaccttacaaatacatagtct

SEQ ID NO: 106634 - DNA, 131 bp, Glycine max
cgcatatgcagaacttgcgcctgctttgtctggtttgaatgttcttgttgagacctactttgctgacatccctgctgaggcatacaagaccctcacatctctgaatggcgtcactgcatatggatttgatt

SEQ ID NO: 106635 - DNA, 213 bp, Glycine max
caagtagttgagaactaagaaggagaagcaaatggcttcctcaatgatctcttccccagctgttaccactgtcaaccgtgccggtgccggcatggttgctccattcactggcctcaagtccatggctggcttccccacagaaagaccaacaatgacattacctccattgctagcaacggtggaagagtgcaatgcatgcaggtgtggccacca

SEQ ID NO: 106636 - DNA, 177 bp, Glycine max
ggcttatggtggatacctaggcacccagagacgaggaagggcgtagtaagcgacgaaatgcttcggggagttgataataagcgtagatccggggattcccgatataggtcaacctttcgaactgctgctgaatccagggcaggcaagagacaacctggtgaattgaaacatcttagt

SEQ ID NO: 106637 - DNA, 199 bp, Glycine max
cttccatcaccgttttccggctatccctaatcctacacagaaatgacgacatcaaggcgccttgcggacaggaaggtggagaagtttgagaaaaacatcaccaaaagaggatttgtgccagacacaaccactaaaaggggaaagactaccctgttggcccagtgctgctcggtttcttcgtctttgttgtcattggatc

SEQ ID NO: 106638 - DNA, 181 bp, Glycine max
gggttgtgaaagcagagaagtgagatacactaagttatcctcataaatacactctaattaggtggcaagataagtgtctaaccttagtaacattgccacatattgtgttcattttggaattgtgccactaaaattctattaattcatctatggctgcctcttcttatgctatgcaatcaat

SEQ ID NO: 106639 - DNA, 166 bp, Glycine max
cttcttcgtctcaaacctcttcgttccttcgattcattccatttcttccaaaatggccaaagactcagttcgcgttctcgtcactggagccgcaggcaaattggatatgctcttgtccctatgattgctaggggttgatgctgggtcctgaccagcccgtgatcct

SEQ ID NO: 106640 - DNA, 213 bp, Glycine max
agaaggtggtaggcattcacctttctttgcagggtataggcctcagttttacatgaggaccaccgatgtgactgggaaggttacgtctatcatgaatgataaggatgaggagtccacgatggtgctgcccggtgacgtgtcaagatggtggtggagcttattgttcctgtggcttgcgaacagggaatgaggtttgctattagggaaggtggg

SEQ ID NO: 106641 - DNA, 189 bp, Glycine max
ggctgccactgctgctgcaggcatagcttccttgttttcttcttctattaacactgtcaaatgtcttcggtcctccaagaactgctccataatagaccctctcataacaacagtgccctcaaaccgtggcatgttgggtcacacttggtggaacctttgtccattaattcgcacaagttgtggggacct

SEQ ID NO: 106642 - DNA, 196 bp, Glycine max
atcgaaggtaaccacctcactcacgctgctatcatcggccaagacggcagcgtttgggctcagagtaccgacttccctcagttcaaacctgaggagataactgccatcatgaatgactttaatgagcctagatacttgctccaactggattgtatctcggtggcaccaaatatatggtcatccagggtgaacccgg

SEQ ID NO: 106643 - DNA, 167 bp, Glycine max
ggtacacaaaataaataggacaattctgaagctttttgtgcaatttaatttctaattaagttcaattctcatcagtaaaaaagtggtacacccaaaaatacagataattcgccagctttatgtgcaatttgtgtccattcaaattatcttcaatacgagtcaaggga

SEQ ID NO: 106644 - DNA, 213 bp, Glycine max
  unsure (1)..(213): unsure at all n locations
aaacactcataacacaaagcacaaagcaaagctcatccttgagttaaaaaatggcagcagcttcttccatggctctctcatcccnctccttggctggcaaggccgtgaagctgggcccatcagccccagaagtggaagggtgagcatgaggaagaccgtcaccaagcaggtctcctcaggaagcccatggtacggcccagaccgagtcaagta

SEQ ID NO: 106645 - DNA, 158 bp, Glycine max
gttaagcgtactctggcaactttacgtagtcttagtaagaggggggagggttaaagatttacccggtgtgagatatcacattgttcgaggaaccctagatgctgtcggagtaaaggatcgtcaacaagggcgttcaaatatggggccaaaaagcaatg

SEQ ID NO: 106646 - DNA, 155 bp, Glycine max
gtctgtgaaacatgtcatattactttgaataaaattgctatttttggcgacaatggaactataattcctggaggtgtaagagtaggtacccctgccatgacgtcaagaggatgtctggaagctcattttgaacaatggctgaatttctcattaga

SEQ ID NO: 106647 - DNA, 154 bp, Glycine max
ggggtcagtatagaagactggtggagaaatgaacagttctgggttatcggtgggacatctgcgcatctctttgctgtgttccaggggcttctaaaagtgcttgctgggatcgatacaaattttactgttaatcgaagagcatcggacgaggatg

SEQ ID NO: 106648 - DNA, 170 bp, Glycine max
ctttggtggccacagcaacaataacaatggcagcctcactacaagctgcagctaccttcatgcaacccaccaaggtgggcatggccactcgcaacctcaaatctacacaatgcatttctaaggcttttggcttggaacccgctgcagctaaactcatttgctcccttaag

SEQ ID NO: 106649 - DNA, 127 bp, Glycine max
tctcatgtcttcatcgttcgattcttctcctcctaaagatgcagatcttcgtgaaaactttgaccggtaagaccatcacccttgaggtggagtcctccgacaccatcgataacgtgaaagctaagat

SEQ ID NO: 106650 - DNA, 179 bp, Glycine max
cgggagtgcaccaatgcaagataattcaggcagttcagttacaatttcatcaccacaggtttctccaacgcatgctcgaattaactataaggatggtgccttcttcttgattgatttatggagtgagcatggcctggatcattgacaacgaaggaaagcagtaccggggtacttcctaa

SEQ ID NO: 106651 - DNA, 208 bp, Glycine max
gtcggctggttctgccactccgcccttctcgtcccatacttctcgtggaagatctcccacggtaagcaccacaaggccaccggccacatggagcgcgacatggtcttcgttcccaagacacgcgaggtatacctacccgtgtcggcaaggcggtccacgagatctccgagctggctgaagagacccccatctacaccctgctccactc

SEQ ID NO: 106652 - DNA, 165 bp, Glycine max
aaagtacagtccatttttagtgatctctttaatttatttgttcatagattaatatggtcgtgtatgattgcttttctatttattgtggcatttttgtgttgtaccctgttgttgtgtttgcaataattattgtaataaagcagcaaattcaatttgtgttcatgc

SEQ ID NO: 106653 - DNA, 116 bp, Glycine max
agcaagatgatttatgcaagctccaaagacagattcaagagggagctggatggaattcaagtagagttgcaagcaactgatcctactgagatgggtcttgatgtgttcaaaaccgt

SEQ ID NO: 106654 - DNA, 269 bp, Glycine max
ctgattcggtacgacaccacccttctgttttgaagaaaaccttattgtctcagcttttggtgcacatgaacgttcagtttgacatctaactttgaattacgaccatgaacttgtatatctttgcagaatttgattttagcagaactgaccccaccatggtcacgctaacatgggcactatctctgctacttaaccatcaaatggaacttaaaagagcccgacatgaactggacactcttattgggaaggacaggaaggtggaagaatct

SEQ ID NO: 106655 - DNA, 262 bp, Glycine max
gcagaagaacaagtagttgagaactaagaaggagaagcaaatggcttcctcaatgatctcttccccagctgttaccactgtcaaccgtgccggtgccggcatggttgctccattcactggcctcaagtccatggctggcttccccaccaggaagaccaacaatgacattacctccattgctagcaacggtggaagagtgcaatgcatgcaggtgtggccaccagttggcaagaagaagcttgacactctttcctacctgcca

SEQ ID NO: 106656 - DNA, 258 bp, Glycine max
caatattgtaaaactcaaaatctagtttcatactttttttcttcttcttgaaatggctctccaggctgcctctcttgttcctgcttctttctcggttcttaaagagggaaagagtggtgtgtctctcaaggactcaccttgttcggtctttcattttcagaacctatcaaagctaacttcagctcttctgcattgaggtgtaagagggaattcgaacaaaagctctgtgctgtgagggccgaaacagtggctacagcc

SEQ ID NO: 106657 - DNA, 262 bp, Glycine max
tgtgaatggggccagggtgctaagcttgatgttctggaatcaaagattgcttcagatacttcacacactattaaggcaatttgcattgtccacaatgagactgcaactggggtcaccaatgacttggccaaagtgagacaattctcgattcctaccggcatccagccctccttattgttgatggagtgtcttctactcgtatccttgatttccgcatggatgaatggggagttgatgtggcaataactggctctcagaaggc

SEQ ID NO: 106658 - DNA, 264 bp, Glycine max
aaatcacccaacaagcacactcgtccgtacatggaagcaagaccattggatcaaggtcttgccgaggacattgacgatggcaagattggaccaagggatgaccccaagattcgctccaagaacttgtcagaagagtttgtatgggacaaggctctcgccaacacaatctggtgctttggctctgagacccatggacccaagatggtggtccatatgtgtaagggagtccagtatttgaatgaaatcaaggattctgtggtgctg

SEQ ID NO: 106659 - DNA, 263 bp, Glycine max
tgccatattccacaagaactctccaatgatcctccttcccacgagattctttggtgggaaaaatccaagaggtttgaaatttgaaggcagggaagatggattatttcaatgcaccaggaagaaaccatcttcttgttccaggccggataacattccggaccagatcatccgggccatgaacagaaacaatgaggactaccgttctccagcaattccagctatgacaaaaactttgcttgaggatgtcaagaagattttcaaga

SEQ ID NO: 106660 - DNA, 261 bp, Glycine max
agcaagatgccccgtcaacttttggctactcgctatgttgccatccctgaggatgtcaagcttgttctcgatggccgcaaggtgaccgtgagcggtaagcgcggcgagctgagacgcgacttccgtcacttgacgccgacatgcgtcgtgtaaacaaggagcagctccgcgtggacctgtggtttggcaaccgtaagcagctcgcctgcgtgcgtacgatctgctcgcttattgaaaacatgatcacgggtgtgcgtgtcg

SEQ ID NO: 106661 - DNA, 260 bp, Glycine max
gagatctttagttggttctagactcggcacattcaccaaagctcaatctgaaagtctcaaaggttcatactattttcttggtatagattattacactccaagtttcgtggaatatgctccaccaaccaccactacaagacctatttcactgataccttagccaaactttcttcgagcaggaatggtgtacccattgggacaccgaatcctctgagctggctctttatctatccggtgggtgtttgtaagctcacgacata

SEQ ID NO: 106662 - DNA, 260 bp, Glycine max
ctgctgattactcagcatattgctatgatcttcgcaatcttagaaacccttggtgtgtgttggctggccatcgtaaagctgtaagctatgtgaaattcttggactctgaaacacttgtatctgcatcaaccgataacatgttgaagatctgggatctcaataaaacctctcctgtgggtccatcaactagtgcttgcagcttaaccctgtctggacatactaatgagaagagattttgtgggtttatcagttgccgatgg

SEQ ID NO: 106663 - DNA, 261 bp, Glycine max
gataggatgagcaaggagattacagcattggcaccaagtagcaatgccagggtccattgtggaaccaccactcaagacaatgttccctggcattgctgataggatgagcaaggagattacagcattagcaccaagctcatgaaaattaaggttgtagcaccaccagagaggaagtacagtgtctgagctggaggttccatcttggcttccctcagcaccttccaacagatgtggattgcgaaggcagagtatgatgaatct

SEQ ID NO: 106664 - DNA, 262 bp, Glycine max
  unsure (1)..(262): unsure at all n locations
gtaagctgcaagcagtgggaggtggctcgggactctgaccgcgtgcctgttgaagaatgagccggcgactcataggcagtggcttggttacctgtaaccaccggagccgtagcgaaactgngtcttcacagggcaatgtcactgcttatggacccgaacctgggtgatctatccatgaccaggatgaagcttgggtgaaactaagtggaggtccgaaccgactgatgttgaagaatcagcggatgagttgtggttaggggtg

SEQ ID NO: 106665 - DNA, 118 bp, Glycine max
tataagctcgcaagcagtgggaggaggctctggactctgaccgcgtgcctgctgaagattgagccggcgactcatatgcagtagctttgttaagggacaccaccggagccgtagcgaa

SEQ ID NO: 106666 - DNA, 255 bp, Glycine max
gtggaagagtgcaatgcatgcaggtgtggccaccagttggcaagaagaagtttgagactctttcctacctgccagaccttgatgatgcacaattggcaaaggaagtagaataccttcttaggaagggatggttccttgcttggacttcgagttggagcacggtttcgtgtaccgtgagcacaacaggtcaccaggatactacgatggacgctactggaccatgtggaagctgcctatgtttggttgcactgatgc

SEQ ID NO: 106667 - DNA, 260 bp, Glycine max
cttcaaaacactcataacacaaagcacaaagcaaagctcatccttgagttaaaaaatggcagcagcttcttccatggctctcatctccacatccttggctggcaaggccgcacagctgggcccatcagccccagaatgggaagggtgagcatgaggaagatcgtcaccaagcaggtctcctcaggaagcccatggtacggcccagaccgagtcaagtacttgggcccattctctggcgagcccccgtcctacctaaccgg

SEQ ID NO: 106668 - DNA, 261 bp, Glycine max
tgatcgagataactagacactgtgtgttgaaaatgaaggtccttgtattcttcgttgctacaattttggtagtatggcaatgccatgcgtacgatatgttacctctccgaatgaacactggctatggtgcccgtactcggaggtgaaatgcgcaagttggaggcttgctgtggaagcacacaacatctttggctcttagaccattcctgaagagtgcgttgaagcaacaaaggaatacatccatggcgaactctatagatc

SEQ ID NO: 106669 - DNA, 278 bp, Glycine max
caaaacctctctcaagatggccacattcacgcccttagctgtgcttcgcacaccgttcagacactgcgctacgttgctcctatgcttgcttcgttctatctgtctatcgcttcccgttctgctgcattcaacgatcagggccctggtgtttgctggcccctgccccctcatcaccccaactgtgagagaggatatggcaaaggaatacgagcaagctattgaagaactccagaaattgttgagggagaagagtgaactcaaagccacagctgctgaga

SEQ ID NO: 106670 - DNA, 263 bp, Glycine max
cttgttgcagccatggccacccacgcggctctagcttctacaaggatctccactaacaccaagttcccatccaaggcttcacactctttcccaacccaatgcgcctcaaagagacttgaggtgacagaattctcgggctaagatccacttcatgtgtgacatatgctaacgatgctagagaatcttccttttttgatcttgtagcttcccaactcactcccaagaccaatggatcatcaactcctgtgaggggagagacagtg

SEQ ID NO: 106671 - DNA, 257 bp, Glycine max
  unsure (1)..(257): unsure at all n locations
agtaaatcttcctaagggaaccggaaaacccgttaaagtggctgttcttactcaaggcgaaaaattcgatgaagcaaaaaatgccggagctgatttggtgggtggagaggatctgatagaacagataaaagcagggttcatggagtttgataaactaattgcttctccagatatgatgcctaaggttgctagcctagggaagattctgggaccaagaggactgatgccanacccaaaagctggcactgtaacaccaa

SEQ ID NO: 106672 - DNA, 253 bp, Glycine max
gtgagatacacagtagttaggtagcaagcataagtgtctaaccttagaaacatatctgctacatttcgtgtgcattttggaattgtgccactaaaattctattcacttatggctgcctcatcttatgcttgcaatcaatccttgcaaaccctctgatccgcatttccagcgggtctagggagaaccattttggtgttcctgcttatcacatgagaaggaatgttggcctgagagttaggtccatggctgagga

SEQ ID NO: 106673 - DNA, 253 bp, Glycine max
gcatctaagtgagatacacagtagttacctttcagcataagtgtctaaccttagaaacatatctgctacatatcgtgtgcattttggaattgtgccactaaaattctattcatctatggctgcctcatttatgctatgcaatcaatccttgcaaaccctatgatccgcatttccagcgggtctagggagaaccattttggtgttcctgcttatcacatgagaaggaatgttggcctgagagttaggtccatgg

SEQ ID NO: 106674 - DNA, 271 bp, Glycine max
ggcatcgcttctcctctctcgcaagaaagaatcatcaatggcgattgaacacgaagactatctcaaagactagaagaaccctcgacctctcgacgatgatgacatcgccgtcctcaagacctacggtttgggaccttactccaaagcataaaaaaggcggagaaggaaattaaagatatggccaagaaagtgaatgacctatgtggtataaaggagtctgatactggtttagctgcaccaagccagtgggatcttgtttctgataagcaaa

SEQ ID NO: 106675 - DNA, 271 bp, Glycine max
gtggtgagagtcctcttagcacaggtgtcaatggagagcttcacccttcaaggttttgtgagaaggacttgctcaaggttgttgatagggagtacacatttgcatacattgatgacccctgcagtggaacataccctttgacgcaaaagctaaggcaagtgcttgtggactatgcattggccaatggagagaacgagtagaacacaaacacatcaatcttccaaaagattgcaacatctcatgaagagttgaagacccttttgcctaagga

SEQ ID NO: 106676 - DNA, 259 bp, Glycine max
tggctaccaccagagaggcacccgcagcagaagttgccacgaccgagctctctgttgccgagacgccagagattgtgaagactattcaagaagcttgggacaaagttgaagacaaatatgcagtgagttcacttgccgtagccggtgtggttgcattggttggctcagctggatatgatctcagcaattgataggcttcctttaattcctggggttcttgaggtcgtaggcattggctacagtgggtggtttgcttaca

SEQ ID NO: 106677 - DNA, 254 bp, Glycine max
gcatctaagtgagatacacagtagttagctcgcaagcataagtgtctaaccttagaaacatatctgctacatatcgtgtgcattttggaattgtgccactaaaattctattcatctatggctgcctcatttatgctatgcaatcaatccttgcaaaccctatgatccgcatttccagcgggtctagggagaaccattttggtgttcctgcttatcacatgagaaggaatgttggcctgagagttaggtccatgg

SEQ ID NO: 106678 - DNA, 274 bp, Glycine max
gcctcacattgcagaacagtttgtacactctcttggattaagttttaatccttacgttgctcagattgaaactcatgactacatggcaaagctttttcattcgctcatccagttcaataatatattaatcgattttgatagagatgtgtggggctatatatctttgggttactttaagcagaccactaaggctggggagattgggtcatcaactatgcctcacaaagtgaatcctattgattttgagaacagcgaaggtaatctaggtgtagct

SEQ ID NO: 106679 - DNA, 273 bp, Glycine max
cttcaaaacactcataacacaaagcacaaagcaaagctcatccatgagttaaaaaatggcagcagctccttccatggctctctcatccccatccttggctggcaaggccgtgaagctgggcccatcagccccagaagtggcaagggtgagcatgaggaagaccgtcaccaagcaggtctcctcaggaagcccatggtacggcccagaccgagtcaagtacttgggcccattctctggcgagcccccgtcctacctaaccggtgagttcccagg

SEQ ID NO: 106680 - DNA, 273 bp, Glycine max
gctaaagcacaagatggctgagcagatcaggagagaagtagcaacaagaaaactaatcaagcatccaaatgttgttcgattgtgtgaggtcatgggaagcaagacaaaaatatatattgttttagagtttgtaaccgggggagagctctttgacaaaattgtaaaccatggaaggatgagtgaaaatgaagctcgtagatatttccagcagcttataaatgctgttgattattgccatagcaggggtgtttaccacagagacctgaagccaga

SEQ ID NO: 106681 - DNA, 288 bp, Glycine max
ctccgaattcagctcgattgcgtgttggtgccgccctaatcgtgagccgaaaggaaaggcaaaagggaaagatggtgtgcataaggaaggcgacggtgaaggaccttctggcgatgcaggcgtgcaacctgttctgcctccctgagaactaccagatgaagtactacctctatcacatcctctcctggccccagctcctctacgtcgccgaagactacaacggccgcatcgtcggctacgtcctcgccaagatggaggaagagaccactgactgccacggccacatca

SEQ ID NO: 106682 - DNA, 276 bp, Glycine max
tgagaatacatgctctgcaaaggaaggaataggtataattgaaattctcagtgcaattgttgcaagaattcccccacctgaagatacatctaaaaaaccattgaggactttaatatttgacagctactatgatccatatagaggtgttattgtatactttcgagttgtagatgggactataaagaaaggtgacagagtttattttatggctagtgggaaggattattttgctgatgaaattggagttttgtctcctagtcaactacaagttgaaga

SEQ ID NO: 106683 - DNA, 263 bp, Glycine max
gacaagtctgagtgggtgaagggacaaacacttcgccaaccttctgctgcatcagttgtgagatgcaaccccaccaccccatcaggcctcaccatcagagctggttcctatgctgatgagctcgttaagaccgcgaaaccagtggcttcaccagggaggggtattatggccatggatgagtccaatgctacctgtgggaagcgtttggcttcaattgggctagagaacactgaagctaaccgccagcataccgtaccctcctt

SEQ ID NO: 106684 - DNA, 272 bp, Glycine max
agctcgagccgtgatgattaccttgagaggagcaaggctaacaaggaattgaatgacaagaagaggttagctactactggagcaaactttgcaagagcatacaccgtggaattcggtagttgcaagttccctgagaacttcactggttgccaagctcttgccgaacaaaagaaagtgccattccttagtgacgatttggagcttgaatgcgaaggaaaggacaaatacaagtgcggttctaatgttttctggaaatggtgaaaggaggcaac

SEQ ID NO: 106685 - DNA, 249 bp, Glycine max
gtggttgcccttggagctgctgttcaggctggtgtcttggctggagatgtcagcgacattgtgctgttggatgtcactccattatctttgggtctggaaactctaggtggtgtgatgacaaaaattatccccagaaacactacccttcccacctcaaagtctgaggttttctcaactgctgctgatggacagaccagtgtagagatcaacgtccttcagggtgagagacatttgttaggggccataaat

SEQ ID NO: 106686 - DNA, 272 bp, Glycine max
actcgagccgtccttttctatttaattcctaaaatcccattcttcttcgctcattcctctgcactgccatcatccccaacttcctcacaaggttacaaggactaaagagttgtgccaccatgtcggacgatgaaagggaggagaaagagttggatctctcttctgccgaagttgtcaccaaatacaaaaccgctgctgagatcgttaacaaggccttgaagctagttatttcagaatgtaaaccaaaggcgaagattgtggatatttgtgag

SEQ ID NO: 106687 - DNA, 263 bp, Glycine max
taatgaatgggttgttgctactggttctacggataaaactgtgaaattgtttgatctgcggaagatcaatactccgctgcacatctttgattctcacaaggaggaggttttccaggttggctggaatccaaagaatgagactatcttggcttcttgttgtctgggtaggagactcatggtgtgggatcttagcaggattgatgaagagcagtcaccagaagatgccgaagatggtccaccagagttgctctttattcatggtg

SEQ ID NO: 106688 - DNA, 264 bp, Glycine max
agatgcttcagaccaggatattctcttatgctgattcacaaaggcacagacttggaccaaactatctgcaacttcctgctaatgctcccaagtgtgctcaccacaataatcatcatgaaggtttcatgaatttcattcacagggatgaggaggtaagttaatgtttaatttcttatattttcttatttgttttctgtttgaaaatctggttgccttgttaactacttagtgctgttagattattcatgcacatgctgattgggt

SEQ ID NO: 106689 - DNA, 272 bp, Glycine max
cccgttgccattctcatcctcctctgtctctctctctccaccattgccatggatccttacaagctccggccatccagcgctttcaattctcccttctggactacaaattctggtgctcctgtttggaacaacaactcctctttaaccgttggagctagacgtccaattctgcttgaggattatcatcttgtggagaagcttgcaaactttgacagggaacgtatcccagaacgtgttgtccatgccaggggagctagtgcaaagggtttctt

SEQ ID NO: 106690 - DNA, 272 bp, Glycine max
tcatcaacacacacaaagacaacaacatatggaggtgctaagggtgcaaaccatagcttccaaatccaaagatgctgccatcccaaccatgtttatgagggcagagacagagcaaccaggcatcacaaccgttcaaggggtgaaccttgaagtgccaattattgattttagtgacccagatgaagggaaagtggtgcatgacattttggaggcaagtagggactggggcatgttccaaattgtgaaccatgacatacctagtgatgttataa

SEQ ID NO: 106691 - DNA, 276 bp, Glycine max
ctcgagccgttagtcttcttctgcacccgcgccgtttctgtgcatttactctgctacctagtgacaatggtgagggttagtgtgttgaatgatgctcttaagagcatgtacaatgctgagaaacgggggaagcgccaggtcatgattaggccatcctcaaaagtgattataaaattccttttggtgatgcaaaagcatgggtacattggagagtttgagtacgttgatgatcacagagctggaaaaattgttgttgaattgaatggtagactgaac

SEQ ID NO: 106692 - DNA, 251 bp, Glycine max
gtgtacatgctactaattagcatatttgtcagccttcttagaggggttttacgtaattcagttttatactttcttcgggaccctgctgatccaaactacaatccatacagtgatctgatagatgatcctgtgcacaaacatgctcgcagggttctgttatctgttgcagtttatgggagtctgattgtgatgctggtattcatgcctgtcaaacttgccatgcggatggcaccgtcgatttttccacacaa

SEQ ID NO: 106693 - DNA, 270 bp, Glycine max
ctcgagccgttttccttgttgtggtgtttcatttgtgaaactaacaacaacacaaggccactcatcatggcagctggttccccaatggcaagccaactcaagtccaccttcactaggactctagtagctcccaagggcctctctgcctcttcaccacttcacctcgtgccttctagaaggcaatttagcttcactgttaaggccatccaatcagagaagccaacctatcaagtgattcagccaatcaacggtgacccattcattggaagc

SEQ ID NO: 106694 - DNA, 267 bp, Glycine max
gcgagttgaggcaaggcttgcagcacttctgatggaaagtaaggagtattcagaagctttgactcttctttctggcttggtcaaagaagttaggagattagatgacaagcttcttcttgtggatatagatttgctggaaagcaagctgcatttctcattaagaaaccttccaaaggcaaaagctgcactcacggctgcaagaacagctgcaaatgctatttatgtgcccccagctcaacaaggtgccatagatctgcagagtggaat

SEQ ID NO: 106695 - DNA, 266 bp, Glycine max
cgacgagcgtgggggacctgagcgcggcggacctgaaggggaagaaggtcttcgtcagggccgacctcaacgtcccgctcgacgacaaccagaacatcaccgacgacaccagaatccgcgccgccattcccaccatcaaacatctcatccaaaacggcgccaaagtcattctctccagccacttggggcggccgaagggtgtcactcccaaatacagcttggcgcctcttgtaccccggctttctgagctcattggtatccagatt

SEQ ID NO: 106696 - DNA, 269 bp, Glycine max
cgggggctcgccagagaatgggcccaagtccttgacgcgggctgggccgtaccatgggcttccggaggaggcctgcttggtgacggacttcctcatgctgggctttcggacgacccagaaacctacgccagaaaccgtgagctcgaagtgatccactccaggtgggccaacctcggggccttggagtgcgtcttccccgaactgttgtcccgcaacggggtcaagtttggagaagctgtgtggttcaaggccgggtcccagatcttcag

SEQ ID NO: 106697 - DNA, 266 bp, Glycine max
gcatatgttatgccttgcaatttcaagatgtgatttgactcaacttctgggatttgagaaattcattccacactttataaaaaagaatggtttaaacatacttaaaggtgttaactatgcatcaggtggagctggaatacgcattgaaaccggctcggacatgggtgctactatcagcttgggattacagttagcaaatcacagagtcatagtttctgaaattgctacgaaacttggaagtcctgacttagctcgacaataccttg

SEQ ID NO: 106698 - DNA, 264 bp, Glycine max
tctctctctctctatctccgtgtttcattccaactgataaacaacaactcaattaagaaattcttctccggagccatggcagatctcacatctacattcttgaacgtctattccgttctcaaatctgaactcctccacgactccgccttcgagttctccgatgatgctcgccattgggtcgaccggatgctagactacaatgtgcctggaggaaagttgaccggggactgtcagtcattggacagctacagattgttgaaagaa

SEQ ID NO: 106699 - DNA, 260 bp, Glycine max
cccataccgaacactcttcttcaatcaagcgaaggtgttctcgattgcaagtgctccacgatacactctacgcttcacaaaaccttcaaacccaattccacagaattcttctgattcaccatgccaccaaagcctttagactatgggtcaataaatgaaaacgtgaagaagagtcaatatgctgtcagaggtgaattataccttcgagcttctgaacttcagaaagagggcaaaaagattatctttactaatgttggcaa

SEQ ID NO: 106700 - DNA, 262 bp, Glycine max
gcagaagaacaagtagttgagaactaagaaggagaagcaaatggcttcctcaatgatctcttccccagctgttaccactgtcaaccgtgccggtgccggcatggttgctccattcactggcctcaagtccatggctggcttccccaccaggaagaccaacaatgacattacctccattgctagcaacggtggaagagtgcaatgcatgcaggtgtggccaccagttggcaagaagaagttacagactctttcctacctgcca

SEQ ID NO: 106701 - DNA, 263 bp, Glycine max
ccaggttgctgtaggagataagattgcagtagtgctaagtgctaacacctgcagtgaacaatggcctccgcatcagcatctctgctcaagtcttcacttgttcttgacaagtctgagtgggtgaagggacaaacccttcgccaaccttctgcatcagttgtgagatgcaaccccaccaccccatcaggcctcaccatcagagctggttcctatgctgatgagctcgttaagaccgcgaaaacagtggcttcaccagggagggg

SEQ ID NO: 106702 - DNA, 263 bp, Glycine max
tccttttctggacgattctagtccaaaagatcatgtttttgttgatgaatttagctgcataggttgcaaaaattgtgccaatgtagcctgtgatgtttttggaatagaagaagaatttggaagagccagagtgtacagccaatgcgggaagcctgaattagttcaacaggctattgatagttgccctgtggactgcattcattggacatcagctgcacagctatcattgcttgaagatgaaatgcgccgcgtagaaagagtca

SEQ ID NO: 106703 - DNA, 264 bp, Glycine max
cggaaaaaggagctgacccccatgatctcaagcaacaggaaaatgtgttggcagagtctaggatgatgattcctgactgccgcaagcgccttgaggccgctttggcagacttgaaaggaatattggctgagttggaggagtcagatgagaaggccagtcttgagattgatgaagctaagaacaccattgtagaagttgaaaaagtatttgaaacaacagaagagtaacaaggttgatagcaatccactttgtcaaggagctaaa

SEQ ID NO: 106704 - DNA, 263 bp, Glycine max
gaatgaggcggctattcttgcagccaggcgtgacctcaaggaaataagtaaagatgagatatctgatgcgcttgaaaggatcatagctggacccgagaagaaaaatgctgtagtctcagatgagaagaagaaattagtagcctatcatgaggctggccatgctctagtgggtgctttaatgcctgaatatgaccctgtagccaagatatcaattattcctcgtggccaagctggtggtctcacattttttgctcccagtgaag

SEQ ID NO: 106705 - DNA, 262 bp, Glycine max
tggatgtgtcgtgccatggaatcaagcggagaacaagttcatctgcccttgccatggatctcagtacaatgaccaaggaagagttgtgagaggacctgctccattgtctctggcattagcacattgtgatatagatgatgggaaggtcgtgtttgttccttgggttgaaacagatttcagaacaggtgatgctccatggtgggcttagactccttaaaacctctgttgtcataatatatatttaaacatgaaattcacacat

SEQ ID NO: 106706 - DNA, 128 bp, Glycine max
cagtaattgaagcacattacttgtttggagcaagctatgacgatattgagattgttattcatcctcaatctatcatacattccttggttgaaacgccggattcatctgttattgccccgttggggata

SEQ ID NO: 106707 - DNA, 131 bp, Glycine max
ctcattcttggtatctggggaggcaagggacaaggaaaatctttccaatgtgagcttgtctttgccaagatgggaatcaaccccatcatgatgagtgctggagagttggaaagtggaaatgcaggagagcc

SEQ ID NO: 106708 - DNA, 265 bp, Glycine max
gggacaaggaaaatctttccaatgtgagcttgtctttgccaagatgacaatcaaccccatcatgatgagtgctggagagctggaaagtggaaatgcaggagagccagcaaaactgatcaggcagagataccgtgaagctgcagacatgatcaagaagggaaagatgcgcgctctcttcatcaacgatcttgatgcaggagctggtcgtcttggtggaaccacacaatacactgtgaacaaccagatggtgaatgccactctcatg

SEQ ID NO: 106709 - DNA, 250 bp, Glycine max
attggaacagccattgcaattgctggtgtggcactctactcgttcatcaaagccagaatggaggaagaaaagcgacaagcaaaagcagcataagaggaaagtcgtcaacctggaggatgtcttgcactgtaaatcaccacaaatttccttcaaaataattgagtgactggttcagtgttgtactatccttgtgatagcgcccttttatttttccttctattttgtcaaatattttctgtttccttttttt

SEQ ID NO: 106710 - DNA, 258 bp, Glycine max
ctaattatgttgctcctgaggtccttaacgatagaggctatgatggggtaactgcagacttgtggtcatgtggggttattctctttgtattggttgcaggttacttgcctttcgatgaccctaatcttatgaacctgtataaaaaaatctcagttgctgaatttacttgccccccatggctttctttcagtgccaggaaattgattacacgaatcttggatcctgatcccaccactcgtatcactatacctgagatat

SEQ ID NO: 106711 - DNA, 252 bp, Glycine max
ccacgatttccccagtcgcgactccccagccacactcgtctgcgctgggaaccggcggaaggaacagaacatggtgaaacagagcatcggcttcaactggggggcagccgccatctccacttcggtgtggcgcacgcgtgcccttgcgcaccctgctcaagagctgcgggatctacacccgcaccaagggcgcgctccacgtgtgcttcgaaggggccgaggatctgccaggtggaggtgggtccaagtacg

SEQ ID NO: 106712 - DNA, 254 bp, Glycine max
caggcaccgaaaccttcttcctttgctggcccacgtgtctaggccgggatgccactaccttgtttacgagtgtctgaagtctggcagcttgcatgacaccctgagcaaggttgaggtgggcgagttcgagttggattggttatcaaggcacaagatcgctctcggtgtggccgctggactcgaatacctgtcattgaagcacaaccctcggatcattcatagggatctcaagcctgctaacatcttcttgatga

SEQ ID NO: 106713 - DNA, 268 bp, Glycine max
ctttggtggccacagcaacaataacaatggcagcctcactacaagctgcagctaccttcatgcaacccaccaaggtgggcatggccactcgcaacctcaaatctacacaatgcatttctaaggcttttggcttggaacccgctgcagctaaactcatttgctcccttaagcccgatctcaaagattttgctcaaaaatgtgtcgacgccaccaaaattgcaggattcgcccttgccacctcagctctcgttgtttctggagcgagtgc

SEQ ID NO: 106714 - DNA, 265 bp, Glycine max
tgctaggaaagtgagtgagagaaagagatcacatagcagaatggcttctactcaatgtttcttgcaccaccatgctcttaccacccctgccagatccccatcacaacgcatcatggttagcaccaagcctaaccagcttgtttgcaaggcacagaagcaagaggatattgatgtcagcccaatctctcgccggttagctctaaccgtgctcattggtgctgctgctgttggctccaaagtccaacctgctgatgcagcttatggg

SEQ ID NO: 106715 - DNA, 264 bp, Glycine max
agctgatgcatcaatctcccagcaaatacctgttggggctctggcaacggctctggctaatgcttctccagagcagcaaaggacgatgctgggtgagaatctctacccccttatggaacagttagagcctgataatgctgccaaagtgacaggcatgcttcttgagatggaccagactgaagttctgcatttgcttgagtcgccagaagccctgaaagcaaaggtggctgaggcaatggacgtcctaaggaatgttgctcagca

SEQ ID NO: 106716 - DNA, 269 bp, Glycine max
ataaacatttgagtcttcattgcacaatgtcaacctcttccataaacgggtggtgcctctcttccatctccccagccaaaacctctctcaggaaggccacattacgcccttccgtcttcgcaacccttaacactccttcttctccttcctcttcatcttccttcccctctctcattcaagacaggcctctttttgctgcccctgcccccatcatcaccccaactgtgagagaggatatggcaaaggaatacgagaaagctattgaagaa

SEQ ID NO: 106717 - DNA, 252 bp, Glycine max
  unsure (1)..(252): unsure at all n locations
ctcgagccgaatcggctcgagcagagagtggtttcagtgagtgatacggtgttcacttgatacttcataagtcgtcatcatagtnctcatcatcaccgttgattgaagaagatgccgatcagaaacatcgccatcggaaggcctgaagaggctactcaccccgacacgttgaaggcggggttggctgagttcatctccaccttgatcttcgtgttcgccggttcaggttccggcatcgcctacaaaaagctc

SEQ ID NO: 106718 - DNA, 261 bp, Glycine max
ctcgagccggaccaacctgattatgtgaaactggtgaaggctctttgtgcagagcacaatgttagccttttgacagttccaaatgcaaagacccttggagaatgggctggtttgtgtaagattgattcagagggaaaggctaggaaggtaactggttgctcatgtgtggttgtcaaggatttcggggaggaacatgaagcctataatgttgttctgcagcatgtgaaagccaactgagttgctgcaggcatgcctagattt

SEQ ID NO: 106719 - DNA, 225 bp, Glycine max
gaactgtgaagaagagggtaactgcaaacaaggcaagcgtcacagtagctgcagtgatggagaggatgaagagggtgcttctgctgtttctaggatacactgttgatctcatgttgccttaagcttctgctacaaagtttattgttggaaacaaccagttttggaaccccaatattaactacactgagtgggctacgggcaaacatctttaccttggtgactggc

SEQ ID NO: 106720 - DNA, 266 bp, Glycine max
  unsure (1)..(266): unsure at all n locations
cttcgaatctctctgaaacttttctcttctctttgattcttctctatcagttaaacattagaatgagccgttcacagtatccacacccttcccgatctttcttcccttttggaaatccttttcggatgatatcacctaaaggctctcgcatgtctccacaacttcttgcagtgttgcaagcttttgaggcaacattggcagagaggctgaaaaatcttatgccctanaagcaaggatgaaatcctcaccttgtcttggatgactta

SEQ ID NO: 106721 - DNA, 262 bp, Glycine max
gggaggcaagaatgagaggaaccttgatgttgggcagggtcatgaagttcttggtatctggggaggcaagggacaaggaaaatctttccaatgtgagcttgtctttgccaagatgggaatcaaccccatcatgatgagtgctggagagttggaaagtggaaatgcaggagagccagcaaaactgatcaggcagagataccgtgaagccgcagacttgatcaagaagggaaagatgtgtgctctcttcatcaacgatcttgat

SEQ ID NO: 106722 - DNA, 132 bp, Glycine max
gtttgttgagatgtttgttggtgttggtgcttctcgtgttcgtgatatgttcaagaatgcgaaagagaatgccccttgcattgtctttgttgatgaaattgatgctgttggaagacaaagagggactggaat

SEQ ID NO: 106723 - DNA, 260 bp, Glycine max
caaagacccttgatttgataaagcaaggatttccatctggaaaatttctttttgctggtgttgttgatggaagaataatttgggccaataattttgcatcttctctgaacacccttcaggcacttggagacattgttggaaatgacaaggttgtggtttccacgtcgtgttctcttcttcacactgcagttgatctggtgaatgagaccaaattggaccaagagattaagtcttggcttgcatttgcagcacaaaaagtt

SEQ ID NO: 106724 - DNA, 260 bp, Glycine max
gttgagaactaagaaggagaagcaatagccttcctcaatgatctcttccccagctgttaccactgtcaaccgtgccggtgccggcatggttgctccattcactggcctcaagtccatggctggcttccccaccaggaagaccaacaatgacattacctccattgctagcaacggtggaagagtgcaatgcatgcaggtgtggccaccagttggcaagaagaagtttgagactctttcctacctgccagaccttgatgatg

SEQ ID NO: 106725 - DNA, 257 bp, Glycine max
agagaatccaaaagtctctcaaaaaataaccatgatgatgcatgtcctttgcttctcagtgttcctagcagcagcaatgcaaggaacactggcggttgaatacagtgtcaccaacaacgccctctcaacccctggtggtgttcgtttccgtgatgcaataggggacgaatacgccaaacaaacacttgactcagccacccaattgctatggggggtcttccagcaaaacgctcctgctgatagaaaagatatacaaa

SEQ ID NO: 106726 - DNA, 264 bp, Glycine max
cggctcgagggcgatcatggttatctatatatttcaaagggtgagaatcaaccaaattctgttgtggagatattagatgttcagaaatcttttggctacatatttgttcacaagggtacagtccaaaagggtgttgtagaggttggcaaagaagttgaagcagcagttgatgtgaagctgaggcagcgagctaaggttcatcatactgctactcatttactacaagctgcacttaaaaaagttattggtcaggagacctcacaa

SEQ ID NO: 106727 - DNA, 257 bp, Glycine max
gggataaaaacattactgctgaggttatgaagtccttgaatatccctagaggtgtaagccgcgtgcttttcagaactttaaacactgacaggcaactcatgtttaagaaagaatttgacacaagctatgtgggattcaaggaggatggtgcaaaatggctagcagagaacactgacatcaaacttgtaggagtcgattacttatctgttgctgcttatgatcactccattccatctcatcttgttttcctggaaagc

SEQ ID NO: 106728 - DNA, 256 bp, Glycine max
cggctcgaggatctattcaatgctggaatcagacccgctattaatgtaggtatttccgtttccagagttggatcggcggctcaaattaaagccatgaaacatgtagctggtaaattaaaattggaattagcacaattcgcagaattagaagcttttgcccaattcgcttctgatctcgataaagctactcaaaatcaattagcaagaggtcaacgattgcgcgagttgcttaaacaatcccaatcagctcctctta

SEQ ID NO: 106729 - DNA, 261 bp, Glycine max
ggcttatggtggatacctaggcacccagagacgaggtagggcgtagtaagcgacgaaatgcttcggggagttgaagataagcgtagatccggggattcgcgatataggtcaacctatcgaactgctgctgaatccacgggcagacagaagacaacctggtgaactgaaacatcttagtagccagaggaaaagaaagcataagcgattcccgtagtagcggcgagcgaaatgggagcagcctaaaccgtgaaaacggggttg

SEQ ID NO: 106730 - DNA, 263 bp, Glycine max
  unsure (1)..(263): unsure at all n locations
ctcgagccgctcgagccgattcggctcgagcccccgtgtgcccatcatcgtcaccggtaaaganttctcaacactgtatgctcctctcatccgtgatgcgcgtatggagaagttctactgggcacctacaagggacgatcgtgttggcgtctgcaatggaattttccgcactgacaatgttcctaaggatgacattgtcaagcttgttgacaccttccccggccaatctattgatttctttggtgcactcagggctagagtat

SEQ ID NO: 106731 - DNA, 263 bp, Glycine max
ctgctcgcagaaagtacacgctattcttacattgaatgagtgagaccatttgatacagaatgatgaacagagagatactgaccaacttactcatgtttacacatttatcctccgtgcggatcctacctacggcatcctgattgataatgtggagacgcaaacgggtagtctcgactctgatggggatcttctccctccaaagaaactcaaagatccggaggctaagataccagaagttggggatgacaaagattttattcctg

SEQ ID NO: 106732 - DNA, 260 bp, Glycine max
cctaattagccaaacacaccacagcaccaaactagttggctcaattctctttgaatggctttggaggctttgaattcaccaacagcagccaccactcccttccgtggttaccaagaagaggaggaggaggttgaccttcacctacgcgagccttgggccaagagaaaacgctccaaacgacctcgttttgagtcggaggaagagtacttggctctttgcctcatcatgcttgcacaaagcggtaacaacaacaacaccca

SEQ ID NO: 106733 - DNA, 261 bp, Glycine max
gaaaaacttactcgagaaaatgtctggaaaggcgaagaggagagacgacgacgatgcttccgacgccgactccgaaggccacgcgccgcccatgaagtccctcaagaaggattccgacgacgatcccgactctgttaccatttgcgaaatttcgaagaacaggagggttgccgtgaggaactggaaaggcagcattatggttgacattcgcgagttttacgtcaaagatggcaagcaattgcctggcaggaaaggtatctc

SEQ ID NO: 106734 - DNA, 259 bp, Glycine max
caccttctccgacgagcacggcaaccttcccatgtgcggcggcgacgacgaagaatctaacacgtgctgcagcatctggcaattcaacttccgcgaattcaacgtcaacgaggacgtctttgccaacgactccatcgagctcttgcgccaaagcggcatcgatttcaagaggaacaacgaaaacggcatcgacgcccaccgttttggggagcttctcatgtcctccgggatcgtcttaaacgacaacattcattgggtt

SEQ ID NO: 106735 - DNA, 253 bp, Glycine max
ggcttatggtggatacctaggcacccagagacgaggaagggcgtagtaagcgacgaaatgcttcggggagttgaaaataagcgtagatccggggattcccgatataggtcaacctttcgaactgctgctgaatccacgggcaggcaagagacaacctggtgaactgaaacatcttagtagccagaggaaaagaaagcaaaagcgattcccgtagtagcggcgagcgaaatgggagcagcctaaaccgtgaaaa

SEQ ID NO: 106736 - DNA, 255 bp, Glycine max
gggacaaacccttcgccaaccttctgcatcagttgtgagatgcaaccccaccaccccatcaggcctcaccatcagagctggttcctatgctgatgagctcgttaagaccgcgaaaacagtggcttcaccagggaggggtattttggccatggatgagtccaatgctacctgtgggaagcgtttggcttcaattgggctagagaacactgaagctaaccgccaggcataccgtaccctcctcgtgacagttccagg

SEQ ID NO: 106737 - DNA, 254 bp, Glycine max
tcccttttgtagtaattattagaaattgtagtaattattataagtattagaagcagcaattcttatttatttcagattaatacttgataacctaaacaatatatctatatatagaatatagatagatatatatataatagaacgtaaaaaaaaaaacgaataataaatagaaaaaggagcatgttgattatatagaaagtaaagggcaacaatcatttttgtttaccatgggtaaggacaccatcgctgacata

SEQ ID NO: 106738 - DNA, 262 bp, Glycine max
  unsure (1)..(262): unsure at all n locations
cgatcaactcaacacaaaccaaaactnaagctaaaattctcactctctctctcancttcgagatcatagtatcatnttcaatatacatttcataccaaacacatggcnttggaagctctcaactcaccaanaacaaccgctccatcttttccctttgacgacccaactattccatgggcgaaacgaaaacgttcaaagcgttctcgcgaccatccttctgangangagtacctcgccctctgcntcatcatgctcgctcgng

SEQ ID NO: 106739 - DNA, 261 bp, Glycine max
gaaactctaacgacagagcgagaaagcgacgacagccatggagtcgtttcttcaatacaattctggatccgaagaagaactggttcgccgctcagcacatgaaatccctctccaaacgcctccgcaaatatgggctccgatacgacgatttgtacgatccttactacgatctggatgtgaaggaggcgctgaatcggcttccgaaagaggtggtggacgctcgccacgcgcgtcttaaacgcgccatcgatctttccatga

SEQ ID NO: 106740 - DNA, 258 bp, Glycine max
acaagctgcagctaccttcatgcaacccaccaaggttggcatagcctctcgcaacctcaaatctacacaatgcatttctaaggcttttggcttggaacctgctgcagctaaactcacttgctcccttcagcctgatctcaaagaatttgctcaaaaatgtgtcgacgctaccaaaattgcaggattcgcccttgccacctctgctctcgttgtttctggagcaagtgcagaaggtgttccaaaaaggctaaccttcga

SEQ ID NO: 106741 - DNA, 258 bp, Glycine max
cttactttgaagagaaaattaacaacgtgaagatgtctgtatcaggaggcagaggaagccaggaggaggagaagaagccttctgatcaaggagcacatattaatctcaaagtcaagggccaggatggcaatgaggttttctttaggattaaaagaagcactcagctcaagaaactgatgaacgcatactgtgatcgtcaatctgtagattttaactcaattgctttcttgtttgatggaaggagactccgagcagaac

SEQ ID NO: 106742 - DNA, 260 bp, Glycine max
gcaagctcatcctagagttttaaaaatggcagcagcctcctccatggctctctcttccccatccttggctggcaaggccgtgaagctgggcccatcagcccccgaagtcgggagggtcagcatgaggaagaccgtcaccaagcaggcctcctccggaagcccatggtacggcccagaccgcgtcaagtacttgggcccattctctggcgagcccccgtcctacctcactggcgagttcccaggtgactacggctgggaca

SEQ ID NO: 106743 - DNA, 253 bp, Glycine max
attcttcatcacttcattcagcatttctctctcccttagctagtttttaccaatggctgctgcggttagtgctgcagtctcttttccatccaccaagtctacctctctcccaagcaggacctccatcattaccccagagagagttgtattcaagaaggcttcattgcaatacagagatgtttgtagcagtggaagggtagtttccatcagagctcaagtcaccactgaggctccagccaaggttgaaaaagag

SEQ ID NO: 106744 - DNA, 256 bp, Glycine max
gcgtttttcattgtgcattattcaatggccaccacagcagctctatccggaaccatggtgagcacctccttcatgaggaagcaacctatgacgatcacaagagcctaaagacattccccaacgctctttttggtctgaaaggtggacgaggtggtcgtgtaacttgcatggcctcgtacaaggtgaagctcataaccccagaaggagaagtggagtttgaatgcccagatgatgttttcattgttgacaaggctga

SEQ ID NO: 106745 - DNA, 263 bp, Glycine max
gcgtaggatgctctagatacgatgttgactttgttataacccttccatttatagatcaagctttcttctgtacaactggcaaagaagtatatgaaacgtgttgcatctgaacttgatgaactatctggtcctgataaagaaccagctagagagtttttggttctgcaaggtgtgcgtttcgctttccgtgtccatcagtttgcaggaggctttgatgcagagagcatgaaggcttttgaagaactaaggagccgcatccaaac

SEQ ID NO: 106746 - DNA, 268 bp, Glycine max
ttcggctcgagcatacaactacaaaggttgctgtaggagataagatattgaagtagtgctaagtgcctaacacctgcagtgaacaatggcctctgcatcagcatctcttctcaagtcttcacttgttcttgacaagtctgagtgggtgaagggacaaacacttcgccaaccttctgctgcatcagttgtgagatgcaaccccaccaccccatcaggcctcaccatcagagctggttcctatgctgatgagctcgttaagaccgcgaaa

SEQ ID NO: 106747 - DNA, 249 bp, Glycine max
tcaagacaggcctgtttttgctgcccctgcccccatcatcaccccaactgtgagagaggatatggcaaaggaatacgagaaagctattgaagaacttcagaaattgttgggggagaagagtgaactcaaagcgacagctactgaaaaagtggagcagataacagcttctctagggacatcatcatctgatggcatcccatcatcagaagcctcagacaggatcaaagctggtttcattcacttcaagaa

SEQ ID NO: 106748 - DNA, 250 bp, Glycine max
tggaggattagaaacatgactattgctttccaattagctgtttttgcattaattgctatttcatttattttattgattagtgtacctgttgtatttgcttctcctgaaggttggtcgaataacaaaaatgttgtattttccggtacatcattatggattggattagtgtttctcgtgggtattcttaattctctcatttcttgaagctctatttattctagatcaaatacgaaatgacccctcccccaga

SEQ ID NO: 106749 - DNA, 256 bp, Glycine max
gtagttgagaactaagaaggagaagcaaatggcttcctcaatgatctcttccccagctgttaccactgtcaaccgtgccggtgccggcatggttgctccattcactggcctcaagtccatggctggcttccccaccaggaagaccaacaatgacattacctccattgctagcaacggtggaagagtgcaatgcatgcaggtgtggccaccagttgacaagaagaagtttgagactctttcctacctgccagacctt

SEQ ID NO: 106750 - DNA, 251 bp, Glycine max
ctcgagccggtggatttctggtgttggtgttgacagtgttgggaagaagcttgtgaactaggaagatggacctgcaacctttgagcagcccaagatgactctggagaagctcttgctgtatggtaacatgcttgtccaagaacaagagaatgtcaagagagtccaattggctgacaagtacttgaacgaggctgctcttggaaatgctaacgaggatgctattcagaggggacatttcttccagtcttgaa

SEQ ID NO: 106751 - DNA, 248 bp, Glycine max
catcgttgggatctccatacgccggatctgctaaaatacgcttgatccatatgggcctcctcgaccacttgtgggacgacaccgtcgccggcccaaggccggaaaacggtctcggcaagctccgaaaacaccacaccttcactttccgacctagctccggcaaggaaacggagggcgggagcgtgagatcgtacggagacgaatcgtcggacgaagcgacgagagtgacgcgtagtatcatgatcgtg

SEQ ID NO: 106752 - DNA, 243 bp, Glycine max
ggggaggcaagggacaaggaaaatctttccaatgtgagcttgtctttgccaagatgggaatcaaccccatcatgatgagtgctggagagttggaaagtggaaatgcaggagagccagcaaaactgatcaggcagagataccgagaagccgcagacttgatcaagaagggaaagatgtgtgctctcttcatcaacgatcttgatgcaggagctggtcgtcttggtggaaccacccaatacactg

SEQ ID NO: 106753 - DNA, 243 bp, Glycine max
cgctttttccgcaatgccattctcctctccgttcttccgctgccccgaaacggcgtcggttcgctaactcctctgggttccgccttgcttcaagccaaaccgtgaattcggttccgcgtgggaatggaacttacaccgttgctgatttcatgacaaagaagcaagatttgcatgttgtcaaaaccaccactaccgttgatgaagctctggaggctcttgtaaactacagaatcagtggtcttc

SEQ ID NO: 106754 - DNA, 250 bp, Glycine max
gccgtttcagccctacagcgaggtgtttgggctccagaggttccgtgagtgcgaactcatccatggaaggtgggccatgctcgccactctcggagctctcactgttgagtggctcactggtgttacatggcaagacgccggaaaggtggagctagtagaagggtcatcataccttgggcaaccacttccattctcaatcaccacactgatctggatcgcggtactcgtaattggctacatagcgttccag

SEQ ID NO: 106755 - DNA, 250 bp, Glycine max
atggccaccgtcacttctgcagccgttgctattccctcattcactggcctcaaggcaagcgcaggcaaagtgagtgccgcagttaaagtctcagctccccaagccacaaggttgggcatcaaggcttcgctgaaagacgttggagtcgctgttgtggccactgccgcgagtgcagtgctggctagcaacgccatggccattgaagtgttgctgggtggtgatgacgggtctctggctttcgttcccaaca

SEQ ID NO: 106756 - DNA, 248 bp, Glycine max
tgctaaagaagtggatgctacaaggaagaatcttggatggccatacgagcctttccatgtgccaacagatgtcaagaagcattggagtcgccatacacctgagggtgctaaacttgaagctgagtggaatgccaagtttgtggaatatgagaagcaatacagtgaggaagctgcagagctgaaggctattattactggcgaattaccagctggttgggagaacgcacttccgacatacacaccagaaa

SEQ ID NO: 106757 - DNA, 243 bp, Glycine max
ggccagggtctcggagtgtttaggtttatttatcttaaacaccacaaacacagaacagaggtgtagagaagaaagctaaaaaatatggcggcagagtcatcactgagggtggcgactcccactctttgcaacctcaatgggtctcagagacgaccaaccaccaccactctctctccgcttcgcttcatgggttttcgtcctcgaccctcctctcactctctcacctcctcttcccttccacac

SEQ ID NO: 106758 - DNA, 140 bp, Glycine max
tttccaggcattggtctcggaactcttctttcaagcggtaggatcgggtctgatggcatggtgcaggctgcagctgagcgtctggctacagacatgagtgaagaggaggtaatcaaaggaattagtttcccttcaacatc

SEQ ID NO: 106759 - DNA, 242 bp, Glycine max
gcttatttgagaacaattacaggaaagactgaggcccttgtggacctaacagtgatagagatatcgtgaaggcatgcttctgatgaggtctaccttggacagagggacaatccaaattggactgatgacacaaaggcaattcaagcctttaagctctttggagccaagctgaaggaaattgaggacaaaatctcagggaggaacaagaattcaagccttaggaaccgtaatggaccggcgca

SEQ ID NO: 106760 - DNA, 239 bp, Glycine max
atttttctttgcacgtcgggtctggaggacagaatccagaaaaaccagctcagagcagacgacgtcgtatcacgccccgccagaataaaacttatcacaacgtcgcgcagaaactccggtgaggtattctctgttctgatgaaacgtgatagtaaatcttcatctccgatttggtccttggattccaatctggaccgtatgattgaatcagcaaattggtgaacggtggtgattgattc

SEQ ID NO: 106761 - DNA, 238 bp, Glycine max
cagtagtttacctggttgctgcctttgacaaagagaggtttgcagaatcaaagaaggagcttgatgccttactttcagatgaatcattggcaaatgttccatttcttgtgctaggcaacaaggttgacattccatatgctgcatcagaagaagagctacgttatcacgcgggcctgaccaatttcactccagggaaggggaaggtcaacatcacggggtcgaaccttcggccactaga

SEQ ID NO: 106762 - DNA, 240 bp, Glycine max
gacaaaagcaaaaggaaagaatatcaacaaggtctagtagattccttactagacatggcgttgacggacacattctacatatctcatggatcaccaactttgtccatagatgaatccattcaggccaggaagttccttcagtcatggaagaaggacgtgtttcctcaaagaccctcttcaattcttgtcatctctggtcattgggaaaccgcagttcccacggtcaacgtcgttgactcc

SEQ ID NO: 106763 - DNA, 240 bp, Glycine max
cattctttagttacatttctgaggaacctatggctgctgcatcatttggtcaggtttactttgcccgtactactgatggtaataatgttgctgttaaagttgcagcgtcctaatttgcatcatgtggtggtgcgggatatctacatccttcgtcttgggttggggctgctgcaaaagattgccaagagaaagagtgaccctcgcctgtatgctgatgaactagggcaaggttttgttggt

SEQ ID NO: 106764 - DNA, 225 bp, Glycine max
gctgatgaggggaacagacacatatcaacacgcgtgatgggaactttcagttatgtggccccagagtatgcagtgactggacatcttcttgtgaagagcgatgtttacagttatggtgttatcctccttgagctttcgactggaagaaaaccggtggacatgtcacaacctcctggtcaagaaaatctcgttgcatgggctcgtccactactctcaagcgaagaa

SEQ ID NO: 106765 - DNA, 245 bp, Glycine max
ccttcttcttcttctcttaaaagttattaagagcttttgcttttctttctgcgcgcttttcccaattaagtagttcttccttttctcaaagcaaaaaaaatgttcatcgagagtttcaaggttgagagtcctaacgtgaagtacacagagactgagattcagtccgtgtacaactatgaaaccactgaacttgttcacgagaacaataatggcacttatcagtgggttgtcaagcccaaaactgt

SEQ ID NO: 106766 - DNA, 242 bp, Glycine max
cataaacgggtggtgcctctcttccatctccccagccaaaacctctctcaggaaggccacattacgcccttccgtcttcgcaacccttaacactccttcttctccttcctcttcatcttccttcccctctctcattcaagacaggcctgtttttgctgcccctgcccccatcatcaccccaactgtgagagaggatatggcaaaggaatacgagaaagctattgaagaacttcagaaattgt

SEQ ID NO: 106767 - DNA, 235 bp, Glycine max
gtttgttgtgagctataagctagtttatcgtgaggagaatatgaagttgtttgttttctttgttgctgcagtagttttggtagcatggccatgccatggcgcaggctaccaaaggttccctctccgaatgaaaactggctatggtgagcgttcttcggaggtaaaatgcgcaagttttaggcttgctgtggaagcacacaacatccgagcctttaaaaccattcctgaagagtgc

SEQ ID NO: 106768 - DNA, 237 bp, Glycine max
tgccaccatgtctggcgaaatgcataccgattccgcgtcatcgtcacgccccgccgccgcctctgatcagcgtcatcagcagccggcggcggcccctctgagccggtccgaatcgcagaaacggcgagactggaacacctttggccagtacttgaagaaccagacacccccagtttcgctttcacagtgcaacttcatccacgtgcttgagttccttcgctaccttgaccaatttgg

SEQ ID NO: 106769 - DNA, 257 bp, Glycine max
ggaattcggctcatgaacacaaagcactaagcaaagctcatccttgagttaaaatctgggcgcagcttcttccatggctctctcatccccatccttggctggcaaggccgtgaagctgggcccatcagccccagaagtgggaagggtgagcatgaggaagaccgtcaccaagcaggtctcctcaggaagcccatggtacggcccagaccgagtcaagtacttgggcgcattctctggcgagcccacgtcctacctaa

SEQ ID NO: 106770 - DNA, 244 bp, Glycine max
  unsure (1)..(244): unsure at all n locations
cttccattaacgggtggtgcctctcttccatctccccagccaaaccctctctcaagatggccacattaggcccttctgtcttcgcaaccgttagcactccttcttctccttcttcttcttcttcttcttccttcccttctctcattcaagacaggcctgtctttgctgcccctgcccccatcatcaccccaactgtgagagaggatatggcatagngatacgagccagctattgaagaactcca

SEQ ID NO: 106771 - DNA, 237 bp, Glycine max
ggacgtcctggtggggatcggatatatggaatttttgatcaccaattaccggctagcggtgaaaagctcccttttgatcgccatctttctttaaaaaatatccagagagttgtcactgaagctgatgggtatcagccccatctgattgctccagagtggggttctagaagactcattgaagggtcaattggctatttcaaaggcccagctgaagcctccgtggatgctgtccacttt

SEQ ID NO: 106772 - DNA, 233 bp, Glycine max
caatgagtaactgcatcaacagtggtatcaacaaggtgtacatcctcactcagtttaactcagcctctctcaacaggcacattgctcgcgcttacaactctggtaatggagtcacctttggagatggctacgtagaggttcttgcagcaacccaaactccaggggaggcaggtaaaaagtggtttcaaggtactgctgatgcagtgaggcagtttcactggctctttgaggat

SEQ ID NO: 106773 - DNA, 232 bp, Glycine max
gatcaacaatctgaagaagctgctcaaagtggtgcctgtgcatgcttgtgggtggtgcagtgaaatccatttaggatctgttggacattcattcaagtcatgtaaaggcacacaggccaacatccgctagggcctccacgaatggacgactgcacctgttgaagacatattcacttccaattgaagcctatcacctctttgatcgtcttggcaaacggattactcatgcaga

SEQ ID NO: 106774 - DNA, 232 bp, Glycine max
tggtaatacccgcctctatgttggacgcttgtcttcgaggactcgttcccgtgacctggagcgtgtcttcagcagatatggaagagttcgaggcgtagatatgaagaatgatttcgcctttattgaatttagtgatcctcgagatgctgatgatgctagatacaacctggatggtcgtgatgttgaaggaagtcgtattattgtggaatttgccaaggggggtcctcgtggt

SEQ ID NO: 106775 - DNA, 236 bp, Glycine max
ctcgaagagcagctgatgaggggaacagacacatatcaacacgagtgatgggaactttcggttatgtggccccagagtatgcaatgactggacatcttcttgtgaagagcgatgtttacagttatggtgttgtcctccttgagctttcgactggaagtaaaccggtggacatgtcacaacctcctggtcaagaaaatctcgttgcatgggctcgtccactactctcaagcgaagaa

SEQ ID NO: 106776 - DNA, 235 bp, Glycine max
cttatttcttaatcattcatccaaccaaacttatatctcttctgttctgcagattgtccctcaacaatctctttccgagattacgataaccttcgacgtgctccaaagcctccaccgccccgccaacttcctcgtgtttgggctgggccgcgattctctcatgtgggccagcctcaacccccacggcatcacgctgttcctcgaggaggaccctaaatggttcgggatcgtcacc

SEQ ID NO: 106777 - DNA, 231 bp, Glycine max
ggtccacaaaccttgactggtacaagggtccaactctgcttgatgcacttgagccattagtgagcccaagaggccctctgacaagcccctcaggcttccccttcaggatgtgtacaagattggaggtattggaactgtgccagtgggacgtgttgagaccggtgtcttgaagcctggaatggtggtgacttttgcaccaactggactgacaactgaagtcaagtctgtgga

SEQ ID NO: 106778 - DNA, 230 bp, Glycine max
ctagtttcttacaagcctctactatactgcttcaccttctgctctagaaaattcagtgctgaaacatggcttcggctactctctctatagccaaaccagcccttcaggcaaatgggaaaggcttctctgaattctctagcctccgaagctcatcaggcttccttcccttttctagaaaatcttcagaggatttccattctgtcattgccttccagacctatgcagttgga

SEQ ID NO: 106779 - DNA, 227 bp, Glycine max
cttccttgcctactacattcttcatcacttcattcaacatttctccccttagcttgtttcaccaatggctgctgcggttagtgctgcagtctcttttccatccaccaagtctacctctcttccaagcaggacctccctcattgccccagagagagttgtgttcaagaaggcttcattgcaaaacagagatgtttctagcagtggacgggtagtttccatcagagctc

SEQ ID NO: 106780 - DNA, 218 bp, Glycine max
tgaagatgaggatgagtatgacaagctctcatgatttaagcctatgaaggaatctcaggttgctaagcttactaaagaacagcagaaagcatattttgatgagtacgattatcgggtgaaagtgctacagataaagcaatggagagaggagttgagaaggatgagagagatgaagaataaaggtagcacaaaagaaaatgactatggttacatggtag

SEQ ID NO: 106781 - DNA, 219 bp, Glycine max
gtggaagccaataattctgggcgtatgagacctcgtgaaggagttgacacagagtatggcgcaacatataaggcggttaaaacacagagaggccaaggtagtaaaacagcttaaagcacaaagggcactacttagaagcacatcaattacttaagtcaatgttggaaaggcggaatacctattagaagttccagaaaatttgtctaagaatatacctcg

SEQ ID NO: 106782 - DNA, 146 bp, Glycine max
gagggagacaacatgattgagaggtccacaaaccttgactggtacaagggtccaactctgcttgatgcacttgaccagattagtgagcccaagaggccctctgacaagcccctcaggcttccccttcaggatgtgtacaagattgg

SEQ ID NO: 106783 - DNA, 242 bp, Glycine max
tgcagttctaggaatctttgtgggccaggtatggagtggagttccatggtttgaagctggagctgacccaaatgcaattgctcctttctcctttggtgctcttctgggaacccagttgattctcatggggtgggttgaaagcaagagatgggtggacttcttcaacccagactcacagtcagtggaatgggccactccatggtcaagaacatctgagaactttgccaatgccactggtgagc

SEQ ID NO: 106784 - DNA, 278 bp, Glycine max
tcggctcgagaaaagccttagccttccctacaactccaaacagaaagacatcatcatccatggctgctcccgtctccactgtcggagctgtcaacagagctcttttgaacctgaatggttctggagctggagcttcagctcccagttcagccttctttgggaccagcttgaagaaggttattgcctcaagggtccccaacagcaaggtttccggtggaagcttcaagattgttgctgtagaagagaagaaagagattgaagagacccagcagaccgac

SEQ ID NO: 106785 - DNA, 129 bp, Glycine max
gcaatttattttgggccgttttcactttgttaggttcattggggttattgttcgttgcaatttccagttatcttggtatggatttgttctttatttctgagaaaattagtgatttttcttttattccgg

SEQ ID NO: 106786 - DNA, 265 bp, Glycine max
ctcaaccgttgactcctcgttgaccatggtcatgggagatgaaatggtgaaggtcattgcttggtatgacaatgaatggggctactcccaaagggttgtggatttggctgacattgttgccaacaaatggaagtgagagccaaacaaattctcattggtaattaaattattatgtatgtaccatgccattgtaattttgtatgcttactactactactaccactacaacacttgttgcttcatttttcttttaaacttgtactga

SEQ ID NO: 106787 - DNA, 241 bp, Glycine max
atctgtttcccgccatatatccaataagctttaaccatgtctgcctttgttggaaagtacgcagatgagcttatcaagaatgccaagtacatagccacacctgggaagggcatcttggcagcagatgagagcactggcaccattgggaagcgcctatcgagcattaacgttgagaacattgaggccaaccgccaagctcttcgcgagcttctcttcacggccccagatgccctccaatacc

SEQ ID NO: 106788 - DNA, 266 bp, Glycine max
cctgattctgttctgagggaatggtctaaaaaatataaaattccactctttggtagctccgattaccaatctgcgatggactcggtgtgcagaaggattggtgtaacagagaagtgcaagaaggaaagctttcagaaccaaattctcatacaaggatgtgagaaaatgggcttgaaagtagagtctgtggctataaattcctcagcagatcactattgtggttcatgctgttatggttgcagaacaggagataagaagggaactga

SEQ ID NO: 106789 - DNA, 269 bp, Glycine max
ctcgttcttcttcttttgttgttctgtgtttgtgtttgttttatctctcacctgaaaatgtcttgctgcggtggtaactgtggttgcggaagctcctgcaagtgcggcaacggctgcggaggctgcaagatgtacccagacttgagctacactgagtcaaccaccaccgagaccttggtcatgggagtggcacctgttaaggctcaatttgagggtgctgaaatgggtgtgcccgctgagaacgatggctgcaaatgtggaccaaactg

SEQ ID NO: 106790 - DNA, 274 bp, Glycine max
atcagcttctttttgaggccttaaattactctcatttctgcaagtatgcttgctctgaagaaaatcctgagctcctggacgtgggaggtccagttgaaggtggatttagtgtcgcatttgatccccttgatggctccagcattgtggacacaaatttcacagtaggcaccatctttggtgtgtggcctggagataagttgactgggatcaccggaagagatcaagttgctgcagccatgggggttttggggtctagaacaacatatgtgcttgc

SEQ ID NO: 106791 - DNA, 271 bp, Glycine max
gaattaattgagcatctgagtgcagaagaaatagaggatcgtggtcgatggcgtctgctagccttggaagtggtggggtaggcagttcgaggtctgttaatggtggcttcaggggttcttccagttccgttgaattggactggcagagagatgcttgagatgaggttgagagaccacgaagacgatagagatagtgagcctgacatcattgatggtgtgggtgctgagacaggtcacgtcataagaaccagcattggtggccgaaatggtc

SEQ ID NO: 106792 - DNA, 268 bp, Glycine max
caaagagaagcattagcactaggagcagcaacaactagtttcagctgaaatggcctcttcagtgatggcatctgtggtcctcaaacctgcccctttcactgttgagaagtcctcagtgagaggccttccctctctctcaaggaactcttcttcattcagagttgtggccagtggcaagaagatcaagactgacaaaccttatggaattaatggtggcatggctttgagggatggaactgatgcatctggcaggaaagcgaaagggaaa

SEQ ID NO: 106793 - DNA, 264 bp, Glycine max
gtggcatatcgacaaatgtcattattgttacgccgaccaccaggccgtgaggctttcccaggcgatgttttctatttacattcccgtctcttagaaagagccgctaaacgatcggaccagacaggtgcaggtagcttgaccgccttacccgtcattgaaacacaagcgggagacgtatcggcctatattccaaccaatgtgatctccattactgatggacaaatatgtttggaaacagagctcttttatcgcggaattagacct

SEQ ID NO: 106794 - DNA, 265 bp, Glycine max
gtgaggctgtgaggaaacagaggatagcagcaaaagcaatggcatctgcaagagaacaaatgtatttgatggcaatcctccttatattctccccttcaaaattaacgttatcaaatgctggtgcagtaacagggcaaccaattccacctgagtggccgcaccagttccacgcgtttatgttcatgaacgaaagcggaattcttcagaaactggacttgtggtacgactggcccaacggccgaaacttcaacatcattcagaatca

SEQ ID NO: 106795 - DNA, 278 bp, Glycine max
caagattgttgctgtagaagagaagaaagagattgaagagacccagcagaccgacaaggacagatggaagggtcttgcctatgatatctcagacgaccaacaagatgtcacaagaggaaagggtttggttgactcccttttccaagctccacaggatgctggaactcactatgcagtcatgagctcctacgggtacctcagcactggacttcgccagtacttggacaacaaatggatggattctacattgctcaagcttttatggacaagttgttgtt

SEQ ID NO: 106796 - DNA, 271 bp, Glycine max
ctgatgttaacagattgagggtggcttctgtgtcactaaaatcaaaactagaagaagagaagtcggttctcgcatcccttaagcaaagtgaggaaaaggcttcggctgcggttgtgaatctccaagctgaactggagaagtctaggtcagccatagctttcattcaaatgaaagaaaatgaagcaagagagatgatgactgagttgcccaagaaactgcaaaaagcatcacaagaggctgatgaggccaaatcacttgctcaggcagctca

SEQ ID NO: 106797 - DNA, 265 bp, Glycine max
attgaatttcaatttccctaggggcttaatatctcccctcacttgtgcctagccttatgtcatagtattatcattcattctcatctttctctcttctctctccacccaaaccctaactcccgaccctgttcccctctcgtatccgtcatgaaaggaggaaagtccaagaccgaatctaagagagccgatcccaaacttgctgtgaataagaagggagccgccaccaaggctaggaaacccgccggcaaggggaaggcagcgaaag

SEQ ID NO: 106798 - DNA, 262 bp, Glycine max
gattaaagattcaacaatggcctctgcttctgctactcttctcaagtcatctcctgttcttgacaagtgcgagtgggtcaaaggccagacccttcgccaacctctcgtgagatgtaacccttcctcagcatcagctctcaccatcaaagctgcttcctatgctgacgagctcgtcaaaaccgccaaaacagtggcctcaccggggcgtggtattatagcgatggatgagtcaaatgcaacctgcgggaagcgtttggcatct

SEQ ID NO: 106799 - DNA, 252 bp, Glycine max
gataactttgtcatcattttcgtggtgaccgttcttcttgccgcccttgatttttgggtagtgaagaatgtgagtgggcgaattttagttggattgaggtggtggaatgaaattaatgatctgggtgagagtgtttggaaatttgaatgtcttgaccacgagtcattggctcggatgaacaagaaggattggcttttctggtggaccctgtaccttacggcggttttgtggatactgctggcaatattctca

SEQ ID NO: 106800 - DNA, 264 bp, Glycine max
aaattgagcaatgaatttgtaaatagggcaaaagtaatggataaggaattaatttctctggatatattagaaaaccgaattcgcattgtctaatgatgaaactaaaacaaaatatttaactaaaatatatgatcctttcctgaacggacgctttcgtggacaaatcgaaaatgttttttcaacctcaatccaatatgaaaaaaatgaaaaaaaaaataccattttgataaataaaattcatggtatccttatttctaataatac

SEQ ID NO: 106801 - DNA, 261 bp, Glycine max
gaaagagaccccggaggccaatcgtcccgaaacgtttctcagaggagtggacgaggcccagtcttccacttcggttcgggcctgcttcgagaagatgataagggaggcccaggacaccgtgtgcagtgccctcgaggccgctgatggtggggcccagttcatggaggacgtttggtccaggcccggtggcggcggtggcattagcagggtccttcaagacggtgccgtttgggagaaggctggggttaatgtctctgttgt

SEQ ID NO: 106802 - DNA, 262 bp, Glycine max
ggcaaacatgattgtggcttccaccaaacctctggttccagtctgcaccagttcccgttcccccacacccaaagtccccattctccaaatttcactccccaaagccccaaccttgaaactgagcctcccgatttcaaagccccagatgctgtccctccttggagggatagcaccactggtcttggccagaccctccctcgcagaagaaattgagaaagcagcactctttgacttcaacctcacccttcccataataatggtg

SEQ ID NO: 106803 - DNA, 256 bp, Glycine max
gatgaagtgaggaagtggatttctggtgttggtgttgacagtgttgggaagaagcttgtgaactcaaaagatggacctccaacctttgagcagcccaagatgactctggagaagctcttgctgtatggtaacatgcttgtccaagaacaagagaatgtcaagagagtccaattggctgacaagtacttgaacgaggctgctcttggaaatgctaacgaggatgctattcagaggggaactttcttccagtcttgaa

SEQ ID NO: 106804 - DNA, 255 bp, Glycine max
atcaataatagggcgattagcaatggcttggaactcaggccctctcaagttgttaatcgccctagggttactgttggtggtgaagacctaaggaccttctacactctggttatggtggatgcagatgcacctagccctagcaaccctgtcttgagggaataccttcactggatggtgacagatattccagctaccacaaatgcaagctttgggagagaggttgtgttttatgagagcccgaacccttcagtaggg

SEQ ID NO: 106805 - DNA, 254 bp, Glycine max
tcgagcggatcggctcgagaacaggtccaattcttagccccgcacttcaacgtgtacgctccggacctaatagcctacggaggatcgagcaccaagtccagcgaaaggagcgaaacgtttcaggcagcgtcggtggggaagcttttggacaagttggaggttgagaagttccacgtggtggggacgagttatgggggcatggtggcttacaatttggccaagatgttgggtgaagacagggtgacaaaagtggt

SEQ ID NO: 106806 - DNA, 265 bp, Glycine max
  unsure (1)..(265): unsure at all n locations
cttcaaaacactcatagcccngcgcanntgccccaagctcgcccttgagttannaacacacagnagnttnttccataggtctctcatcnccatccttggctggcaaggccgtgaagctgggcccatcagccccagaagtgggaagggtgagcatgaggaagaccgtcaccaagcaggtctcctcaggaagcccatggtacggcccagaccgagtcaagtacttgggcccattctctggcgagcccccgtcctacctaaccggtga

SEQ ID NO: 106807 - DNA, 292 bp, Glycine max
aagtctcagaatacggctcgagcagatccatgcgtgaggatccacttccagatgcagatccgaatgaaaagttttatttgggtgataaccaatatagaaatagtgggcaagctttagaattcaaggaattaaacatccatgcttgggaagcatttgacaagggacaagatgtccacatgcaagcagctccatcccaggctgagttactctataagaatttcaaggtcatgaaggagaagttgaagtatcaaacaaaggaaaccattatcgagaagtatggcaatgcggccga

SEQ ID NO: 106808 - DNA, 233 bp, Glycine max
acattcacgtcttttggaaagagccgcttaattaagttctcagttaggcgaatgttctatgactgctttaccaatagttgaaactcaatcgggagatgtttcagcttatattcctactagtgtaatttccattacagatggccaagtattcttatctgccgatctattcaatgctggaatcagacccgctattaatgtaggtatttccgtttcctgagttggatcggcggctc

SEQ ID NO: 106809 - DNA, 254 bp, Glycine max
cgccgccactcaccagcaaattcccaagccgccccttcccccatctctttcgcgccccatttgatcgattcctgatggcgcccaaggccgagaagaagcccgcggagaagaagccggcggaggagaaggccgagaagaagccaagggcggagaagcgcgtgccgagcaaggagggcggcgagaagaagggaaagaagaaggcgaagaagagcgtcgagacgtacaagatctacatcttcaaggtgctcaagcag

SEQ ID NO: 106810 - DNA, 260 bp, Glycine max
agaacgctcgcccgcaccgtccagatcgtaatcaagagtagaggagcgagttttgtttttccttggcgcccaagccatggcgcctctgatcctgcatggtggaaaaaccaacaaaaattcttacaagacactcattgcggcggagtatgccggcgtccaagttgactttgccccaaattttgagatgggtgtctccaataaaactcctgaatttctcaagatcaatcctattggcaaggttcctgtgttggaaacacctg

SEQ ID NO: 106811 - DNA, 262 bp, Glycine max
  unsure (1)..(262): unsure at all n locations
cattatcattgaagcatacaagactgtcagagatcgtggtcgcaatcctgctgataaagttttgagagacttccaaggcaaatttgcatagaatctgtatgacagtggttctaagattgcatttgttgctgcggatgctgatgggagtgtacccgttgtctagggaactgatgctaataatctaaaagntnncncagatgagacagagatcgnaactaagagctgngggaaatcttacgcaccattccccaaaggatttttc

SEQ ID NO: 106812 - DNA, 255 bp, Glycine max
tgttgatcgagataactagaaacagtgtgatgaaaatgaaggtccttgttttcttcgttgctacaattttggtagcatggcaatgccatgcgtacgatatgttccctctccgaatgaacactggctatggtgcccgtactccggaggtgaaatgcgcaagttggaggcttgctgtggaagcacacaacatctttggctttgagaccattcctgaagagtgcgttgaagcaacaaaggaatacatccatggcgaac

SEQ ID NO: 106813 - DNA, 255 bp, Glycine max
ctcgagccgtttgaagataccaaccatatctcatcttcaatggcactctttcagtataatatctagttccagggctgatgaccacattttgtctgtgataattaaatgtgaagggtggtgggctaattctctttatgacctgatacatgctgaactagacaaaactgcggatacaaggaagggaatacctgttgccatcgaaggaccttatggacctgcttcattagactttttgagatatgattcccttctttt

SEQ ID NO: 106814 - DNA, 248 bp, Glycine max
catgtttggaaatatctattttgtgcggttgccacaggatgtttcagatgagatagaagaagatcctactggtgggaggatcaagtgggagcagggaaagctgaatggagctcccaataaggtggaagaaattgtacagtttcacattggtgatgttgtcacatgcttgcaaaaggcttctcttataccaggtggtggagagtgcattgtatttggaacagttatgggaagtgttggggcattacatg

SEQ ID NO: 106815 - DNA, 251 bp, Glycine max
agcacacacaaacccgtccctcacactctccaaaccctagcggcactacacactagttctatcgctatctccccaagatgtcgagcgccgatcccgagcacagagaagaggaggaggcacccgccgttggcgacgacgacgacaccggagctcacgtcgctccaatcgtcaagctcgaggaggttgctgtcaccaccggcgaggaggacgaagatgcaatcctggatctcaaatcgaagctttaccggttc

SEQ ID NO: 106816 - DNA, 253 bp, Glycine max
agcacacacaaacccgtccctcacactctccaaaccctagcggcactacacactagttctatccctatctccccaagatgtcgagcgccgatcccgagcacagagaagaggaggaggcacccgccgttggcgacgacgaggacaccggagctcacgtcgctccaatcgtcaagctcgaggaggttgctgtcaccaccggcgaggaggacgaagatgcaatcctggatctcaaatcgaagctttaccggttcga

SEQ ID NO: 106817 - DNA, 260 bp, Glycine max
ggcatcttctgggttatccgtcattgaagctactagttttgtatctcctaaatgggtccctcagttggcagatgcaaaggatgtaatgcaagcagttcataacctgggaggcattagattgccagttctgactcctaatttaaagggttttgaagctgctatagcggctggtgcgagagaagtagctgtttttgcatcagcttctgaatctttctcaaaatcaaacattaattgtagtattgaagagagccttgtccgct

SEQ ID NO: 106818 - DNA, 264 bp, Glycine max
cttcaaaacactcatagcacaaagcacatagcaaagctcatccttgagttaaaaaagagcagcagcttcttccatggctctctcatccccatccttggctggcaaggccgtgaagctgggcccatcagccccagaagtgggaagggtgagcattgaggaaaaccgccaccaagaaggtttctcaagaagccatggtacggcccagaccgagtcaagtacttgggcccattctctggcgagcccccgtcctacctaaccggtgag

SEQ ID NO: 106819 - DNA, 265 bp, Glycine max
ggataagctcaagaatcaacaccgcgagaagtagtcgatgaaaccttaccgtggaataaggatccggaactgggggaagtgggtagcggagatcagagaacccaacaaaaggtcgaggatatcgttgggttcttacacgacacccgtggccgccgcacgtgcctacgacaccgctgtcttttacctccgaggtcccaccgcgcgcattaacttccccgaactcctgttccaggccgacgaccacgagagcaatgattcgtttcag

SEQ ID NO: 106820 - DNA, 266 bp, Glycine max
ggataagctcaagaatcaacaccgcgagaagcagtcgatgaaaccttaccgtggaataaggatgcggaagtgggggaagtgggtggcggagatcagagaacccaacaaaaggtcgaggatatggttgggttcttacacgacacccgtggccgccgcacgtgcctacgacaccgctgtcttttacctccggggtcccaccgcgcgccttaacttccccgaactcttgttccaggacgacgaccaggagggcagtgattcggtgcagc

SEQ ID NO: 106821 - DNA, 263 bp, Glycine max
caaagaaaaaaaaaaacccttagccaacacaaccatcatggccacctctgctattcagcaatcagcattcactggtcaaactgctctgaagcagctcaatgagttcgtccgcaagaccggtggcgccggcaaaggtcgcactaacatgcgccgcaccgtcaagagtgctcctcagagcatttggtatggccctgaccgtcccaagtacttgggtccattctcggagcagattccatcatacctgaccggagaattccctggtg

SEQ ID NO: 106822 - DNA, 267 bp, Glycine max
cgttgccattctcatcctcctctgtctctctctctccaccattgccatggatccttacaagctccggccatccagcgccttcaattctcccttctggactacaaattctggtgctcctgtttggaacaacaactcctctttaaccgttggagctagaggtccaattctgcttgaggattatcatcttgtggagaagcttgcaaactttgacagggaacgtatcccagaacgtgttgtccatgccaggggagctagtgcaaagggttt

SEQ ID NO: 106823 - DNA, 264 bp, Glycine max
tattttccttgcaaatctctcagctactttggcttggctttctgaattttggtttttcagtgctgagagctgaacaagaagatggggggtggaaatcaagaggcagtcaagcagctgcagaccctgatggaaaatgtggatgatgagcagctgaagaatacattccagattatgcaccagggttatcaaacggaaacgttaatacggtttctcaaagctagggactggagtgttgccaaagcccataaaatgttaattgattgt

SEQ ID NO: 106824 - DNA, 263 bp, Glycine max
aagtgtttctgtaaccatggcatccaccactctatcccctacaaccccttctcagctatgctcaggaaaaagtgggattttcagttcctcacaggcacttcttgtgaagccagtgaagaggcagatgatggggaagagcaagggattgagaattgcatgccaagccaccagcatttccgctgatagagtccctgacatgggcaaaagacagctcatgaatcttcttcttcttggtgccatttcactccccactgctggaatgc

SEQ ID NO: 106825 - DNA, 266 bp, Glycine max
gtcattgactttaaaagctaatcaggaagatctgttaggtttctcagcttcacttgtgaaaagagcaccaaatactaaaaataaaaggatactggttgctaaaagggaggcagagatgtcaaaaggcgtaaaggtgctagcagagttagagaaaattaggacagctatagaagaggataccaagcgagtagcaagcttgagtacctgggcagaagcatctggagttgatgagaaggtgctacagaagctattgcatcgtggctatt

SEQ ID NO: 106826 - DNA, 267 bp, Glycine max
tgctttcgtcaaaagggaagctgccctccttctcattaccattaacacatttggaattgttgtggagtcaatttaccttgcaatcttcctactttatgccccaaggaagcctaggcttacaaccatcaagcttcttctcttactgaatgtgtttgggtttggagccatgcttctatcaactctctacctgtcaaagggagcaaagcgtcttgctatcataggatggatttgccttgttttcaacatcagtgtctttgctgcgcctct

SEQ ID NO: 106827 - DNA, 263 bp, Glycine max
ccttcacaagattctcacaaacaactcttgagaaagaaagaatggctgccaacacattgatgagttctgccatctcagccttcccatctctcctttcctcctcaaaatccagatttgccgcagcagttcctctttccagctttgttgtcaccaatgcctcttcttctcgcttttccatgagtgctgactggatgcctggccagcctagacccccctaccttgatggttcagcacctggtgactttggattcgaccctcttcgt

SEQ ID NO: 106828 - DNA, 263 bp, Glycine max
ggctgctgcggttagtgctgcagtctcttttccatccaccaagtctacctctcttccaagcaggacctccctcattgccccagagagagttgtgttcaagaaggcttcattgcaaaacagagatgtttctagcagtggacgggtagtttccatcagagctcaagtcaccactgaggcaccagccaaggttgaaaaagagtccaagaaacaggatgaaggtgtggttgtgaacaagtttaaacccaagaccccttacattggta

SEQ ID NO: 106829 - DNA, 267 bp, Glycine max
  unsure (1)..(267): unsure at all n locations
ccgacgaagtgagccgattggaaggcgagaacgcgcgtttggcgccgagcataaaagtgaaggaggaagcgtacgttgagatggaggccgccaacgacatcctcagagcacagaccatggaactcgccgaccggttaaggtttctgaactccattattgagatcgccgatgaggtcggcggcgaatccttcgagattccgcagattccggaccctctcttcangccctggcagatcccccaccctatgatggcaagccgcctgacat

SEQ ID NO: 106830 - DNA, 273 bp, Glycine max
  unsure (1)..(273): unsure at all n locations
ctcgagccgcttgtttctttttcttctatagagacacacggagagagtctcagagcaatacacacctctcaatggctaccactaaagtttacattgtttactattctacgtacggacatgttgagaagttagctgaagagattaaaaagggagctggttccgttgaaggtgtggaagcaaagctatggcaggtacctgaaacactttctgaagaggtccttgggaagatgggtgcacctccanagagtgatgtaccgattattacacccaacg

SEQ ID NO: 106831 - DNA, 263 bp, Glycine max
cttccttttgccacattacacaagaactctccaaggatcctccttcccacgaaattcatttggtgggaaaatccaagaagagggtggaatttcaagccagggaagatggattatttcaatgcaccaggaagaaaccatctctttgttccggggccggttaacatcccggaccagatcattcgggccatgaacagaaacaatgaggactaccgttctccagcaattccagctatgaccaaaacactgcttgaggatgtcaagaa

SEQ ID NO: 106832 - DNA, 260 bp, Glycine max
gggagcaatctgtaatggtattgctcttcatagccccggattcattccatactgtgcaactttttttgtcttcactgactacatgagagctgccataaggatttctgcactgtgtgaagctggagttatttatgtgatgactcatgattcgattggacttggagaggatggaccaactcatcagccaatagagcacttggcaagcttcagggcaatgccaaacactttgatgcttcgtccagctgatggtaatgaaactg

SEQ ID NO: 106833 - DNA, 259 bp, Glycine max
aaagaatggcacgcatcaaagaggatccatctctgaaacatattttggaggagatagagactggcggtcctgctgctatgatgaggtactggaataatgaggaggttttgcagaagttgggacaagccatgggtcttgccaattcgggagatgcaggtgcctctgctgaaaattctggggcagatgagaccgaagatttgggaaatgaagatgaatcaattgttcatcatactgctagtgttggtgatgtggagggctt

SEQ ID NO: 106834 - DNA, 260 bp, Glycine max
aaaggatttggccctgcatgcatgcgccggggagcctcccctcacattcctcgactcacttcttcttggagagtgggaagatcgcatgcagagaggactttttcgctatgatgttaccgcctgtgaaaccaaggtgattcctggtgaatatggtttcgttgcccagcttaatgagggtcgtcacctcaagaagagaccaactgagttccgagttgacaaggtccttcaaccctttgatgaaaacaaattcaactttacca

SEQ ID NO: 106835 - DNA, 250 bp, Glycine max
ttcttctgcttctcttaaaagttattaagagcttttgcttttctttctgcgcgcttttcccaattaagtagttctacgctttctcaaagcaataaaaatgttcatcgagagtttcaaggttgagagtcctaacgtgaactacacagagactgagattcagtccgtgtacaactatgaaaccattgaacttgttcacgagaacaataatggcacttatcagtgggttgtcaagcccaaaactgtcaaatat

SEQ ID NO: 106836 - DNA, 260 bp, Glycine max
gtgattccattgcagccccatcatgatgagtgctggagagttggaaagtggaaatgcaggagagccagcaaaactgatcaggcagagataccgtgaagccgcagacttgatcaagaagggaaagatgtgtgctctcttcatcaacgatcttgatgcaggagctggtcgtcttggtggaaccacccaatacactgtcaacaaccagatggtgaatgccaccctcatgaacattgctgataaccccaccaatgtgcagcttc

SEQ ID NO: 106837 - DNA, 251 bp, Glycine max
ccacttcaaaacactcataacacaaagcacaacaaatagctcatccttgagttaaaaaatggcagcagcttcttccatggctctctcatccccatccttggctggcaaggccgtgaagctgggcccatcagccccagaagtgggaagggtgagcatgaggaagaccgtcaccaagcaggtctcctcaggaagcccatggtacggcccagaccgagtcaagtacttgggcccattctctggcgagcccccgt

SEQ ID NO: 106838 - DNA, 266 bp, Glycine max
gttaattcaattggagcagtctttcagtttgtgtacacaatcatcttcctgatgtatgctgagaaagcaaagaaggtgagaatggttggattattgctggcagttcttggcatgtttgcaatcgtattggttgggagcttgcagatagatgacgttataatgcgtcggttctttgtggggttcttgagctgcgcgtctctcatttcaatgtttgcctctccattgtttataattaaattggtcattcagacaaagagtgttgaatt

SEQ ID NO: 106839 - DNA, 258 bp, Glycine max
ggctggccactggaacgtgattgacgtgtgtaacggcctgcttggcgggttcgctgccattacatcgggctgtgccgttgtggaaccgtgggccgcgattgtgtgtgggtttgtggcggcgtgggttttgattgggcttaataagcttgccgcgaaggtagagtacgatgatccgttggaggcggcgcacttcacggcgggtgcggcgcgtggggtgttttcttcacgggattgtttgcgaagaaagtgtacgtggag

SEQ ID NO: 106840 - DNA, 256 bp, Glycine max
gttgaagtcttgcccttctctcttcaactccaaacacaagacatcatcatccatggctgcctccgtctccactgtcggagctgtcaacagagctcttttgaacctgaatgggtctggacctggggtttcagctcccagttcatccttctttgggagcagcttgaagaaggttattggctcaagggtccccaacacaaagatttcctctggaagcttcaagattgttgctgtagaagagaagaaagagattgaagag

SEQ ID NO: 106841 - DNA, 267 bp, Glycine max
gaggtgtttagaagcgatcgagaaaaactctgtacacatgttggtttaccaagacctccttacaggtgatgagcttctctctgactccttccgttacaaggaaattgagaatggaatgctgtaggaagttgcacggggaaattgggttagttaaaggacgcagttgaatgtagaacattgggtgcaaacccttctgctgagggtggaggagaagatgaagggattgatgatgcagctgttaaggttgttgacaatgttgacacattc

SEQ ID NO: 106842 - DNA, 259 bp, Glycine max
gtcgtgtcttcttctctaaaataaaaaaccctaacttctgaacctttcaccgcatcgccaccgattccctatctccactaatcaaagaaaattaaatgagtagacgctcgagcagaactgtctacgttgggaatctaccctagtgatatccgtgcaagagaagttgaagatttgtttctgaagtacggacacataacacacattaacctaaaggttcccccaagtacacctggttatgcatttgtagagtttgaagatg

SEQ ID NO: 106843 - DNA, 263 bp, Glycine max
caggcatgattcctctgcaactggagttaggaggaaaagatgcctgcattgtacttgaggatgctgacctggatttggttgctgcaaacattataaagggaggcttttcatacagtggtcagaggtgcactgctgttaaggttgtcctggtaatggagtccgttgccgatgctttggttgagaaggtgaaggctaaggtggcaaaactaactgttggaccaccagaggatgactgtgatatcaccccggttgtgtcagaatca

SEQ ID NO: 106844 - DNA, 250 bp, Glycine max
caaacttgttgttcacattaccaactctccagcactcatcatgatggggttgattcccatcatgatgagtgctggagcgttggaaagtggaaatacaggagagccagcacaactgatcaagcagagataccgtgaacctgcagacttgatcaagaaaggacacttgtgtgctctcttcatcaacgatcttgatgcacgagctggtcatcttgatggaaccacccaatacactgtcaacaaccagatggtg

SEQ ID NO: 106845 - DNA, 257 bp, Glycine max
  unsure (1)..(257): unsure at all n locations
agggaggccacagtgctggaactgntaagaacctggccacatggccatcagttgtccaaatgagggtatttgccacacctgtggtaaagctggacaccgtgctagggaatgctcagcccctccaatgcctccatgggacttaaggttgtgcaacaactgttataagcaggggcacattgcagctgaatgtacgaatgagaaggcatgcaacaactgtaggaagacaggccacttggcacgtgattgtcctaatgatc

SEQ ID NO: 106846 - DNA, 257 bp, Glycine max
gagctattcttccaggatctgatgcagatattatcatcctcaatccaaattcaacctttgagataactgcaaagtcccaccactccaaactggacacaaatgtctatgagggaaggagtggaaagggaaaaatcgaagtgactattgcaggaggaacagttgtttgggaaaataatgaactgaaggttgctcctggtactggcagatatataaaaatgccaccctttagttatctgtttaacggaattgacaaaaag

SEQ ID NO: 106847 - DNA, 253 bp, Glycine max
aaaaattgccagttacattcccttcacaagattctcacaaacaactcttgagagagaaagaatggctgccaacacattgatgagttctgccatctcagccttcccatctctcctttcctcctcaaaatccagatttgccgcagcagttcctctttccagctttgttgtcaccaatgcctcttcttctcgcttttccatgagtgctgactggatgcctggccagcctagacccccctaccttgatggttcagca

SEQ ID NO: 106848 - DNA, 255 bp, Glycine max
ggtaaatatgtggagccagggcctggtggtgacccaataagaaatccaaaagtcttgccaacaggaaagaatattcatgccctggaccctcaatctattcctacaactgcagcgatgtagagtgccaaaatagtggtagataggttgattgagaggcagaaagctgagaatgggggaaaatatcctgagacaattgcacttgtattgtggggaactgataatagtaaaacatatggtgaatccctggctcaagtc

SEQ ID NO: 106849 - DNA, 256 bp, Glycine max
caatgagtaactgcatcaacagtggtatcaacaaggtgtacatcctcactcagtttaactcagcctctctcaacaggcacattgctcgcgcttacaactctggtaatggagtcacctttggagatggctacgtagaggttcttgcagcaacccaaactccaggggaggcaggtaaaaagtggtttcaaggtactgctgatgcagtgaggcagtttcactggctctttgaggatccaagaagtaaggatattgagga

SEQ ID NO: 106850 - DNA, 258 bp, Glycine max
cggctcgagcggctcgagcggctcgagattgaatctcagaattctctaaaagagatctttttctgctctttgaagaaagaagggtctttgcttgattttggagatgtctctgctctcagatctcatcaaccttaacctctccgataccaccgagaaggtgatcgcagagtacatatggatcggtggatcaggaatggacctgaggagcaaagcaaggactctcccaggaccagttagcgacccttcagagcttcccaa

SEQ ID NO: 106851 - DNA, 259 bp, Glycine max
ttgtgaatcagcaccacattcacctgagctttttgtgaggattccaaagcatggcttcccttgcagcatccactgctgctgcttcccttggcatgtcagaaatgcttggaaaccccatcaacctcagtggtgccacaaggccagctccatctgcctctagccctgcctccttcaagactgtggctcttttctccaaaaagaaggctgcacctccaaaaaaagctgcagctgctgctcctgccaatgatgagcttgccaa

SEQ ID NO: 106852 - DNA, 262 bp, Glycine max
caatgacattacctccattgctagcaacggtggaagagtgcaatgcatgcaggtgtggccaccagttggcaagaagaagtttgagactctttcctacctgccagaccttgatgatgcacaattggcaaaggaagtagaataccttcttaggaagggatggattccttgcttggaattcgagttggagcacggtttcgtgtaccgtgagcacaacaggtcaccaggatactacgatggacgctactggaccatgtggaagctg

SEQ ID NO: 106853 - DNA, 255 bp, Glycine max
ctgttgtgcactaactgggttcgactccttctctttgcaaccaaatgctggtgctgctggagaatatgctggacttatggttattcgtgcatatcatttggcaaggggagaccaccaccgcaatgtttgcattatacctgtctcagcacacggaacaaatcctgctagtgcagctatgtgtggaatgaaaattgtctctgttggaactgatgccaagggaaacattaatatagaagagctgaggaaggctgctga

SEQ ID NO: 106854 - DNA, 252 bp, Glycine max
gccatattccacaagaactctccaaggatcctccttcccacgagattctttggtgggaaaaatccaagaggtttgaaatttgacggcagggaagatggattatttcaatgcaccaggaagaaaccatctctttgttccagggccggttaacattccggaccagatcatccgggccatgaacagaaacaatgaggactaccgttctccagcaattccagctatgacaaaaactttgcttgaggatgtcaagaa

SEQ ID NO: 106855 - DNA, 252 bp, Glycine max
gacacagcttcattgtgctaacagaagcaaagaaaagctgtttcatgccaatttacgcatggtagttcacattgctaaacattatcagggacgtggtctcagccttcaggacttatttcaggagggaagtactggtcttatgaagagcatccaaaagtttaaacctgaagctggttgccggtttggtacttatgcatactggtggataaggcatgcaataaggaaggctatatttctacattccaggacaat

SEQ ID NO: 106856 - DNA, 255 bp, Glycine max
agagtcttcagtttctcctcgttgttcttcgctttcctgttttcaatttcgattctttcgttaatttaataagatgtttgggagggcaccgaagaagagcgataatacgaggtactacgaaatcctcggcgtctccaagaacgcttcgcaggatgatctgaagaaggcttacaagaaagccgccattaagaatcaccccgacaagggcggtgatcccgagaagtttaaagagctggcgcaacttatgaggttctg

SEQ ID NO: 106857 - DNA, 256 bp, Glycine max
ggttcatagatttagggaatcgattactatactagtaataaattgtacaacaaataaaaatataaataatataaatataaaaagaacaaacacaaattttatgtgattagtcgcggtatttaaaatacaaaatgaaagtagacaaataaaaaaggaaaggagatgtttgaataaaaataattccccttcaagttcttattttttgagaggacaggacaatatgaatgttttattatgctctatcaacacattaaaa

SEQ ID NO: 106858 - DNA, 256 bp, Glycine max
tggctctactatcatcagtcctaaagcaattgccgcatgagctaagttcaacccattacctaacagttttcttctgcatcttccttatacttcttcagctaataagaagaaacaaatacaatctgccaccatccccaccaaagatacccataatcggcaatcttcaccagctaggcacactgccacaccgctcctttcatgcactctcacacaaatatggccctctcatgatgttgcaattgggtcaaattccaac

SEQ ID NO: 106859 - DNA, 259 bp, Glycine max
ccaagggtacggcagaagtagtcttctcgcgccgagctgatgctgtagctgcagtgaagaggtacaacaatgttcagctggatgggaaaccaatgaaggtagagattgtggggacgaacatcgctacacatgctgcaccacccgctgtgaatggaacttttggaaacccaactggagttcctagaagtggacaagggagaagtgggtcattaggaaggccacgtggtgggagtagaggtcgtggcagcattcaacgggg

SEQ ID NO: 106860 - DNA, 262 bp, Glycine max
ccaatgttggtgtccaggataccacccagatccacactcacatgtgctactcgaacttcaacgacatcatccactccatcatcgacatggacgccgatgttatcaccattgagaactctcgctccgacgagaagcttctgtcagtcttccgcgaaggtgtgaagtatggtgctggaattggccctggtgtctatgacatccactccccaagaataccaccaactgaagaaattgctgacagaatcaacaagatgctggcagt

SEQ ID NO: 106861 - DNA, 249 bp, Glycine max
ctcacgctcttttctttttagctacatatggtgatggtgagccaactgataatgcagcgagattttataaatggtttacggaggggggtgagaaaggagaaggatggcttgagaatcttcactatggtgtgtttggccttggaaacaggcaatatgagcattttaacaaggtggcgaaggtagtggatgacatgcttgctgagcaaggggggaagcgtcttgtgccagtgggcctaggagatgatgatc

SEQ ID NO: 106862 - DNA, 276 bp, Glycine max
ctggtgcaatgacttcaacaaatttggcattttggattcctaatattggtcaactaatatttataacatgtggttggtgctccgatacatggaaaggtttctcatttttggcattcaaagatctttggcctgttgtcaagctttccctttcatctggtatcatgttatgtcttgagctctggtacaacacaatattggttcttttaacgggcaacatggaaaatgctgaggtccaaattgatgctctatctatatggtattccttctgtattgtcc

SEQ ID NO: 106863 - DNA, 278 bp, Glycine max
agaaaaacaagtagttgagaactaagaagaaggaaatggcttcctcaatgatctcctccccagctgttaccaccgtcaaccgtgccggtgccggcatggttgctccattcaccggcctcaaatccatggctggcttccccacgaggaagaccaacaatgacattacctccattgctagcaacggtggaagagtacaatgcatgcaggtgtgaccaccaattggcaagaataagttcgagactctttcctacttggcagacctcgatgatgccaattgg

SEQ ID NO: 106864 - DNA, 257 bp, Glycine max
atttattttagtgccgcgacagagacaacaaagagagtgagaaactaaaaagagaagaggaaaaaaaaatggaggaatcatcaacaacatgcgtgttgtgcgagaagagggcaatgatgctctgcgactcggaccaggctaagctatgctgggaatgcgacgagaaagtccacagcgccaatttcttggtcgcgaaacattctagggttcttttatgtcgtttgtgtcactccccgactccgtggaaggcttcgggg

SEQ ID NO: 106865 - DNA, 272 bp, Glycine max
ggattgtcagaaactgtccattgatgcctgcctgcatgctgctcaaaatgaaagacttccgttaagggttgttgtgcaagttctattcgcggaacaggtaaagataagcaatgcactagccagcagttctgtgaaagatgttgaatctgagagtcatgcaatggttacaaaccggaaaacacttctcgaagggacaccacaatcattccaagaaggatggacagctgctaaaaaggacatcaacacactaaagtttgagcttgagagtgtga

SEQ ID NO: 106866 - DNA, 271 bp, Glycine max
atcaacaactccgaattggattagtttctcctcaacaaataagtgcttgggcaaaaaaaatcctacctaatggagagatagtgggggaggtaacaaaaccctatacttttcattacaaaaccaataaacccgaaaaagatggattattttgtgaaagaatttttgggcctataaaaagtgggatttgtgcttgtggaaattatcgagtaatcagagataaaaaggacgacccaaaattttgtgaacaatgcggagtagaatttattgattc

SEQ ID NO: 106867 - DNA, 273 bp, Glycine max
gagtgttgcagcatcattctattggggggttttggtctcattgtggctggaattccaccagagaaggagtttttagtggtgttccttttttggcctttccaatattaatggaccaaccactaaacggtaagttgatagtagaggaatggaaggtggggtggagggtgaagaaggaggtgaaaaaggacactttgataacaaaagatgaaattgctaatcttaataagaggtttatgcatttgggtggggatgagtgagagatatgaggaaaag

SEQ ID NO: 106868 - DNA, 252 bp, Glycine max
atcagggaaatggctctcactgggttactcttgttggcctttctcacgatcttctcctctgctcatgcctatggtggagggtggactaatgctcatgccacattctatggagggagtgatgcatctgggacaatgggtggggcatgtgggtatgggaacctctacagccaagggtatggaacaaacactgctgctctgagcactgcactcttcaacaatggcttgagctgtggctcttgctatgagattagg

SEQ ID NO: 106869 - DNA, 250 bp, Glycine max
cggctcgagaagcattgttgacttggacctggaactatttgacaaagtcatggacataaatgttcgtggcgttgtggcaggcatcaagcatgcagcacgtgtaatgatcccacgtggaagtgggtccattctctgcacagcaagtgtcacaggtgtgataggaggggtgtcacaacacacttactcaatatccaagtttgcagttgtgggcattgttaaatctctggcttctgagctatgcaggcatgga

SEQ ID NO: 106870 - DNA, 267 bp, Glycine max
cactttcctgggcttgtttacttgtcaggcggacgggaattgcagccctggattgccaaggatgatgattcaggtcagaagatgtggagaatcaatcagcggattgtaaaattgattgtggaacttatgaggaatcatgagactgcagaatcattggtaattgtggcaagttcatcagatttactactgcgagccacagatgggatgctggttgatggagaagcttgcactttaccacagctggaggtagtatatttcaacaagtgt

SEQ ID NO: 106871 - DNA, 270 bp, Glycine max
ggagggtatcccccggaccagcaacgtctcatcttcgccggaaagcagctcgaggacggccgcaccctcgccgactacaacatccagaaggaatcaacccttcacctcgtcctccgtctccgtggtggcatgcagatcttcgttaagaccctcaccggcaagactattaccctagaagtcgaaagctccgacaccatcgacaacgtcaaggctaagattcaggacaaggagggaatccccccagaccagcagaggttgatcttcgccggg

SEQ ID NO: 106872 - DNA, 271 bp, Glycine max
tgaatctcagaattctctaaaagagatctttttctgctctttgaagaaagaagggtctttgcttgattttggagatgtctctgctctcagatctcatcaaccttaacctctccgataccaccgagaaggtgatcgcagagtacatatggatcggtggatcaggaatggacctgaggagcaaagcaaggactctcccaggaccagttaagcgaccttcagagcttcccaagtggaactatgaatggtccagcacaggtcaagctcctgggtg

SEQ ID NO: 106873 - DNA, 266 bp, Glycine max
tcgagacgttccgtatatgagcctctccaaacaggacttattgatacagattcgatgatccccataggacgtggccaacgagaattaattattggagacagacaaacgggtagaacagcagtagccacagatactattctcaatcaacagggacaaaatgtaatatgtgtttatgtagctattggtcaaaaagcatcttctgtggctcaagtggttgataccttacaggataggaggagcattggaatacatattgtagtagctgg

SEQ ID NO: 106874 - DNA, 263 bp, Glycine max
ctacatctttgtttgcaacaatgataccatggcagagaatctccaaagacagctctttggtctgcctccacgatacagagattcagtaagaacaataactccagggttgcccatttttctgtacaactactccactcaccaactccatggtatctttgaggctgcaagttttggaggatccaatattgatccaacggcttgggaggccaagaagtgccctggtgaatctcgtttccctgctcaggttcaagtgattactagga

SEQ ID NO: 106875 - DNA, 271 bp, Glycine max
caaaactgaagaggttaagaaggaactaacagacagggatgtacacgagggctttgacattacacttacaaagcataaggggcagtatgctcttcgaaaattgtatcatgacagtccaaggcttatatgcgtattatatacatcaccaacatgtggtccctgtaggactctgaagccaatccttagtaaggtgattgatgaatttgatcagaatgtacattttgttgaaattgatatagaggaagatccagaaatagcagaagcagctgga

SEQ ID NO: 106876 - DNA, 267 bp, Glycine max
attgtttaaacctaattctcatttcttcatcgttcgattcttctcctcctaaaggtacgtctctggtttcctctctctcttgttcattcttttcgtaatagcaaccttattagccttcgtttattgatttttctcctaattacacttcaattttttcgatttgtgtttgttacgtcaatctgtatatcttttttgttgtcgtcgaatccgaaacttttcattcggctttctgaatccgtaaatcgtttgttaagtgcaacatctttc

SEQ ID NO: 106877 - DNA, 269 bp, Glycine max
agagaagtgagatacactaagttatcctcataaatacactctaattaggtggcaagataagtgtctaaccttagtaacattgccacatattgtgttcattttggaattgtgccactaaaattctattcaattcatctatggctgcctcttcttatgctatgcaatcaatcctggcaaaccctttgatccgcatttccagcgggtctagggtgaaccaatttggcgttcctgctttgcacatgagaaggatgttggactgagagttggtc

SEQ ID NO: 106878 - DNA, 266 bp, Glycine max
caaccagttcaccaaaaccctcgacaaaaatctcgcaacaaatctttttaaaatgctgctgaagtacaggccggaggacaaggcggagaagaaggagaggctgttgaagagggctcaggctgaggctgatgggaaacctgttgaggccaagaagcctattgttgtcaaatatggtctcaaccacgttacctaccttattgagcagaacaaggcacaactggttgtgattgctcatgacgtggacccaattgagctggtagtctggc

SEQ ID NO: 106879 - DNA, 267 bp, Glycine max
atgatgatgaagtgatgaagtggatttctggtgttggtgttgacagtgttgggaagaagcttgtgaactcaaaagatggacctccaacctttgagcagcccaagatgactctggagaagctcttgctgtatggtaacatgcttgtccaagaacaagagaatgtcaagagagtccaattggctgacaatacattgaacgaggctgctcttggaaatgctaacgaggatgctattcagagggggactttcttccagtcttgaattggag

SEQ ID NO: 106880 - DNA, 265 bp, Glycine max
ctctaatagtaacagtaatagtaatatacataacataaccaatggaagcacgtgcaggagccaatcaacgtattgcaagaatctctgctcatcttcagccttcaaatttccatgaagggagtgatgttcttcttaagagaggtgagtgcagagcttaaggtggggcacctggattcaaagttgcaattttgggggctgcaggaggaattggtcaatccctttctattgctgatgaagatgaacccatgggttgcagttcttcatc

SEQ ID NO: 106881 - DNA, 248 bp, Glycine max
tacaaaggttgctgtaggagataagattgcagtagtgctaagtgctaacacctgcagtgaacaatggcctctgcatcagcatctctgctcaagtcttcacttgttcttgacaagtctgagtgggtgaagggacaaacccttcgccaaccttctgcatcagttgtgagatgcaaccccaccaccccatcaggcctcaccatcagagctggttcctatgctgatgagctcgtaaagaccgcgaaaacagt

SEQ ID NO: 106882 - DNA, 270 bp, Glycine max
agaaaaacaagtagttgagaactaagaagaaggaaatggcttcctcaatgatctcctccccagctgttaccaccgtcaaccgtgccggtgccggcatggttgctccattcaccggcctcaaatccatggctggcttccccacgaggaagaccaacaatgacattacctccattgctagcaacggtggaagagtacaatgcatgcaggtgtgggcaccaattggcaagaagaagttcgagactctttcctacttgccagacctcgatgatg

SEQ ID NO: 106883 - DNA, 261 bp, Glycine max
agcgcctccttgtttagaggagtttggttttagttcgtctgatgtgtttataaagaggattgtggctaaggctggggacactgttgaggtgcgtgatgggaaactactggtaaatggtgctgctgaagaacggcaatttgtagtagagcctctagcttatgagatggatccaatggttgtgccagaaggatatgtgtttgtaatgggagacaatcggaacaacagctttgattctcataactggggccctctcccagttga

SEQ ID NO: 106884 - DNA, 263 bp, Glycine max
ggcacttggaatccaaaaatgagagaaatcatcagcattcacataggtcaggccgggatccaggttggcaactcctgctgggaactctactgcctggaacatggcatccagcccgatggcatgatgccaagtgactcctccttcggtgtagcccacgacgccttcaacaccttcttcagcgaaaccggatccggcaagcacgtccctcgcgccgtcttcgtcgatctcgagcccaccgtcatcgacgaagtccgttgtggcac

SEQ ID NO: 106885 - DNA, 267 bp, Glycine max
atgatgatgaagtgaggaagtggatttctggtgttggtgttgacagtgttgggaagaagcttgtgaactcaaaagatggacctccaacctttgagcagcccaagatgactctggagaagctcttgctgtatggtaacatgcttgtccaagaacaagagaatgtcaagagagtccaattggctgacaagtacttgaacgaggctgctcttgggaatgctaacgaggatgctattcaagagggaactttctaccagtctggaattggag

SEQ ID NO: 106886 - DNA, 258 bp, Glycine max
ctgatctggagataacattttttttgcggagaaccatttaaaccatttgatcagctaatggggaccctacccgcttcaagttcaagtgcactgcctaaaaaatatagggatttgatgattgatccttcatcatctattcttcaattctaccctgctgattttgagattgacatgaatggaaaacgatttgcatggcagggtgtagccaagttggccatcattgatgatatggatttgcttgctgccaccaagcaactt

SEQ ID NO: 106887 - DNA, 169 bp, Glycine max
gcgagaaatggcgatggcaatggcgcttcgcaggctttcatcttcaattgacaagcctctgcgccctctcttcaatgccggttccctctactacaagtcgtctttgcctgatgaagctgtttacgacaaggagcgacccggagttacatggccgaagcagttgaatgct

SEQ ID NO: 106888 - DNA, 234 bp, Glycine max
accgaatgagagcatcaaactcttcttcttcgatttccattgcgaacgttactttttcttcttctttctcttcattttcttcgctcttcgatcttcgtccggggactgctccgaataccaccaccaccactcgccgatggccacgatcggaggcttacacgactcccaaggctctcaaaacagcgtcgaaaccgaagccctcgctcgattcgccgtagacgaacacaacaagaa

SEQ ID NO: 106889 - DNA, 260 bp, Glycine max
ctgcttcaacacactacttctcattctccctctctaatagtaatagtaatatacataagtaacataaccaatggaagcgcgtgcaggagccaatcagcgtattgcaagaatctctgctcatcttcagcctccaaatttccaggaagggagtgatgttcttcttaagagtgctgagtgcagagcaaagggtggggcactggattcaaagttgcaattttgggggctgctgggggaattggtcacccctttctttgctgatg

SEQ ID NO: 106890 - DNA, 256 bp, Glycine max
cttctcttccctcttttctttctttcatccccaaatcaaaacctaaaattcccaccttcaactttctcccccaaatcgaccacccccaccactgccaagtcccattattttatatatttattcgtatatgtacatacaaagagaggggggagaatggattcggatcagggaaagcttttcatcggtgggatttcatgggatacgacggaggacaagctccaggagcatttcggaaactatggcgacgttttgacca

SEQ ID NO: 106891 - DNA, 259 bp, Glycine max
gctagaaactgaggacttagctagtagttagagatgcctgagttttgcgtgacaggtggtactgggttcatcgcatcttacctggtcaaggccttactagagaagggtcacacagtgaggaccaccgtgagaaacccaggggatgtggagaaggttggttttctgactgaactaagtggagccagagagagactgaagattttgaaagcagatctattagtggaaggaagcttgatgacgcagtgagaggagttgatgg

SEQ ID NO: 106892 - DNA, 284 bp, Glycine max
gaccggagtggcggatgctgcggaaggtgtgcgtgctcaagatgctgagcaacgccacgctggactccgtgtacgacctgcgccgcaacgagatgcgcaaaaccgtgtcttatttgtacggtcgagtggggagcgcggtgaatataggagaacaggtgtttctgacggtgatgaatgtgataacgaatatgatgtggggaggggcggtggaaggggcggagagggaaagcatgggggcggagttcagggagctggtggcggagataacgcagctcttggggaag

SEQ ID NO: 106893 - DNA, 280 bp, Glycine max
gttagcatcatcctcttctctttctccttctctcccttcttcattccctcgcccttctctccatctccaccttcactttccttcccaaactacccatcttcgcctccataccccaccacccctttcttgctcccttaattcttcttcttcttcttcttacgtggaacaatctgcttcatcttctcagatgcagaatggcttgctgtactccagagcttattgggttgctgaatctctcatagcttgggacgtggatgttggaaacgggttttcttgctac

SEQ ID NO: 106894 - DNA, 279 bp, Glycine max
ggcaagagtggtggcactccaacagaaccaactatctttctctaccttagctccctctctttctgacttcagtggaaccagacttcaaactcaacttcagttcaagagaaagcaatgccatccaaaagggtctttctacgtctccgcatcgagcaccaagaaaatcctaataatgggaggcaccaggtttattggtgtgtttttgtctaggctccttgtcaaagagggtcaccaggtgactttattcacaagaggtaaagcgcctgtcactcaacagtt

SEQ ID NO: 106895 - DNA, 281 bp, Glycine max
aaaaaaatctcaaaataaaacaaccaaaccacacacttcacaccctcttcaacatcctcagcaagtacaagaacaagaagaaacaatgtcttgctccaatctcacaatgttggtgtcctcaaaaccttccctttccgatccctccaatctctccttccgctctgtcctcaacccttttcagctcccttcacaaaacccaacttcatgcactccttcacgctcctcaaccacccaaattcagtgtggtctgagagaactcagaacccgcattgattccgtga

SEQ ID NO: 106896 - DNA, 282 bp, Glycine max
gaatttaacacggagaggatgatggaggaatttgagagggtgacaaaggatgctgagaggattcaaagggaaaccctgaagaggattttggaagataatgcttctgctgagtacttgctgaatttgggcttgaatgggaggacggatcctgagagtttcaaggcctttgttccacttgttactcataacgatttggagccttatatcaatagaataattgatggtgatttttcttctgttctcactggcaaacccatcacaaccatgtctttgagttctggc

SEQ ID NO: 106897 - DNA, 284 bp, Glycine max
attttcttcctctaaaccctaaacaactctttctcttcttccttcgctcgttgttctccctcgcgtagatcgacaatggcggagacagagacgtttgctttccaggctgagatcaaccagctcctcagtctcatcatcaacaccttctactccaacaaggagattttccttcgtgaactcatcagcaacgcctccgatgctttggacaagattcgatttgagagtttgacagataagagcaagctcgatgctcagccagagttgttcattcatattattccaga

SEQ ID NO: 106898 - DNA, 278 bp, Glycine max
caagataggtgttgaaactgacaagattggacggattttgtccaatccaagtacagcagtgaatggagtcctaccagcagatacaaggactccattgactgctggacttggattggacaagataggtgacgaaactgacaagattggacggattttggtaaacgaacgatttgccacaaatgtctctggtgtttatgctattggagatggcattccatgcccaatgttggcacacaaggcagaagaagacggtgttgcttgtgttgagtacatagctg

SEQ ID NO: 106899 - DNA, 279 bp, Glycine max
gttgagaactaagaaggagaagcaaatggcttcctcaatgatctcttccccagctgttaccactgtcaaccgtgccggtgccggcatggttgctccattcactggcctcaagtccatggctggcttccccaccagaaagaccaacaatgacattacctccattgctagcaacggtggaagagtgcaatgcatgcaggtgtggccaccagtacgcaagaagaagtttgagactctttcctacctgccagaccttgatgatgcacaattggcaaaggaagt

SEQ ID NO: 106900 - DNA, 280 bp, Glycine max
tctcagtggtgttcacagaagcctctctacctgtcatccaccgagaacttggcattggtgaggagaaggagagtgacggagtgccaggcctatgaagctgacaggtcacggcctctggagatcaacattgagctgccggctgaagaggcggcgcagaggttcaagattggtgtgtattttgctacatggtgggctttgaatgtagttttcaacatttacaataagaaggttttgaatgcttttccttacccatggctcacctccactttgtcccttgctg

SEQ ID NO: 106901 - DNA, 283 bp, Glycine max
aagaagcagaaagagaagcattagcaaaagcaagaagaactagtctaagcagaaatggcctcttcagtgatggcatctgtggccctcaaacctgcccctttcactgttgagaagtcctcagttagaggccttccctccctctcaaggaactcctcttcattcagagttgtggccagtggtggcaagaagatcaagactgacaagccttatggaattaatggtggcatggctttgagggaaggagttgatgcatctggcaggaaaggaaagggaaagggcgttt

SEQ ID NO: 106902 - DNA, 265 bp, Glycine max
ggctcgaggaactggtgtcaggtccagacaggggagtggaattggagcacatccttcgcaaaattgatgatgatggtcgtttggttggaattgtgaatggcatggatgttcaggagtggaatccaaccactgacaaatatatagctgtcaaatacgatgtttcaacagtattggaagcaaaggctcttttgaaagaagccctccaagcagaagttggattgccggtcgacagaaatattcctcttattggtttcattggtaggct

SEQ ID NO: 106903 - DNA, 278 bp, Glycine max
aaaaaatggcagcagcttcttccatggctctctcatccccatccttggctggcaaggccgtgaagctgggcccatcagccccagaagtgggaagggtgagcatgaggaagagcgtcaccaagcaggtctcctcaggaagcccatggtacggcccagaccgagtcaagtacttgggcccattctctggcgagcccccgtcctacctaaccggtgagttcccaggcgactacggctgggacactgctgggctttccgcagacccagaaaccttcgccaag

SEQ ID NO: 106904 - DNA, 278 bp, Glycine max
gccatattccacaagaactctccaaggatcctccttcccacgagattctttggtgggaaaaatccaagaggtttgaaatttgaaggcagggaagatggattatttcaatgcaccaggaagaaaccatctctttgttccagggccggttaacattccggaccagatcatccgggccatgaacagaaacaatgaggactaccgttctccagcaattccagctatgacaaaaactttgcttgaggatgtcaagaagattttcaagaccactactggaaccc

SEQ ID NO: 106905 - DNA, 274 bp, Glycine max
cttatggtcttgataagaaggccacaagtgttcgtgagaagaatgtgttgatttttgaccttggtggtgggacatttgatgtttctttactaaccattgaggagggtatctttgaggtgaaagccacagctggtgacacccatcttggaggtgaggattttgataacagaatggtgaaccactttgttcaagagtttaagagaaagaacaagaaggacataagtgggaaccccagagcacttagaaggttgaggactgcttgtgagagggccaa

SEQ ID NO: 106906 - DNA, 271 bp, Glycine max
ggggttccctggcttcagagttggcatcatatactcttacaatgatgctgtggtcaattgtgcacgcaaaatgtcaagtcttgggttggtgtcaacacagactcagcatcttttagcatcaatgctaaatgatgatgagtttgtggaaaggtttctggaagagagtgcaaaaaggttggcacaaaggcatagagttttcacttcggggttggccaaagttggcataaagtgcttgcaaagcaatgctggtctctttgtgtggatggattta

SEQ ID NO: 106907 - DNA, 270 bp, Glycine max
attgctgacaaccaaggagcacgtgccactaacgtaatcaggggcacaaagaaagaacaagttcaacaaatcatcagagaacttaaggagttcaaagaaagcactaaggttgacaaggtggttgtcctgtggacagccaacacagagaggtacagcaacgtagttgtgggactaaacgacaccatggaaaacctctttgcttccttggacaggaatgaggctgagatttccccttccaccttgtatgccataacctgtgatatggaaaat

SEQ ID NO: 106908 - DNA, 257 bp, Glycine max
  unsure (1)..(257): unsure at all n locations
anatagaaagatacncatgttatatatgcgaattcgtcaantaacaacacantcnncactnantcttctcatttnattcttcttcctncntntgtcttcccttagctnagtttgaagatcatggggagaggaagggttcagctgaagcagatcgagaacaaaatcagccgccaagtgacgttttccaaaaggagaactgggctgcgaaagaaagctaatgaaatctctntgctctgtgatgctcnagtggcatgatt

SEQ ID NO: 106909 - DNA, 281 bp, Glycine max
catatttctgtgccaacaaaagaagatggcctcacaggtttgcaaagctgcttccagagccgcgaggtcccttctctccgcttccagagcctcccatggacgtgcggttggggctgctacggctgtttcattgagctgcaaagtgcctcttttctacggaaagaacggttctggaagtggttccgcttcatcatcatcatcatcatggatttcaggagcacttgctcttcctgccgcagcttacatgttccaagatcaggaggtgcgcgcactagagctgg

SEQ ID NO: 106910 - DNA, 279 bp, Glycine max
cgtggagatagtacctgttccctgccgcagcactgatgacttcaatttaagtataacttcaatcgagagaaccttcaatcaagcaaagatgcgtggtcaaaaagttcgcggaattataataaacaacccctcaaatcctgctggcaaactattggatagggaaacactgttggatcttttggactttgctagagagaagaacattgcgataatctctaatgaaatgtttgccagctcttcttatggaaacgaagagtttgtgagcatggcagaaatcat

SEQ ID NO: 106911 - DNA, 265 bp, Glycine max
ctggcgtaagaaaaccaagacaaccctgtccgagagatcaagcccaagaataggagcatcatgggtgctggaggcactgatgatgaggacaacaacaggtggccagcgtggctgaagcctctgctaaaatagagtttctatgttcagtgcaagcttcacgctgattcgcacaagagcgagtgaaacatgtactgcgtggattgtatgaacggtgctctctgctctctctgcatcgcttaccataaagatcatcgtgctatgcaga

SEQ ID NO: 106912 - DNA, 274 bp, Glycine max
gcaaaccattgttacccacttcctctgacgatgctccatatccacgcactcggaaggctcttgttctaatgatttgcggtttgtttgtgctctcttcccttgttgcctttggagggtacagggcctccaacgcgccacatgctgacgactcatcgccagcatctaacgatgaacaacctagtcccacatcggtgccttctccgaaatggtacccggtttcacggggtgtttcttctggggtgtcggagaagtcatcaagcatgttgtttgcggt

SEQ ID NO: 106913 - DNA, 274 bp, Glycine max
tggccacccacgcggctcttgcttctacaaggatcccttcaaacacaaggttcccatccaaggcctctcactctttcccaacccaatgcgccttaaagagacttgaggtgacagaattctctgggcttagatccacttcatgtgtcacatatgctaacagtgctagagaatcttccttttttgatcttgtagcttcccaactcactcccaagaccaatggatcaactcctgtgaggggagagacagtggccaagttgaaggtggcaatcaatgg

SEQ ID NO: 106914 - DNA, 274 bp, Glycine max
  unsure (1)..(274): unsure at all n locations
atcaacaagtccgaattggattagtttctcctcagcaaataagtgcgtgggnaagaaaaatcctaccgaatggagagatagtgggggaggtaacaaaaccctatacttgtcattacagaaccaataaacccgaaagagatggattattttgtgaaagaatttttgggcctataaaaagtgggatttgtgcttgtggaaattatcgagtaatcagagataaaaaggacgacccagaattttgtgaacaatgcggagtagaatttattgattctcg

SEQ ID NO: 106915 - DNA, 278 bp, Glycine max
caaggcagaaagcaagctcatcctagagttttaaaaatggcagcagcctcctccatggctctctcttccccatccttggctggcaaggccgtgaagctgggcccatcagcccccgaagtcgggagggtcagcatgaggaagaccgtcaccaagcaggcctcctccggaagcccatttcacggcccagaccgcgtcaagtacttgggcccattctctggcgagcccccgtcctacctcactggcgagttcccaggtgactacggctgggacactgctgg

SEQ ID NO: 106916 - DNA, 273 bp, Glycine max
ctctggacttgcttcatatgtttctggtcaaattgatcgtattttcagctggaaggatgtgaagtggcttcaaacaatcaccaaactgccaattctggtgaagggtgtgctgactgctgaggacacaaggatagctatacacagtggtgcagctggaattatagtgtccaatcatggagctagacaacttgactatgttcctgccaccatatcagccttagaagaggttgtcaaagctgctgaaggtcgccttcctgtatttttggatggtgg

SEQ ID NO: 106917 - DNA, 271 bp, Glycine max
cacactttggtggccacagcaacaataacactggcagcctcactacaagctgcagctaccttcatgcaacccaccaaggtgggcatggccactcgcgacctcaaatctacacaatgcatgtctgaggcttttggcttggaacccgctgcagctaaactcatttgctcccttaagcccgatctcaaagattttgctcaaaaatgtgtcgacgccaccagaattgcaggattcgcccttgccacctcagctctcgttgtttctggagcgagtg

SEQ ID NO: 106918 - DNA, 274 bp, Glycine max
ctacaaagttctatggagaggttactcaacagatgttgaagcatgctgatttccccggcagcaacaatggaacaggtctcttccaaaccatagttggtttgaagataagagatttatatgagcagctaatagccaccaaggctgagactccagtggctgcaaaagcttaggaattgaattgaacctgccataataatatatatacatatcgaccgagcgacgcagtcaaattgcattagttctcatcaaaatcatcattttctttcttctttca

SEQ ID NO: 106919 - DNA, 180 bp, Glycine max
aaaagattcgatagaaactaagaaaataaacaaattgattcgccgtgaaagaggatagagagggattcgaaccctcgatagttctttgttccgaactataccggttttcaagaccggggctatcaaccactcagccatctctccaaaagctaatttatattttatctttattccacacaa

SEQ ID NO: 106920 - DNA, 267 bp, Glycine max
caacgatcttgatgcaggagctggtcgtcttggtggaaccacccaatacactgtcaacaaccagatggtgaatgccaccctcatgaacattgctgataaccccaccaatgtgcagcttcctggtatgtataacaaggaagagaatccccgtgtgcccatcatcgtcaccggtaacgatttctccacactctatgcgcctctcatccgtgatgggcgtatggagaagttctactgggcaccaacaagggatgaccgcattggtgtctg

SEQ ID NO: 106921 - DNA, 267 bp, Glycine max
caactacaaaggttgctgtaggagataagatattgaagtagtgctaagtgcctaacacctgcagtgaacaatggcctctgcatcagcatctcttctcaagtcttcacttgttcttgacaagtctgagtgggtgaagggacaaacacttcgccaaccttctgctgcatcagttgtgagatgcaaccccaccaccccatcaggcctcacaatcagagctggttcctatgctgatgagctcgttaagaccgcgaaaacagtggcttcacc

SEQ ID NO: 106922 - DNA, 268 bp, Glycine max
caacaacacaaggccatcatcatggcagctgcttctcctatggcaagccaactcaagtccaccttcactaaaactcttgtagctcccaagggcctctctgcctcttcaccactccacctcctgccttctaagaggcaatttagcttcactgttagggccatccaatcagaaaagccaacctatcaagtgattcaaccaatcaacggtgatcccttcattggaagccttgaaaccccagttacatccagccccttgattgcatggtact

SEQ ID NO: 106923 - DNA, 270 bp, Glycine max
cgagataactagaaacagtgtgatgaaaatgaaggtccttgttttcttcgttgctacaattttggtagcatggcaatgccatgcgtacgatatgttccctctccgaatgaacactggctatggtgcccgtactccggaggtgaaatgcgcaagttggaggcttgctgtggaagcacacaacatctttggctttgagaccattcctgaagagtgcgttgaagcaacaaaggaatacatccatggcgaacaatatagatcagactccaaaac

SEQ ID NO: 106924 - DNA, 274 bp, Glycine max
tgcaaccccaccaccccatcaggcctcaccatcagagctggttcctatgctgatgagctcgttaagaccgcgaaaacagtggcttcaccagggaggggtattttggccatggatgagtccaatgctacctgtgggaagcgtttggcttcaattgggctagagaacactgattctaaccgccaggcataccgtaccctcctcgtgacagttccaggccttggtcagtacatctctggtgccattctctttgaggaaacactctaccaatccacaa

SEQ ID NO: 106925 - DNA, 268 bp, Glycine max
tttgaacccaaagagcgggtagctgagatcggagaaccctctcttacttctccttcttcagcagttgaaaataaaaaatggcagatggtgaggatattcaaccactcgtctgcgataatgggacaggaatggtgaaagctggatttgctggggatgatgctccgagggctgtgtttcccagcattgttggtcgtccccgtcacacgggagtgatggttggcatgggccaaaaagatgcatatgttggggatgaagctcagtccaagag

SEQ ID NO: 106926 - DNA, 266 bp, Glycine max
atcggaatcaacggatttggaagaattggccgtttggtagccagagtggctctgcagagagacgatgttgaactcgttgccgttaacgaccctttcatcaccaccgattacatgacatacatgtttaaatacgacagtgttcatggacactggaagcatcacgatgtcaccgttaaggacgagaagacccttctcttcggtgacaagccagtcactatttttggacacagaaaccctgaagagatcccatgggggtcaactggagc

SEQ ID NO: 106927 - DNA, 265 bp, Glycine max
ttcggaagtgaaggaaatcattttatctactaatagcggacaaattggagtattaccaaatcatgcgcctattgccacagccgtagatataggtattttgagaatacgtcttcttaaagaccaatggttaacgatggctctgatgggcggttttgctagaataaacaataatgagatcactgttttagtaaatgatgcggaaaagggtagtgacattgatccacaagaagcacagcaaactcttgaaatagcagaagctaatttg

SEQ ID NO: 106928 - DNA, 262 bp, Glycine max
gaacaggcgggtacaaaaggaattcaagtacaaattgcaggacgtatcgacggaaaagaaattgcacgtgttgaatggatcagagaaggtagagttcctctacaaaccattcgagcgaaaatcgattattgttgctatacagttcgaactatttatggggttttagggatcaaagtttggatattttctaaataaagaaaaatatattattctttatcttaaatgtgctatattttatcttaaatgtgctatattttttttt

SEQ ID NO: 106929 - DNA, 263 bp, Glycine max
ctcgagccgctcgagccgatctcggtgcgcaattcgccgacgtctgtctccccggatccgcatacaccgaagagtccgccacatggatcaacacggaaggtcgatcgcaactcggtcgagtcgctgtcgtcccaccaggtgccgctcgagaagattggaagattatccgtgccctctccgaagtcgtcggctcccctctcccctacgacgacctgatccaattgagagagcgaatgtgggatgtctcacccaccctcgtccga

SEQ ID NO: 106930 - DNA, 260 bp, Glycine max
tggtcttggccctttagaatttttgactaagtttcgtataccacatcctggaagagttggaggaaggttttttgttgacatcatgatgccttctatgttgagctgggtcttaggtggcaatagcgacaaacttgagggcagaccactaagttgcaggctcacagacaaagtacgttgctcaaataaagtttcttttgtactttgttgctgagaagatattgtatatctggcaaatgatcagttacgtagatggtttgaag

SEQ ID NO: 106931 - DNA, 264 bp, Glycine max
tacgtactcagtgcaaacaaagggaaaaaggagagaattggtagacttttagaaatgcatgcaaacagcagagaggatgttcaagtagctttagctggtgatattattgcacttgcaggtttgaaagatactattacaggtgaaacattgtgtgaccctgataatccaattgtgcttgagcggatggacttcccagatcctgttattaaggttgctattgaaccaaaaactaaagctgatgttgacaagatggcaactggttta

SEQ ID NO: 106932 - DNA, 267 bp, Glycine max
cggctcgaggggaaaatcattcacagaaagggcggtgtgttgtaccttttccgaggcagaaactacaattataaaacacgcccacattttcctctgatgttgtggaaacctgtgcctccagtatatcctaggttggttcagcgagttcctgaaggtctaacgctagaagaagcaactaaaatgcgtcaaaagggaagcacattgattcccatatgcaaactaggtaaaaatggtgtttactgtgacctagtaaaaactgtcagagag

SEQ ID NO: 106933 - DNA, 228 bp, Glycine max
ggtccaagtgcctctaactgtccacgacacggaggaggacgacggttctgatggctccaccgccacctccgccgccaccaccaccaccaccaccaccaagcctaagaaaggcaaggccgcgttgcctcttaagagggacaggacgagatctaagaggttcttggaaattcaacaattgagggagcgtaagaaagagtatgacttgaagacagcaatatctttggttaa

SEQ ID NO: 106934 - DNA, 230 bp, Glycine max
tgcaattgaagttgaagtcttgcccttctctcttcaactccaaacacaagacatcatcatccatggctgcctccgtctccactgtcggagctgccaacagagctcttttgaacctgaatgggtctggacctggggtttcagctcccagttcatccttctttgggagcagcttgaagaaggttattggctcaagggtccccaacacaaagatttcctctggaagcttcaag

SEQ ID NO: 106935 - DNA, 232 bp, Glycine max
agacgaagtgaggaagtggatttctggtgttggtgttgacggcattgggaagaagcttgtgaactcaaaagatggacctccaacctttgagcagcccaagatgactctggagaagctcttgacgtatggtaacatgcttgtccaagaacaagagaatgtcaagagagtccaattggctgacaagtacttgaacgaggctgcacttggaaatgctaacgaggatgctattaac

SEQ ID NO: 106936 - DNA, 232 bp, Glycine max
ctagtttcttacaaggctctactctactgcttcaccttctgctctagaaaattcagtggtgatacatggcttcggctactctctctgtagccaaaccagcccttcaggcaaatgggaaaggcttctctgaattctctggcctccgcagctcatcaggcttccttcccttttctagaaaatcttcagaggatttccattctgtcattgccttccagacctatgcagttggaag

SEQ ID NO: 106937 - DNA, 232 bp, Glycine max
ctcagatgcagaactgtggaatgggagatttgctatgttgggtttgattgctctggcttttactgagtatgttaagggtagtactttggtataattcagtcatgaaggcacaccacaatggacttaatctcctttgtgattagagagaccaatgtttatttgattttcgtgtgtttatttaatctacatatcaaaattatttcgtttatcataaaaaaaaaaaaaagggggg

SEQ ID NO: 106938 - DNA, 228 bp, Glycine max
gcccatcatcgtcaccggtaacgatttctccacactctatgcgcctctcatccgtgatgggcgtatggagaagttctactgggcaccaacaagggatgaccgcattggtgtctgcactggaatttttcgcaccgattcaattcctgaacaggacgttgtcaagattgttgacaccttccctggccaatccattgatttctttggtgcactgagggccagagtatatga

SEQ ID NO: 106939 - DNA, 229 bp, Glycine max
cagaagaacaagtagttgagaactaagaaggagaagcaaatggcttcctcaatgatctcttccccaagtgttaccactgtcaaccgtgccggtgccggcatggttgctccattcactggcctcaagtccatggctggcttccccaccagaaagaccaacaatgacattacctccattgctagcaacggtggaagagtgcaatgcatgcaggtgtggccaccagttggca

SEQ ID NO: 106940 - DNA, 229 bp, Glycine max
ggcttatggtggatacctaggcacccagagacgaggaagggcgtagtaagcgacgaaatgcttcggggagttgaaaataagcgtagatccggggattcccgatataggtcaacctttcgaactgctgctgaatccacgggcaggcaagagacaacctggtgaactgaaacatcttagtagccagaggaaaagaaagcaaaagcgattcccgtagtagcggcgagcgaaa

SEQ ID NO: 106941 - DNA, 228 bp, Glycine max
gaagggtttgacagaagcaaaactgaaggttgccataaacggatttggaaggattggaaggaacttcttgaggtgctggcacggtcgcaaagactcccctcttgatgtcattgccatcaacgacaccattggcgtgaaacaagcctctcaccttctcaagtacgattcgatcttcggaaccttcgatgctgatgtcaagcctgttggcagcttcatcatctctgtcga

SEQ ID NO: 106942 - DNA, 217 bp, Glycine max
ggaacaaaacaaccacccaactaaccctaattcaacttttccgatctgatcacttcgagtaaaaattccaaatgagtcgggcacaggatgcaaaccaatcattcttcccttttggaaatcctatcatgctggtatgtataacaaggccgagaatccccgtgtgcccatcatcgtcaccggtaacgatttctccacactctatgcgcctttcatccgt

SEQ ID NO: 106943 - DNA, 225 bp, Glycine max
agaaaaaaaaaaacccttagccaacacaaccatcatggccacctctgctattcagcaatcagcattcactggtcaaactgctctgaagcagctcaatgagttcgtccgcaagaccggtggcgccggcaaaggtcacactaacatgcgccgcaccgtcaagagtgctcctcagagcatttggtatggccctgaccgtcccaagtacttgggtccattctcggagca

SEQ ID NO: 106944 - DNA, 226 bp, Glycine max
gagagagagaacttcaactgagggtgagagtgacacaaatctagggagcactactctaaaagttctattagattcttcaaaacatgaccatgcatcgcgagtcttgggcttttgtcttcggcgttatgggcaacatcatctcctttggagtgttccttgctccattgccaaccttttactacatctacaagaagaaatccactgaagggttccagtcacttcctta

SEQ ID NO: 106945 - DNA, 228 bp, Glycine max
ctcatcctcctctgtctctctctctccaccattgccatggattcttacaagctctggccatccagcgccttcaattctcccttctggactacaaattctggtgctcctgtttggaacaacaactcctctttaaccgttggagctagaggtccaattctgcttgaggattatcatcttgtggagaagcttgcaaactttgacagggaacgtatcccagaacgtgttgtc

SEQ ID NO: 106946 - DNA, 229 bp, Glycine max
gcacaaagcaaagctcatccttgagttaaaaaatggcagcagcttcttccatggctctctcatccccatccttggctggcaaggccgtgaagctgggcccatcagccccagaagtgggaagggtgagcatgaggaagaccgtcaccaagcaggtctcctcaggaagcccatggtacggcccagaccgagtcaagtacttgggcccattctctggcgagcccccgtccta

SEQ ID NO: 106947 - DNA, 226 bp, Glycine max
ctgatactgactctgatatgggcatggaagaagctcaactcattatggctcacgccaaagaggcttgaaaagatcttaagagaacaaggccttcgaggcagtccatacaggtttaaggttggggacacgaaggagacattgaagatgcaaatgcaagccatgtccaaacccatgaatctcttctctaatgacataggaccgcgtgtgtctccctatgatcattaca

SEQ ID NO: 106948 - DNA, 222 bp, Glycine max
attgtttaaacctaattctcatttcttcatcgttcgattcttctcctcctaaagatgcagatcttcgtgaaaactttgaccggtaagaccatcacccttgaggtggagtcctcggacaccatcgataagttgaaagctaagattcaagacaaggaagggatcccacctgaccagcagagacttatctttgcgggtaaacagctttaggatggtcaaaccctt

SEQ ID NO: 106949 - DNA, 225 bp, Glycine max
ctcgagccgttgcctttaaggattactttaagaggcttttcaactttaaaaaggataaagctggctactggaagtggtttgctgggaatttggcatctggtggggctgctggggcttcttccctcttatctgtctattctttggattatgcccgtactcgtttagcaaacgatgcaaaggctgcaaagaagggtggcgagaggcagtttaatggcttggttgatg

SEQ ID NO: 106950 - DNA, 225 bp, Glycine max
atccttatgttgttcgccttcacgaggttcttgcaagccgtaccaagatttatatcatattggagttcatcacgggcggtgaattgtttgataaaattatacaccatggccgtcttagtgaaaatgactctagaagatatttccagcagcttattgacggtgtagattattgccacagtaagggagtttatcacagagatttaaagcctgaaaatcttttactcg

SEQ ID NO: 106951 - DNA, 224 bp, Glycine max
aaagtgataattcccgatgcatatggtgtgtcttccatacagaatgcaaaagttggggacaatttctaatctttcaaattggaaattgtccccaacttgaaagattagaaaaacttgtttttaataggactgtcaccttaaagggcagctatagcaaaggtggaaagtagggtccctgaatattgattagaagtaacaaggacggacaggcaggtctgcgggta

SEQ ID NO: 106952 - DNA, 224 bp, Glycine max
gaaaaacaagtagttgagaactaagaagaaggaaatggcttcctcaatgatctcctccccagctgttaccaccgtcaaccgtgccggtgccggcatggttgctccattcaccggcctcaaatccatggctggcttccccacgaggaagaccaacaatgacattacctccattgctagcaacggtggaagagtacaatgcatgcaggtgtggccaccaattggca

SEQ ID NO: 106953 - DNA, 225 bp, Glycine max
gcagaacaagtagttgagaactaagaaggagaagcaaatggcttcctcaatgatctcttccccagctgttaccactgtcaaccgtgccggtgccggcttggttgctccattcactggcctcaagtccatggctggcttccccaccagaaagaccaacaatgacattacctccattgctagcaacggtggaagagtgcaatgcatgcaggtgtggccaccagttgg

SEQ ID NO: 106954 - DNA, 219 bp, Glycine max
ccataccataattttcctctttcctctgtgcctcgcttcttcttgaatccatgcgcatgagtttgaagaattgtgttagcggtgaggtgagatatttcaatatttgataattgatagtatatatatggggaggggaagagtggatttgaagaggatcgagaacaagatcaataggcaagtgactttctccaagagaaggtctggcttgcttaagaaagc

SEQ ID NO: 106955 - DNA, 221 bp, Glycine max
ctctggacttgcttcatatgtttctggtcaaattgatcgtactttaagctggaaggatgtgaagtggcttcaaacaatcaccaaactgccaattctggtgaagggtgtgctgactgctgaggacacaaggatagctatacaaagtggtgcagctggaattatagtgtccaatcatggagctagacaacttgactatgttccagccaccatatcagccttag

SEQ ID NO: 106956 - DNA, 215 bp, Glycine max
  unsure (1)..(215): unsure at all n locations
gtttggttttcaatatcgngtgactgacacagtaattaaaggagctggaaagctgaagctggtgtttgttccagaaggccagggtgatgagactgaattcgaggtttttaacttcactggtgaagggggtgtttcattggctatgtacaatactgatgagtctattcgttcaaatgccgnggcctctttggcaactgctttagagaaaaagtggc

SEQ ID NO: 106957 - DNA, 215 bp, Glycine max
cttgaatcttcgttatccttctttttttctccttgaactcgaatattcactatgtcagatgaggtggttctgctagatttctggccaagtccaattgggatgagggtcaggattgcacttgctgaaaagggtatcaaatatgagtccaaagaagaggacttgcagaacaagagccctttgctcctcaaaatgaacccggttcacaagaaaatccc

SEQ ID NO: 106958 - DNA, 222 bp, Glycine max
caacgatcttgatgcaggagctggtcgtcttggtggaaccacccaatacactgtcaacaaccagatggtgaatgccaccctcatgaacattgctgataaccccaccaatgtgcagcttcctggtatgtataacaaggaagagaatccccgtgtgcccatcatcgtcaccggtaacgatttctccacactctatgcgattaacatccgtgatgggcgtatgga

SEQ ID NO: 106959 - DNA, 216 bp, Glycine max
tcggctcgagctcgagccgttctcttaaaagagcctttgctttttctttaggcctttccgaattaagtacatgtttcattttctctcgaagcaagaaaaatgttcatcgagagtttcaaggttgagagtcctaacgtgaagtacacagagactgagattcagtccgtgtacaactatggaaccactgaacatgttcacgagaacaagaatggcact

SEQ ID NO: 106960 - DNA, 218 bp, Glycine max
caacaacacaaggccatcatcatggcagctgcttctcctatggcaagccaactcaagtccaccttcactaaaactcttgtagctcccaagggcctctctgcctcttcaccactccacctcctgccttctaagaggcaatttagcttcactgttagggccatccaatcagaaaagccaacctatcaagtgattcaaccaatcaacggtgatcccttcat

SEQ ID NO: 106961 - DNA, 218 bp, Glycine max
atttcatcgtgcattcaatggccaccacagcagctctatccggaaccatggtgagcacctccttcatgaggaggcaacctatgaccaccacaagcctaaagacattccccaacgttggtgaagctctttttggtctgaaaagtggacgaggtggtcgtgtcacttgcatggcctcgtacaaggtgaagctcataaccccagaaggagaagtggagttt

SEQ ID NO: 106962 - DNA, 213 bp, Glycine max
atcggaataaacggatttggaagaattggccgtttggtagccagagtggctctgcagagagacgatgttgaactcgttgccgttaacgaccctttcatcaccaccgattacaagacatacatgtttaaatacaacagtgttcatggacactggaagcatcacgatgtcaccgttaaggacgagaagacccttctcttcggtgacaagccagtc

SEQ ID NO: 106963 - DNA, 219 bp, Glycine max
cttccttgcctactacattcttcatcacttcattcaacatttctccccttagcttgtttcaccaatggctgctgcggttagtgctgcagtctcttttccatccaccaagtctacctctcttccaagcaggacctccctcattgccccagagagagttgtgttcaagaaggcttcattgcaaaacagagatgtttctagcagtggacgggtagtttccat

SEQ ID NO: 106964 - DNA, 219 bp, Glycine max
ctgaatctgcgtgtgtttgtgaattgttgttgagatctgaatcaaaatcagaaacgataatggctacaccggaccacctcttcaacctccgcaacaacttctaccccggcgcttaccaagccgccatcaacagcagcgacgttgccaacctctcccaagaagataccctcgagcgcgacaccctcgtccaccgctgctacatcgccctcggccagctcc

SEQ ID NO: 106965 - DNA, 220 bp, Glycine max
agaaaagaaaagaatcgagtgattttcgtttgcgttgctgttgcgactgagtgagtgaagatggcgtgcttgcacgaccacagttgcgaagaccatgactgttcctctaactggtctctctacaaacacatcgacctctccaaggtaactgctttgaatgaggcaaatccaggaagtgttaagtcagttttcaaagcttgggaagagcgtctggattctt

SEQ ID NO: 106966 - DNA, 217 bp, Glycine max
atttttgtgaattgtctctatcctgtaagtcaattaccttcagaagctgtcgttgtaaatgttacatgtggtagtggacgtggtggtttacccaccactgcttggattagttctgcagttaacaatcgctcctcagacatcaacaaaaggattcgcacagcacttgggaaaggtaagaaaattgtttttcttactagagttgatccttttccagtag

SEQ ID NO: 106967 - DNA, 216 bp, Glycine max
ctgttgtgcaccatcactgggttcgactccttctctttgcaaccaaatgctggtgctgctggagaatatgctggacttatggttattcgtgcatatcatttggcaaggggagaccaccaccgcaatgtttgcattatacctgtctcagcacacggaacaaatcctgctagtgcagctatgtgtggaatgaaaattgtctctgttggaactgatgcc

SEQ ID NO: 106968 - DNA, 217 bp, Glycine max
gccatattccacaagaactctccaaggatcctccttcccacgagattctttggtgggaaaaatccaagaggtttgaaatttgaaggcagggaagatggattatttcaatgcaccaggaagaaaccatctctttgttccagggccggttaacattccggaccagatcatccgggccatgaacagaaacaatgaggactaccgttctccagcaattcca

SEQ ID NO: 106969 - DNA, 217 bp, Glycine max
ttcaattgctgctggtaactatcctgagtggaaactgttcgttcagacaatagatcctgagcatgaagacaaatttgactttgaccctcttgatgttactaagacttggcctgaggacattatacccttgcagcctgttggtcgcttggtcctgaataaaaacatagataatttctttgctgagaatgaacaacttgcattttgccctgccattgtg

SEQ ID NO: 106970 - DNA, 219 bp, Glycine max
  unsure (1)..(219): unsure at all n locations
cgtggcnctccggcaatttcccaacaattctgggtcatgaggcaataggggttgtggagagcgtaggagaggatgtaactgaagttgcaaaaggagatatggttgtcccaattttcatagctgaatgtggggagtgtatagattgcaaatcaagcaagagcaacctttgttcaaagtttcctttcaagctgtctccttggatgcctagacatgccactt

SEQ ID NO: 106971 - DNA, 273 bp, Glycine max
tgtcttgcaattgaagttgaagtcttgcccttctctcttcaactccaaacacaagatctcatcatccatggctgcctccgtctccactgtcggtgctgtcaacagagctctttcgaacctgaatgggtctggacctggggtttcagctccagttcatccttctttgggagcagcttgaagaaggttattggctcaagggtccccaacacaaagatttactctggaagcttcaagattgttgctgtagaagagaagatagagattgaagagacc

SEQ ID NO: 106972 - DNA, 263 bp, Glycine max
gcgggcacagcctttgtagattttgagtttcaagaagaagttaattctggaaaagtatcagccctaacattgaacaaattttcatgtatagcattggctggggtgtctactgaatatcttatatatggattttctgaaggaggtcggatgacataagaaagttggatttattgctcaagggcctaggcttcacacagaagaagacagattctcaggttagatggtctttgctaaacacggtcttgctcttgcggaggcatgaa

SEQ ID NO: 106973 - DNA, 259 bp, Glycine max
tacaaaggttgctgtaggagataagattgcagtagtgctaagtgctaacacctgcagtgaacaatggcctctgcatcagcatctctgctcaagtcttcacttgttcttgacaagtctgagtgggtgaagggacaaacccttcccaaccttctgcatcagttgtgagatgcaaccccaccaccccatcaggcctcaccatcagagctggttcctatgctgatgagctcgttaagaccgcgaaaacagtggcttcaccagg

SEQ ID NO: 106974 - DNA, 271 bp, Glycine max
ggctcgagggctcgggaagagttaccgaagcgaggacgagatgagggagaggtacgagatattctcgcaaaacctcaggttcatccgctcccacaacaagaaccgcttgccctacactctctctgttaatcattttgctgattggacttgggggagttcaaaagacacagactaggcgctgcgcaaaattgctctgccactcttaaacggcaaccacaagctcactgatggctgtccttcctcccacgaaagactggaggaaagaaggaat

SEQ ID NO: 106975 - DNA, 260 bp, Glycine max
catttgcctgcatgcctttggtattgtggggtgtggttcgtttagtggtgtcaagtcttgcgaacgtgagggtgctggagtggtaatcgggatgtttttgttgcacggctccatgcttgcgcatgcaacgtgtgacatgcatcttttcattgtcaccttagccttcgtggcttaggtgctgacgattggttcctgtgttgcctacctaccaaacggtattcgtgtggctagtcagacccattccatccaggcctctttgt

SEQ ID NO: 106976 - DNA, 257 bp, Glycine max
caagtagttgagaactaagaagaaggaaatggcttcctcaatgatctcctccccagctgttaccaccgtcaaccgtgccggtgccggcatggttgctccattcaccggcctcaaatccatggctggcttccccacgaggaaaccaacaatgacattacctccattgctagcaacggtggaagagtacaatgcatgcaggtgtggccaccaattggcaagaagaagttcgagactctttcctacttgccagacctcga

SEQ ID NO: 106977 - DNA, 257 bp, Glycine max
ctagtttcttacaaggctctactctactgcttcaccttctgctctagaaaattcagtggtgatacatggcttctggtactctctctgtagccaaaccagcccttcaggcaaatgggaaaggcttctctgaattctctggctccgcagctcatcaggcttccttcccttttctagaaaatcttcagaggatttccattctgtcattgccttccagacctatgcagtcgtaatcagtggaggccaagaaagggtgtgac

SEQ ID NO: 106978 - DNA, 268 bp, Glycine max
attgagagcccagagagccaaatctatgaagtttaaggatgggtacatgatttcttctgggcaacctgtcaaagattacattgactctgcagtgagacatgtgctgctgagacagggtgttcttggcattaaagtgaagatcatgcttgttgggatcctaaggggaaacagggtcctaaaactcccctgccctgatcttgtcacaatccattgctcaaaggaggcagaagaatacatccagcctgctccagttttagctgctaatgat

SEQ ID NO: 106979 - DNA, 258 bp, Glycine max
tgtagagagaagtaatggcgaacatagacatcgaagggatcttgaagcagcagcagccttatgatgggcgcgttccgaagacgaagatagtgtgtactttgggccctgcttctcgatccgtagaaatgaccgagaagctttgagggcagggatgaacgttgctcgtttcaatttctctcatggcacccacgactatcaccaggaaaccctcaacaatctgaagactggcatgcacaacactggcatactctgtgccgt

SEQ ID NO: 106980 - DNA, 254 bp, Glycine max
atgcttttcaccatcccggctgaactagcttatggtgagactggttctcctccaacaataccccctaatgcaactcttcaatcagatgtggagctgttgtcttagactagtgtgaaagacatttgtaaggatggaggttatttaagaagatacttaccaagggggagaaatgggagaacccaaaggatcctgatgaagttgtagtcaagtatgaagcatgccgtgaagatggaactcttgtggcaaatctgatg

SEQ ID NO: 106981 - DNA, 254 bp, Glycine max
attgagagcccagagagccaaatctatgaagtttaaggatgggtacatgatttcttctggagaacctgtcaaagattacattgactctgcagtgagacatgtgctcctgagacagggtgttcttggcattaaggtgaaatcatgcttgattgggatcctaaggggaaacagggtcctaaaactcccctccctgatcttgtcacaatccattctccaaaggaggaagaagaatacatccagcctgctccagtttt

SEQ ID NO: 106982 - DNA, 255 bp, Glycine max
gtgcgagaaatggcgattgcaatggcgcttcgcaggctttcatcttcaattgacaagcctctgcgccctctcttcaatgccggttccctctactacaagtcgtctttgcctgatgaagctgtttacgacaaggagcgcccggagttacatggccgaagcagttgaatgctccacttgaggtcgtggatcctgagattgctgatattattgagcttgagaaagctaggcaatggaaggggctagaattgataccgt

SEQ ID NO: 106983 - DNA, 267 bp, Glycine max
gggcgcggggtgagtgacagacacagagtcgctacaagtgtcccagctacgagccatttttcgcactgcttattgagcagaactgcagaacatggcacagattttggctccctctacgcaatggcagatgagaatctcaaaatcctctccaatgcaactcacattacatcaacgatgtggagtactgtactgtggaaacaaaatgaggacgattgacctaccagttctgctaaatttagagtgctggccattaaggctgacaatagc

SEQ ID NO: 106984 - DNA, 252 bp, Glycine max
gtcaaatgatcccaagtttgatcacattgacatcaatgagaaacaaaaggtcttaaatgaatagtgtggaagctgagaactggctcagggagtaaaaacagcatcatgactcgcttccaaaatatggcagcacctgtactttttcagctgatgtaagatagaaagctgaagctctcgacaggtatttgtaagctcattatgaggaaaccaaaaccactgccacccaagccagctacacgagaagtaccagtg

SEQ ID NO: 106985 - DNA, 254 bp, Glycine max
gattacagccctgatgaacctatcatcctcaatgcatcctgcaccactaactgccttgcaccctttgtcaaggtccttgatcagaaattcggtatcatcaagggtaccatgaccaccactcactcctacaccggcgacaaaggcttctcgacgcgagccaccgtgacctgaggcgcgccagggcggcagctctcaacattgtccccacttcaacaggagcagcaaaggcagtggcccttgtcctcccaaccctc

SEQ ID NO: 106986 - DNA, 250 bp, Glycine max
ctcttccagatggaggtgttcttcttctagaaaatgtgaggttttacaaggaggtagaaaagactgatcccgagcatgcaaaaaagcttgcctctctggcagatctgtttgtgaatgatgcatttggtactgctacagggcacatgcatcaacagagggtgttactaaatacctgaagccatctgttgctggttttcttttgcaaaaggaacttgattaccttgttggggcggtatcaagccccaaaagg

SEQ ID NO: 106987 - DNA, 250 bp, Glycine max
gcgagaaatggcgatggcaatggcgcttcgcaggctttcatcttcaattgataagcctcttcaccctctcttcaatgcgggttccctctactacaagtcgtctttgcctgatgaagctgtttacgacaaggagcgcccggagttacatggccgaagcagttgaatgcttcacttgaggtcgctgatcctgagattgctgatattattgagcttgagaaagctaggcaatggaaggtgctggtactgatac

SEQ ID NO: 106988 - DNA, 253 bp, Glycine max
cttgaagcaccaaaagatcagtaccttcaggttttctttgttcactgttagagctgattctgatgactctgactgcaatgaggaagagtgtgccccggataatgaagtagggaaggtcaatgtggaatggttagtggggtgtagacaaaagtagtgggcacattcccacctcgtcgtaagccgggttggactggctatgttgagaaagacactgctggggagacagacatatattcagttgaaccagcagtta

SEQ ID NO: 106989 - DNA, 233 bp, Glycine max
cgttgtttcatcacgaagatatgggaattcactgggagattgctaagcttggagttcgacagggtatgtggggagctgtcaagaagtttgatccaggactacggacatatgagagacaaagggtttctggtacaccttgtcaccctgtgcacgtgctgctaagatcaacactcaaagtaaccatggactatgtgaggtctctggaaaacacgaccagtgagttattggaaact

SEQ ID NO: 106990 - DNA, 248 bp, Glycine max
ccaacatgccaaacgacagcgttctgagtcttttcttcttcgttacgctcttcacatgccttctctctgctaattcccacgatgaccatattttcctaccgagtcaactccatgacgatgactcagtgagtgcactgctaccgacccaaaccttaactacaagccggtgatcggaatcctgacccaccccggcgacggtgcctctggccggctcagcaacgctaacggggtttcttacatcgccgcct

SEQ ID NO: 106991 - DNA, 216 bp, Glycine max
caatgacattacctccattgctagcaacggtggaagagtgcgatgcatgcaggtgtggccaccagttggcaagaagaagtttgagactctttcctacctgccagaccttgatgatgcacaattggcgaaggaagagaataccttcttaggaagggatggtttccttgcttggaattcgagttggagcacggtttcgtgtaccgtgagcacaacagg

SEQ ID NO: 106992 - DNA, 251 bp, Glycine max
tctcgagccgattcggctcgggagatggtggaataagcaaaagaaaacatgccaccaaagggaacttgaagcttttgtttctaactgtggcatcaggtgatagaattaatggtgaagctattcaaagcaatcgagtctttccatgatccttgatgcccttgtgaaaacaaaatctagagcagtgctgaatgatataattaacaaaaatggtttacagatgttacataacattatgaagcagtacaggcatg

SEQ ID NO: 106993 - DNA, 254 bp, Glycine max
gccgccgatccaagtagctggtaaattaaaattggaattagcacaattcgcagaattagaagcttttgcccaattcgcttctgatctcgataaagctactcaaaatcaattagcaagaggtcaacgattgcgcgagttgcttaaacaatcccaatcagctcctcttaccgtggaagaacagataataactatttatactggaacgaatggttatcttgattcattagaaattggacaggtaaggaaatttcttg

SEQ ID NO: 106994 - DNA, 244 bp, Glycine max
agcaagactatatacacgtgcgagccagaagaggccaagccaccgataaccacagtctggctgagagagctagaagggaaaaaatcagtgagaggatgaaaattcttcaggatttagtccccgggtgcacaaggtaattggtaaagcattctcgctggatgagataattaattatgtccagtcactgcaacgtcaggttgagttcctttcaatgaagcttgaggcagttagttcgagattgagc

SEQ ID NO: 106995 - DNA, 172 bp, Glycine max
atcgagccgctcgagccgctcgagccggtcctgttatctctcagcgcgtaaagcatggcttagttggtggagaaaaccacgagtggtcgcgagtacaaggtcaaggacctttcccaggccgacttcggccgctcgagatcgagctggccgaggttgagatgcccggcctcat

SEQ ID NO: 106996 - DNA, 274 bp, Glycine max
cactcacaaacgcacactgaattcaaaaacatcgaaagagagaggcatggccgagcaaaccttcatcatgatcaagccagatggcgttcaaagaggccttattggcgagattattagcagatttgagaggaagggtttttacttgaaagggttgaaactcgttactgtggaccgtccttttgctgagaagcactatgctgatttgtctgcaaaacctttctttagtggtttggtggatacattgtctctggccctgttgttgccatgactggga

SEQ ID NO: 106997 - DNA, 283 bp, Glycine max
tgcaattgaagttaaaagccttagccttccctacaactccaaacacaaagacatcatcatccatggctgcctccgtctccactgtcggagctgtcaacagagctcttttgaacctgaatggttctggagctggagctacagctcccagttcagccttctttgggaccagcttgaagaaggttattgcctcaagggtccccaacagcaaggtttccggtggaagcttcaagattgttgctgtagaagagaagaaagagattgaagagacccagcagaccgacaa

SEQ ID NO: 106998 - DNA, 277 bp, Glycine max
ttcatggccaagccagtgtccattgaggtatggaacccaagtggcaaatacagagttgttagcaccaaaccaatgcctggaactcgttggatcaatcttctcgttcaaaatgatgttcgccttgaaatatgtaccgagaagaaaacgattctgtcagttgaagacatcattgctttgattggtgataagtgtgatggagttattggacagctgactgaagactggggagaacagttgttctctactttgagcaaagccggaggcaaagctttcagta

SEQ ID NO: 106999 - DNA, 278 bp, Glycine max
gaagaagaagaagaattaccatttggtcccgaccccccaaaaattggaccttccgatttccatattcttcgtgttgtaggacagggtgcctttgggaaggtctttctcgtcagaaaaaaaggtgattgcttcgacgacgctgatggcgtgttcgccatgaaggtgatgaggaaagacaccatcattaaaaaaaaccacgtcgattacatgaaagccgagagggatattctcaccaaagtccttcaccctttcatcgttcagctccgttactctttcca

SEQ ID NO: 107000 - DNA, 275 bp, Glycine max
tggtgatattatgaccagctagtgcaactttgcaatttagaaagttagcagattgtgattttctcaagagaaactttaagcagatgtctaatgttttatgggtggctcctgaggacaaggcgagtttatggtcacaacttcattatgtttcgtgcaataatctggaaatgcaagaagcttatcttgtcaatctcgtaaatgtgttacgagaattgtatttgcacagtccagaggaagctcgccaattgagaaggaaagtctctctcgtattgaat

SEQ ID NO: 107001 - DNA, 282 bp, Glycine max
aaaggttgctgtaggagataagattgcagtagtgctaagtgctaacacctgcagtgaacaatggcctctgcatcagcatctctgctcaagtcttcacttgttcttgacaagtctgagtgggtgaagggacaaacccttcgccaaccttctgcatcagttgtgagatgcaaccccaccaccccatcaggcctcaccatcagagctggttcctatgctgatgagctcgttaagaccgcgaaaacagtggcttcaccagggaggggtattttggccatggatgag

SEQ ID NO: 107002 - DNA, 282 bp, Glycine max
  unsure (1)..(282): unsure at all n locations
ggggcttcgaacaaggagccccgaaacccaaaccctaatctgattcgctttcgattatggcgtctgagagcgcttctcgatcgagttccgcggccgattcgtacattgggagcttgataagcttgacctctaagagtgagatcagatacgaaggtattctctacaacatcaacaccgaagagtccagtattggcctcagaaacgtgcggtcttttggannngaaggaaggaaaaaggatggcccacaaatccctcccagtgacaaggtttatgagtatatac

SEQ ID NO: 107003 - DNA, 280 bp, Glycine max
gaagaagggtcttactgctgaagatgtgaatgcagcattcagaaaggcagctgaggggccgctcaaaggtgtattggacgtgtgtgatgttccacttgtgtctatcgacttccgctgctctgatgtttcctctactattgactcctccttgactatggtcatgggagatgatatggttaaagtggttgcttggtatgacaatgaatggggttacagccaaagagtggtcgatttggcacatctagtagcaagcaagtggccaggggcacctaaagcgggg

SEQ ID NO: 107004 - DNA, 281 bp, Glycine max
aaggagtctgacatgtgtgcgagtcaacgggcgagtaaacccgtaaggcgcaaggaagctgattggtgggatccccctgtgggttgcaccgccgaccgaccctgatcttctgtgaagggttcgagtgagagcatacctgtcgggacccgaaagatggtgaactatgcctgagcggggcgaagccagaggaaactctggtggaggcccgcagcgatactgacgtgcaaatcgttcgtctgacttgggtataggggcgaaagactaatcgaaccgtctagtag

SEQ ID NO: 107005 - DNA, 277 bp, Glycine max
gagaaggagaacaactttaagcagcccggagagagataccgatcttgggcacctgacaggcaagatagatttaatcgccgatgggttgatgctttatctgacccacgggtcacccatgaaatccgcagtgtctggatatcttactggtctcaggctgaccgttctctaggccaaaagatagcatctcgtctgagcatgaggccaaatatttaatgttgttgccaaccccagaatgattgttagagttgcagacgtgcaaagagtacgataaggatgt

SEQ ID NO: 107006 - DNA, 279 bp, Glycine max
cggacacgaactttactcctggattggccaatacgatttgagataatcgtaggcattgcgcgaggcatgttgtatcttcaccaagactccagattgagagtgattcatagagacctgaaaaccagcaacattcttctagatgaggagatgaatccaaagatatcagactttggtcttgccaaaatatttgggggaaaagaaactgaagcatgtacagggagaatagtgggaacctatggatacatggctcaagagtatgccttggacggattcttttca

SEQ ID NO: 107007 - DNA, 281 bp, Glycine max
atcagcaccacattcacctgagctttttgtgaggattccaaagcatggcttcccttgcagcatccactgctgctgcttcccttggcatgtcagaaatgcttggaaaccccatcaacctcagtggtgccacaaggccagctccatctgcctctagccctgcctccttcaagactgtggctcttttctccaaaaagaaggctgcacctccaaaaaaagctgcagctgctgctcctgccaatgatgagcttgccaagtggtatggtcctgacagaaggatcttc

SEQ ID NO: 107008 - DNA, 277 bp, Glycine max
cctcctaaccttcaataattctcttctcacccttataaaaagaaactcattttaactcagactttgcatttcaccttatctatctatcttttctaacatggctgctgggactggactctttgcagagattttggatggagatgtgtacaagtactatgctgatggagaatggaagaaatctgcttctgggaaaagtgttgccatcatcaaccccactaccagaaagactcaatacaaagttcaagcttgttcacaagaggaggttaacaaggtcatg

SEQ ID NO: 107009 - DNA, 278 bp, Glycine max
gcagaagaacaagtagttgagaactaagaaggagaagcaaatggcttcctcaatgatctcttccccagctgttaccactgtcaaccgtgccggtgccggcatggttgctccattcactggcctcaagtccatggctggcttccccaccagaaagaccaacaatgacattacctccattgctagcaacggtggaagagtgcaatgcatgcaggtgtggccaccagttggcaagaagaagtctgagactctttcctacctgccagaccttgatgatgcac

SEQ ID NO: 107010 - DNA, 280 bp, Glycine max
gttagtctagcagaaacaattagagggtttaaattgattctttctggagaattagatggtcttcctgaacaagccttttatttggtaggtaatatcgatgaagctactgcgaaagctacgaacttagaaatggagagcaatttgaagaaatgactttaaatctttgtgtactgacccccaatcgaattgtttgggattcggaagtgaaggaaatcattttatctactaatagcggacaaattggagtattaccaaatcatgcgcctattgccacagccgt

SEQ ID NO: 107011 - DNA, 278 bp, Glycine max
aacatctgtggatgaagctttagaaattcttgttgaaaacaggataactggttttcccgtgattgatgataactggaaactggttggtgttgtttcagattatgatttgttagcactggactctatatcaggtcacgggttaaaggataacatgtttccagaagttgacagtacttggaaaactttcaatgaggttcaaaagctgctaagtaagaccaacggaaagttgattggtgacttgatgaccactgcccctatggtcgttcgtgagaccacca

SEQ ID NO: 107012 - DNA, 278 bp, Glycine max
ggaagcctgattttgaagcatatattgatccacaaaagcaatacgcagatgcagtgatagaagtgttgccaacccaactcattccagatgacaacgagggtaagattttgagagtgaggttgatacagaaagaaggggttaagtactttagcccagtttacttatttgatgatggctctaccatttcatggataccatgtggaaggaagcttacatgctcctaccctggcatcaaattcttctatggaccagagacttactacggaaatgaggtgtca

SEQ ID NO: 107013 - DNA, 279 bp, Glycine max
ggccaaatggggacgttcggtttacataaatattcagaaattcgtacagtttcagcttaccgttaatgtggttgcattaatagtgaatttcacatcagcctgcttgacaggttagaaagttaatttaattttgttaccacaaaatagggttatgtacttacataaacagcaaggaactgcactttttttgttttcacaccagcctgcatgacagattataaataaaaacactttttttgttttcttcttattagttatcttatgatcttacatgtattt

SEQ ID NO: 107014 - DNA, 274 bp, Glycine max
gctagcaccacattcacctgaggcttccaaagcaatggcttcccttgcagcatccactgctgctgcttcccttggcatgtcagaaatgcttggaaaccccatcaacttcagtggtgccacaaggccagctccatctgcttctagtcctgcctccttcaagactgtggctcttttctccaaaaagaaggctacaccaacacctccaaaaaaagctgctgctgctgctcctgccaatgatgagcttgccaagtggtatggtcctgacagaaggatc

SEQ ID NO: 107015 - DNA, 273 bp, Glycine max
aggatatggtgcaagtgctgtgtgtccgtacttggcattggagacttgtcggcagtggcgtttgagcaataaaaccgtaaatctgatgaggaatggaaagatgcctactgtatcaattgaacaggcacagaagaactattgcaagttactgtggtgcacaaatatttgaagtctatggattagggaaggaagttgttgatcttgcattcagaggaagtgtgtcgaaaattggtggattaacttttgatgaggtggcaagagagactttgtctt

SEQ ID NO: 107016 - DNA, 277 bp, Glycine max
acaagtagttgagaactaagaaggagaagcaaatggcttcctcaatgatctcttccccagctgttaccactgtcaaccgtgccggtgccggcatggttgctccattcactggcctcaagtccatggctggcttccccaccaggaagaccatcaatgacattacctccattgctagcaacggtggaagagtgcaatgcatgcaggtgtggccaccagttggcaagaagaagtttgagactctttcctacctgccagaccttgatgatgcacaattggc

SEQ ID NO: 107017 - DNA, 277 bp, Glycine max
agaaaaagcttctccaaagaatttgaaggagaaagattcattcatgttcattttttccttttccccttcgtccccatcaagtttctgattctctcttttcacttcctttctctttcttcattcttctttctcttttcaactattttctttacatttttttctttttctctcgcttttttcgcgttcactttctctactctgttttacgcattttatttattgttttgttagttaattttgcgattcgagtaattggtatgcttgtgttttctagaac

SEQ ID NO: 107018 - DNA, 269 bp, Glycine max
gacgaggatgacagtgcggggcttcaaactactatgagcaaaagattgagcatctagagctgaaggtgcatgatgaaatacagaatctggcgtgtctgcaagcgcaacgtaatgagctcaattcaagaggtctaaatatcatctttttaacaagattacagatgattcttgtttgagctgatgtgtttcttattaaatataaagttctcttgctgcatgaagagctgcagatgatacaggagctttgttcgtatgtaggcgagtaacaa

SEQ ID NO: 107019 - DNA, 272 bp, Glycine max
atctgtatttggcggagtaggtgaacgtactcgtgagggaaatgatctttatatggaaatgaaagaatctggagtaattaatgaacaaaatattgcagaatcaaaagtagctctagtatatggtcaaatgaatgaaccgcccggagctcgtatgagagttggtttaactgccctgactatggcggaatattttcgagatgtcaatgaacaagatgtacttctatttatcgacaatatctttcgcttcgtccaagcaggatctgaagtatctg

SEQ ID NO: 107020 - DNA, 266 bp, Glycine max
caagtctctcgaagcatctttctttctcttcctgcagaagctatccgtgttacttgttcccaagtctccaacaagcaaagtacatggttgataatggaaatccaggtccccagcgcattcgacccgtttgccgaggcgagagaatcagatgcccccggggcaaaggagtatgtgcacatacgaattcagcagaggaatggaaagaagagtctgacaacagtgcaagggctgaagaaggagttcagctacgagaagatcctcaagga

SEQ ID NO: 107021 - DNA, 275 bp, Glycine max
gaagaaagtggaggccaaaaatacattggagaattacgcctataacatgaggaacacaattaaagatgataagattgcttccaagctgtctgctgatgataagaagaaaattgaggatgcaattgagcaggctatccaatggctcgatggaaaccaacttgctgaagctgacgaattcgaggacaagatgaaggagttggagagcatttgtaaccccatcatagcaaagatgtaccaaggagctggtggtgatgcgggtggagccatggatgagg

SEQ ID NO: 107022 - DNA, 273 bp, Glycine max
aagcaaccagacttgctgtagaggcatggggtttgaagaattgcacccaaaaggaagagtggtacagtgacactgtgactgctgttcttgttcctgcttacattgatagtactgaaatagttaggagggcatggaagagatacaatttgagcttaggtcttggactgaacaaagttgctgggaaggttttcagaattggacatcttggccacttgaatgagttgcaactgttgggatgtctagctggtgtagagatgatactcaaagatgtgg

SEQ ID NO: 107023 - DNA, 253 bp, Glycine max
cgtcttgcaattgaagttgaagtcttgcccttctctcttcaactccaaacacaagacatcatcatccatggctgcctccgtctccactgtcggagctgtcaacagagctcttttgaacctgaatgggtctggacctggggtttcagctcccagttcatccttctttgggagcagcttgaagaaggttattggctcaagggtccccaacacaaagatttcctctggaagcttcaagattgttgctgtagaagag

SEQ ID NO: 107024 - DNA, 275 bp, Glycine max
gacaagacttgcaattttgtcaaggctgacttcatgaaaatgccattcccagacaacagttttgatgcagtgtatgcgattgaagccacttgccatgcaccggatgcttatggatgctataaagagatttttagagtgttaaagcctggtcaatattttgctgcttatgaatggtgcatgaccgattcttttgatccccaaaacccagagcaccaaaaaatcaaggcagaaattgagattggtgatgggctacctgacattcgattgactgctaa

SEQ ID NO: 107025 - DNA, 273 bp, Glycine max
cacttgctcccttcagcctgatctcaaagaatttgctcaaaaatgtgtcgacgctaccaaaattgcaggattcgcccttgccacctctgctctcgttgtttctggagcaagtgcagaaggtgttccaaaaaggctaaccttcgacgaaatccagagcaagacatacttggaagtgaagggaactggaactgctaaccagtgcccaaccattgaaggtggagtggactcattcgccttcaagccagggaaatacaacgccagaagttgtgcctg

SEQ ID NO: 107026 - DNA, 269 bp, Glycine max
gcttccacaagaggctttgttcagaaatacttagccacaggtcccttcaaggtccaattcggaaagtctatgatcaagatgagcaacattggtgtcaagaccggttctcagggtgaaattcgcaagatatgttctgctattaattaattaaggcaaatattataaggatactgattaatatttgccttaattaattaatcagtatccttataatattgattaaggaattaaaaaaatatttaaaattatattaatcatcacttaaggat

SEQ ID NO: 107027 - DNA, 269 bp, Glycine max
aatggcaacccaagcctctctcttaaccccacccctctccggtctcaaagccagcgaccgcgcctccgtgccatggaagcaaaactccagcctctccttctccagcccgaagcccctcaagttctccagaacaatcagagcagcagccgccgacgagaccacagaggcaccagcaaaagtagaggctgcaccggtcgggttcaccccaccagaacttgacccaaacaccaattccccgatcttcgggggcagcaccggcgggctcctgc

SEQ ID NO: 107028 - DNA, 270 bp, Glycine max
cggctcgagcggctcgagcggctcgaggcgagaaatggcgatggcaatggcgcttcgcaggctttcatcttcaattgacaagcctctgcgccctctcttcaatgccggttccctctactacaagtcgtctttgcctgatgaagctgtttacgacaaggagcgacccggagttacatggccgaagcagttgaatgctccacttgaggtcgtggatcctgagattgctgatattattgagcttgagaaagctaggcaatggaaggggctaga

SEQ ID NO: 107029 - DNA, 221 bp, Glycine max
caagtaaatatttctgttcctgaaggttgtgctgatccaagtgctagaagttgtgatgggacttgcgtgtaacattcttagaattctcaatgtcttaggtgcaaagagaagatgccaagtttgagatgattttactatatttttcatattggactgtcttcctctataattttgagttaaagtgtccacttaaattgaaaaaaaaaaaaaaaaagagaaaa

SEQ ID NO: 107030 - DNA, 269 bp, Glycine max
aaacaaagaaaaaaaaaaacccttagccaacacaaccatcatggccacctctgctattcagcaatcagcattcactggtcaaactgctctgaagcagctcaatgagttcgtccgcaagaccggtggcgccggcaaaggtcgcactaacatgcgccgcaccgtcaagagtgctcctcagagcatttggtatggccctgaccgtcccaagtacttgggtccattctcggagcagattccatcatacctgaccggagaattccctggtgact

SEQ ID NO: 107031 - DNA, 266 bp, Glycine max
ggcgcacgttagcacaaactatcatggccacggcaacagcagctgccacctcgtcctttatggggacgcgtctcctggaggctcactccggagcggggcgagtgcacgcccgattcggcttcggcaagaaaaaggctcccgccccaaagaaagcctccaggggatcgggccgagacaccgacagacccctttggtatccgggcgccaaagcgcccgaatacctcgatgggagtcttgtcggagctacgggttcgacactttgggct

SEQ ID NO: 107032 - DNA, 262 bp, Glycine max
gacaagacttgcaattttgtcaaggctgacttcatgaaaatgccattcccagacaacagttttgatgcagtgtatgcgattgaagccacttgccatgcaccggatgcttatggatgctataaagagatttttagagtgttaaagcctggtcaatattttgctgcttatgaatggtgcatgaccgattcttttgatccccaaaacccagagcaccaaaaaatcaaggcagaaattgagattggtgatgggctacctgacattc

SEQ ID NO: 107033 - DNA, 268 bp, Glycine max
tcttcttcttcttccttcccttctctcattcaagacaggcctgtctttgctgcccctgcccccatcatcaccccaactgtgagagaggatatggcaaaggaatacgagcaagctattgaagaactccagaaattgttgagggagaagagtgaactcaaagccacagctgctgagaaagtggagcagataacagcttctctgggaacatcatcatctgatggcatcccatcatcagaagcctcagacaggatcacagctggtttcattc

SEQ ID NO: 107034 - DNA, 269 bp, Glycine max
ggcttgtgaatcagcaccacattcacctgagctttttgtgaggattccaaagcatggcttcccttgcagcatccactgctgctgcttcccttggcatgtcagaaatgcttggaaaccccatcaacctcagtggtgccacaaggccagctccatctgcctctagccctgcctccttcaagactgtggctcttttctccaaaaagaaggctgcacctccaaaaaaagctgcagctgctgctcctgccaatgatgagcttgccaagtggtat

SEQ ID NO: 107035 - DNA, 269 bp, Glycine max
cggctcgagcggctcgagcggctcgaggcgagaaatggcgatggcaatggcgcttcgcaggctttcatcttcaattgacaagcctctgcgccctctcttcaatgccggttccctctactacaagtcgtctttgcctgatgaagctgtttacgacaaggagcgacccggagttacatggccgaagcagttgaatgctccacttgaggtcgtggatcctgagattgctgatattattgagcttgagaaagctaggcaatggaaggggctag

SEQ ID NO: 107036 - DNA, 269 bp, Glycine max
cttaattaatattctctagtggtgcttcccaatcaatatcctttaattttgtctcaattcctttctttctcattcaccaatccatacttcattttgttaatttcttaatccaacaccaccaagatgccaactgacacatcatcagtttccggcggcgaaatcgtgtgtgtgaccggtgccggcggtttcatagcctcttggcttgtcaaacatctcttagagaaaggctacactgtgagaggaaccgtgagaaacccagatgatccgaa

SEQ ID NO: 107037 - DNA, 268 bp, Glycine max
cacgtaaattctaagcggtggccaaaggaaaaaatggctctactatcatcagtcctaaagcaattgccgcatgagctaagttcaacccattacctaacagttttcttctgcatcttccttatacttcttcagctaataagaagaaacaaatacaatctgccaccatccccaccaaagatacccataatcggcaatcttcaccagctaggcacactgccacaccgctcctttcatgcactctcacacaaatatggccctctcatgatgt

SEQ ID NO: 107038 - DNA, 266 bp, Glycine max
tggatgtatgtatatttatgtttattgtccttttcccttttcaacagaaaatgcccgtgtggtggagatggtactattgggcatgtcctgtggcttggaccttgtatggattgattgcatctcagtttggagatataactgaaagaatgccgggtgaagataacaagatggtgaaagaattcatagaagactattttggtttcaaacatgacttcgttggaatttgtgctgttgtggttgctggcatcgccgttgcctttgcatta

SEQ ID NO: 107039 - DNA, 265 bp, Glycine max
acaaaggttgctgtaggagataagattgcagtagtgctaagtgctaacacctgcagtgaacaatggcctctgcatcagcatctctgctcaagtcttcacttgttcttgacaagtctgagtgggtgaagggacaaacccttcgccaaccttctgcatcagttgtgagatgcaaccccaccaccccatcaggcctcaccatcagagctggttcctatgctgatgagctcgttaagaccgcgaaaacagtggcttcaccagggagggg

SEQ ID NO: 107040 - DNA, 266 bp, Glycine max
catatgtgtagcttataaaatctttagctaaatttgagcatcagagtcatggatgcttttcagttcaaaactattatttcaggcattcttgccctgctagcatgcgccttgttttatcaatttaagaaaacactttgtggcaatacaaagaagatctgtagggcacctcaagcagcaggtgcatggcctatcattggccatttgcacctcttcaatgctcatcaactcacacacaaaacacttggcaaaatggctgagaaacatgg

SEQ ID NO: 107041 - DNA, 268 bp, Glycine max
cctttgtaaggtcgaccatgcataggagcctcttgtacctgttttcagctattcataccaaattatgcgtagtcttcaaaggaacatgtgtgataatgagacaggccatgttctttatgagaccatgtttgtttggaatgagttcttaactcgaggaattaggaatcacctccagaatactatttggacagttgcgctagtgtatggattttttaaacaggaaatgctaatgatatccagacgggagttcacacttacgctcattgca

SEQ ID NO: 107042 - DNA, 267 bp, Glycine max
cggctcgagtgcatgtgatagctttcttgaacttacggaatatacacgagaagaaattttgggacgaaattgtcggtttcttcaaggaccagaaacagatcaggcaactgtttccaggataagagatgctatcagagaacaaagggaaatcactgtacagttgataaactatactaagagtggaaaaaagttctggaatttgtttcacttgcaacctatgcgtgaccaaaagggtgaacttcaatacttcattggtgttcaactaga

SEQ ID NO: 107043 - DNA, 269 bp, Glycine max
aagcattagcaaaagcaagaagaactagtctaagcagaaatggcctcttcagtgatggcatctgtggccctcaaacctgcccctttcactgttgagaagtcctcagttagaggccttccctccctctcaaggaactcctcttcattcagagttgtggccagtggtggcaagaagatcaagactgacaagccttatggaattaatggtggcatggctttgagggaaggagttgatgcatctggcaggaaaggaaagggaaagggcgttta

SEQ ID NO: 107044 - DNA, 265 bp, Glycine max
actcgttcttcttcttttgttgttctgtgtttgtgtttgttttttctctcacctgaaaatgtcttgctgcggtggtaactgtggttgcggaagctcctgcaagtgcggcaacggctgcggaggctgcaagatgtacccagacttgagctacactgagtcaaccaccaccgagaccttggtcatgggagtggcacctgttaaggctcaatttgagggtgctgaaatgggtgtgcccgctgagaacgatggctgcaaatgtggacca

SEQ ID NO: 107045 - DNA, 267 bp, Glycine max
tcagaaccggcctgcagagttgattgccaagtttttggatgagaaacttcgtgcaggtaacaaaggcacttcagaagaagagttggagggtacacttgataaagtcctggttttattcaggttcattcagggcaaggatgtgtttgaggcattttataagaaagatcttgcaaaaagactactgttaggaaagagtgcttctattgatgcagagaaatctatgatctccaagttgaagaccgagtgcggcagccagttcacaaacaa

SEQ ID NO: 107046 - DNA, 264 bp, Glycine max
gtgggcagagaactgaagggtttagaatcacaaactagtttatttaccctacgacaaatcaaggcagcaacaaataactttgacaaatccttgaagattggagaaggagggtttggtcctgtttacaagggtgtactatcggatggcactgtagtagcagttaagcagctttctgctaggtcaaggcaagggagtcgggaatttgtaaatgagataggcctgatttctgctttgcaacacccttgtttagttaagctctacggc

SEQ ID NO: 107047 - DNA, 264 bp, Glycine max
taattctcttctcacccttataaaaagaacctcattttaactcagactttgcatttcaccttatctatctatcttttctaacatggctgctgagactggactctttgcagagattttggatggagatgtgtacaagtactatgctgatggagaatggaagaaatctgcttctgggaaaagtgttgccatcatcaaccccactaccagaaagactcaatacaaagttcaagcttgttcacaagaggaggttaacaaggtcatgga

SEQ ID NO: 107048 - DNA, 265 bp, Glycine max
gaaagagaagccacttccaatttcacacacacacagcaaacgactgcactgtgtggaaagtaagcatggcaagagtggtggcactccaacagaaccaactatctttctctcccttagcttcctctctttttgacttcagtggaaccagacttcattctcaacttcagttcaagagaaaactatgccatccaaaagggtctttctacgtctcggcatcgagcaccaagaaaatcctaataatgggaggcaccaagtttattggtgt

SEQ ID NO: 107049 - DNA, 266 bp, Glycine max
gggcatttgctcttggaataaagaaacttggaactgtggaaattcaggaccttcccttctttgacactgtgaaggttaagacttccaatgcacacgcaattgctgatgctgctctcaaaagtggaataaatttgcgagttgttgatggaaacactatcactgttgcttttgatgaaacaaccacattagaggatgttgataatcttttcaaagtttttgctggtggaaagcccgtctccttcacagctgcatctcttgcaccagaa

SEQ ID NO: 107050 - DNA, 267 bp, Glycine max
agaaatttctgattccagagcacagatcacagctatccatttaataatagggactcttcaaaggatgcacgtctttggtgttgaaaacagggatactttaactcacaaggccacagggtattcagcaaagcttttaaagaagccagatcaatgcagagctgtgtatgcatgctcacatctgttttgggttgatgatcatgataacatgaaagatggagagagggtcctattatgtcttaagcgggctttaagaattgcaaatgctgc

SEQ ID NO: 107051 - DNA, 235 bp, Glycine max
tttacgagtatgggcatcaagagtgctgtagagtaagaaaggtgaggcccttgaggagagcccttaaggttctcaaagcatggattactggacagataaaagaccagtctcctggtactaggtctgaactccctattgtccaggttgatcctgtttttaagggactggatcgtggaattggcagcctggtgaagtggaacccggttgcacatgttaacagtctgcacataatggg

SEQ ID NO: 107052 - DNA, 261 bp, Glycine max
ttgttgcatcaccgcaagtccacaacatggctgccactgccgcttcaggcatagcttccttgttttcttcttctattaacagtgtcaaatgtcttcgttcctccaagaactggtccattatagacccccttataaccacagtgccctcaaaccgtggcatgtttgtgtcacacttggtggaacctttgtccattgggggtgccattaattcgcacaagtttggggggctagaatttctgctgcttttgcacaaaaagaggt

SEQ ID NO: 107053 - DNA, 257 bp, Glycine max
gaacattgctgataaccccaccaatgtgcagcttcctggtatgtataacaaggaagagaatccccgtgtgcccatcatcgtcaccggtaacgatttctccacactctatgcgcctctcatccgtgatgggcgtatggagaagttctactgggcaccaacaagggatgaccgcattggtgtctgcactggaatttttcgcaccgattcaattcctgaacaggacgttgtcaagattgttgacaccttccctggccaat

SEQ ID NO: 107054 - DNA, 261 bp, Glycine max
aaagaggaggctccaccagtggagaaggtagaggaggagccagcaccagatatgaatgaaatcaaggcactgcctccgccggagaattatactccgcctcctccgcctgagccggagcccaagccacagccacaggttacggaggatttggtgaatctgagagacgacgcagtcactgcagatgatcagggaaataaatttgctttagcactctttgctggtgcacctgctaataatgcaaatggatcatgggaagccttc

SEQ ID NO: 107055 - DNA, 261 bp, Glycine max
cttctctgggaacatcatcatctgatggcatcccatcatcagaagcctcagacaggatcaaagctggtttcattcacttcaagaaggagaaatatgacaagaatccagctttgtatggtgaacttgccaaaggccagagccccaagtttatggtgtttgcttgctcagactcaagggtgtgcccatctcatgtgctagatttccaaccaggagaggcctttgtggtcagaaatgttgctaacattgtcccaccatatgacc

SEQ ID NO: 107056 - DNA, 259 bp, Glycine max
cattaacgggtggtgcctctcttccatctccccagccaaatcctctctcaagaaggccacattaggcccttctgtcttcgcaaccgttagcactccttcttctccttcttcttcttcttcttcttccttcccttctctcattcaagacaggcctgtctttgctgcccctgcccccatcatcaccccaactgtgagagaggatatggcaaaggaatacgagcaagctattgaagaactccagaaattgttgagggagaag

SEQ ID NO: 107057 - DNA, 261 bp, Glycine max
cgaacatttatcttggtgtctgaagaagatgaggaagcaacatttgtgtaaccttctaagcgtggaaaatactgtgttgtttttgacccgctggatggttcctctaacattgattgtggtgtttcaattggcacaatctttgggatttatttgataaaagaagaccatgaaccaaccgtagaagatgttttgcaacctgggaagaacatgttggcagctggttattgcaggtatggtaactcttgaacgcttgtgataagc

SEQ ID NO: 107058 - DNA, 264 bp, Glycine max
acgttttgctctacgcctctccctctctctcaaaaatcgttctcttcgattttagggttttgttttgctgctgcctccgttccccccttctcataaacaacgcgttttctcttctgcttcgtatctattctttgcttttggttttggttgattcaaggccttcacagcattcgttgcggcattttaatcgatttatccaagcaggactgaatgaactaatggagtctaaaggtgggaaaaagaagtctagtagtagtagtagta

SEQ ID NO: 107059 - DNA, 258 bp, Glycine max
gagaagttggattgaagtgcagggagaagttcatgtttttgtggcgggggattggaagcatgagaggtccaaggaaatttatcagaagttggcagagcttatgggggatattgaaaaattagggtatgttcctgtttgggatgaggtgttgcataatgttggggaggaaaagagaaaggaggccctttggtatcatagtgagaaattagcagttgcatttggagtgttgtgtggacctgcaccaccagggaagccgtt

SEQ ID NO: 107060 - DNA, 257 bp, Glycine max
ggcgtggatgtggcttcgatcagcgcgtgcagcaagaagcgcaagctctcccgcgcgtggagctcacacctggcttcgggaagctggacactaagccgtgaacaaggaagcaagctcctggcgcgtaagttccggtacgattgcttgtacgtgtgcgagtggccagggtgcgtgcacaaggaggagaagcgcaagtactgcctcttcagaggggttttcaagaacttcaggcgaactatggtttggaggactattca

SEQ ID NO: 107061 - DNA, 259 bp, Glycine max
gatggctggtgttaagagaagattatgtagtgattcagatatccatgctcttcacaaagaattggatgaagtttcatgtcctatctgcatggaccatccacataatgctgttctcctcctttgcagctctcatgagaagggctgcagatcttacatttgtgatacaagttatagacattcaaattgcctggaccgttttaaaaaaatgagggacaattttaaggagaaccaaaatttacccagttctttagtaaacaca

SEQ ID NO: 107062 - DNA, 260 bp, Glycine max
attttagaactagtgcacgtgaaaaagggttccaaattcgtgactttgaatacagtccagaaacacatgagaaccgaaagcaggagttagataaattggtacaagatcaggaaagattgagggcttctctgttgcaatggtgctataccagctatggagaggttttcagttcctggatgcacttttgtgctgtgcgtttatttgctgagagcattctgagatatggtctgccaccatctttcttggcatgtgttttagct

SEQ ID NO: 107063 - DNA, 263 bp, Glycine max
gacagacctttgtggtttgcatcaaagcaaagtctttcttacttggatggcagccttccgggtgactatggatttgaccctctgggactttcagaccctgaaggaacaggagggttcattgagccgaaatggctagcatatggtgagataatcaatggtcgttatgcaatgttgggtgcagttggtgcaatagcacctgaaattctaggcaaggctggtctgatccctcaggagacagcactcccatggttcagaacgggtgt

SEQ ID NO: 107064 - DNA, 265 bp, Glycine max
tgcaaggccgagttagacacgttctgtgatgctcttatttcctttctcaatctcagacaattacttgtctaatggaaataagagcatcacagaacctgtctaactcggccttgctttcactctcagtaggctcaatcatgagtgtgccaggcacaggccatgacattgttggtgcatgacaaccgtagtccatgaggcgctttgcaacatcttcaggctcaattccagcagtattcttaaagcctctcaagtcaatgatgaattc

SEQ ID NO: 107065 - DNA, 258 bp, Glycine max
cagaaaccctgaagagatcccatgggggtcaactggagctgacatcattgttgagtccaccggagttttcaccgataaggacaaggccgccgcacatttgaagggtggtgcaaagaaggttattatttctgcccccagtaaggatgcccccatgtttgttgttggtgtcaacgagcacgagtacaagccagagcttgatattatttccaatgctagctgcacaaccaactgccttgccccacttgccaaggttatcaa

SEQ ID NO: 107066 - DNA, 220 bp, Glycine max
gtgtccgccgatttcatgtagccgtagccttcaaaactgggttcttgatcggcggtaacattttcgttgctgtttgtttttgatgagtactgttttttgttttgatggtaaaagtctgagattttcaaattcacaagcagccatagggttttagtccatttcctttgctgctgaggagggatgtcttaaatttgcatttaatttataaggaagttttgtt

SEQ ID NO: 107067 - DNA, 259 bp, Glycine max
atacgccgtcgttacgctctccggcgaccctctccaccctcagggcgccaccacccacgtccacaaagacgccggcagcaaacccacgtggaactaccccgtgaaattctccgtcaacgaatcgctggccaaggagaatcgtttgtctcttgagatcaagctcgtctccgaccgcaccctcggcgacaccgttatcggcaccgtccatgttcctctcagggaactcatggacaatcccggcgacgacggttccttccgc

SEQ ID NO: 107068 - DNA, 260 bp, Glycine max
ctaattcctacttatccttgcttgtcttgatccttgtagctctgctcctcacccctcaagggcttgctgatgaatctgcttcttactataagccaccagtttacaagaaaccaccagtgtacaatcccaagcccaagccacccattcacaagcccaagccacccgtttacaagcccaagccacccgtttacaagaaacccccttatggtaagtacccaccagttcaagacaacgatcacttctaaaccatgcaacaaggc

SEQ ID NO: 107069 - DNA, 261 bp, Glycine max
gtgaactttattctcgcgattgggttcggaatgacggtgataatcaccaaggtggcggagaccatcgccggatgaaccccgccgccgtgggccacccctccgagggggtggtggttgggtccatggttttctttggggttcttggagttccccttgcgattactttcagtgtcccttttgctctagcatcaatatactgcagcgcttcaggagcaggacaaggtttatctttgggagttctcaatcttgcaattgtggtac

SEQ ID NO: 107070 - DNA, 256 bp, Glycine max
ctcgagccgctcttctttctctctctaccattgccatggatccctacaagcaccggccatacagcgccttcaattctcccttctggactataaattctggtgctcctatttggaacaacaactctactttaaccgttggagctagaggtccaattctgctggaggattatcatcttgtggagaagcttgcaaattttgatagggaacgtatctcagaacgtgttgtccatgccaggggcgctagtgcacagggttt

SEQ ID NO: 107071 - DNA, 253 bp, Glycine max
attgaagagacccagcagaccgacaaggacagatggaagggtcttgcctatgatatctcagacgaccaacaggacatcacaagaggaaagggtttggttgactcccttttccaagctccacaggatgctggaactcactatgctgtcatgagctcctacgagtaccttagcactggacttcgccagtacttggacaacaacatggatggattttacattgctccagcttttatggacaaacttgttgttcaca

SEQ ID NO: 107072 - DNA, 254 bp, Glycine max
gaacaagtagttgagaactaagaaggagaagcaaatggcttcctcaatgatctcttccccagctgttaccactgtcaaccgtgccggtgccggcatggttgctccattcactggcctcaagtccatggctggcttccccaccagaaagaccaacaatgacattacctccattgctagcaacggtggaagagtgcaatgcatgcaggtgtggccaccagttggcaagaagaagtttgagactctttcctacctgc

SEQ ID NO: 107073 - DNA, 257 bp, Glycine max
gtcttcgcaaccgttagcactccttcttctccttcttcttcttcttcttcttccttcccttctctcattcaagacaggcctgtctttgctgcccctgcccccatcatcaccccaactgtgagagaggatatggcaaagtaatactatcaagctattgaagaactccagaaattgttgagggagaagagtgaactcaaagccacagctgctgagaaagtggagcagataacagcttctctgggagcatcatccatctg

SEQ ID NO: 107074 - DNA, 255 bp, Glycine max
gagaatccgaggcgaagagaagagaaaaattaagatggaggggaaggagcaggatgtgtcgctgggagcgaacaagttcccggagagacagccgattgggacggcggcgcagagccaagacgacggcaaggactaccaggagccggcgccggcgccactggttgacccgacggagtttacgtcatggtccttttacagagcagggatagcagagtttgtggccacttttctgtttctatacatcactgtcttaac

SEQ ID NO: 107075 - DNA, 255 bp, Glycine max
cttctctgggaacatcatcatctgatggcatcccatcatcagaagcctcagacaggatcaaagctggtttcattcacttcaagaaggagaaatatgacaagaatccagctttgtatggtgaacttgccaaaggccagagccccaagtttatggtgtttgcttgctcagactcaagggtgtgcccatctcatgtgctagatttccaaccaggagaggcctttgtggtcagaaatgttgctaacattgtcccaccat

SEQ ID NO: 107076 - DNA, 259 bp, Glycine max
ggtctcacttgactcgattgcaagtgatccacgacacactgttcgcttcacaaaagcttcgaatccaattcctcagtaacatctgcatgaagtcttctccttcaccatgccaccaaagcctttagactatgggtcaataaatgaaaacgtgaagaagagtcaatatgctgtcagaggtgaattataccttcgagcttctgagcttcagaaagagggcaaaaagattatatttactaatgttggcaacccacatgcattg

SEQ ID NO: 107077 - DNA, 258 bp, Glycine max
ccacaacaaggcagcagtgcgaagagaaagaaagagaagaagcgcttatcgaactcggacggaagcactgagttaactcagagcgagtgaaagtgttgctgcgtgatgtctggtggtatcgcccgtggacgcctcaccgaggagcgcaagtcgtggcggaagaaccatccccatggttttgttgcgaaccggagacgctgcccgatggaaccgtgaacttgatggtgtggcattgcactattcccgggaagactggga

SEQ ID NO: 107078 - DNA, 264 bp, Glycine max
tctcgagccgattcggatcgagaccatggacacccaagcagctcttgcttctacaaggatcacttcaaacacaaggttcccatccaaggcctctcactctttcccaacccaatgcgccttaaagagacttgaggtgacagaattctctgggcttagatccacttcatgtgtcacatatgctaacagtgctagagaatcttccttttttgatcttgtagcttcccaactcactcccaagaccaatggatcactcctgtgagggga

SEQ ID NO: 107079 - DNA, 273 bp, Glycine max
agaagaagaagaaaagatggtgggaccagtgagacctcagtttgtgctctttggttcttccattgttcagctcagttactctctccaaggttggggcgctattcttgctcatttgtatgctcgcaaggcggatataattctgcgaggatactctggttggaattcaaggcgtgctgtgcaagttctggattcaattttccctaagaacgccactgagcaaccagatttggtaattgtgtactttggtggtaatgattctcttcttccacatcc

SEQ ID NO: 107080 - DNA, 269 bp, Glycine max
ggaagtcatggcagcaacattgatggcagcaacaacaagttctggtactcttaaagcaactcctttccttggccaaggcaagggtgccaatgccaatgctcttagggatgttgtctccatgggaactgggaagtacaccatgggcaatgatttgtggtatggaccagacagagtgaaatacttgggacccttctcagctcagaccccttcatacttgaaaggagaattccctggggattatggatgggacactgctggcttatctgctg

SEQ ID NO: 107081 - DNA, 270 bp, Glycine max
ggcttgtgaatcagcaccacattcacctgagctttttgtgaggattccaaagcatggcttcccttgcagcatcatctgctgctgcttcccttggcatgtcagaaatgcttggaaaccccatcaacctcagtggtgccacaaggccagctccatctgcctctagccctgcctccttcaagactgtggctcttttctccaaaaagaaggctgcacctccaaaaaaagctgcagctgctgctcctgccaatgatgagcttgccaagtggtatg

SEQ ID NO: 107082 - DNA, 270 bp, Glycine max
gttctgcaacactgtcaatggcatatgcagctgccaagtttgctggtgcatgcctccgtgtgttaaaaggagaagctggggtagtggagtgtgcttttgttgattctcaggttacagaacttcccttctttgcaaccaaagtgcgtctaggtcgtgctggagcagaagaagtttatcaactgggtcccctgaatgagtatgaaaggattggattggaaaaagcaaagagagagttagcaggaagcatccagaagggtgtagagttcatca

SEQ ID NO: 107083 - DNA, 253 bp, Glycine max
ctctggagaagttcttgacattctcttgttcttggacaagcatgttaccatacgtcaagagcttctccagagtcatcttgacgtatggtaacatgcttgtccaagaacaagagaatgtaattgagtccaattggctgacaagtacttgaacgaggctgcacttggaaatgctaacgaggatgatattaacaggggaactttcttccaatcttgaattggaggcaaagcaaacttgggcagtagatatttctgt

SEQ ID NO: 107084 - DNA, 271 bp, Glycine max
ctgcaggacactcctattcacagtgttgctgctggagttggagctggtgaaggagttgttacagagatcataatcacatttggattagtgtacacggtgtatgccacagcagcagaccctaagaagggttcattgggcacaattgcacccattgccattggtttcattgttggtgccaacatcttagcagcagggccattctctggcgggtccatgaaccctgcacgctcctttggccctgctgttatcagtggtgactttcatgacaact

SEQ ID NO: 107085 - DNA, 270 bp, Glycine max
caaggcagaaagcaagctcatcctagagttttaaaaatggcagcagcctcctccatggctctctcttccccatccttggctggcaaggccgtgaagctgggcccatcagcccccgaagtcgggagggtcagcatgaggaagaccgtcaccaagcaggcctcctccggaagcccatggtacggcccagaccgcgtcaagtacttgggcccattctctggcgagcccccgtcctacctcactggcgagttcccaggtgactacggctgggac

SEQ ID NO: 107086 - DNA, 85 bp, Glycine max
ggttcaaaaggaagatttgggcttgagtctaagtttgagcttccctgctcctctcctcttctaccttccagccaacaaaccctca

SEQ ID NO: 107087 - DNA, 276 bp, Glycine max
ccttagtcctcaaccacccttcttcacttcccttcacattgcagaagagatggctcttgtgaaaccaatttccaatgtcactcccaaatttggcagcagccccagaatgggatcacactccaaattcagcaccataataagaatgtctgccactgccaccccaccaccaccaccctccacctccacaaagccagctgcaagcaacaagaagggcaacatcaaggagaccctcttgactccaaggttctacaccactgactttgatgagatggagac

SEQ ID NO: 107088 - DNA, 268 bp, Glycine max
caaaccatatacggtcttgtgcagtgtacgcctgatttgtcaaggcaagactgcggtgactgcttgcattggagtttggcagatttcggaaatgttttcaaaaacaaagttggtgctgtagtgcttagaccaagttgtaatgttagatatgaaatctaccccttctacgatgaacctacaccatcagcatcggtaccactttccctaaaagaaaagggcaactcactgcgaactacaatcgccatagttgtgcctaccgttctcgttg

SEQ ID NO: 107089 - DNA, 267 bp, Glycine max
caccaagggcaccattggtggaggctgggaagatggagatgatgatggtgatgaatgagagcagaaggaaacttggaagcttccagatatgtgccttgtgcacctgctgtggtggagcaaaagggatgtgcttgccctctccttgttgctatgccatcaattgcaacattcctcatagaccttttggcttttgctcattcacaccaaagacctgtaattgctttggatgccatctttagtcccctctccccctattatagtcttata

SEQ ID NO: 107090 - DNA, 269 bp, Glycine max
caaaacactcataacacaaagcacaaagcaaagctcatccttgagttaaaaaatggcagcagcttcttccatggctctctcatccccatccttggctggcaaggccgtgaagctgggcccatcagccccagaagtgggaagggtgagcatgaggaagaccgtcaccaagcaggtctcctcaggaagcccatggtacggcccagaccgagtcaagtacttgggcccattctctggcgagcccccgtcctacctaaccggtgagttcccag

SEQ ID NO: 107091 - DNA, 267 bp, Glycine max
atttcgagacgttccgtatatgagcctctccaaacaggacttattgctattgtatcgatgatccccataggacgtggccaacgagaatagtatctgtggctactgctgttttacccgtttgtctgtctccaataattaattctcgatcaacagggacaaaatgtaatatgtgtttatgtagctattggtcaaaaagcatcttctgtggctcaattggtgaataccttacaagaaagaggagcaatggaatacactattgtagtagct

SEQ ID NO: 107092 - DNA, 273 bp, Glycine max
cggggaagtgggggtattatttgatcagaagtacaaagctcttcaaaacccaaacaacagctccacggaccacccctactgctctgctctgcaatggccgacgaggaacctgttgatcagaagagatatcttgaagagtcttgcaaaccaaaatgtgtaaaaccattactggaataccaggcgtgcattaaaaggatacatggtgatgattctgggcagaaacactgcactggacaatattttgattattggtcttgtattgacaaatgtgtt

SEQ ID NO: 107093 - DNA, 273 bp, Glycine max
aaagtattttgattggatgggaatcaatagagaaatactaaatcgttccatatcgaatccagaattttggttcttttcaaaatttgtgatattttatgacgcatataggggtaactcgcaggttataccaatcaaattactttttttttcttctaatgtaaatcaaaatgttagtgaaaataaaaagaacattactagaaagaaaaaaaatgaatctcttgaattggagttagagactcgaaatcgggcaaaagcagaataccctgatcaacg

SEQ ID NO: 107094 - DNA, 279 bp, Glycine max
cattgactagtatcattaagatggctaattcctacttatccttgcttgtcttgatccttgtagctctgctcctcacccctcaagggcttgctgatgaatctgattcttactataagccaccagtttacaagaaaccaccagtgtacaagcccaagcccaagccacccattcacaagcccaagccacccgtttacaagcccaagccacccgtttacaagaaacccccttatggtaagtacccaccagttcaagacaacgatcacttctaaaccatgcaac

SEQ ID NO: 107095 - DNA, 264 bp, Glycine max
cgcagacaagcgggcgtccgctacgccatgcagaacccccactcctacgtggcatccaacatcgccggattcgtaactcttctagaagcttccaaaaacgctaacccccagcccgccatcgtttgggcctcctcgagttccgtctatgggctcaatgacgaaagcccattctccgaactccaccgtacggaccagcctgcgagcctctacgcggcaactaaaaaagcaggcgaacaatcgcgcacacctataatcatatctatg

SEQ ID NO: 107096 - DNA, 265 bp, Glycine max
cctatatgcacgaatcacgccatctccatgcaatgcggcgaccaagaggatgtgggggtcgcttcttgaacactaagaattctgttgacggaaatggtaaaattggaaatgaagtgcataaaactgttggtgaacaattgcagtctagtggctctcagagttctgaattccttcaatctgaggttggaacttttaattcatcaaaagagactaatggaagcagtccaaatatttctggttcagaggtgactagcatgtattcgcg

SEQ ID NO: 107097 - DNA, 268 bp, Glycine max
gcgacttcacggttgcgttaaaccctcccaaaaccttccgctccgacaatctcctatccaccaccaaccgcatttccccagcggcgcgtggctttcaaacctcactcgcgttcaaaccgcgcgtttttcgaggaatccgcgcttcggtgatgccaagagagggccagccacaacaacaacaacaacaagcgtcgtctctcggagacgctctcgtcaacagtccgcgccgaaacgacgtcgtcgaggccatcggaagaaccgcatcgct

SEQ ID NO: 107098 - DNA, 269 bp, Glycine max
gcgagaaatggcgatggcaatggcgcttcgcaggctttcatcttcaattgacaagcctctgcgccctctcttcaatgccggttccctctactacaagtcgtctttgcctgatgaagctgtttacgacaaggagcgacccggagttacatggccgaagcagttgaatgctccacttgaggtcgtggatcctcagattgctgatattattgagcttgagaaagctaggcaatggaaggggctagaattgataccgtcagagaatttcacct

SEQ ID NO: 107099 - DNA, 276 bp, Glycine max
cagaagaacaagtagttgagaactaagaaggagaagcaaatggcttcctcaatgatctcttccccagctgttaccactgtcaaccgtgccggtgccggcatggttgctccattcactggcctcaagtccatggctggcttccccaccagaaagaccaacaatgacattacctccattgctagcaacggtggaagagtgcaatgcatgcaggtgtggccaccagttggcaagaagatgtttgagactctttcctacctgccagaccttgatgatgca

SEQ ID NO: 107100 - DNA, 271 bp, Glycine max
ttttacttcccctatggctcgtcactccttgctcttagccctcctcctcttcgccgccgtggccaccgccgcgatggcgtggccgcgtccgacgccgacgacatcctgatccgtcaggtggtgccagatgttggcgaagccgaagaggaggacaacctgctgaacgccgagcaccacttcgcgagcttcaaggacaagttcgccaagacctacgccaccaaggaggagcacgatcatcgcttcggcgtcttcaagtccaacctccgcagag

SEQ ID NO: 107101 - DNA, 265 bp, Glycine max
aagaaatttaagtgaggagctagagaatgatgatgaagtctgctatgtgtgcagtggtggttgtagcacttcttcttctggcggaggtggggcccatggctgaggctgtgacatgcaccccaacagagttgagtccgtgtcttccagcaatcacttccggtgctaaaccttccaatgcttgttgcacgaagctgaagcagcaaaaaccatgcttatgtggctacctcaaaaacgctagcttgaagcagtatgttaactctcctaa

SEQ ID NO: 107102 - DNA, 133 bp, Glycine max
tgtacatagggttatattatcgatgcactgtatttgtattcaaattccaaatggcgaacatatttgattgctgttagttttcaaggttctgtagattatgtgacaatgcagcagcaatatttggatttgtccc

SEQ ID NO: 107103 - DNA, 262 bp, Glycine max
cacaactttgcccccttgtaaaacttcttattgtgatgtctaaaagcgaagacttgaagcttttgggatactggttcagcccatttgccctgagggtgcagattgcccttaactccaagggtctagaatatgaggttgttgaagagaccttgaatcccaaaagtgacctgcttcttaagtccaaccctgtgcacaagaaaatcccagttttcttccatggagataaagtcatttgtgaatctgcaatcatagttgagtacat

SEQ ID NO: 107104 - DNA, 264 bp, Glycine max
ctcactcttgttgccttcatggccaagccagtgtccattgaggtatggaacccaagtggcaaatacagagttgtcagcaccaaaccaatgcctggaactcgttggatcaatcttctcattcaaaatgatgttcgccttgaaatatgtaccgagaagaaaacgattttgtcagttgaagacatcattgctttgattggtgataagtgcgatggagttattggacagttgactgaagactggggagaagagttgttctctgctttg

SEQ ID NO: 107105 - DNA, 260 bp, Glycine max
ggctaacggcaaggttatcaagtttatcatcgtacctgatcaagaagttgacacgtcacgggtccctaaacggttgttagaataccctgttgtttatttatccagtgtggcgcacacacgctatgttgctatgtacgagtacgcgagcgacattgatgagccgacacacttgtacctaaatgcgaaaccgtatgaagcagcggctacggaaaccccgaaggtggggtccacagaggtgtggtatgtgatcaacttgacgg

SEQ ID NO: 107106 - DNA, 265 bp, Glycine max
gtcgtgcacatcagttggtaatggaaggatataaatggatgttcaataaccagatagttactgtctggtcagctccatattattgctacagatgtggcaatgtagctgcaattctggagttggatggaaatcttaataagcagttccgggtgtttgaagctgctccacaggaatcaagaggaacacctgctaagaaaccagcaccagattactttttatgaagtggatttctttgtttctataatctacatgctcaaattgatgt

SEQ ID NO: 107107 - DNA, 266 bp, Glycine max
gcccagcaaagcttgatgagaagccactgttccctttgcttcctactaaagacgggatttgcttgtcggcgcaaaaaactgttgtttctggcaacaaaagaggttttgctgataccatggatgggttttctcaggggaagttcgctggtaatacagggatgaacgcaatgctatcacctaggccttctggagctcagccttctgctatgaaagaaataccaagcaagttgcaagaaaggccctgttcaactaagaatggaaccggt

SEQ ID NO: 107108 - DNA, 269 bp, Glycine max
agttatcaacagcttcatctcaacatgttcgctctgcactggcttctgttataatgcgtatggcaccggtgttagggaaggatgctacaattgagcaacttctgcctattgtcctttctcttttgaaagacgagtttcctgatgtcaggctaaatattatcagcaagcttgatcaagtgaaccaggttattggtaatgatttgttatctcagtctctgttgccagccatagtagaattagctgaggatcggcactggagagttcgactt

SEQ ID NO: 107109 - DNA, 271 bp, Glycine max
atggcatcttcttctggtagtttagacacctctgcaagtgcaaactccttcaccaacttcaccttctccacacaccctttcatgtacacttctttctctgaccttcttgcttctcccacagacaacaacaaaccaccacatggtggtggtggtggtttgtctgagagaactggctctggtgtccccaaattcaagtccacaccaccaccttctctgcctctctctccccctcccatttctccttcttcctacttttctattcctcctggtt

SEQ ID NO: 107110 - DNA, 275 bp, Glycine max
tggtgattgtcccttcaaatgtcgcagacaagttgccttttacactggtcccacagttggaggacttctgaatgctacatgtgggaatgttactgagctcataatagcaatatttgcccttagcagtaacaaaattgccgtggtcaagtattctctgttgggttctattctttcaaaccttcttctggttcttgggacctctctattatgtggtggcattgcaaacgttggagtggaacaaaaatatgatagaagacaagcagatgtgaactcac

SEQ ID NO: 107111 - DNA, 279 bp, Glycine max
aaacaaagaaaaaaaaaaacccttagccaacacaaccatcatggccacctctgctattcagcaatcagcattcactggtcaaactgctctgaagcagctcaatgagttcgtccgcaagaccggtggcgccggcaaaggtcgcactaacatgcgccgcaccgtcaagagtgctcctcagagcatttggtatggccctgaccgtcccaagtacttgggtccattctcggagcagattccatcatacctgaccggagaattccctggtgactacggatggga

SEQ ID NO: 107112 - DNA, 262 bp, Glycine max
agctaatcggcaggcataccgtaccctacttgtgacagtacctggtcttggtgaatacatctctggtgccattctctttgaggaaactctctaccaatccactgtcgatggaaggaagatcgtcgacgtacttgttgaccaaaacattgttcccggtatcaaggtcgacaagggtttggtgtccctagctggttcgaacgatgagtcatggtgccaaggtcttgatggtcttgcgtctcgctcagctgcatactaccagcaa

SEQ ID NO: 107113 - DNA, 260 bp, Glycine max
gttgctatttgctatttgctctgctaatttgtatttctttttggtgaattgctgctaactttcattcttgtattctttttggtttttagtttcaggatgctggaagttcatgctcacactgagtcctgcagggctgctcgattcatcaacggtggacgtgcgatcttgacaggttctccggattgcttaatactggctacagatgtggaaactggatctacaattgctcgtcttgatgatgctcatgagtgatcaaattt

SEQ ID NO: 107114 - DNA, 262 bp, Glycine max
cttcgaggacgtggaaggcgtgaaggaggaactaaaggagttggaaggtttggctcagagtctaaggagcagccacgagcagagcaagacgctgcacaacgcgaaggcggtgagggacctgcgcgcgcgcatggacggcgacgtctcggcggcgctgaagaaggcgaactagatcaagctcaagctcgaggcgctggagcggtccaacgccgcgaaccggaacatgcctgggtgtggaccgggttcgtcctcggaccggacc

SEQ ID NO: 107115 - DNA, 259 bp, Glycine max
ctctgctcgtgcctctagggttatcatatctccatttccatttcctctctctcagtttccaagaatcttaagctatgggaaagtcttacccaaccgtgagcgctgattaccagaaggccgttgagaaggcgaagaagaagctcagaggcttcatcgctgagaagagatgcgctcctctaatgctccgtttggcatggcactctgctggaacttacgacgtgagctcgaagaccggtggtcccttcggaaccataaagca

SEQ ID NO: 107116 - DNA, 263 bp, Glycine max
ccgcgcctcccgtcctccccatctccaacccccaaaccaccgcgggaaccaccggtgcaggcggcggcgccatcgaggctccggccaacaacccggccttccgcgctttcatcaacatcctctccaactccctccgccacggcctcgaccagcgccgcccctggtcggagctcgcggaccgctcagcgttctcgaaacccgagtccttctccgaagccaccctccgtgtccgcaaaaacttctcctacttccgcgtcacatac

SEQ ID NO: 107117 - DNA, 271 bp, Glycine max
gtttgttgatcgagataactagaaacagtgtgatgaaaatgaaggtccttgttttcttcgttgctacaattttggtagcatggcaatgccatgcgtacgatatgttccctctccgaatgaacactggctatggtgcccgtactccggaggtgaaatgcgcaagttggaggcttgctgtggaagcacacaacatctttggctttgagaccattcctgaagagtgcgttgaagcaacaaaggaatacatccatggcgaacaatatagatcaga

SEQ ID NO: 107118 - DNA, 209 bp, Glycine max
  unsure (1)..(209): unsure at all n locations
ggaggcaaacaaggagttgaactcagcacagcacagagacncagagcttcagatgaagaagtcaaaacttgtgaccatgctagatgaggtggagcaaaggtaccgacagtatcaccaccaaatgcaagttgtgataacatcatttgagcaagcagcgggtgttggagctgcaaagtcttacacagcccttgcgttaaagacaatctcna

SEQ ID NO: 107119 - DNA, 259 bp, Glycine max
ggcatttcttgaaaactgggaacctacacaagactcctacatggtggtgaatgcacctgggatgcaacctctcaaaatatgtttgagccaacaagggaaggaggtagcaaatgctgtctcagtatgggaatggactggatctgccttggatgagggagctgaagcatcacagtggttctcagattatttaggaaaaccatgtcaactggtccgcttcaattcagcttctgaagttcgaccagtggatcctgattacgtc

SEQ ID NO: 107120 - DNA, 260 bp, Glycine max
  unsure (1)..(260): unsure at all n locations
gtgaagaactccaagttcttggtgcctgcacaagaccttctcatcgagttttgtagccttgacgcaaagcaaagcgaacttgggaaagccaacaaaatcgttgaataagaagcagtgggaagaggaaaataacggtatcggttcctcgaagaagcattctctgacctctctagagttcgtggagttgcagaagagaaagacaaagcnctttcgatgctggaagaggttgacagaaggtacaagcataccgcaatcagatg

SEQ ID NO: 107121 - DNA, 260 bp, Glycine max
tacaaaggttgctgtaggagataagatattgaagtagtgctaagtgcctaacacctgcagtgaacaatggcctctgcatcagcatctcttctcaagtcttcacttgttcttgacaagtctgagtgggtgaagggacaaacacttcgccaaccttctgctgcatcagttgtgagatgcaaccccaccaccccatcaggcctcaccatcagagctggttcctatgctgatgagctcgttaagaccgcgaaaacagtggcttc

SEQ ID NO: 107122 - DNA, 264 bp, Glycine max
aagtagttgagaactaagaaggagaagcaaatggcttcctcaatgatctcttccccagctgttaccactgtcaaccgtgccggtgccggcatggttgctccattcactggcctcaagtccatggctggcttccccaccaggaagaccaacaatgacattacctccattgctagcaacggtggaaacgtgcaatgcatgcaggtgtggccaccagttggcaagaagaagtttgagactctttcctacctgccagaccttgatgat

SEQ ID NO: 107123 - DNA, 271 bp, Glycine max
cccgactgatgaggagctggttctgcaatacttgaagcgcaaggtcttctcctgccctttgccagcctctatcattcctgagcttcatgtttgcaagtctgatccttgggatttgccaggtgatttggagcaagagagatacttctttagcaccaaagtggccaaatatcccaacggaaatcgctccaacagagccacaaattcgggttattggaaggcaactggcttggacaaacaaattgttacttcaaaaggcaacaaccaagttgtc

SEQ ID NO: 107124 - DNA, 265 bp, Glycine max
ggcagagcgtggagacagtcttgaaggcatcaaggctagcattgaagcaaggaagcctgattttgaagcatatattgatccacaaaagcaatacgcagatgcagtgatagaagtgttgccaacccaactcattccagatgacaacgaggagaagattttgagagtgaggttgatacagaaagaaggggttaagtactttagcccagtttacttatttgatgatggctctaccatttcatggataccatgtggaaggaagcttaca

SEQ ID NO: 107125 - DNA, 267 bp, Glycine max
ctcttcaactccaaacactagacatcagcatccatggctgcctccgtctccactgtcggagctgtcaacagagctcttttgaacctgaatgggtctggacctggggtttcagctcccagttcatccttctttgggagcagcttgaagaaggttattggctcaagggtccccaacacaaagatttcctctggaagcttcaagattgttgctgtagaagagaagaaagagattgaagagacccagcagaccgacaaggacagatggaag

SEQ ID NO: 107126 - DNA, 265 bp, Glycine max
cactaactaaagccgagcagagagagagagaaaccctagcaaaaatgccggctggtcacggtttgagatcccgcaccagagattccttctctcgtcccttcaggaagaagggtaccatcgccctcaccacatacctcagaacctaccacgtcggcgattatgtcgacgtcaaggttaacggcgccgtccacaagggaatgcctcacaagttctaccatggccgcaccggtcgcgtctggaatgtcaccaaacgtgctgttggggt

SEQ ID NO: 107127 - DNA, 265 bp, Glycine max
ccagattagtaccacaaaaatggagaaatagaataactgaatatcgtatagctcaaaataaagatttaaccaaatgcaattcatatgaaaaaagccaattaattctttacaaagaacaacaagtaaacgcattaaaaaaaaaaattagaaaacaatatagatacgatcttttatcctataatttaatcaattatgcagataggaaagactcatatatttagggatatagatccctatttcaagtaaaaaaaaaccaagtgatttc

SEQ ID NO: 107128 - DNA, 263 bp, Glycine max
attaacccaacaatgcaaaacaacacactgaactctcttcactgaaacgacacacacaaaaaaaagctttagtttaggatgacccaagtgaggaacaagcaagtggttctaagagattatgtcaccggattccctaaagaatccgacatgaacattgttgaaggcaccataatattgaaggttccagaaggttccaatgatgtccttctaaaaaatctctacttgtcatgtgatccatacatgcgactcctcatggccaagga

SEQ ID NO: 107129 - DNA, 258 bp, Glycine max
aattaacccattcactaaatatgctttgttgatgaacccattggcgagaagtctcgaagagttgctaccagatagaatctcaagtatttatcgatgtttcattcttcttagaacagcacttgttgtatctaccgtttgtgctgcttttctgattcctttctttgggtttgtgatggctttaattggttctctcttcagtgtacttgtgtcagtggtaatgccaagtttatgttttatgaaaattgtgggaagaaaagc

SEQ ID NO: 107130 - DNA, 262 bp, Glycine max
cggctcgagattgactacgccgccgtgacagttcagctaccgggaggcgaacgtgtgccctttctcttcaccatcaagcagttggtggcatcagggaagccagatagctttagtggggagtttctagtcccatcctaccgtggaagctctttcttggaccccaagggaagaggtgcttccacaggttatgacaatgcagttgctttgcctgctggtggaagaggagatgaggaagaacttgccaaggaaaacaataaaagtg

SEQ ID NO: 107131 - DNA, 267 bp, Glycine max
tcgttggcttgctaccaggttgggtggatatatggttctgtgacagaggatatcttgactggatttaaaatgcattgccatggttggcggtctgtgtattgcattcctaagcggcctgcattcaaggggtctgcgcctatcaacctttcagatcgtctgcatcaagttcttcggtgggctcttgggtctgttgagatttttttcagcagacattgtccaatctggtatggttatggtggtgggttgaaatggttggaacgattttcc

SEQ ID NO: 107132 - DNA, 267 bp, Glycine max
gaggttgaattggaggatcccgttgagaatattggtgccaagttggtgagacaagcggctgccaagacaaacgacttggctggtgatggaaccacgacctcggttgttcttgctcagggtcttatagcggaaggtgtcaaggttgttgcagctggggccaaccctgtgctcatcacacgtggcattgagaagacagcgaaagctcttgtatctgagcttaaatagatgtcaaaagaggttgaagatagtgagttggcagatgtggca

SEQ ID NO: 107133 - DNA, 258 bp, Glycine max
gtacgttttgttcgttggggatttcctggaaaaaatcgtcgtattattctcgaaatacctatgaacgagcttcactccatcagaataataacagaagttaaagaagagggtatttttactcgtaccagtacttttgagagtatcgtttatctggaaaccatagaacaggggtttattcccttgactcgtattgaagataatttgaatgggacacaaattgcacataaagctggcgaattatctgtatttttgggtgta

SEQ ID NO: 107134 - DNA, 261 bp, Glycine max
ggagatgttgtcacaaacctagatttcatccggaagaggaagatttctagtgacttcaacatgatgatggatcagaaaatctacacatgcgagcatccccaatgcccttacagcgaagttcgccttggtttccatgataggtctgctagggacaatcatcaattgaattgtgcatatagaaacagttctgcagattatggtggtggtcccaatttccatgctactgaggttaagccagtcatattcccccagtcctttgtt

SEQ ID NO: 107135 - DNA, 257 bp, Glycine max
accgaccaatctcaaaactattaccattataaggataacagggtactcccttctcacgttgatgccgaacttgccaatgctcaagcttggtggtacaagccggactatattatcaacgagcttaacataaactccgtgataaccacgccttgccacgaggagatcttgcccatcaactcatggactactcagatgccttatttcatcagaggctatgcgtattccggtggtgggagaaaggtgacacgtgttgaggt

SEQ ID NO: 107136 - DNA, 262 bp, Glycine max
cctcgctctatttctcagtctctgtgtttgcggctgaggattccgaacgagtgaccttcttcgtttctcgcaaagtttaagtaatcatgggtaaggaaaaggttcacatcaacattgtcgtcattggacatgtcgactctgggaagtcaactaccactggtcacttgatctacaagcttggaggtattgacaagcgtgtgattgagaggttcgagaaggaggctgccgagatgaacaagaggtcattcaagtatgcctgggt

SEQ ID NO: 107137 - DNA, 258 bp, Glycine max
tggctgcctcactacaagctgcagctaccttcatgcaacccaccaaggttggcatagcctctcgcaacctcagatctacacaatgcatttctaaggcttttggcttggaacctgctgcagctaaactcacttgctcccttcagcctgatctcaaagaatttgctcaaaaatgtgtcgacgctaccaaaattgcaggattcgcccttgccacctctgctctcgttgtttctggagcaagtgcagaaggtgttccaaaaa

SEQ ID NO: 107138 - DNA, 258 bp, Glycine max
  unsure (1)..(258): unsure at all n locations
ggtggtctcacttgactcgattgcgagtgatccacgacacactgttcggttcacaaaagcttcgaatgcgattcctcagtaacatctagatgaganagttctccttcaccatgccaccagancgtttatagtatnngtcaataaatgataacgtgaagaagagtcaatatgctgtcagaggtgaattataccttcgagcttctgagcttcagagagagggcagaaagattatgattactaatgttggcgaaccacatg

SEQ ID NO: 107139 - DNA, 263 bp, Glycine max
cttgagttaaaaaatggcagcagcttcttccatggctctctcatgcccatccttggctggcaaggccgtgaagctgggcccatcagccccagaagtgggaagggtgagcatgaggaagaccgtcaccaagcaggtctcctcaggaagcccatggtacggcccagaccgagtcaagtacttgggcccattctctggcgagcccccgtcctacctaaccggtgagttcccaggcgactacggctgggacactgctgggctttccg

SEQ ID NO: 107140 - DNA, 183 bp, Glycine max
caagtagttgagaactaagaaggagaagcaaatggcttcctcaatgatctcttccccagctgttaccactgtcaaccgtgccggtgccggcatggttgctccattcactggcctcaagtccatggctggcttccccaccaggaagaccaacaatgacattacctccattgctataaggtgtga

SEQ ID NO: 107141 - DNA, 267 bp, Glycine max
atcgagccgctcgagccgttcaccatgacagcttccatccttggcagcccagccgtcaccaaccggtcagcagtagcaacgcagaggagatcactcgtagtgaatgctgccaaagctgttgaagcagaaaaggtcagttatgacaatgacatggatggtagcaatggaaggaggaacttgatgttcgccgcggcggcggctgctgtttgctctgttgctgggatggcagtggcagatgagcctaaaccaggaaccccagaagccaag

SEQ ID NO: 107142 - DNA, 267 bp, Glycine max
atgtttttctctgttcatgcaagggctgccacagaaaaaaccatttatgattttactgtcaaggatattgacagaaaggatgtttctcttagcaagtttaaggggaaggttctattgattgtcaatgttgcttcacgatggtatgaattatgcacttttcaagggagatatgtagctcaatatgtgtcatggagccctattttcttctttgaatttcccaatttttaatgtaaaaaatgaaaatcaaataagttgtagcttaacatt

SEQ ID NO: 107143 - DNA, 262 bp, Glycine max
acaaaggttgctgtaggagataagattgcagtagtgctaagtgctaacacctgcagtgaacaatggcctctgcatcagcatctctgctcaagtcttcacttgttcttgacaagtctgagtgggtgaagggacaaacccttcgccaaccttctgcatcagttgtgagatgcaaccccaccaccccatcaggcctcaccatcagagctggttcctatgctgatgagctcgttaagaccgcgaaaacagtggcttcaccagggag

SEQ ID NO: 107144 - DNA, 261 bp, Glycine max
caggaatgtggttgctcagcttgtgagaagagctgaaagggctggattcaaagccattgcccttactgttgataccccaagactaggacgcagagaagctgatatcaagaacagattcacactgccaccatttttgacattgaagaactttgaaggattggaccttggaaagatggacaaagctgatgactcgggatgttcataatatgccggtcaaattgatcgcgcactcttagctggaaggatgtgaagtggcttcaa

SEQ ID NO: 107145 - DNA, 257 bp, Glycine max
cttgagttaaaaaatggcagcagcttcttccatggctctctcatgcccatccttggcgggcaaggccgtgaagctgggcccatcagccccagaagtgggaagggtgagcatgaggaagaccgtcaccaagcaggtctcctcaggaagcccatggtacggcccagaccgagtcaagtacttgggcccattctctggcgagcccccgtcctacctaaccggtgagttcccaggcgactacggctgggacactgctgggc

SEQ ID NO: 107146 - DNA, 259 bp, Glycine max
  unsure (1)..(259): unsure at all n locations
gtcaacttggaagaatttgntatgactaaagacgaattctccggagctgatataaaggcaatatgtactgaagctggtttacttgctctacgagaacgtcgaatgaaggtgactcatgccgactttaagaaggccaaggataaagtgatgtttaagaagaaagaaggggtgcctgaagggctgtatatgtgaaaaactatcctctattatctctggccctcttgtctttcttttaacgttctagttatgcgaacaaatg

SEQ ID NO: 107147 - DNA, 262 bp, Glycine max
atgagctgacacgaggagaatcagagatgggagtacaaggcactatggaatacttatctgacgtacttagcaccaaaaagaagaagaagaagaagcaagtccaaactgtagcactgaaaatcagaatggactgtgaaggctgtgcacgcaaggtcaagcatgttctttttggtgttaaaggagctaagtcggtggaagtggacttgaagcagcagaaagcaacagtgacaggatatgttgagccaaagaaagtgcttaaggc

SEQ ID NO: 107148 - DNA, 264 bp, Glycine max
actgcttcaccttctgctctagaaaattcagtgctgaaacatggcttcggctactctctctgtagccaaaccagcccttcaggcaaatgggaaaggcttctctgaattctctggcctccgaagctcatcaggcttccttcccttttctagaaaatcttcagaggatttccagtctgtcattgccttccagacctatgcagttggaagcagtggaggatacaagaagggtgtgacagaagcaaaactgaaggttgccataaacgg

SEQ ID NO: 107149 - DNA, 266 bp, Glycine max
ccacaatctaatttctgattcacagtcctatccttttgagataagagcacacgtttaacaaaattgcattctctatttctcttcccctctcatcattttaatcacgcgcacatcagcacaacacagcaattcactaagctaaaatcacttcatcatggcttcctcgtgtgcttcctctgccattgcagctgttgccatctccacaccaagttcccaggagaatggatcactcttgggaagcacaaaagcttcttttcttagtggga

SEQ ID NO: 107150 - DNA, 256 bp, Glycine max
gcgttgatctggaagtttgattttgcacccttcatggttttgattattgccatactcaatgatggtaccattatgactatatccaaggatagagtgaaaccatcaccacttcctgatagctggaaactgagggagatatttgctactggcgttgtgctaggaagttacatggcactaatgacagtagtatttttctgggcaatgaaagataccaacttcttctcgaacaagtttggtgtgaggccattgagagata

SEQ ID NO: 107151 - DNA, 259 bp, Glycine max
atggagactccgtccctctttacgccaacaaagttggtccctttcacaaccccagtgaaacgtatcggtactttgacctgccattctgtgtaacaggtcatgagaaagaaaagactgatgccctcggtgaggtgttgaatggcgatcgccttgttagtgctccttacgaacttagtttcaagaaggagaaagactctaaggttgtatgcaagagaaagctcacaaaggagcaagttgctcagttccgagaagcagttaa

SEQ ID NO: 107152 - DNA, 253 bp, Glycine max
ctgcttccaattgtgtatactcctgttgttggtgaggcttgccagaaatatgggagcatcttcaagcgtcctcagggtcttttcataagtttgaaagagaaggggaaggttcttgaagtattgaaaaactggcctgagaggagtattcaagttattgttgtaacagatggcgaacgaattttgggacttggggatcttggatgtcaggggatggaattcctgttggtaaattggcctgtacacagcactagga

SEQ ID NO: 107153 - DNA, 262 bp, Glycine max
ctttgggtcagcagcaaaaggaactggacttaaagctcttgaatttgctctctctatgtgtgattcagtggatatgtatggtttcactgtagatgctggttataaagaatggactagatatttctctgaatcccgtcaaggccataccccgttgcatggtagagcttattaccagatgatggagtgcttggggcttatcaaaattcattctcccatgcgagctgatctaaatcgtgttgtaaaatgggttccaagccaccat

SEQ ID NO: 107154 - DNA, 255 bp, Glycine max
ggactttggggtggagctgtagtgggtaaaacggtactgattatggaattgatcaataacattgccaaagctcatggaggtgtatctgtatttggcggagtaggtgaacgtactcgtgagggaaatgatctttatatggaaatgaaagaatctggagtaattagtgaacaaaatattgcagaatcaaaagtagctctagtatatggtcaaatgaatgaaccgcccggagctcgtatgagatttggtttaactgcc

SEQ ID NO: 107155 - DNA, 254 bp, Glycine max
agcctgattgcttggatgatttgtcctatgcaataatgtatgagacaaccaagttggcttatcgtgtttcagaagatgatgttacacgtgctcgtaatcagttgaaatcttcactgctactacacatagatggaacaagcccagtggctgaagatattggtcgtcagctactcacatatggtcgaagaatcccatttgctgaattgtttgctagaattgatgctgttgatgccagtacaattaaacgtgttgcg

SEQ ID NO: 107156 - DNA, 257 bp, Glycine max
cccacaggcacgctgagcatggaacacagaaccctagaactcaacctggcttcagcaaaggatctcaaagacttgaatatattctcaaagatggatgtatatgctgtgctttcactctccggcgatcaaaagaccaagactcccgtccacagaaacggcggcagcaacccaacatggaattttccggtcaagttcacttttgatgaatcggtggcgcggcagaaccgtttggccctcgaaatcaagatccgctccga

SEQ ID NO: 107157 - DNA, 256 bp, Glycine max
ctcgagccgaatcggccgagtgaggatttatctgggttggagttgtgttggtgatagactgctatcagcggtcatcccttatgaagaaagtggatggtacgacggacagatgtgggtcaagccgcccgagatcctagctcgtgatagattgttgggctcttacaaggttaaaccagtcgttaaattgctgaaacaaactctagttgggacaggagcattgcttgttacaggagttatgctatttatctttgctaca

SEQ ID NO: 107158 - DNA, 255 bp, Glycine max
tccgaaaacatccatcaacaccatgatgttggggtggacccaccgcgcaaatccaaccgtacacgtgccaccgtggacgccggagatcttctcaccgtacaccggcaatgccgattactctccgtactcattgcaagaagcactgagtgcgcttcagcgctacgaatccaccgatgctcggtcagactcggagtttccgtctcgggaaccggaagtcccggtggacgcttactcctgcgaccatttccgcatgtt

SEQ ID NO: 107159 - DNA, 249 bp, Glycine max
ctcttccagattgaggtgttcttcttctagaaaatgtgaggttttacaaggaggaagaaaagaatgatcccgagcatgcaaaaaagcttgcctctctggcagatctgtttgtgaatgatgcatttggtactgctcacagggcacatgcatcaacagagggtgttactaaatacctgaagccatctgttgctggttttcttttgcaaaaggaacttgattaccttgttggggcggtatcaagccccaaaa

SEQ ID NO: 107160 - DNA, 254 bp, Glycine max
tagctaatggctatgcatggaacttcttgtttggtgcctgctgttctggagctagcaaaacaacccatcatcgaagttccagaacgatatgttcatgccaatcaagatccacatattctttccaacacaatttctttaccacaagttcccatcatagacttgcatcaattgttgtctgaagatccaagtgaactagagaagctggaccatgcgtgcaaagaatggggtttctttcagcttataaaccatggagt

SEQ ID NO: 107161 - DNA, 253 bp, Glycine max
gctgctcttgacaagtacgacttcgattctgaagttggcggcaagattaaaggcactgtgttctacacagataacaatggagcagttgttgatatcactgcaaagtcttcggcatatttgccactgcaagatgcgtgcatccacagggttaagcatgttgaagaagcaggcttagttcctgggttcaaagaggagtttttgatcattggtgagaactcattggatgatagcttggtcttgagtttaaggtctc

SEQ ID NO: 107162 - DNA, 253 bp, Glycine max
gaagattttgaaagcagatctattagtggaaggaagctttgatgaggcagtgagaggagttgatggtgtctttcatatggcgtcccctgtgcttattccttatgatgagaacgttcagcaaaatttgattgatccctgtataaaaggaactttgaatgtgcttaactcttgtgtaaaagcaactgtgaaacattttgtgctcactcttcttgctcttccataagataccgtgatgatgtgcaagaagtgtgtc

SEQ ID NO: 107163 - DNA, 257 bp, Glycine max
atcgatatggatttgtattttcctttggcaatacttgtgctgatattaggcacaccatactctagtgcttttgggaagagtgaaagtaatgtgaaaacagctgtttttctgtctcccaagtttgaacttggaccgggttcggtagccaataaatttgattatgatattgattttccaagaggtcatattgccctcaagagtttcaatgctgaagtagttgatgaagcagggaactctgtggctctccatgaaactta

SEQ ID NO: 107164 - DNA, 250 bp, Glycine max
ccaacagttagtggggaagtcatagaagtttatcagccaagtcatgaagggaagcaaaagtttaatgataatgggcataacctaaaagcatggacggatatgtatctgttaagtttatcagacgtgttggtgactacctctctctcaacatttggctacgttgctcaaggattgggaaatttaaagccatggcttctctacaggctagtcggtaaccatagcggcgattttccacgctgtgaacgggatt

SEQ ID NO: 107165 - DNA, 247 bp, Glycine max
tcttactgtgtggtgactgtgctctgctctcatctcattcatattcatttcaatggcaactcaaggtcaagtcattacctgcaaagctgcggtggcctgggaacccaacaagcccttaaccgtccaagacgttcaggttgctccgcctcaggccggcgaggtccgtgtccaaatcctcttcaccgctctctgccacaccgatgcttacacttggggcggcaaggatcccgaagtctcttcccctgta

SEQ ID NO: 107166 - DNA, 247 bp, Glycine max
atcacaatttgtgcattgcctcgtgtcctttttcttctttgcttgccaaaaatcttccacacaccagacgagagaaaatgggctctcaccagcaagaaccatggctattggagaatgggaaaccgagggtgttgaccaaggagaataggcatggccgttctgcacacagcatgtccttcacgtctttgcgcaagaagtctagccgaactcttgtctccaagcttccatgtgccacactcagaagcat

SEQ ID NO: 107167 - DNA, 188 bp, Glycine max
gacgccgattcacaacctcaacaactcgaagagagcacagaggagcaagaactgaagtacctggaattcgtgcaattcgcgaccatacaggctctgatgcgctgcgccatcctctactcatacgccaaggagcgcgcgggtcctctgaagcccggtgtcgacaccgtggaggaggccgtgaagaccgt

SEQ ID NO: 107168 - DNA, 253 bp, Glycine max
gcttggaattcgagttggagcacggtttcgtgtaccgtgagcacaacaggtcaccaggatactacgatggacgctactggaccatgtggaagctgcctatgtttggttgcactgatgcttctcaggtgttgaaggagcttcaagaggctaagactgcataccccaacggcttcatccgtatcatcggattcgacaacgttcgccaagtgcagtgcatcagcttcatcgcctacaagcccccaggcgtctaagt

SEQ ID NO: 107169 - DNA, 240 bp, Glycine max
aaatgccggaccaagatatttgcagttacattaatgaacctcgtcttgtagccagaaagttcttggccagacctcagcatgagggtgttggggctgttgttagaagaagcatagggagatttgagctcaagtactttgatcctttcattgtcttggatgaattctcagtcaccgctcctgctgggtttcctgatcatccacatagaggatttgagacagtcacttacattttccagggag

SEQ ID NO: 107170 - DNA, 207 bp, Glycine max
ggcagaagaagatgaagaaaagatggtgggtccagtgagacctcagtttgttctctttggttcttccattgttcagctcagttactctctccaaggttggggcgctattcttgctcatttgtatgctcgcaaggcggatataattctgcgaggatactctggttggaattcaaggcgtgctgtgcaagttctggatgaaattttcct

SEQ ID NO: 107171 - DNA, 248 bp, Glycine max
atgctcattgagatacaggataccctgaaatcgagccctccagaaaacaaggtcatgaaaagagcaagtttgattggcatcttgactacaaccttgttctatgtgctatgtggctgcctaggttatgcagcatttggaaacgacgcaccaggaaatttcctcacagggttcggtttctacgagcccttttggctaatagactttgctaacatctgcatagccgtacacttggttggagcatatcaggt

SEQ ID NO: 107172 - DNA, 245 bp, Glycine max
cacaaagcacaaagcaaagctcatccttgagttaaaaaatggcagcagcttcttccatggctctctcatccccatccttggctggcaaggccgtgaagctgggcccatcagccccagaagtgggaagggtgagcatgaggaagaccgtcaccaagcaggtctcctcaggaagcccatggtacggcccagaccgagtcaagtacttgagcccattctctggcgagccccgtcctacctaaccggtg

SEQ ID NO: 107173 - DNA, 245 bp, Glycine max
gtaagctcccaagcagtgggaggaggctcgggactctgaccgcgtgcctgttgaagaatgagccggcgactcataggcagtggcttggttaagggaaaccaccggagccgtagcgaaagcgtgtcttcacagggcaattgtcactgcttatggacccgaacctgggtgatctatccatgaccaggatgaagcttgggtgaaactaagtggaggtccgaaccgactgatgttgaagaatcatcgga

SEQ ID NO: 107174 - DNA, 249 bp, Glycine max
cagagatcttgcttgatggggagcatggtattgatagaacttttgaagtagcccaaaaggtctgggcagaggttttcttctaccttgctgagaacaatgtcctttttgagggtattctccttaagcctagcatggttacacctggagccgagtccaaggacaaggccagtcctcagacagttgctgattacaccctcaagctccgtcacaggagaattccccctgctgtccctggaattatgtttttgt

SEQ ID NO: 107175 - DNA, 250 bp, Glycine max
cttgcaccctttgtcaaggtccttgatcagaaattcggtatcatcaagggtaccatgaccaccactcactcctacaccggtgaccaaaggcttcttgatgcgagccaccgtgacctgaggcgtgcaagggcagcagcactcaacattgtccccacttcaacaggagcagcaaaggcagtggcccttgtcctcccaaccctcaaaggcaaactcaatggcattgcactccgtgtgccaacaccgaacgtct

SEQ ID NO: 107176 - DNA, 239 bp, Glycine max
gtccgatcttacgttgttgcctcgcagacgcaacgggcaaaagaagcgcctaactttggacagcacaagggttacccggtcattgaccatgagttcgacgcggttgttgtcggtgctggtggagccggtctgcgagccgcgttcggtcttgccgagggaggattgaagaccgcttgtatcaccaagctctgcccgacccgatcgcacacggtcgctgctcagggtggtgtcaacgccgc

SEQ ID NO: 107177 - DNA, 177 bp, Glycine max
agcgttgttgatgctgctgctggtggttttctcggcgttggctcggcccggtccatctcggtcgaagcgcttcgaccgagcgacaccttcccccggctgcacaactctgccaccccggaggagcagagcaagatggcagagtcgtgtggcttcggtagcctcgactccctcgtggac

SEQ ID NO: 107178 - DNA, 202 bp, Glycine max
ccatggctgcctccgtctccactgtcgagagctgtcaacagagctcttttgaacctgaatggttctggagctggagcttcagctcccagttcagccttctttgggaccagcttgaagaaggttattgcctcaagggtccccaacagcaaggtttccggtggaagcttcaagattgttgctgtagaagagaagaaagatattg

SEQ ID NO: 107179 - DNA, 242 bp, Glycine max
gtttggacaagcgccgtggctactcactatacctgcaattgccataattggtagagagataaccatgtctgcagtcagggagtgggctgcttcccaggatagcaagcttttagaggctgttgctgtaaataacttggggaagtggaaaacagccacacagatgacagcattaaccatccttcttgcgacccgggactggagccatggaggaggagctgccattgtagtaggctctggtgttg

SEQ ID NO: 107180 - DNA, 234 bp, Glycine max
atcggctcaggagacgtctctccattggttacttcatctgcatggaaccacttgcatagttgtggaaaccaagaatgtttgaagggtagcatcaacaagaagttctggaaatggagatcaccaatggcagcgagtatgaaggctattgcaaagcagaagttgccaaagatggtgtgtgactactacgcatctggtgcagaggaccagtggctctgcaggatgacagaaatgctt

SEQ ID NO: 107181 - DNA, 245 bp, Glycine max
cgcgttcttcgttcgtcttttacatcaggatggagtctcaggtgaagcacgcacttgttgtcaaagtaatgggtcgtactggatccagaggacaggtgacccaggttagagtgaagtttctggatgatcagaaccgtcacatcatgaggaatgttaaaggaccagtgagagaaggagacattctcaccctactcgagtctgaaagggaagctagaaggttgcgctaagagggtctttctttcttg

SEQ ID NO: 107182 - DNA, 199 bp, Glycine max
aggacattcaacctctggttgttgataatggaactggaatggtcaaggctggttttgcagttgatgatgctcctagggccgtgttccgcagcattatttggagaccacgccgtactggtgtgatggttgggatggttcagaaggatgcttacgtgggtgatgaagcccaatcacaagtgtgtatactcatcttgaagta

SEQ ID NO: 107183 - DNA, 239 bp, Glycine max
agagacggcaacgttgtgctgtccgccttgaccgagccagagcttcgtcttggccctcgattttgccctgtaaaactaatcccagtcacaacagaaataatcaatggcaccgaaacagaccaaggctgagaagaagatcgcttacgatgcgaactgtgcgacctaatggaggagtacggccaaatcctcgttgtaaactccgacaacgtgggatcgaaccagctccagaacattcgcaa

SEQ ID NO: 107184 - DNA, 242 bp, Glycine max
caggtactggtttcggaagcagacacagatggctcgtacgaagcaaaccgctcgtaagtccacaggaggaaaggctcctaggaagcagcttgcaaccaaggctgcacgtaagtctgcaccaactactggtggtgtgaagaagccccaccgttatcgtcctggtaccgttgctcttcgtgagattaggaaataccagaagagtaccgagcttttgatccggaagctccccttccagaggctgg

SEQ ID NO: 107185 - DNA, 222 bp, Glycine max
tgtcgacgtgctcctcgagcaaaacattgttcccggtattaaagtcgacaagggttttgtaccccttgctggttccaacgacgagtcatggggccaaggtcttgatggtcttgcctctcgctcggctgcatactaccagcaaggtgcccgtttcgccaaatggcggactgttgtgagcatccccaacggtccctctgctctggcagttaaggaagctgcctg

SEQ ID NO: 107186 - DNA, 200 bp, Glycine max
gccaaatggcgtactgttgtgagcatccccaacggtccctctgctctggcagttaaggaagcagcctggggtctggctcgctatgctgcaattgctcaggacaatgggttggtcccaattgtggagccagagatcttgcttgatggggagcatggtattgatagaacttttgaagtagcccagaaggtctggccaaggtt

SEQ ID NO: 107187 - DNA, 242 bp, Glycine max
gtctcttcctacttgaagaaggttggttacaacccagacaagattccatttgtgcccatctctggtttcgagggtgacaacatgattgagaggtccaccaaccttgactggtacaagggaccaactctccttgaggctcttgaccaaatcaatgagcccaagaggccctcagacaagccactcaggcttccattgcaggatgtctacaaaattggtggtattggtaccgtgccagtgggacg

SEQ ID NO: 107188 - DNA, 243 bp, Glycine max
caactacaaaggttgctgtaggagataagatattgaagtagagctaagtgcctaacacctgcagtgaacaatggcctctgcatcagcatctcttctcaagtcttcacttgttcttgacaagtctgagtgggtgaagggacaaacacttcgccaaccttctgctgcatcagttgtgagatgcaaccccaccaccccatcaggcctcaccatcagagctggttcctatgctgatgagctcgttaa

SEQ ID NO: 107189 - DNA, 242 bp, Glycine max
cagaaaaacaagtagttgagaactaagaagaaggaaatggcttcctcaatgatctcctccccagctgttaccaccgtcaaccgtgccggtgccggcatggttgctccattcaccggcctcaaatccatggctggcttccccacgaggaagaccaacaatgacattacctccattgctagcaacggtggaagagtacaatgcatgcaggcgtggccaccaattggcaagaagaagttcgagac

SEQ ID NO: 107190 - DNA, 210 bp, Glycine max
tcctagagtttgaaaagatggcagcttcctcctccatggctctctcttccccatccttggctggcaaggccgtgaagctgggcccatcatcccccgaagtcagaaggggtcagcatgaggaagaccgtgaccaagcaggcctcctccggaagcccatggtatggcccagaccgcgtcaagtacttcggcccattctctggagagccccgt

SEQ ID NO: 107191 - DNA, 171 bp, Glycine max
ctggaggaatcagcgacaggtggcaacagcagcagcagaagaagctatgtgataacatgtgcagcaggtgactcacagacagtggtgattggacttgctgcagactcagggtgtgggaagagcaccttcatgaggaggctgacaagtgtgtttggaggagcagcagagcca

SEQ ID NO: 107192 - DNA, 245 bp, Glycine max
ccataacacaaggcagaaagcaagctcatcctagagttttaaaaatggcagcagcctcctccatggctctctcttccccatccttggctggcaaggccgtgaagctgggcccatcagcccccgaagtcgggagggtcagcatgaggaagaccgtcaccaagcaggcctcctccggaagcccatggtacggcccagaccgcgtcaagtacttgggcccattctctggcgagcccccgtcctacctc

SEQ ID NO: 107193 - DNA, 245 bp, Glycine max
ggcgaaggacgttgaggttgctgagcgtggctccttctctgggaaggactaccaggtccctccaccagcaccactcatcgatgctgaggagctcacaaagtggtccttttacagggctcttattgctgagttcattgccactttgctcttcctcgacattactgggctcacagttatagggtacaagcaccagacggatcatgctgatgcgtgtggtggggttggcattctgggcattgcatggg

SEQ ID NO: 107194 - DNA, 192 bp, Glycine max
agacgatccggagggatgggaggtcctggtggccctggatttcctcttgcttttggtcaatccaaagccaagtttcaaatggaaccaaacaccggagtgacatttgatgatgttgctggggtggatgaagccaagcaggactttatggaggtggtggagtttttaaagaagcctgagaggtttactgctgtt

SEQ ID NO: 107195 - DNA, 231 bp, Glycine max
cggctcgaggggaaacattaatatagaagagctgaggaaggctgctgaaacacacaaggataacttatctgcacttatggtaacatatccttcaacccacggtgtttatgaggaaggtattgacgaaatttgcaatattattcatgataatggaggccaggtatatatgggatggtgccaacatgaatgctcaggtgggacgcacaagcccgggttggataggagcagatg

SEQ ID NO: 107196 - DNA, 241 bp, Glycine max
ccagattagtaccacaaaaatggagaaatagaataactgaatatcgtatagctcaaaataaaatttaaccaaatgcaattcatatgaaaaaagccaattaattctttacaaagaacaacaagtaaacgcattaaaaaaaaaaattagaaaacaatatagatacgagcttttatcctataattttatcaattatgcagataagaaagactcatatatttatggatatagatccctatttcaa

SEQ ID NO: 107197 - DNA, 243 bp, Glycine max
agctagttgaattttatcaaacattgatgaaaagggaggctaagaaggatacttcatcatcactattagttacttcagcaagtaatgcatctgatgctaggagcaacatgattggtgaaattgagaatagatcatcattcctcctagctgtgaagcgtgatgtagaaacacaaggtgattttgtcatgtccttggcagctgaagttcgagcagcctccttctcagatattaatgacttggtgg

SEQ ID NO: 107198 - DNA, 244 bp, Glycine max
tacaactacaaaggttgctgtaggagataagatattgaagtagtgctaagtgcctaacacctgcagtgaacaatggcctctgcatcagcatctcttctcaagtcttcacttgttcttgacaagtctgagtgggtgaagggacaaacacttcgccaaccttctgctgcatcagttgtgagatgcaaccccaccaccccatcaggcctcaccatcagagctggttcctatgctgatgagctcgtta

SEQ ID NO: 107199 - DNA, 257 bp, Glycine max
cgagcaatacaagtcttttttctcagcatttgctggcctgacggagcaaattaatttggaccgctatctgcatccacacttccgttattacatgagggaggtcagaacagttgtttattcccaatttttggaatcttacaagagtgtgacaattgaagccatggcaaaagcctttggagtgacagtagatttcattgatgtggagctatcacgttttattgcagcagggaagcgtcatttcaagattgataaagttg

SEQ ID NO: 107200 - DNA, 255 bp, Glycine max
gcgccagttctgatatttacaccatctgctctcaagactgtgaattatggaatcctgcttgcacaaaagcaatgactatgtcatttaatccaaacccgtgttctgatgcatggagtttggaatttctgaagcgtaccggatttcattgtgatatcatttgtgtcactggatggactgccaccccaatgcaggatgttcaggttacaattgattggtttatttcctctcaggaatgtgttcccaggacctattgtg

SEQ ID NO: 107201 - DNA, 255 bp, Glycine max
aaatgatagtgattccactataggagaaagttctaataatctcgatgaaagtcaaaaatataagcattagtggcttgaatgcgaaaattgttatggattaaattataaaaaattttttaaatcaaaaatgaatatttgtgaatactgtggatatcatttgaaaatgggcagttcagatagaatcgaacttttgattgattcgggtacttggaatcctatggatgaagacatggtttctctggatcctattgaatt

SEQ ID NO: 107202 - DNA, 257 bp, Glycine max
aaaattggagtgattgagtcacttttggaaaaagttgacattcttcttcttggtggaggaatgatcttcacattttacaaggcacaaggtctttcagtgggttcatcccttgtagaagaagataagttggatcttgctacatcactacttgcaaaagccaaggaaaagggggtgtctctcttgttaccaagtgatgtggtgattgcagacaaatttgcccccgatgcaaacagcaaggtcgtgccagcatctgccat

SEQ ID NO: 107203 - DNA, 258 bp, Glycine max
gtggatacctaggcacccagagacgaggaagggcgtagtaagcgacgaaatgcttcggggagttgaaaataagcgtagatccggggattcccgatataggtcaacctttcgaactgctgctgaatccgcgggcacgcaagagagaacctggtgaactgaaacatcttagtagccagaggaaaagaaagcaaaagcgattcccgtagtagcggcgagcgaaatgggagcagcctaaaccgtgaaaacggggttgtggga

SEQ ID NO: 107204 - DNA, 256 bp, Glycine max
attgagagcccagagagccaaatctatgaagtttaaggatgggtacatgatttcttctgggcaacctgtcaaagattacattgactctgcagtgagacatgtgctcctgagacagggtgttcttggcattaaggtgaagatcatgcttgttggggatcctaaggggaaacagggtcctaaaactcccctccctgatcttgtcacaatccattctccaaaggaggaagaagaatacatccagcctgctccagttttg

SEQ ID NO: 107205 - DNA, 256 bp, Glycine max
cattttggcctagtacaatgatggctcagataaataccctttttgtgaagcaaggtactactcttgacagacacctcggaagcttcaaaattgccccagcaagtttggctgcatttgttactgtgtccttgcttgtttgcattgtgctctatgatcgcttctttgtgaagatcatgcaaaggtttacgaagaaccccagaggcattacccttcttcagaggatgggaattggccttgtaatccacacactgatcat

SEQ ID NO: 107206 - DNA, 249 bp, Glycine max
cggggtggttctgttggatacatgggccagcatgtttgggatgagggttaggattgcattagctgaaaagggtgttgagtatgaatacaaggaagaaaatctcaggaacaagagtgctgtgcttttgcaaatgaacccaattcacaagaaaattccagttctgatccataatggcaaaccaatttgtgaatctgcaattatagtgcagtacattgatgaggtctggaatgataaagctccagtcttgcc

SEQ ID NO: 107207 - DNA, 247 bp, Glycine max
gtgacaagtacttgaacgaggctgctcttggaaatgctaatgaagatgctattcagaggggaactttcttccagtcttgaattggaggcaaagcaaacttggcaagtaaatatttctgttcgtgaaggttgttgtactaatccaagtgctagaagttgtgatggaacttgcgtgtaacattcttagcaatctcaatgtcttaggtgcaaagagaagatcctaagttgaagatgatcttactatattt

SEQ ID NO: 107208 - DNA, 254 bp, Glycine max
gtgattttgtgcacaaattcactgctcataccggggagttgtactcagttgcctgcagcccaacagatgcagacttggtggctactgcaggcggtgatgacagaggatttctctggaagattggccaaggggattgggcttttgagcttcaaggtcacgaagaatctgtatccagtttagcttgcagctatgatggacagtgtttggcatcaggaagcttagatggaattattaaagtccgggatgtatctgga

SEQ ID NO: 107209 - DNA, 253 bp, Glycine max
tgcaattgaagttgaagtcttgcccttctctcttcaactccaaacacaagacatcatcatccatggctgcctccgtctccactgtcggagctgtcaacagagctcttttgaacctgaatgggtctggacctggggtttcagctcccagttcatccttctttgggagcagcttgaagaaggttattggctcaagggtccccaacacaaagatttcctctggaagcttcaagattgttgctgtagaagagaagaa

SEQ ID NO: 107210 - DNA, 259 bp, Glycine max
tctcgagccgattcggctcgaggttgagaactaagaaggagaagcacaatggcttcctcaatgcatctcttccccagctgttaccactgtcaaccgtgccggtgccggcatggttgctccattcactggcctcaagtccatggctggcttccccaccagaaagaccaacaatgacattacctccattgctagcaacggtggaagagtgcaatgcatgcaggtgtggccaccagttggcaagaagaagtttgagactctt

SEQ ID NO: 107211 - DNA, 259 bp, Glycine max
cgaaacatggcaagagtggtggcactccaacagaaccaactatctttctctaccttagcttcctctctttctgacttcagtggaaccagacttcaaactcaacttcagttcaagagaaagcaatgccatccaaaagggtctttctacgtctccgcatcgagcaccaagaaaatcctaataatgggaggcaccaggtttattggtgtgtttttgtctaggctccttgtcaaagagggtcaccaggtgactttattcacaa

SEQ ID NO: 107212 - DNA, 273 bp, Glycine max
attcggctctaggggatagagatgccacttccaatttcacacacacttagcaagtcactgcactgtgtggaaagtaagcatggcaagagtggtggcactccaacagaaccaactatctttctctcccttagcttcctctctttttgacttcagtggaaccagacttcaaactcaacttcagttcaagagaaaactatgccatccaaaagggtctttctacgtctcggcatcgagcaccaagaaaatcctaataatgggaggcaccaggtttat

SEQ ID NO: 107213 - DNA, 251 bp, Glycine max
aatatagcccaagccctatacaaccaaaccctaacacacacccatttgattcagtttccatggctagcctcaaggttgcatttttggctgcagtgctctgcatggttgtggtgagtgcacccatggcacatgcagctatcacgtgcgggcaggtgacgaatagcctgatcaattgcatcggttacctccagaacggaggaacgccgccgtcgggatgctgcaacggagtgaagagcctcaatgccgccgcc

SEQ ID NO: 107214 - DNA, 249 bp, Glycine max
agaagggtgagggccttccatggcttccgcttgtgcttcctctgcaattacagctgttgccatctctacgccgagttccgggcagaagaatggatcaggaggttgttttcttagtggaaggaaattgagggtgaaaaaggagagagcagcaattggaggacgatcgatgggcactacagtgtgcgcagttgctgagcctgacagacctctatggttcccaggcagcacccctcctccatggcttgatgg

SEQ ID NO: 107215 - DNA, 247 bp, Glycine max
aatttatgatttaatgcaagctgctgatgttgataacagtgggactattgtttacggcgagttccttgctgcaacattgcaccgcaacaaaattgaaagagaagataatctatttgcagccttttcttactttgataaagatggaagtggctatattactcaggaagaacttcaacaggcttgtgatgagtttggcataaaagatgtccgcctggaggagataatcaaggaaattgatgaagacaat

SEQ ID NO: 107216 - DNA, 251 bp, Glycine max
gtggatacgtaggcacccagagacgaggaagggcgtagtaagcgacgaaatgcttcggggagttgaaaataagcgtagatccggggattcccgatataggtcaacctttcgaactgctgctgaatccacgggcaggcaagagacaacctggtgaactgaaacatcttagtagccagaggaaaagaaagcaaaagcgattcccgtagtctctgcgagcgaaattggagcagcctaaaccgtgaaaacggggt

SEQ ID NO: 107217 - DNA, 251 bp, Glycine max
gaagggctatatagcataaacatttgagtcttcattgcacaatgtcgacctcttccattaacgggtggtgcctctcttccatctccccagccaaaacctctctcaagaaggccacattaggcccttctgtcttcgcaaccgttagcactccttcttctccttcttcttcttcttcttcttcgttcccttctctcattcaagacaggcctgtctttgctgctcctgcccccatcatcactccaactgtgaga

SEQ ID NO: 107218 - DNA, 254 bp, Glycine max
aaattcttatgacagattcttaagaaagagataagcaaagcacgaataagattaatggagtctttggtgaaggggtctgctggtctggactaccttaggaatgcctttgctaacaaatatggatctccatctgatgccatcacctctctgccttcaacattgagatggatttcatctgtttggaattgcaaagatcaggaatgggaagaacatgtgagttcctcatcagcattggcttctaattcatcccaaga

SEQ ID NO: 107219 - DNA, 252 bp, Glycine max
gttgagtggcaaacggcccctattcggccctgatcttccccaaaccgaagaaatcagagacgtgttgtagacattccatgtcatagcagagcttccactagacaactttggcgcatacatcatctcaatggcaactgcaccttctgatgtgcttgcagttgagcttctgcagcgcgaatgccatgtcaagcatccactaagagttgtgccattgtttgagaagctagctgatctagaagcagcaccggccgc

SEQ ID NO: 107220 - DNA, 251 bp, Glycine max
ctatgaggttatgtacttaattcatgagaagcatgaagaggaggatgtagctgtcaatgagaaaattcaagactttttgagggagaagaaaggtcaggtttggagattgaatgattggggtatgagaaggctagcttacaaaataaaaaaagctaacaatgcccactacatgttgataaactttgagttggatgccaaatatatcaacgatttcaagactctgttggaccaagatgaaagagttattcggc

SEQ ID NO: 107221 - DNA, 255 bp, Glycine max
gagaggattattcagtggaacctgccgagagcaggaggccattccgtgcactccttgatgttggtcttgttaggactacaacaggaaatcgcgtctttggtgcccttaagggagctctggatgggggtttggatattcctcacagcgacaagaggtttgctgggtttgataaggagaagaaggagcttgatgctgaggttcatcgcaaatatgtttttggtggacatgttgctgcctatatgaagatcttggcag

SEQ ID NO: 107222 - DNA, 257 bp, Glycine max
tgtgagatacacagtagttaggtagcaagcataagtgtctaaccttagaaacatatctgctacatatcgtgtgcattttggaattgtgccactaaaattctattcatctatggctgcctcatcttatgctatgcaatcaatccttgcaaaccctatgatccgcattctcaccgggtctagggagaaccattttggtgttcctgcttatcacatgagaaggaatgttggcctgagagttaggtcaatggctgaggaag

SEQ ID NO: 107223 - DNA, 247 bp, Glycine max
ctaatttattatgatctctaccagtccacacgacatacgactaaacgtcacagcctatgccgcattcttgaaagcaaatggtgaaacactagtgacttagaaaagggcagcaaccatggatgaggtcctccaggaggcagatataattagtcttcatcctgtcttggataaaaccacttatcatctagtcaacaaggaaagactagctaagatgaagaaggaagcaattaatataaattgcagtaga

SEQ ID NO: 107224 - DNA, 249 bp, Glycine max
ttcggcataagctcaatcagggaacctctggaagagatgttctatagagtatatgggcattgaagaagagggtgaatgatggagtttttctgtagcacgatcatcatggattctccagtcagattgtatgcctagggagagtataaattaataggtccattgtttggacctgttgtgttgtttgtgttatcttctcatatagtgcagagttagtgttgtagaagcaacctgtgtcttggtatttttttt

SEQ ID NO: 107225 - DNA, 249 bp, Glycine max
  unsure (1)..(249): unsure at all n locations
gaacaaactataaccaatgctggaaattggttgattgggggtgacctagaggtcattgaaccaattcagtacaatgatggacttgatcattttcgtctatctccgtcacacctccgtgccctgttcacaaggcgcaatgcggatgctgtgtttgccttccagctctggaatcctgttcacaatggccatgctttgctaatgactgacacganaaagcgccttcttgagatgggctataagaatcctgtc

SEQ ID NO: 107226 - DNA, 252 bp, Glycine max
actcgagccgaatcggctcgagagcagagaaacaaagttacaagtacagtaaattaagaagagcattaatggcttctcttgcacccttagctgctgttcaaccagctgcgctcaatggccttgctggaagttccctctctggaactaagctctctttcaagccctctcgccacactgtcaaatccaagaacttcaggagtggtgccgtggtagcaaagtatggtgacaagagtgtgtactttgatttggagg

SEQ ID NO: 107227 - DNA, 244 bp, Glycine max
cacaattccatattaggcgtactgttgtgagcatccccaacggtccctctgctctggcagttaaggaagcagcctggggtctggctcgctatgctgcaattgctcaggtcaatgggttggtcccaattgtggagccagagatcttgcttgatggggagcatggtattgatagaacttttgaagtagcccaaaaggtctgggcagaggttttcttctaccttgctgagaacaatgtcctttttga

SEQ ID NO: 107228 - DNA, 247 bp, Glycine max
aaaagccttagccttccctacaactccaaacaccaagacatcatcatccatggctgcctccgtctccactgtcggagctgtcaacagagctcttttgaacctgaatggttctggagctggagcttcagctcccagttcagccttctttgggaccagcttgaagaaggttattgcctcaagggtccccaacagcaaggtttccggtggaagcttcaagattgttgctgtagaagagaagaaagagatt

SEQ ID NO: 107229 - DNA, 242 bp, Glycine max
gggaagttcagtaaaagcaacaggaagaattgctcagatacctgtaagtgaggcttatttgggtcgtgttataaatgccctggctaaaccaattgatggtcgaggagaaatttcagcttcggaatctcgattaatcgaatctcctgctcccggtattatttcgagacgttccgtatatgagcctctccaaacaggacttattgctattgattcgatgatccccataggacgtggccaacgag

SEQ ID NO: 107230 - DNA, 241 bp, Glycine max
caccaaaccaaaccacattgtttgcaaggcagcacagaagcaggttactgtgcaagagggtgaggacactactactggccttgtctctcgcaggttggccctgcactgtgctcattggtgctgctgctgttggctctaaggtggcacctgctgatgcagcctatggagaagctgccaatgtgtttggaaaaccaaagacaaacacagacttcctttcatacaatgggaatggattcaaact

SEQ ID NO: 107231 - DNA, 261 bp, Glycine max
cccaggattcggctcgagccgaacgtctcagtggtggacctcgtcgatcaggtctcaaagaagacctttgcagaagaagtgaatgcagcattcagagagagtgcagacaatgagctcaagggaatcctctctgtgtgtgatgagccacttgtgtccgttgacttcaggtgcactgatgtgtccccaaccgttgactcctcgttgaccatggtcatgggagatgacatggtgaaggtcattgcttggtatgacaatgaatgg

SEQ ID NO: 107232 - DNA, 241 bp, Glycine max
gtaagaactgtgagattccaaggtttgatgtccgtggaatactcgaacgacttcgtgggaaaagggtggttttcgtcggcgattctttgagtaggacgcaatgggagtccatgatatgtttgctaatgacaggagttgaggataagaagagtgtctatgaaatcaaaggcaacaagatcacaaaacagataaggtttttaggtgtgaggtttagtacttttgatgttagaatcgattttta

SEQ ID NO: 107233 - DNA, 245 bp, Glycine max
  unsure (1)..(245): unsure at all n locations
cggctcgagccgagggcgaatcccccaacagcttgttcaacatgctaggcaacttgctcttccccagactcgcattcgcgggcctgttcttcctcttccgcagagcccaaggcgcgnccggcgggcctggcgggctgggagggcccatggacttcgggcggaacaagtccaagttccaggaagtccccgagaccggcgtgagcttcgctgacgtggcaggcgcggaccaagcgaagcttgaatta

SEQ ID NO: 107234 - DNA, 242 bp, Glycine max
cagaattttagcaattttagaggcattattttcattgaagccatcttctgttggcacgccttggagttacagctcaaatgagatagttgcagcagctatggttgctgcacatgtttctgaactatttagaaggtcaaaaacttgcatgcatgctctgtctgttcttattcgttgcaaatgggacaatgaaattcattccagggcgtcatcattgtataatctcatagatattcacagcaaag

SEQ ID NO: 107235 - DNA, 242 bp, Glycine max
gttctagatcgcgtgcgtgcattccattgttgttgttattgtatcgtagccagagaagaagaagagaagagatcgcggcgaagaaagaaagatgacggaggcacatataaggaagaagcccgggatggcgagcgtgaaggacatgccggttctccaggacggtcaccgccggcgggttcgctccggtccggttcgcccggcgcatcccgaacaagggcccagcgccgttgccatcttcctca

SEQ ID NO: 107236 - DNA, 269 bp, Glycine max
cacacgcttcagatgacatggcctcattgggtgggttacaaaatgtgagcggcatcaattttcttatcaaagagggtccaaaagtcaatgcaaagttcgagctgaagccgccatcatatccactgaatggtttggagccggcgatgagccagcagacacttgagtttcactgggggcagcaccacaagacttatgtggaacatctggaaacacagttgttgggactggcttgatgggcagtcactagaagagttattgtcacatcacac

SEQ ID NO: 107237 - DNA, 271 bp, Glycine max
cacacacaaacacaacaacatatggaggtgctaagggtgcaaaccatagccaccaaatccaaagatgctgccacaccagccatgtttgttagggcagtgacagagcaaccaggcatcacaaccgttcaaggggtgaaccttgggtgccaattattgattttagtgacccagatgaagggaaagtggtgcatgagattttggaggcaagtagggactggggcatgttccaaattgtgaaccatgacatacctagtgatgttataagaaagtt

SEQ ID NO: 107238 - DNA, 272 bp, Glycine max
ggaatggaaggaacagttatgacagatgggaagagcaaaagcttagtggcatatcatgaagttgggcatgctatttgtggaactttgactcctggtcatgatgctgtgcaaaaggtaacactagttcctcgtggtcaagctcgggtcttacatggttcattcctaatgatgatccaactctgatctccaaacaacaactctttgcaagaattgttggaggactaggtggacaggctgcagaagaaattatttttggtgagcctgaagttaca

SEQ ID NO: 107239 - DNA, 266 bp, Glycine max
gtccaaggacaaggccagtcctcagacagttgctgattacaccctcaagctccttcacaggagaattccccctgctgtccctggaattatgtttttgtctggtggacagtctgaggttgaagctaccctcaatttgaatgcatgaaccaatctccaaacccgtggcacgtgtcattctcgtatgccagagccctccaaaacactgccttgaagacatggggaggccgcccagagaacgtgaaggcagcacaagatgcactcgcatt

SEQ ID NO: 107240 - DNA, 267 bp, Glycine max
ggcagaaagcaagctcatcctagagttttaaaaatggcagcagcctcctccatggctctctcttccccgatccttggctggcaaggccgtgaagctgggcccatcagcccccgaagtcgggagggtcagcatgaggaagacgtcaccaagcaggcctcctccggaagcccatggtacggcccagaccgcgtcaagtacttgggcccattctctggcgagcccccgtcctacctcactggcgagttcccaggtgactacggctgggac

SEQ ID NO: 107241 - DNA, 146 bp, Glycine max
tggtggccatctgaaggtggagctggagcctcaattgataatgcaggcacttactatgctagtttgattcgtcatgcctcgagtgggaattaaactccaaagaggcctggtgagtctatagagacttacttgttcgcgcattttga

SEQ ID NO: 107242 - DNA, 251 bp, Glycine max
aaaagcgttagcgttctctacaacttccaccctcacgacatcttcatccatggctgcttccgtctccactgccagagctgtcaacagagctcttttgaacctgaatggttctggagctggagattcagctcccagttcagccttctttgggaccagcttgaagaaggttattgcgtcaagggtcgccaacagcaaggtttccggtggaagcttcaagattgttgctgtagatgatcagactgagattgaag

SEQ ID NO: 107243 - DNA, 272 bp, Glycine max
tgcaattgaagttgaagtcttgcccttctctcttcaactccaaacacaagacttcatcatccatggctgcctccgtctccactgtcggagctgtcaacagagctcttttgctgcctgaatgggtctggacctggggtttcagtcccagttcatccttctttgggagcagcttgaagaaggttattggctcaagggtccccaacacaaagatttcctctggaagcttcaagattgttgctgtagaagagaagaaagagattgaagagacccag

SEQ ID NO: 107244 - DNA, 271 bp, Glycine max
tccatacatagccacttctcactcactcactcctgttgcagtcatctccaagccagtgtccattgaggcatggaacccaagtggcaaatacagagttgtcagcaccaaaccaatgcctggaactcgttggctcactctctcattcaaaatgatgttcgccttgaaatatgtaccgagaagaaaacgattttgtcagttgaagacatcattgctttgattggtgataagtgcgatggagttattggacagttgactgaagactggggagaag

SEQ ID NO: 107245 - DNA, 125 bp, Glycine max
tgtgaagggaaccatgacaaccacacattcctacacaggagaccagaggcttttggatgcttcacaccgtgacttgagaagagccagggctgcagcactgaacattgtcccaaccagcactggag

SEQ ID NO: 107246 - DNA, 264 bp, Glycine max
cgtgcctctagggttatcatatctccatttccatttcctctctctcagtttccaagaatcttaagctatgggaaagtcttacccaaccgtgcgcgctgattaccagaaggccgttgagaaggcgaagaagaagctcaaggcttcatcgctgagaagagatgcgctcctctaatgctccgtttggcatggcactctgctggaacttacgacgtgagctcgaagaccggtggtcccttcggaaccataaagcacccctccgaactc

SEQ ID NO: 107247 - DNA, 268 bp, Glycine max
aaacgggaacagttcagataaattccgccccggctcgtgggccagatcattttccctttcagggtacaaaggacagtggcattggatctcaagggattaccaacagcataaacatgatgaccaaggtcaaaacgactgcgatcaacttacccagcccttcctatactatgggctagtagtgtaatagttatacacatacatgcatggaggaaaatcaatttatatcatgttccataaatcatagtgaacgttcaaaacgtatgagttc

SEQ ID NO: 107248 - DNA, 269 bp, Glycine max
ggcggggataagattaaagattcaacaatggcctctgcttctgctaatcttctcaagtcatctcctgttcttgacaagtgcgagtgggtcaaaggccagacccttcgccaacctctcgtgagatgtacatcccattcagatcagctctcaccatcaaagctgcttcctatgctgacgagctcgtcaaaaccgccaaaacagtggcctcaccggggcgtggtattttggcgatggatgagtcaaatgcaacctgcgggaagcgtttggca

SEQ ID NO: 107249 - DNA, 265 bp, Glycine max
tgcacttgggaagaactaccaggaagcaattgaggacattaccattagaatgggtgctggaatggccaaatttatttgcaaggaggtagaaacaattgatgactatgatgaatattgtcactatgtagcgggacttttgggctgggtttatcaaagcttttccatgcgtctggttcagcagatctggctccagatgacctttgcaattcaatgggcttgtttctacagaaaacaaacattattcgagattatctggaagacatca

SEQ ID NO: 107250 - DNA, 264 bp, Glycine max
ctgaagcatctcaatgagttcgtccgcaagaccggtggcgccggcaaaggtcgcactaatcatgcgccgcaccgtcaagagtgctcctcagagcatttggtatggccctgaccgtcctaagtacttgggtccattccggagcagattccatcatacctgaccggagaattccctggtgactacggatgtgacactgctggattatcagctgacccggaaaccttcgccaggaaccgggagctggaggtgattcacagcagatgg

SEQ ID NO: 107251 - DNA, 262 bp, Glycine max
agagggtgccactcttgttgctattaggcccagcgagctatcccccaatactgcgaagaaggaggcgtcggatttgtcgtgggtttcgacggcgtttgaggagccgtataggacggctgctacaatgcttgtcagaggaggacttattgccttgagatgaactcattctgatgcgtttgtgagggaatgcagaatcatttgaaaagggagaaaatgttaagttcttcatagaagggaatcacaaaactcactctttcttggg

SEQ ID NO: 107252 - DNA, 241 bp, Glycine max
gcttctgtgcgccttgacagcagcccacatagccactatgactatataccccttcaatgttgctacgaatgcatgcttctgtgagtcttgagagctaaattgtacttcgagccttaggagctgaagtctatctcactgccctgccacaagaaccgatgcagttcttaggaaggccgaggagatagtgaataacacgcccggaagttacatgctccgccagatagataatcctgctaatcca

SEQ ID NO: 107253 - DNA, 266 bp, Glycine max
ctgttctttgggtgagtcccacgtaatgacagatctttgaaatgcccactggcggcgccgctatcatgagggacggtcctactctcctcaatttggccacgaaggagcagtgcttggctcttgggactaggctcagtccaagtacaagatcacgtaccagttctacagggtcttccctaatggggatgttcagtcatttgcaccctaaggatggtgtttaccctgagaaggtcaacgccggacgctcaagggtgggtcaaaacttc

SEQ ID NO: 107254 - DNA, 267 bp, Glycine max
  unsure (1)..(267): unsure at all n locations
tgagcttgcagcagcgatttctcatttcatttttcacacttcatcaacgttcanaaccttcaaatacatcatcctcggtggaggagtttccgcatgttatgcggcgagggagtttgccaaacagggcgttaagccagggagttggctatcatttcgaaagaagcggtagcaccttatgaacgtcctgctctgagcaaggcttacctttttccagagtcccctgctagacttcctgggttccatgtctgtgttggaagtggaggagaa

SEQ ID NO: 107255 - DNA, 264 bp, Glycine max
ggggccagggaatgtgtcactaatcttgagaacgtcctgttcaggaattgcatcggtgcgataaattccagtgtcaacaccaatgcggtcatcccttgttggtgcccagtagaacttctccatacgcccatcaggatgagaggcgcatagagtgtggagaaatcgttaccggtgacgatgatgggcacacggggattctcttccttgttatacataccatgaagctgcacattagtggggttatcagcaatgttcatgagggtg

SEQ ID NO: 107256 - DNA, 260 bp, Glycine max
tgttcttgcacatgactctggctctcaccaacttgttagtcattggttaagaactcactcttgacagagccgtatgttattgcaatcaacaggcaacttagtgagttgcaccccatatacaaattgctacacctcatttccgttatacaatggagatcaacgctatcgcacgagaagcacttatcaacgctgatggcaccattgagagctcatttgcaccaggaaagtactccatagagattagctctgctgcttatgct

SEQ ID NO: 107257 - DNA, 222 bp, Glycine max
atcgagccgaagaaatataactaatattctttagattaatcaaaaagaatattaaattccagataaatttcagatagaaaaaagacttaaaaaggaggatttgaaatgcgagatctaaaaacatatctttccgtggcaccagtagtaagtactctatggttcggggctttggcgggtctcttgatagagatcaatcgtttttttccagatgcattgatattc

SEQ ID NO: 107258 - DNA, 217 bp, Glycine max
aattaacctcatgacaccataagccggtacattaaaattggaattagcacaatttgccgcattagaagccctctccctattcgcttctgatctcgctaaagctactcataatcaattaacacgaggtcaacgattgcacgagttgcttatactatcgcaatcaactcctcttaccgtggaagaacagttaataactatttctactggaacgaatggt

SEQ ID NO: 107259 - DNA, 260 bp, Glycine max
taaaggagttgtaaattaagagcatggctgcacaagctcttgtatcatcatcatctcttaccttctcagccgaggctacaagacaaagtcttggaccaagatcactccaatctccatttggcttctcaagaaagcctcctttcttgttaaggcagctgctactccccctgtcaagcaaggatcagacagacctttgtggtttgcatcaaagcaaagtctttcctacttggatggcagccttccgggtgactatggatttg

SEQ ID NO: 107260 - DNA, 238 bp, Glycine max
aaactagatgccagggtctgtagtgtgcgggtgggtttgtttatctcaaacacagctcagaggtgtagagaagaaagctctcaaaagtatggcggcggagtcatcactgatcgtggcgactcccactatttgcaacctcaatggttctcagagaagaccaaccactctctctccgcttcgcttcatgggttttagccctcgaccctctcactctctcacttcctcttcccttccacac

SEQ ID NO: 107261 - DNA, 146 bp, Glycine max
ggccaggtaaggtgacaagaatcttgacaacatcctgttcaggagttgaatcggtgctaacaattccagtgctgataccaatgcggtcatcgcttgttggtgcccagtagaatttgtcgatatgggcgtcaggttgaaatgtgcat

SEQ ID NO: 107262 - DNA, 180 bp, Glycine max
cttaacacaaggcagatagcaaggtcatcctagggttttgaaaatggcagcagcgtcctccatggctctctcttctcgatccttggctggcaatgccgtgaagctgggcccatcagctgccgatgtcgggagggtcagctatgaggactgaccgtgcaccacagcagcgacctcctaccg

SEQ ID NO: 107263 - DNA, 262 bp, Glycine max
ggccagggaaggtgtcaacaatcttgacaacgtcctgctcaggcattgaatcggtgcgataaattccagtgcagacaccaatgcggtcatcccttgttggtgcccagtagaacttctccatacgcgcatcaggatgagaggcgcatagagtgtggagaaatcgttaccggtgacgatgatgggcacacggggattctcttccttgttatacatacgaggaagctgcacattggtggggttatcagcaatgttcatgagggtg

SEQ ID NO: 107264 - DNA, 264 bp, Glycine max
gtcgagccgatcatcaagggcaccatgaccaccactgactcctacaccggcgaccaaaggcatctcgacgcgagccaccgtgacctgaaccgcgccagggcggcagctctcaacattgtccccacttgaccagcagcagcaaaggcagtggcccttgtcctcccaaccctcaagggcaaactcaatggcattgcactccgtgtgccaacaccaaacgtctcagtggtggacctcgttgttcaggtctcaaagaagacctttgca

SEQ ID NO: 107265 - DNA, 256 bp, Glycine max
tctccattggttcttcatctgcatgcacacacttgcatagttttggaaaccaagaatttttgaagggtagcatcaacaagaagttctggaaatggagatcaccaatgtcagcgagtatgaagctattgaaagcagaagttgccaaagatggtgtttgactactacgcatctggtgcagaggaccagtggactctgcaggagaacagaaatgccttttccagaattttgtttcggccacgtattcttattgatgtga

SEQ ID NO: 107266 - DNA, 258 bp, Glycine max
cacgttccgagttttctgatcgctcatagagagttcgacgcggcggttgcagaagaagattgcaagatgaagttcaacatcgcgagtcccaccactggatgccagaagaagctcgagatcgacgacgatagaaactacgagcattttgggacaagagtctctcacaggaggtcagcggagatgcacttggtgaggaatttaagggctatgtcttcaaaattactggaggttgtgacaaacaaggattcccgatgaaac

SEQ ID NO: 107267 - DNA, 231 bp, Glycine max
atttcactcagccgctgcgaggcgaacagagtgacccgaagccagatttcaagatgaagttcaacattgcgaatcccaccactggttgtcagtcgaagctggagatcgatgatgacctgaagctacgagcattttgggacaagaggatctcacaagaggttgttggtgatgctctgggtgaggaattcaaaggctatgtcttcaaaattactggaggttgcgacaagcaag

SEQ ID NO: 107268 - DNA, 232 bp, Glycine max
gaaaaccacttgcatcgaaaagcgtggcactctcggcggtacctgcctcaacgtcggatgcatcccttccaaggcacttctgcattcttcccacatgtatcatgaggttaaacatgcatttgccaaccatggggtcaagttttcatctgttgaggttgatttgccagccatgatggcccaaaaagataaagcagtttctaatcttaccaagggtattgaaggtctattcaag

SEQ ID NO: 107269 - DNA, 230 bp, Glycine max
gcaattgaagttgaagtcttgcccttctctcttcaactccaatcacaagacatcatcatccatggctgcctccgtctccactgtcggagctgtcaacagagctcttttgaacctgaatgggtctggacctggggtttcagctcccagttcatccttctttgggagcagcttgaagaaggttattggctcaagggtccccaacacacagatttcctctggaagcttcaaga

SEQ ID NO: 107270 - DNA, 226 bp, Glycine max
ggcgttgttgttgctgctgctggtggttttctcggcgttggctcggcccggtccatctcggtcgaagcgcttcgaccgagcgacaccttcccccggcggcacaactctgccaccccggaggagcagagcaagatggcagagtcgtgtggcttcggtagcctcgactccctcgtggacgccatcttgcctaagtcgatacgccttaaggatatgaagttcgggaaat

SEQ ID NO: 107271 - DNA, 220 bp, Glycine max
atcgagccgtgcaacgcctgcaaatccatgtgttctgggaaagatgggccttgtctttgtgatacttgggtcttttgtggggatcgcaaggcctgtggatccaagtttggtgagtgttggttgaagaaacagaaggacagcttagcacctgaacggcaagaaggaacgcctccgggggaagtgattggttggacttctggtcttatctttgggaaaggag

SEQ ID NO: 107272 - DNA, 230 bp, Glycine max
gcaattgaagttgaagtcttgcccttctctcttcacatccatctatctagacatcatcatccatggctgcctccgtctccactgtcggatctgtcaacagagctcttttgaacctgaatgggtctggacctggggtttcagctcccagttcatccttctttgggagcagcttgaagaaggttattggctcaagggtcctcaacacaaagatttcctctggaagcttcaag

SEQ ID NO: 107273 - DNA, 228 bp, Glycine max
gttggaaagttttatgattctgcagaaacacagaagtcaggctccaggatccagcctctttacatagtactgtagcagagactagaatcattgtgcaaacaacaagtgaagtggatcccttagatgatggatctacatggcgcaaatatgggcagaaagttgtcaaaggcaacccatatccaaggtgatattggttttctccctacactttgattgcttatatttaag

SEQ ID NO: 107274 - DNA, 229 bp, Glycine max
aggctggaaaggttccagatgtttactactgcctcaagcttttggaagccactggcatatccactgttcctggttcaggatttggtcagaaagaaggggtgttccatttgaggacaactattttaccagctgaggaagacatgcctgatattatggatagtttcaaaaagttcaatgatgaattcatggagctctacgaagacgatagaggttattcaaggttgtaaga

SEQ ID NO: 107275 - DNA, 228 bp, Glycine max
tggtgttgcttgtgttgagtacatagctggtaaggttggtcatgtggattatgacaaagtccctggcgttgtctatacaatgcccgaggttgcatctgttgggaagacagaggagcaggtgaaggaacttggagttgaataccgtgttggcaagttcccattcctggctaatagcagagctaaggcaattgacaatgctgaaggactggtgaagatattggctgaaaa

SEQ ID NO: 107276 - DNA, 226 bp, Glycine max
aaaaaagcttcaatttttcgatgatgaggagcgagaacgctagcaagaagaggtacaggaccaagttcagcaaggagcagaaggagaagatgcatggattctctgagaaattggggtggagaatgcagaaaggggatgatgggttggtccaagaattctgcaatgagattggggtctcaagaggggttttcaaagtgtggatgcataacaataagaacactcttag

SEQ ID NO: 107277 - DNA, 226 bp, Glycine max
caggagcagttccaggtatagttcatgtgctgaagaagggaagcatggaggctcgggaaaatgcagcagcaacacttttcagcctttcagtaatagatgaaaacaaggttacaattggatctttaggagccataccaccactagtgacactgctaagtgagggtaaccaaaggggtaagaaagatgctgcaacagcactcttcaatttgtgcatttatcagggcaa

SEQ ID NO: 107278 - DNA, 225 bp, Glycine max
ttccttgtcactgcccgtgtgtcgccgccatggccaccgtcaccacccaagcctccgccgcaattttccggccatgtacctcgaaatcgaggtttttgaccggctcttccggtaaacttaaccgggaagtgactatgcggccaatggggtgccctccttctgcctctttcaaggttgaagccaagaagggagagtggttacctggcttggcctccccaacttacc

SEQ ID NO: 107279 - DNA, 229 bp, Glycine max
gtttgtttgagcgcccaaattaaagctgaaagcccatttaacactgtgttcaattcaaagtatgtgagtacagatagaaatgatctcggtagcacaaacgataaggtttcagcaaactcagttcctcagactcctcggagtcgagggtgagatcttgcagtcatccaatttaaagagctttaccttgtcagaacttaagacggccactagaaatttccgtccagatagc

SEQ ID NO: 107280 - DNA, 230 bp, Glycine max
gaagaaaatgaaagtccttgttttctttgttgctatagttctaccagcatggcattgccatggctcagaccatgaccatgaccatggccacacctaccaaattttccctctgagaatgaaaactggccatggtggccactacattccggaggtatcatgccaaagttggaggcttggtgtggaagcacacaacgtcattgactggaaaaccgttcctcaagattgcgagg

SEQ ID NO: 107281 - DNA, 232 bp, Glycine max
ggcgcacgttagcacaaactatcatggccacggcaacagcagctgccacctcgtcccgcatggggacgcgtctcctggaggctcactccggagcggggcgagtgcacgcccgattcggcttcggcaagaaaaaggctcccgccccaaagaaagcctccaggggatcgggccgagacaccgacagacccctttggtatccgggcgccaaagcgccggaatacctcgatgggag

SEQ ID NO: 107282 - DNA, 229 bp, Glycine max
ctgactgtagatactgctgaattaagcaaaatctcagcactcgctaatcgtgctgaccttccctccaccttccaaccacaacaaattgatcaacttgcaaccactttacctgttgctttcaatacactgaatgttcgccgtgccatcataccagcagctaatggacatgtatctgcccgagcacttgcacgttattatgcagccctagctgatggtggcaagataccac

SEQ ID NO: 107283 - DNA, 230 bp, Glycine max
gttagaggcttctaaattaagtgcatcagagtcagtcacaagctgtttgcaagttgcaaaaagggagaataagtgcttaaagaagcttctgacttgggaaaaacagaaagtaaagacacatcaggatattgcaacagaaaaacagaagatattggagatacaagaagaactagctcagattaaacagtgtgcaaaggaaactgaggtaacgaggaaggaagagttgaagg

SEQ ID NO: 107284 - DNA, 226 bp, Glycine max
atgctgcctatggagaagctgccaatgtgtttggaaagccaaagacaaacactgacttccttccatacaatggggatggattcaaactctcaattccctcaaagtggaacccaagcaaagaggttgagtacccaggtcaggttcttagatatgaggacaattttgactcaaccagcaatgttgctgtcatggacactgcaactgacaagaagtccatcactgacta

SEQ ID NO: 107285 - DNA, 225 bp, Glycine max
gaaagaatgagagaggttgccaaccttattctgagcttcccggaagagaggctcaataattgttctctctgccatgggaaagacaactaacatgcttttgctggctggagaaaaagctgtaagctgtggagtaactaatgctgatagtattgatgagctcaacataataggagatcttcatctcaggactgtggaacagcttggagtggacagaaatgttattga

SEQ ID NO: 107286 - DNA, 222 bp, Glycine max
caagagtgtagcagccattcatgcaactgtcttcagctgtcttcgaaggcgtgaggttggggaacaactatatgatcctgttagaaatactgtgacagttgtttatgaggaatatagaaatcaatgtgcagccaattctttgagctcaaaaggaatgtttcaactgatccaaagaaaaggttcttcaaggaatctgatggctcttgttaatactgatgggtc

SEQ ID NO: 107287 - DNA, 223 bp, Glycine max
cggctcgagatttccaaggtaccccaattggtgtttcaatggataacacccgtttagccattgcatcaattgggaaacttatgtgtgcccaattctctgaacttgtaaatgacttctacaacaatggtttgccttcaaatctaacagctagtcgcaatccgagcttagattatggattcaaaggtgctgaaattgcaatggcatcctattgctcagaacttca

SEQ ID NO: 107288 - DNA, 220 bp, Glycine max
cggctcgagatttccaaggtaccccaattggtgtttcaatggataacacccgtttagccattgcatcaattgggaaacttatgtttgcccaattctctgaacttgtaaatgacttctacaacaatggtttgccttcaaatctaacagctagtcgcaatccgagcttagattatggattcaaaggtgctgaaattgcaatggcatcctattgttcagaact

SEQ ID NO: 107289 - DNA, 218 bp, Glycine max
ctgcaaccatcggcagaatatcttggatcactgcttggcgtggacaaatgggccgtggaaatatttactgaagaaattatccgtgctggatctgctgcttctttgtctactcttctaaatcgactggatcctgtgctccgaaagacagctcatcttggaagctggcaggttattagtccagttgaaactgttggatatgttgaggttgtagatgagtt

SEQ ID NO: 107290 - DNA, 224 bp, Glycine max
ccttagccttccctacaactccaaacatcaagacatcttcgtccatggctgcctccgtctccactgtcggagctctcaacagagctcttttgaacctgaatggttctggagctggagcttcagctcgcagttcagccttctttgggaccagcttgaagaaggttattgcctcaagggtccccaacagcaaggtttccggtggaagcttcaagattgttgctgta

SEQ ID NO: 107291 - DNA, 221 bp, Glycine max
agagtatatgatgatgaagtgaggaagtggatttctggtgttggtgttgacagtgttgggaagaagcttgtgaactcaaaagatggacctccaacctttgagcagcccaagatgactctggagaagctcttgctgtatggtaacatgcttgtccaagaacaagagaatgtcaagagagtccaattggctgacaagtacttgaacgaggctgctcttggaaa

SEQ ID NO: 107292 - DNA, 225 bp, Glycine max
ttgtcgagccgtatcggctcgagcggctcgaggaagactactgagagggagatttctgatgatgaggatgaggaagagaagaaggatgaggagggtaaagttgaagatgtggatgaagataaggagaaggaggagaagaaaaagaagaccattaaggaggtatctcacgagtggtcattggtgaacaagcagaagcctatttggatgaggaaacctgaagagatt

SEQ ID NO: 107293 - DNA, 218 bp, Glycine max
cttcaactctatctgcaacagccaaccttgtcgttcgtcgatcacaaaaatggcggcgaaacttcaaatatttacgggattgccccccgcgccatttcaatcttcttcttcctccactctctgcgtactcaagaagcctctcactacctccttcttcggcaccgcgcgagtggaagttctgaaacttagagtgatgaggattgtgaagcctacgcgtg

SEQ ID NO: 107294 - DNA, 221 bp, Glycine max
catcaacaagcagttctgaaaatggagatcaccaatgtcagtgagtatgaggctattgcaaagcagaagttgccaaagatggcgtttgactactacgcatctggtgcagaggaccagtggactctgcaagagaacagaaatgccttttccagaattttgtttcggccacgtattcttattgatgtgagcaagatagacttgacaactactgtcctaggctt

SEQ ID NO: 107295 - DNA, 221 bp, Glycine max
tctcgagccgaatcggctcgagtgaggatttatctgggttggagatatgttggtgatagaacttctatcagcggtcatcccttatgaagaaagtggatggtacgacggacagatgtgggtcaagccgcccgagatcctagctcgtgatagattgttgggctcttacaaggttaaaccagtcgttaaattgctgaaacaaactctagttgggacaggagcat

SEQ ID NO: 107296 - DNA, 221 bp, Glycine max
ctcgagccgcggcttccaccgcagctatgtcagcctgcttggaaaccccgtgagcctgaactgcgccaccaggtctgctccatcaccgtctacacctgttactttcaagaccgttgcgcttttctccaagaagaaggcagcaccacctcctccaaagaaaaagcctgctgctgtatcccccgccaatgaggaactcgccaagtggtatggtcctgacagaa

SEQ ID NO: 107297 - DNA, 222 bp, Glycine max
cactgccccccagaagaagagaagttgcagtgtatgatccctgcacccaaggggtatgtaacaccatttccatggccgaagagccgtgattatgttccgtatgctaatgctccctacaagagccttacagttgagaaggctattcagaattggatccaatacgagggaaatccgttcaaattccctggtggcggaacccaatttcctcaaggtgctgataaa

SEQ ID NO: 107298 - DNA, 208 bp, Glycine max
cggctcgagcggctcgagcggctcgagagtaaatcgaggtacccattttatgataaactttccttccatttgtgttcctccagtaggcctagtatttccggcaattgcaatggtcttctttatttctttatgttcaaaaaaacaagattttttagatacagaaaacaaagtaaaattctggggttttttattccccaattataatact

SEQ ID NO: 107299 - DNA, 218 bp, Glycine max
  unsure (1)..(218): unsure at all n locations
tgggaacgaccctattttcacttcttcaggtgaagctggatcattcctccgcggaatcgatgtgaaccgtttacctctgtggttgattgcgaagaggaagcaggtgtttcatctccaaacagcacggtttctagcgtcagtggaaagcgcanacgagggaaaccaatggagaagaaaacgacacagacagagcttgttccagaggcatcatcagcgac

SEQ ID NO: 107300 - DNA, 262 bp, Glycine max
ctcatttgccttcaaggcagggaaatacaaggcccagaagttgtgcctggaaccaacttccttcacggtgaaggcagagggtgtggccaagaatgccccgctcgaatttcagaacaccaagctcatgactcgtctgacctacaccctggacgagatcgagggtcccttcgaggtttcatccgatggaacggtgaaattcgaggagaaagacggaattgactatgctgctgtcactgtacagcttccagggggaagacgtgtg

SEQ ID NO: 107301 - DNA, 258 bp, Glycine max
cttgaaaactgggaacctacacaagactcctacatggtggtgaatgcacctgggatgcaacctctcaaaatatgtttgagccaacaagggaaggaggtagcaaatgctgtctcagtatgggaatggactggatctgccttggatgagggagctgaagcatcacagtgttcccaagattatttaggaaaaccatgtcaactggtccgcttcaattcagcttctgaagttcgaccagtggatcctgattacgtcaaggga

SEQ ID NO: 107302 - DNA, 254 bp, Glycine max
cacattacacaagaactctccaaggatcctccttcccacgaaattcatttggtgggaaaatccaagaagagggtggaatttcaagccagggaagatggattatttcaatgcaccaggaagaaaccatctctttgttccggggccggttaacatcccggaccagatcattcgggccatgaacagaaacaatgaggactaccgttctccagcaattccagctatgaccaaaacactgcttgaggatgtcaagaaga

SEQ ID NO: 107303 - DNA, 237 bp, Glycine max
ataccttacaccgcgcgctgtaaatctgagtatcaaacaacttcccctcaccaccacataacctcaaacaacacaacaccgccaacatgggtaaggagaagatgcacatcaacgtggtcgttatcggccacgtcgattccggaaagtccaccaccaccggccacttgatctacaagtgcggtggtattgacaagcgtaccatcgagaagttcgagaaggaagccgccgaactcggta

SEQ ID NO: 107304 - DNA, 263 bp, Glycine max
gaaattattgaggtctttgcagtttgcaagaactctaaacatttgatccatcaccatcttcttagcagtgaggtgaagtgaggtgactgcaatggcttctgcttgtgtgaccttgaaatccaatacccatttagcaaactctgagaagggctttctaggagaaagaataaaaggtggcttcaagaacagtgccttggtaatgaatcagttggctatacgttctagaagccacaagagggtgaaacatggtgttggtgttgtat

SEQ ID NO: 107305 - DNA, 257 bp, Glycine max
gtttggtggagagagagaagcctggggagtataattggggagggtacgtggaactcatggaaatggcgaagaagcatggcctcaaggtgcaggctgttatgtcatttcaccaatgtggcggtaacgtcggagactcttgcactattcctttgcccaaatgggttgtggaggagattgataatgaccgcgatcttgcatatactgatcaatggggaagaagaaactatgaatatatatcacttggatgtgatactttg

SEQ ID NO: 107306 - DNA, 257 bp, Glycine max
gtgagtgatgttaaagatcaaggcagctgcggatcatgctggacattcagcacaactggggctttagaagcagcctatgcacaagcatttgggaagagtatctctctttctgagcagcagctagtggattgtgctggccgtttcaacaactttggctgtaatggtgggttgccatcacaagcctttgagtacatcaaatacaatggaggacttgagacagaggaagcatacccctacactggaaaagatggtgtatg

SEQ ID NO: 107307 - DNA, 254 bp, Glycine max
cagcaatggagctgtcttccagtgcatttgtggtaatattgttggcagtcgcagctacagcagtactctcaaatgggttggatctatctttcttgcccagcgatttcctctttggcattgcttcttcctcttaccagtatgaaggagcttacaagagtgacggcaaaggactgagcaactgggataactacactcacggaccaggtagaagtgtaataatggatggaagcaatggggatatcgcgattgatcat

SEQ ID NO: 107308 - DNA, 258 bp, Glycine max
tacaaaggttgctgtaggagataagattgcagtagtgctaagtgctaacacctgcagtgaacaatggcctctgcatcagcatctctgctcaagtcttcacttgttcttgacaagtctgagtgggtgaagggacaaacccttcgccaaccttctggcatcagttgtgagatgcaaccccaccaccccatcaggcctcaccatcagagctggttcctatgctgatgagctcgttaagaccgcgaaaacagtggcttcacc

SEQ ID NO: 107309 - DNA, 147 bp, Glycine max
taaacccctattttgagagtggtaagctgaagccaatacttgacccgaagagcccgtttccattttctcagactgttgaagcgtttgcccatctggaaacaaacagagcaactggaaaaatagttgtctatcccattccatgaacat

SEQ ID NO: 107310 - DNA, 261 bp, Glycine max
ggaaagtgagtgagagaaagagatcgcagacacagagcagaatggcttctacccaatgtttcttgcaccaccatgctcttaccacccctgccagtgccagatccccatcactacgcatcctggttagcaccaagcctaaccagcttgtttgcaaggcacagaaacaacaaacaccacaagaggatattgatgtcagcccaatctctcgccgtttagctctaactgtgctcattggtgctgctgctgttggcttcaaagtcc

SEQ ID NO: 107311 - DNA, 254 bp, Glycine max
gtcgcattctattcacctaacctctttcagtctgtgggtatgggacacgatgctgctttactttcaactgtaatacttggaattgtcaaccttgcttctctcatcttatccactgctgttgttgatcgttttggttcgaaggtcttgttcattactggtggcattctcatgcttttctgtcagattgcggtgtctgctttgctagctatggtgactggtgttcatggtacatagggcatatcaaagggtaacgc

SEQ ID NO: 107312 - DNA, 250 bp, Glycine max
cacaacacaacccatggccaccacctccgcattcctcctccttcacctcctcctgctgctccacctcgccatcgccgctcacggcatcggcatcaactacggcacgctcggcgacaaccttccaccgcccgcggcgtgtccgcaacttcctgaagacgaagacgaccatcgaccgcgtgaagatctacgacgtgaacccggacatcctgcgggccttcgccggcagcggcatctccgtgacggtgaccgc

SEQ ID NO: 107313 - DNA, 208 bp, Glycine max
ggccatggtgctaagcttgatgttctggaatcaaagattgcttcagatacttcacacactataaaggccatttgcattgttcacaatgagactgcaactggggtcaccaatgacttggccaaagtgagacaaattcttgattcctaccagcatccagccctccttattgttgatggagtgtcttccatttgtgctcttgatttccgca

SEQ ID NO: 107314 - DNA, 261 bp, Glycine max
cttgaaaactgggaacctacacaagactcctacatggtggtgaatgcacctgggatgcaacctctcaaaatatgtttgagccaacaagggaaggaggtagcaaatgctgtctcagtatgggaatggactggatctgccttggatgagggagctgaagcatcacagtggttctcagattatttaggaaaaccatgtcaactggtccgcttcaattcagcttctgaagttcgaccagtggatcctgattacgtcaagggacaa

SEQ ID NO: 107315 - DNA, 259 bp, Glycine max
gttattgaaagatacccaccaacaacgtctccttttcaaattgagaaggatatccagaagttacttgctgcctgagtgtaattcagaacacaaacgagagctgtatgtaagagcacgaaccgagtgatgtgtgcacaataagttaaaactgaagatgagcaataagtatagctatgcaatttactttggtgtctttactaaagaaattatcagtttagggaagaaaattatactgtattaccccaaaatgattgaatat

SEQ ID NO: 107316 - DNA, 253 bp, Glycine max
tctgaagcgtgagggcgatggaggaaagaaagccactcaaactctacttcattcatttcctagcagcgggtcacatgatccctctctgcgacatggccacactcttctccactcgcggccaccacgtcaccatcatcaccaccccctccaacgcccaaatcctccgcaaatccctcccctcccaccctctcctccgcctccacaccgttcagttcccctcccatgaggtgggtcttcccgacggcatcgaaaa

SEQ ID NO: 107317 - DNA, 247 bp, Glycine max
gaacaagtagttgagaactaagaaggagaagcaaatggcttcctcaatgatctcttccccagctgttaccactgtcaaccgtgccggtgccggcatggttgctccattcactggcctcaagtccatggctggcttccccaccaggaagaccaacaatgacattacctccattgctagcaacggtggaagagtgcaatgcatgcaggtgtggccaccagttggcaagacgaagtttgagactcttcct

SEQ ID NO: 107318 - DNA, 253 bp, Glycine max
ggtcatcgttgggatctccatacgccggatctgctaaaatacgcttgatccatatgggcctcctcgaccacttgtgggacgacaccgtcgccggcccaaggccggaaaacggtctcggcaagctccgaaaacaccacaccttcactttccgacctagctccggcaaggaaacggagggcgggagcgtgagatcgtacggagacgaatcgtcggaggaagccacgagagtgacgcgtagtatcctgagcgtgaa

SEQ ID NO: 107319 - DNA, 250 bp, Glycine max
gggctatatagcataaacatttgagtcttcattgcacaatgtcgacctcttccattaacgggtggtgcctctcttccatctccccagccaaatcctctctcaagaaggccacattaggcccttctgtcttcgcaaccgttagcactccttcttctccttcttcttcttcttcttcttccttcccttctctcattcaagacaggcctgtctttgctgcccctgcccccatcatcacaccaactgtgagaga

SEQ ID NO: 107320 - DNA, 250 bp, Glycine max
gtgcaaagaaggttattatttctgcccccagtaaggatgcccccatgtttgttgttggtgtcaacgagcacgagtacaagccagagcttgatattatttccaatgctagctgcacaaccaactgccttgccccacttgccaaggttatcaatgacaggtttggcattgttgagggtttgatgaccactgttcattccatcaccgctacccagaagactgttgatggaccatcagccaaggactggagagg

SEQ ID NO: 107321 - DNA, 236 bp, Glycine max
tggatacctaggcacccagagacgaggaagggcgtagtaagcgacgaaatgcttcggggagttgaaaataagcgtcttcaacgccgtcggcggtggcacctgttccggtctcggatctgtattactcgagcgtctctccttctattagggaaaaaattccaaattagggttcaccatttacccttccccacaggtttcaaccgcagtcgttgaaccctacaacagcgtcctctcca

SEQ ID NO: 107322 - DNA, 235 bp, Glycine max
tgcaactgttggggagaagcccgtccgcgagcttatagctgatgatgcctggttgaatggtgaattcattactactgttcaacaacgtggtgctgcaattatcaaagctagaaagctttcaagtgcactatcagctgctagtgctgcttgtgaccatattagagattgggttcttggaactcctcagggcacctgggtgtcaatgggagtatattctgatggttcctacaatgtt

SEQ ID NO: 107323 - DNA, 154 bp, Glycine max
aaagcagaaggtgaggtcattcttgaacatgttcaaccaaaacttgctcaggcagctgccccaccatctacagatcccatttctttagctgttgaagagaaactaaatgtgacactagaacgagatggtggagtcagtaattttggatgttcaa

SEQ ID NO: 107324 - DNA, 218 bp, Glycine max
tgtgaagggaaccatgacaaccacacattcctacacaggagaccagaggcttttggatgcttcacaccgtgacttgagaagagccagggctgcagcactgaacattgtcccaaccagcactggagctgccaaggctgtgtctctagtgttgccacagctgaaggggcaagcttaatggaatagcggctcgtgtggctacacccaatgtttcatttgtg

SEQ ID NO: 107325 - DNA, 251 bp, Glycine max
tgcaattgaagttaaaagccttagccttccctacaactccaaacaccgagacatcatcatccatggctgcctccgtctccactgtcggagctgtcaacagagctcttttgaacctgaatggttctggagctggagcttcagctcccagttcagccttctttgggaccagcttgaagaaggttattgcctcaagggtccccaacagcaaggtttccggtggaagcttcaagattgttgctgtagaagagaag

SEQ ID NO: 107326 - DNA, 251 bp, Glycine max
tgttcatcttgctgctgttacttgccctgatgccagtgtgcgttattgtgatgttgacgaaaatggggttcgacacttggccctttgtcgtgtaataatggggaacatggagattcttcggcctggcactgatcagtttcatcccagtagttgtgaatatgataatggggtggatgccattgaatgtccacaatactatgtggtgtggaatatgaacatgaacacccacatctatccggaattcgttgtta

SEQ ID NO: 107327 - DNA, 220 bp, Glycine max
aagaaatataactaatattctttagaataatcaaaaagaatattaaattcaaataaattttagatagaaaaaagacttaaaaaggaggatttgaaatgcgagatctaaaaacatatctttccgtggcaccagtagtaagtactctatggttcggggctttggcgggtctcttgatagagatcaatcggttttttccagatgcattgatatcccctttttt

SEQ ID NO: 107328 - DNA, 248 bp, Glycine max
tttctatctatcgtcaacgttagtgctttgtttaggtgaactaattcggagaccttgcaagacttcatcaatggctgtcaaagtttatattgtgtactactccatgtatgggcatgttgagaaactagcagaagaaataaagaaaggggcttcctctgtggaaggtgttgaggccaagttatggcaggtacctgagacactgctggatgaggtgcttggtaagatgagtgcaccacccaagagtgacg

SEQ ID NO: 107329 - DNA, 183 bp, Glycine max
gaacaatggcgggtagggtttcgacgtgcttcttcttcgtgtttgctctttctctccttcttccttttcagatctccgctgaggaatcatcggagaaagagttcgtactcacattggatcactctaactttcacgacactgtctgcaagcacgatttcatcgtcgccgagttctaggtccatg

SEQ ID NO: 107330 - DNA, 242 bp, Glycine max
ctcaacactctatgcacctctcatccgtgatgggcgtatggagaagttctactgggcaccaacaagggaagaccgcattggtgtttgcaccggaattttccgcactgatggtattcctgaacaggacattgtcaagcttgttgacaccttccctggccaatccattgatttctttggtgcactgagggccagagtatatgatgatgaagtgaggaagtggatttctggtgttggtgttgaca

SEQ ID NO: 107331 - DNA, 232 bp, Glycine max
agttagacaggttctgtgatgctcttatttccattagacaagaaattgctgagattgagaaaggaaaggttgacattaacaacaatgtacttaaggtaaaaaaaaacacggttcttcatttgtacgatgccactaggggataccttggttttgggtaaattgtttaatagtatacaccatggggcgcatatttcattcacaatttcacctcgtgcccggcacttatattgat

SEQ ID NO: 107332 - DNA, 288 bp, Glycine max
aggtaatggcagcgtcactacaagcagcagctactttcatgcaacccaccaagttgagcaggagcaacactttgcagcaaaagtctactcagtccatttccaaggcttttggtttggaacctgttggagctaaaaaggtcacatgctcccttcaggctgatcttaaggacttggcacacagttggggtgttcaaccaaaattgcaggattcgcccttgccacctctgccctcgttgtctctggggcaagtgctgaaagtgttccaaagaggctaaccttcgacgaaat

SEQ ID NO: 107333 - DNA, 288 bp, Glycine max
atctcagaattctctaaaagagatctttgtctgctctttgaagaaagaagggtctttgcttgattttggagatgtctctgctctcagatctcatcaaccttaacctctccgataccaccgagaaggtgagtgcagggtacatatggatcggtggatcaggaatggacctgaggagcaaatcaaggactccccaggaccagttagcgacccttcagagcttcccaaggggaactatgatggttccagcacaggtcaagctcctggtgaagacagtgaagtgattttata

SEQ ID NO: 107334 - DNA, 184 bp, Glycine max
actgttcgtgaaggttgttgtactaatccaagtgctagaatttgtgatggaacttgcgtgtaacattcttagcattctcaatgtcttaggtgcaaagagaagatgctaagtttgagatgatcttactatatttttcatattggaccgtcttcctctataattttgagttacagtgtccacttaa

SEQ ID NO: 107335 - DNA, 284 bp, Glycine max
aatgataaagcttgaccgaatctgcagggaggcgaatgttatgttgatctttgctcgctcatatggccttacagggcttagtcgaattagtgtgaaggagcatgctgtgattgagtcaaagcctgaccattttttggatgatctccggttaaataatccttggcctgaactcaagagatttgcaatgacattgacttgaatgtgcaagatcctgtagctcataaacacataccatatgttgtcattcttgtcaagatggctgatgagtgggccaaaagccatgg

SEQ ID NO: 107336 - DNA, 277 bp, Glycine max
caaggcagatagcaagctcatcctagagttttaaaaatggcagcagcctcctccatggctctctcttccccatccttggctggcaaggccgtgaagctgggcccatcagcccccgaagtcgggagggtcagcatgaggaagaccgtcaccaagcaggcctcctccggaagcccatggtacggcccgaccgcgtcaagtacttgggcccattctctggcgagcccccgtcctacctcactggcgagttcccatgtgactacggctgggacactgctgg

SEQ ID NO: 107337 - DNA, 280 bp, Glycine max
gagtttggaaaacagaaggctaagagagaatatggagagtagtgagggaattaggtgtaaggtatgcgtgaccggcggtgctagttacataggctcttgccttgtcaagaagcttctgcaaaagggctacaccgtccactccaccctcagaaactttaaggacgagtcaaagataggccttctggagggttgcctcatgctaatgatgagagactggtgttatttgaagcagacatatataaaccagacgagtacgagccagcaattcaaggctgtgaga

SEQ ID NO: 107338 - DNA, 278 bp, Glycine max
caccattgactagtatcattaagatggctaattcctacttatccttgcttgtcttgatccttgtagctctgctcctcacccctcaagggcttgctgatgaatctgattcttactataagccaccagtttacaagataccaccagtgtacaagcccaagcccaagccacccattcacaagcccagccacccgtttacaagcccaagccacccgtttacaagaaacccccttatggtaagtacccaccagttcaagacaacgatcacttctataccatgc

SEQ ID NO: 107339 - DNA, 278 bp, Glycine max
ctcaacttgaactatccatacatagccactttacactcactcttgtgttgttgccttcatggccaagccagtgtccattgaggtatggaacccaagtggcaaatacagagttgttagcaccaaaccaatgcctggaactcgttggatcaatcttctcgttcaaaatgatgttcgccttgaaatatgtaccgagaagaaaacgattctgtcagttgaagacatcattgctttgattggtgataagtgtgatggagttattggacagctgactgaagact

SEQ ID NO: 107340 - DNA, 274 bp, Glycine max
gctcggtaatcggctcgatctgccgccgtctccactgtcggagctgtcaacagagctcttttgaacctgaatggttctggagctggagcttcagctcccagttcagccttctttgggaccagcttgaagaaggttattgcctcaagggtccccaacagcaaggtttccggtcgaagcttcaagattgttgctgtagaagagagaaagagattgaagagacccagcagaccgacaaggacagatggaatggtcttgcctatgatatctcatacga

SEQ ID NO: 107341 - DNA, 287 bp, Glycine max
aattcctaattgtttaaacctaattctcatttcttcatcgttcgattcttctcctcctaaagatgcagatcttcgtgaaaactttgaccggtaagaccatcacccttgaggtggagtcctccgacaccatcgataacgtgaaagctaagattcaagacaaggaagggatcccacctgaccagcaggacttatctttgcgggtaaacagcttgaggatggtcgaacccttgccgactacaacatccaaaaggaatccactctgcacctcgtacttcgcctcagggggg

SEQ ID NO: 107342 - DNA, 280 bp, Glycine max
attttgataccgcgattcaacattacacaaaggctttggagttggatgatgaggatatttcgtatctcactaaccgcgatgctgtctacttagacatcggcgagtatgaggaatgcgtagaagaggatgacgaggatgacgatgaagatgaagaccatgacgaaggactagaaggtgatgcatctgtaggtcgaagcagaccagaagtgaaaagaagagtcgcaaggcaatgctgaaacttggaatgaaacctgtcacaggtgtcagacgatcgacagtc

SEQ ID NO: 107343 - DNA, 90 bp, Glycine max
ccttcatggaatgatgagaagcagctccaagacatgtatcttagcagaaagtcttttgcttgtgattctgaagcccctggtgctggcatg

SEQ ID NO: 107344 - DNA, 282 bp, Glycine max
  unsure (1)..(282): unsure at all n locations
ggaacgaccctattttcacttcttcaggtgaagctggatcattcctccgcggaatcnatgtgaaccgtttaccttctgtggttnattncnaagaggaancangtntttcatncccaaacagcacggtttctagcgtcantngaaancgcagcannagggaaaccaatngagaagaaaacgcacanacanagcttgttccagaggcatcatcancgacgaannagatgctgaaacctctagaaagaaacttagactctccaaagntcagtcaattgtccnggt

SEQ ID NO: 107345 - DNA, 279 bp, Glycine max
  unsure (1)..(279): unsure at all n locations
gaggaacttgctaaagaaaacaacaagagtgcttcttctggcaagggcataatcaccttgagtgtcaccaagaccaagcctgagactggtgaggttattggggtcttngagagtgttcagccttctgatactgatttgggggctaaagctcctaaggatgttaagatccaaggcatctggttgctcagcttgactcatagaccctttttcttaatgctgtatttctactttcttgtaactcccccagttggcgaagactcagagcgttatcacgtgtgt

SEQ ID NO: 107346 - DNA, 273 bp, Glycine max
gtacagtttttgagggacacattatgacacatctgtccaccttcaggagaattcatggaatttttgcctcataaacctgcaaaatatcatgaagttgttgcgaaatactcacaagaaattagtacactaggactcaaaattttggagctgttatgtgaaggatgaggacttgaccataatactgttgtggtgaacttagtgatagtccagtattgctagctcatcactacccgccttgcccagaaccaactttaacttttggagctcccaagc

SEQ ID NO: 107347 - DNA, 278 bp, Glycine max
acaaaggttgctgtaggagataagattgcagtagtgctaagtgctaacacctgcagtgaacaatggcctctgcatcagcatctctgctcaagtcttcacttgttcttgacaagtctgagtgggtgaagggacaaacccttcgccaaccttctgcatcagttgtgagatgcaaccccaccaccccatcaggcctcaccatcagagctggttcctatgctgatgagctcgttaagaccgcgaaaacagtggcttcaccagggaggggtattttggccatg

SEQ ID NO: 107348 - DNA, 276 bp, Glycine max
cgttatacatcaggtcaccaggatactacgatggacgctactggaccatgttcaagctgcctatgtttggttgcactgatgcttctcaggtgttgaaggagcttcaagaggctaagactgcatatcccaacggcttcatccgtatcatcggattcgacaacgttcgccaagtgcagtgctcagcttcatcgcctacaagcccccaggcttctaagtgtgaaaaatttgcaaagcatttgtagccgccatcccactttgtttgtttgtacttaaact

SEQ ID NO: 107349 - DNA, 273 bp, Glycine max
ggcagatagcaagctcatcctagagttttaaaaatggcagcagcctcctccatggctctctcttccccatccttggctggcaaggccgtgaagctgggcccatcagcccccgaagtcgggagggtcagcatgaggtagaccgtcaccaagcaggcctcctccggtagcccatggtaggcccagaccgcgtcaagtacttgggcccattctctggcgagcccccgtcctacctcactggcgagttcccaggtgactacggctgggacactgctg

SEQ ID NO: 107350 - DNA, 268 bp, Glycine max
gtaaatgttactgctatctttgcattacatgtgatgcctgacattccactaggtgaagcagcctctaggtctgatcctctggatccccaggttgtgacagttgctaagttccaaggaggtggtgcattcaatgttattccagattatgtcacaattggtggcacctttcgagcttttctagagataaattggaccaacttaaacagcgcattaagcaggttgtcattggtcaagctgctgtgcagaggtgtaatgcaactgtcaactt

SEQ ID NO: 107351 - DNA, 249 bp, Glycine max
aattaatagcttcatctgttgttctgtcttcactgtcagtgtctcttcatgatcatacccacggtgcatctcatttggaacttgagcatgaataagagagtaatttgagaatggctaatctcattggctttaatctttaaactaaacctgaaagcagagaaatgtatcaaggtcatcacttcttgctgaactggcatccaagggtgtgatgtcttgtgttactcaggaagtgaaggacatttaccatct

SEQ ID NO: 107352 - DNA, 275 bp, Glycine max
cagcttcctggtatgtataacaaggaagagaatccccgtgtgcccatcatcgtcaccggtaacgatttctccacactctatgcgcttctcacccgtgatgggcgtatggagaagttctactgggcaccaactagggatgaccgcattggtgtctgcactggaatgtttcgcaccgattaattcctgaacaggacgttgtcaagattgtcgacaccttccctggccaatccattgattactttggtgcactgagggccagagtatatgatgacgaa

SEQ ID NO: 107353 - DNA, 271 bp, Glycine max
tcaaaacactcataacacaaagcacaaagcaaagctcatccttgagttaaaaaatggcagcagcttcttccatggctctctcatccccatccttggctggcaaggccgtgaagctgggcccatcagccccagaagtgggaagggtgagcatgaggaagaccgtcaccaagcagtctcctcaggaagcccatggtacggcccagaccgagtcaagtacttgggcccattctctggcgagcccccgtcctacctaaccggtgagttcccaggt

SEQ ID NO: 107354 - DNA, 265 bp, Glycine max
agataatccccgtgtgcccatcatcgtcaccggtaacgatttctccacactctatgcgcctctcatccgtgatgggcgtatggagaagttctactgggcacttacaagggatgaccgcattggtgtctgcactggaatttttcgcaccgattcaattcctgaacaggacgttgcaagattgttgacaccttccctggccaatccattgatttctttggtgcactgagggccagagtatatgatgacgaagtgaggaagtggattt

SEQ ID NO: 107355 - DNA, 261 bp, Glycine max
attgaagttaaaagccttagccttccctacaactccaaacatgaagacatcatcatccatggctgcctccgtctccattgtcggagctgtcaacagagctcttttgaacctgaatggttctggagctggagcttcagctcccagttcagccttctttgggaccagcttgaagaaggttattgcctcaagggtccccaacagcaaggtttccggtggaagcttcaagattgttgctgtagaagagaagatagagattgaaga

SEQ ID NO: 107356 - DNA, 261 bp, Glycine max
gttcacaaatctttttctaagtgtagtagaggagaggaaccgcgccaaccctctcttcttcttcttcttcaatccttttataacatttatagtttcattcttaatcgttgggaaaaatgttcatcgagatttttaaggtagagagtcctaatgtgaagtacaccgagacgagattcagtccgtgtacaactatgtaaccaccgaactttttcacgagtataggaatggcacctatcagtggattgtcaaacccaaatccgt

SEQ ID NO: 107357 - DNA, 269 bp, Glycine max
cagaaaaacaagtagttgagaactaagaagtaggaaattgcttcctcaatgatctcctccccagctgttaccaccgttaaccgtgccggtgccggcatggttgctccattcaccggcctcaaatccatggctggcttccccacgaggaagaccaacaatgacattacctcattgctagcaacggtggaagagtacaatgcatgcaggtgtggccaccaatacgcaagaagaagttcgagactctttcctacttgccagacctcgatgat

SEQ ID NO: 107358 - DNA, 273 bp, Glycine max
tcggaattctgctctagttatgcttctggggctacccgctcctgcaatttgctattgcgattggagtggtaggccattctcgcaacgtttgagttcagcagatccataattttgcagaaaccaggttaaggagaatgaagattacggaacgaattgccaatttggctttagcaggtttatccttagcgccgcttgtcgtgaaagtatatccgtatttgaatgtcatattgactgcttgcctcactgtgtttgtgggatgtcaccgctccgtta

SEQ ID NO: 107359 - DNA, 249 bp, Glycine max
gggacaaggacttcgccaacgttctgctgcatcagttgtgagatgcaaccccaccaccccatcaggcctcaccatcagagctggttcctatgctgatgagctcgttaagaccgcgaaaacagtggcttcaccagggaggggtattttggccatggatgagtccaatgctacctgtgggaagcgtttggcttcaattgggctagagaacactgaagctaaccgccaggcataccgtaccctccttgtgac

SEQ ID NO: 107360 - DNA, 250 bp, Glycine max
ggtgtacaaacaaacgtggagatcttcactaccatcatcagtggatggtgtgccgcaggaaacatggatcgtgcatttagcctttgtgagaaaatgcatgaaatgggaacttccccaaatttgaaaacttatgaaacattaatatggggatatggagaagcaaaacaaccatggaaagcagaagagatacttagtactatggaagagagaggtgttgtccctgaaatgtcaactatgcaactggtggctg

SEQ ID NO: 107361 - DNA, 188 bp, Glycine max
cttttgataaagaagttcaaataaagacttgttcaaaactgtagaaggaagccaattggtgatgaaggcagaagtgtagacacaatacccccaaaatgagataggcacatgtgattggaattgtaaagatatggccactttaaggagatgatgatgttttctttcagctaaggagttttgctgaggtc

SEQ ID NO: 107362 - DNA, 258 bp, Glycine max
gtgaaaatgttcagaaaccagtacgacacggacgtgaccacatggagccctgcggggaggctgttccaggtggagtacgctatggaggcggtgaagcagggctcggcggcgatagggctccgatcgaagacccacgtggtcctcgcatgcgtcaacaaggccaacaccgaactctcctcgcaccagaagaagatcttcaaggtcgacaatcacatcggcgtcgccatcgctggcctcaccgccgatggccgcgtcctc

SEQ ID NO: 107363 - DNA, 258 bp, Glycine max
tgcttgacaagcaaccaatgaagattttcaaagaagaatcagcgagattctatgcggcagaggttgtcattggtttggaatatctccactgtttaggtataatttaccgtgacttaaagcctgaaaatatcttacttcagaaggatggtcatgttgtattagctgattttgatctatcatatatgacatcttgtaaaccacaggttgtgaagcaagcgatacctggtaaaagaagatcacgaagtgaaccaccaccaa

SEQ ID NO: 107364 - DNA, 257 bp, Glycine max
tgcaattgaagttaaaagccttagccttccctacaactccaaacaggaagacatcatcatccatggctgcctccgtctccactgtcggagctgtcaacagagctcttttgaacctgaatggttctggagctggagcttcagctcccagttcagccttctttgggaccagcttgaagaaggttattgcctcaagggtccccaacagcaaggtttccggtggaagcttcaagattgttgctgtagaagagaagaaagag

SEQ ID NO: 107365 - DNA, 259 bp, Glycine max
ctacaacagatgttgcgcaaagggcattgaaagccggactgcagcaatcccaaataaagatttttggtctacctgtccgaccttcctttgttaagcctgtccggccaaaggatgaactaaggagagaattagggatggatgaggatcttcctgctgtattattgatggggggaggtgaaggtatggggcccattgaggctactgctcgggcacttggagattcattatacgacgagaatattggggctcctgtaggtca

SEQ ID NO: 107366 - DNA, 186 bp, Glycine max
gaaagagagagagagagagacacaagagatatacactgccaagaagaagaacatgaaaattcagtgcgatgtgtgttagaaagccccggcaaccgtgatttgctgcgcagatgaggcagctttgtgtgccaaatgtgacgttgaagttcatgctgcaaacaagcttgcaagcaagcaccggaggct

SEQ ID NO: 107367 - DNA, 253 bp, Glycine max
ttgcaattgaagttaaaagccttagccttccctacaactccaaacaggaagacatcatcatccatggctgcctccgtctccactgtcggagctgtcaacagagctcttttgaacctgaatggttctggagctggagcttcagctcccagttcagccttctttgggaccagcttgaagaaggttattgcctcaagggtccccaacagcaaggtttacggtggaagcttcaagattgttgctgtagaagagaaga

SEQ ID NO: 107368 - DNA, 250 bp, Glycine max
attttgataccgcgattcaacattacacaaaggctttggagttggatgatgaggatatttcgtatctcactaaccgcgctgctgtctacttggaaatgggaaagtatgaggaatgcataaaagattgtgacaaggctgttgaaagaggaagagaactaagatcagattttaagatgatagcaagagctttgacaaggaaaggaaatgccttggtgaaattggcgaagtgctcaaaggattatgagcctgc

SEQ ID NO: 107369 - DNA, 251 bp, Glycine max
cctggcggcttccaccgcagctatgtcagaaatgcttggaaaccccgtgagcctgagaggcgccaccaggtctgctccatcaccgtctacacctgttactttcaagaccgttgcgcttttctccaagaagaaggcagcaccacctcctccaaagaaaaagcctgctgctgtatcccccgccaatgaggaactcgccaagtggtatgagcgtgacagaaggatcttcttgcctgagggtctcttggaccgat

SEQ ID NO: 107370 - DNA, 251 bp, Glycine max
catcaacaagcagttctgaaaatggagatcaccaatgtcagtgagtatgaggctattgcaaagcagaagttgccaaagatggcgtttgactactacgcatctggtgcagaggaccagtggactctgcaagagaacagaaatgccttttccagaattttgtttcggccacgtattcttattgatgtgagcaagatagacttgacaactactgtcctaggcttcaaaatatccatgccaatcatgattgcccc

SEQ ID NO: 107371 - DNA, 255 bp, Glycine max
gttggtgagaataatgtgttgatttttgaccttggtggtgggacatttgatgtgtctttactaatcattgacgatggtatctttgaggtgaaagccacagctggtgacacccgtcttggaggtgaggattttgataacagaatggtgaaccactttgttcgagagtttaagagaaagagcaagaaggacatgagtgggaaccccagagcacttagaaggttgaggactgcttgtgagagggccaagagaacattg

SEQ ID NO: 107372 - DNA, 253 bp, Glycine max
agctgtgtcaaaccccaagagaccatttgctgctatcgttggtgggtcaaaggtgtcttccaagattggagttattgagtccttgttggagaaagttaacgttctcttgcttggtggaggaatgatctttaccttttacaaggctcagggttattcagttggttcatctcttgtggaggaagacaagcttagccttgcaactacacttctcgaaaaggccaaggctaaaggggtttctttgttgcttccaact

SEQ ID NO: 107373 - DNA, 252 bp, Glycine max
gggccttgggctggtgaaattagtactcgggatcaaggctcattggttgcttttgaggatggaacaagtacttcttatgcaatctctagttcacaggagaggggacagatgtttattggtcctggagtggatgtttataaaggtcaaattgttggcatccatcagcgacctggggacttgtccttgaatgtttgcaagaagaaagctgcaaccaacatacgttccaacaaggaacaaacagtgattcttgat

SEQ ID NO: 107374 - DNA, 250 bp, Glycine max
ctcgcttgtgctgccttcgtttgcgtttttatcacagaggaattaacatatatatagcaagcatggcagtcacactctacgaccttagctcttcctctgggttgaagaaacttgatgagtaccttctcccacgcagttacatcaccgggtaccaagctacaaaggatgatcttactgtttatgcagctttgccaactgctccatcagatgaatatggaaatgtttccaggtggtacaagcacattgatgc

SEQ ID NO: 107375 - DNA, 255 bp, Glycine max
gagagggagtcagagaaaccctaggtaagaagaaaagatgccggctggtcatggtttgagatcccgcaccagagattccttctctcgtcctttcaggaagaagggaaccatcgccctcaccacatacctgagaacctaccacgtcggcgactatgttgacgtcaaggttaacggtgccgttcataagggaatgccccacaaattctaccatggccgcaccggacgcgtctggaatgtcaccaaacgtgctgttgg

SEQ ID NO: 107376 - DNA, 258 bp, Glycine max
ctacaacagatgttgcgcaaagggcattgaaagccggactgcagacaatcccaaataaagatttttggtctacctgtccgaccttcctttgttaagcctgtccggccaaaggatgaactaaggagagaattagggatggatgaggatcttcctgctgtattattgatggggggaggtgaaggtatggggcccattgaggctactgctcgggcacttggagattcattatacgacgagaatattggggctcctgtaggt

SEQ ID NO: 107377 - DNA, 241 bp, Glycine max
ggtgaacaagacattgtcactaaaaggaggatactatgactttgttaagggatcttttgagctctggggccttcagtttggccttgcatcctctttctccgtatgaacatcaaccattatcaatgacctcatcttggttccctaagttaaagatgtggccaccattctgcattggaagctataggggccatgcttagaggtcgtgtgtatctgcaatgaagaggcctagccaccttcatca

SEQ ID NO: 107378 - DNA, 244 bp, Glycine max
cagaatgcgattcccggccccaacggtggtggtgctgctggaaatcagttcgtgacgacgtcgctttacgtcggagatctcgacccgaacgtcacggacgcccagctgtatgatttgttcaaccaattggggcaagtcgtatccgttacggtttgcagggacttgaccagtaggagatcgctcggttatggttatgtcaactgtagcaacccgcaagatgctgccagagctttggatgttctga

SEQ ID NO: 107379 - DNA, 245 bp, Glycine max
tcgtgcgttacaagtatgctgatgaggctcagaaggccgttgagaggctcgacgggagaatggttgatggtcgcgaaataacggtccagtttgcgaaatatgggcctaatgctgaaaggattttttcaaattgcagtcacaaaggaaggattattgaaacatccccaagatcaaggcgatcaaggagccgtagcccaaggggaaggcatcgtgatgattacagagacagagattataggagaaga

SEQ ID NO: 107380 - DNA, 249 bp, Glycine max
ttgatattagtcacaggtaccatcctgatatgcctgcctgggaatccaaggatagccttgggcagtttttgtggcttacaagaagcatggccaatggttctctggctaacttctcccaattcaagctccccgctcacagcggcacccatgtcgatgctcccggacatgttttcgatcactatttccattctggctttgatgtcgactctctcgatttactactccttaatggccctgcactattagttg

SEQ ID NO: 107381 - DNA, 250 bp, Glycine max
ccaagatttgaaaaagctatttgaagcctggtatgaaaaacggcaaatgagaaagatctattccccacttctggaaggactgctggcactatacctaggtttcgagtggatccaaaatggttacgtgacagactgataatattcttgctcccattatcacacatggcatatattccactgtgatattgggacatggcctttggaagataaatgaccaccggcgtagactacgtcaaagaatcgaacagct

SEQ ID NO: 107382 - DNA, 256 bp, Glycine max
ctcgagccgcgttgtcttctcacttcgtcaaaaccaaccaaagcactccccaattctcaagccaaccatgtcgtccttcaagagcaagtaccaagatgaactcattgccaatgctgcttacattggcaccccagggaagggtatccttgctgctgatgagtcagctggtacaattggcaagcgaggggccagcattaatgtcgagaatgttgaagcagataggcgtgctctgcgtgaactcctattcaccacacct

SEQ ID NO: 107383 - DNA, 254 bp, Glycine max
cctaagaaaagccaaaaggttctcagtcctcactcgccttctcaaaaccacacaactcataaaccaactcaactcacagctcgtaacttcaagctcatgagggttaaccctatttgcacccgaagacagtgccttctccaaactcaaagcagggttcctcaactccctcactgatagacagaaggtggagctcttacagttccacactctctcttccgtcatttccatctcaaactttgataccctcacgaacc

SEQ ID NO: 107384 - DNA, 255 bp, Glycine max
agtggggtttgaggaaactgagttaaggcttggactgcctggaaacggaggcactgaagaagtgctcatcaggaagaggggtttctctgagactgaaactggtcatgaagatgagtctgccaccactgtggatttgatgcttaatctttcttctaaggaggccgcaaccactgctgctgctgctgcagatccaactgataagcacaagactttgcctaaggagaagacccttctgccagcagatcctgctaagcc

SEQ ID NO: 107385 - DNA, 251 bp, Glycine max
tgtaaatgaaggggactacactcatcagatctctaacattataagcaacgcttcctgcaccacaaactgtcttgctccctttgtgaagatcctggatgaagagtttggaattgtgaagggaaccatgacaaccacacattcctacacaggagaccagaggcttttggatgcttcacaccgtgacttgagaagagccagggctgcagcactgaacattgtcccaaccagcactggagctgccaaggctgtgt

SEQ ID NO: 107386 - DNA, 248 bp, Glycine max
tggctgcctcactacaagctgcagctaccttcatgcaacccaccaaggttggcatagcctctcgcaacctcaaatctacacaatgcatttctaaggcttttggcttggaacctgctgcagctaaactcacttgctcccttcagcctgatctcaaagaatttgctcaaaaatgtgtcgacgctatcaaaatttcaggattcgcccttgccacctctgctctcgttgtttctggagcaagtgcagaaggt

SEQ ID NO: 107387 - DNA, 256 bp, Glycine max
gggactgaaataaaagtatggcatggaaaagttgaaggcctctctgtctactttttggagcctcaaaatggattctttcaggttggctgtgtatatggtcgtgggaatgatggagagagatttggttttttttgtcatgccgctctcgagtttctactccaaagtggatttcatcctgatatcatccactgccatgattggtcaagtgcatttagtgcttggctatttaaagacaactatgcacattatggtctta

SEQ ID NO: 107388 - DNA, 250 bp, Glycine max
ttgatattagtcacaggtaccatcctgatatgcctgactgggaatccaaggatagccttgggcagtttttgtggcttacgagaagcatggccaatggttctctggctaacttctcccaattcaagctccccgctcacagcggcacccatgtcgatgctcccgggacatgttttcgatcactatttccattctggctttgatgtcgactctctcgatttactactccttaatggccctgcactattagttg

SEQ ID NO: 107389 - DNA, 247 bp, Glycine max
tcaaaaacaaagaaaaaaaaaaacccttagccaatacaaccatcatggccacctctgctattcagcaatcagcattcactggtcaaactgctctgaagcagctcaatgagttcgtccgcaagaccggtggcgccggcaaaggtcgcactaacatgcgccgcaccgtcaagagtgctcctcagagcatttggtatggccctgaccgtcccaagtacttgggtccattctcggagcagattcgatcata

SEQ ID NO: 107390 - DNA, 250 bp, Glycine max
ctgcaatagagaaagaggcagatagaaaaaaagagcgacttttgagttcaaaagatgactaacttcccattgatcaacttggagaagctcagtggtgaggaaagaaacgataccatggaaaaaattaaagatgcttgtgaaaactggggattctttgagctggtgaatcatggcattcctcatgacatattggacactgtggagaggttgaccaaagagcactacaggaaatgcatggaagagaggttca

SEQ ID NO: 107391 - DNA, 253 bp, Glycine max
tctcaaacaagggaaatagcactagcacttcagggtagtggggtaaggttcttgtgggctatgcgttctcccccaacctcagacaatgcagacagaaccttaccagaaggtttcttggaatggatggaggaaggtaaaggaatggtatgtggatgggcaccccaagtggaggttttggcacacaaagccattggggggttcgtgtctcatagtggatggaactctattttggaaagcttgtggtttggggtac

SEQ ID NO: 107392 - DNA, 261 bp, Glycine max
  unsure (1)..(261): unsure at all n locations
tgcaattgacgttgaagtcttgcccttctctcttcaactccaaacacaagacattacaatccatggctgnctccgtctccactgtcggagctgtccacagagctcttttgaacctgaatgggtctggacctgggccttcagctcccagttcatccttctttgggagcagcttgaagaaggttattggctcaatggtccccaacacaaagattttctctggaagcttcagattgttgctgtagaagagaagaaagagattga

SEQ ID NO: 107393 - DNA, 278 bp, Glycine max
gattgtttgttgttgtaactcgttcttcttcttttgttgttctctgtttgtgtttgtcttttctctcacctgaaaatgtcttgctgcggtggtaactgtggttgcggaagctcctgcaagtgcggcaacggctgcggaggctgcaagatgtacccagacttgagctacactgagtcaaccaccaccgagaccttggtcatgggagtggcacctgttaaggctcaatttgagggtgctgaaatgggtgtgcccgctgagaacgatggctacaaatgtgg

SEQ ID NO: 107394 - DNA, 274 bp, Glycine max
tgcttctttaatggctttaggcacatttattgatcaaggtgaagcccctgtcttttatttccagaaataccctgaagatcatcccgtgtttggattttttacttggagatgggttctcacccttggttttgatcacatgtttacatcccctatatttcttggagtgttggctctccttggtgcatccctcatggcctgcacttacacaactcaactccccctcatcagggtttcaagaagatggtcatttttgcactctgctgaggccatacgt

SEQ ID NO: 107395 - DNA, 275 bp, Glycine max
  unsure (1)..(275): unsure at all n locations
aggttgcataactgaacaaacaaagcaaccctatgtcgaaggtggtttgtgtcaccggagccagtggcgcacttggatcatnggtggccctcctcctcctccagcgtggttatacggtccatgccaccgtccaagacatcaaggatgaaaatgagacgaaacatttggaggaaatggaaggagcaaagagtcgtctccatttttttgaaatggatcttcttgacatcgactccattgccgctgccataaagggttgctccggcgtaatccacctc

SEQ ID NO: 107396 - DNA, 275 bp, Glycine max
caaaaaggtaaacttctgcaacaaccatggttgcaatggcagcagcaacagcatcctcccagttgattttctcaaagcctcgttcaccctcgcgtctctgccccttccacactatgtgtctttgacaccaaacaagtgctgtcaagttcaagtggcaggagaaggcatgtggggggttctggagttaggtgcatggcggtgggagaagctgcaaccactgagactaagaagagaagtggatatgagcttcaacactcactaactggttgctgaag

SEQ ID NO: 107397 - DNA, 277 bp, Glycine max
gcttggcggggataagattaaagattcaacaatggcctctgcttctgatactcttctcaagtcatctcctgttcttgacaagtgcgagtgggtcaaaggccagacccttcgccaacctctcgtgagatgtaacccttcctcagcatcagctctcaccatcaaagctgcttcctatgctgacgagctcgtcaaaaccgccaaaacagtggcctcaccggggcgtggtattttggcgatggatgagtcaaatgcaacctgcgggaagcgtttggcatct

SEQ ID NO: 107398 - DNA, 280 bp, Glycine max
gctttgtatggtgaacttgccaaaggccagagccccaagttcatggtgtttgcttgctcagactcaagggtgtgcccatctcatgtgctagatttccaaccaggagaggcctttgtggtcagaaatgttgccaacattgtcccaccatatgaccagtcaaaatacgctggaactggggctgcagttgagtatgctgttttgcatcttaaggtgtcggagattgtggtcattggacacagtgcttgtggtggtattaaggggcttctgtctttcccatatg

SEQ ID NO: 107399 - DNA, 277 bp, Glycine max
gaaccgtcctctgcttggtcttcacgagaatgtaccattagctgttgctcatccccaattcctcccgttcaaatggccacccaagtccaaactcccctccgtcgtcggaattcgatgctcctcctcccctttcaacgacaaaaccctcatttccatcacacctaacacttcccacctcaatcccaacctcttggcttgtcgctttcacgcttcccagtttggagaacaggagagcaacaaatacgtggaagcctatgctgtaggacgaaatattcgt

SEQ ID NO: 107400 - DNA, 205 bp, Glycine max
agagaattttcaaacatataatgggcataatgccaaatagggggcagagtttcaagttgaattgggcaacttttagtgctggtgatatgtcgcgccacgacgattctccagattacaccatatttgttggtgacttggctgcagatgttactgattatcttattcaggagacatttagggctcgttataactcggtgaagggtgc

SEQ ID NO: 107401 - DNA, 273 bp, Glycine max
agaaaaaaaagattctaaagaaatataactaatattctttagaataatcaaaaagaatattaaattcaaataaattttagatagaaaaaagacttaaaaaggaggatttgaaatgcgagatctaaaaacatatctttccgtggcaccagtagtaagtactctatggttcggggctttggcgggtctctagatagagctcaatcgtttttttccagatgcattgatattcccttttttttcattctagttattgacactgaaaggggtgaagaa

SEQ ID NO: 107402 - DNA, 246 bp, Glycine max
tgaaggttttggtggggaggcttttgcaagattggcaatgatatttcccaatttttgggcccacttatattgaatcagctgttacagtctatgcaaaatggtgatccatcctggactggctatgcatatgccttctcaatatttgttggagtggtctttggggtgttatgtgaagctcaatattttcagaatgtcatgcgtgttggttaccggttaagatcaacattggtggctgctgtatttcgc

SEQ ID NO: 107403 - DNA, 265 bp, Glycine max
acggtcacacgcagttgtattgtagaactgaacaagggtttctctttctctttctctgtctgcttcttcactttctctcgtttcaatcgaaaaaaatcatgggcagaaaattcttcgtcggtggcaactggaaatgcaatgggaccactgaggaggtgaagaagattgttactactttaaatgaagctaaagtccctggagaagatgttgtagaagttgttgtgagccctccttttgtgttccttccttttgtaaaaagtttgct

SEQ ID NO: 107404 - DNA, 273 bp, Glycine max
atttggtccgcggggatctgtacgatcatgagaagttggtgaaagctatcaagcaagtagatgtcgtcatatccacgctgggtcacctgcagcttgccgatcagctcaagatcatcgctgccattaaggaagccggtaatgttaagaggtttttcccttcggaattcggtaacgacgtggatcgtgtccatgccgtggaaccagcaaaatctgcattagctatcaaagcccaaattcgacgcagcattgaagccgaagcatcccctatacgta

SEQ ID NO: 107405 - DNA, 278 bp, Glycine max
tcggacttcggctcgatgaagagcaaaatcgaataaaaaaagaagctttaaaagctagtcttatgaaggaggaacaatttaaaacatctcatggggctgataataatactagtgattcaatggtcattgattctggcaataatcatgtaccacctgaagtgtctggtcccagaggcggacgataccgggacatatttattgatggatttgttccccctttgacaagtgttgctccaatgtttccctgttatgagaatacatcagagtgggatgatttt

SEQ ID NO: 107406 - DNA, 248 bp, Glycine max
aagaagatcaagactgacaagccttatggaattaatggtggcatggctttgagggaaggagttgatgcatctggcaggaaaggaaagggaaagggcgtttaccagtttgtagacaaatacggtgctaatgtcgatggttacagtcctatctacgacaccaaggactggtctccaaccggtgatgtctacgctggcggtacgactggcttggctatctgggctgtgactctacttggtcttcttgctgg

SEQ ID NO: 107407 - DNA, 282 bp, Glycine max
aagggcctcacatttatctgaagagggaagatctcaatcacaccggggctcacaaaattaacaatgctgttgctcaagctttgcttgctaagaggttgggcaaaaaacgcattattgctgaaactggagcgggtcagcatggagttgccactgctactgtatgtgctcgatttggtttagaatgcattatttatatgggcgcacaggatatggaaaggcaggctctcaatgttttcagaatgcgtcttcttggtgctgaggtgagacccgtccattctggga

SEQ ID NO: 107408 - DNA, 114 bp, Glycine max
ctcgagccgttttggattacctgaaagaactaatccttttcttgcaatattatgttgtgtgtacccataactccatgaatgcaactcgttgacctatctcaataaatgccgttt

SEQ ID NO: 107409 - DNA, 158 bp, Glycine max
gaacaagtagttgagaactaagcaggagaagcaaatggcttcctcaatgatctcttccccagctgttaccactgtcaaccgtgccggtgccggcatggtagctccattcactggcctcaagtccatggctggcttccccaccagaaagacgcaacaat

SEQ ID NO: 107410 - DNA, 270 bp, Glycine max
gggagttggtttgcctgcactattgggaagtggcaaagcttatgctgatgaacaaggggtttcatcctccagaatgtcttactccaggtttctggagtatttggacaaggacagagttaaaaaagtggatctttatgacaatgtaaacactgctgttgttgatgctgattcgcccgagttggggaaccggtcacagtatgttagagttcaactccctggacttaaccaagagctccttcagaaattcagggaaaagaatattgactttgc

SEQ ID NO: 107411 - DNA, 273 bp, Glycine max
gacggagtctgaagtcattgaaggctctctcccaccgtccctcgacggcgcctacatccgaaacggccccaacccccagttcctcccgcgtgggccctaacacctcttcgacggcgacggcatgctccacgcgcttcgcatcttccatggcaaataacccacgctctgcagccgctacgttaaaacctacaaatacaccatggaaaacgaccacggtttccctctcatccccaacgtgttctccggcttcaactccctcgtggcctccgcggc

SEQ ID NO: 107412 - DNA, 278 bp, Glycine max
gaagattcctggattgattgtgaagatggctgagtcggacaacgacttcgggaggggcgcagaacgcgggaaacagtggaaacttgagcgagttgtcgcctcgggaacaggaccggtttctccccatagcgaacgtgagcaggatcatgaagaaggccttgccggcgaacgcgaagatctcgaaggacgcgaaggagacggtgcaggaatgcgtgtcggagttcatcagttcataacgggtgaggcgtcggacaagtgccagagggagaacgcgccat

SEQ ID NO: 107413 - DNA, 251 bp, Glycine max
caaggtgatagcagcaactaaccgtgcagatattcttgatcctgccctgatgcgttctggtcgtttggatcgtaaaattgagtttccacacccaagtgaagaagcaagagctcgaattctacagattcattcaaggaagatgaatgttcacccagatgtcaactttgaagaacttgcccggtccacagatgatttcaatggcgcacaactgaaggctgtctgtgttgaggctggcatgttggctctacgcc

SEQ ID NO: 107414 - DNA, 258 bp, Glycine max
tgcaactgttggggagaagcccgtccgcgagcttatagctgatgatgcctggttgaatggtgaattcattactacagttcaacaacgtggtgctgcaattatcaaagctagaaagctttcaagtgcactatcagctgctagtgctgcttgtgaccatattagagattgggttcttggaactcctcagggcacctgggtgtcaatgggagtatattgtgatggtacctacaatgctccagctggactgatctattcatt

SEQ ID NO: 107415 - DNA, 269 bp, Glycine max
aacggaactatccttgtatttgaccttggaggcggtacctttgatgtctccgtgctcgaggttggcgatggagtctttgaggtcctctctacttcaggtgatacccacttgggtggtgatgactttgataagagaattgttgattggctggcttctaacttcaagagggatgaaggcatagaccttttgagagataaacaagctcttcagcgtctcactgagacagccgagaaagcaaagatggagctctcaacattgactcaaactaa

SEQ ID NO: 107416 - DNA, 271 bp, Glycine max
atttctctctcccttagctagtttttaccaatggctgctgcggttagtgctgcagtctcttttccatccaccaagtctacctctctcccaagcaggacctccatcattaccccagagagagttgtattcaagaaggcttcattgcaatacagagaggtttgtagcagtggaagggaagtttccatcagagctcaagtcaccactgaggctccagccaaggttgaaaaagagtccaagaaacaggatgaaggtgtggttgtgaacaagttca

SEQ ID NO: 107417 - DNA, 262 bp, Glycine max
agaacttaagaatggacgtcttgctttgttggcttttgtgggattctgtgttcaacaatcagcttatcccggcactggacctttggagaacttggctgctcacttggctgacccatggcacaacaacattggaaacatcattattccacaatcgattttgccttgaaaaaaaaaaatcaaatatttgtttcaatagctacctgtataattccatgtaacattttgtaacgaatcgggttgctacgttggtatctctgtgttg

SEQ ID NO: 107418 - DNA, 272 bp, Glycine max
  unsure (1)..(272): unsure at all n locations
caaggtgatagcagcaactaaccgtgcagatattcttgatnctgccctgatgcgttctggtcgtttggatcgtaaaattgagtttccacacccaagtgaagaagcaagagctcgaattctacagattcattcaaggaagatgaatgttcacccagatgtcaactttnncagaacttgcccggtccacagatgatttcaatggcgcacaactgaaggctgtctgtgttgaggctggcatgttggctctacgccgtgatgcaactgaggtgaac

SEQ ID NO: 107419 - DNA, 271 bp, Glycine max
ggaatatttcattataaattagaacataataaccctctcaattctgtaataaatcaatggacaaattggttaaaggatcattattatcaatatgacttatctaaaagtagatggtccagattagtaccacaaaaatggagaaatagaataactgaatatcgtatagctcaaaataaagatttaaccaaatgcaattcatatgaaaaaagccaattaattctttacaaagaacaacaagtaaacgcattagaaggaaaaattagagaacaat

SEQ ID NO: 107420 - DNA, 234 bp, Glycine max
gatgtttgctaatttttcagctttgtgaagttgatttgagtgagatgttgcctcctgaagcattggccccatttatagatgaaatcaagaagcgtgcaaatcagaggaagcaacttgcaaaaaaggaaaagaaggaaaaaataaaggctgaagctactacgtgctactctcttcccatatcattaagtcatcagtttacttctcgcgatgatcctccaacattctccatggatg

SEQ ID NO: 107421 - DNA, 271 bp, Glycine max
gccttttatttggtaggtaatatcgatgaagctactgcgaaagctacgaacttagaaatggcttgttcaggaagaccatctaattctccagaaagaatcaatttaaaccctctaattgtttctttctggagaattagatggtcttcctgaacaagccttttatctggtaggtaatatcgatgaagctactgcgaaagctacgaacttgagaatgggggagcagtttgaagaaatgactttgaatctttgtgtactgacccccaatcgaatt

SEQ ID NO: 107422 - DNA, 186 bp, Glycine max
attttggtctggagcagcttcaaatgctgtggtggttgagccggatgcttttaaggaaaatgacgtcatatatagagcccttagctccagaggtcaccatgatgacatgctccaaactgctgaattggtatgcttctgtgtgaacatgacctccatgttattattatcatttttccactaactctc

SEQ ID NO: 107423 - DNA, 263 bp, Glycine max
attggaagaacttttccaaggtcgtccatttgatatgcttcatgctgctttatcagatacagttgccaaattccctgttgatatccagccatttaaagatatgatagaaggaatgagactggatcttaagaagccaagatacaaaaactttgatgaactatatctttactgttactatgttgctgggacagttggtataatgagtgttccaatcatgggcatttcaccaaattcccaagccacaacagagagtgtatacaatg

SEQ ID NO: 107424 - DNA, 265 bp, Glycine max
gagagatagagagagagagatagacattaagaaaaaatggcagcctgcactgtctactcaacacaatctctgagctcaaattgctccatctcaaccccatcaaagacacagctgagtttcttccaccaaaagcaggtaatactctggaggaacagcaacaggggcaacagcagcagcagaagaagctatgtgataacatgtgcagcaggtgactcacagacagtggtgattggtcttgctgcagactcagggtgtgggaagagca

SEQ ID NO: 107425 - DNA, 265 bp, Glycine max
gtgttaaaagaatgcctctttctatagggggaggggctggtgcaaagaatgctattctcatgaatatgccaaatgctgttctttcaatgtggagatattttgttggagatctcgtctttgaagtttctaagatgacttctccctacattaaatgtacagtctctctcttcatagcatttggaaatttggctgatgacaccatcaattttgaggcttttccccacaagctggtgcagtttggagagattcaggaaaaagttgtatt

SEQ ID NO: 107426 - DNA, 267 bp, Glycine max
aacgaagcctcctcgttcttcttcttctgcgctttctctctccctctctagaaccgtaaccgtcgtttctttctttctctctcctcaaccagagataaagagtcaccttcttatttttctgaatctcgcggcgttgttctttctgctgctgcggctgtggttccggcggcgatgggacagcaatcgttgatctacagcttcgtcgctcgaggcaccgttatcctcgcggagtacaccgagttcaccggaaacttcaccggcgtggcg

SEQ ID NO: 107427 - DNA, 251 bp, Glycine max
attgttttgcagggaataaggtggagaaactctgtgatctctgtaacattactgttaacaagaacgctgtttttggtgatagcagtgccttggcccctggtggagtgcgaattggtaacgatcttacttctcttttatatgctacaatacaaatcttgctttactaactcaattggaaacaagatctcatttataagattataaaaatgatttccttaggctaggactatatcctctctctctctctctct

SEQ ID NO: 107428 - DNA, 268 bp, Glycine max
tgaggagttcaaaagacacagactaggcgctgcccaaaattgctctgccactcttaacggcaaccacaagctcactgatgctgttcttcctcccacgaaagactggaggaaagaaggaatagtgagtgatgttaaagatcaaggcagctgcggatcatgctggacattcagcacaactggggctttagaagcagcctatgcacaagcatttgggaagagtatctctctttctgagcagcagctagtggattgtgctggccgtttcaac

SEQ ID NO: 107429 - DNA, 215 bp, Glycine max
tcatgataatggaggccaagtatatatggatggtgccaacatgaatgctcaggtgggactcacaagcccaggttggataggagcagatgtatgccatctcaatctccacaagacattttgcatccctcatggaggaggtggccctggcatgggtcctataggtgtaaagaaacacttggcaccatttttaccatcacaccctgtgatagcaactg

SEQ ID NO: 107430 - DNA, 268 bp, Glycine max
catggcagctgcttctcctatggcaagccaactcaagtccaccttcactaaaactcttgtagctcccaagggcctctctgcctcttcaccactccacctcctgccttctaagaggcaatttagcttcactgttagggccatccaatcagaaaagccaacctatcaagtgattcaaccaatcaacggtgatcccttcattggaagccttgaaaccccagttacatccagccccttgattgcatggtacttatcgaacctccccgcatac

SEQ ID NO: 107431 - DNA, 241 bp, Glycine max
ctcactgagagaggatacatgttcaccacctctgctgagcgagaaattgtccgtgacatgaaggaaaaacttgcatatgttgccctagattatgagcaagaactcgagactgcaaaaagcagttcatcagttgagaaaagctatgagctccctgatggacaagttatcacaattggggcagagagattccgttgcccagaagttcttctccagccatctatgattggaatggacgctgctg

SEQ ID NO: 107432 - DNA, 257 bp, Glycine max
gggacaaggaaaatctttccaatgtgagcttgtctttgccaagatgggaatcaaccccatcatgatgagtgctggagagttggaaagtggaaatgcaggagagccagcaaaactgatcaggcagagataccgtgaagctgcagacatgatcaagaagggaaagatgtgcgctctcttcatcaacgatcttgatgcaggagctggtcgtcttggtggaaccacacaatacactgtgaacaaccagatggtgaatgcca

SEQ ID NO: 107433 - DNA, 140 bp, Glycine max
tatttgtgctcttgatttccgcaaggatgaatggggagttgatgtggcaataactggctctcagaaggccctttcccttcccactgggataggtattgtggttgcaggacctagagctattgaggcctcaaaacatgcta

SEQ ID NO: 107434 - DNA, 265 bp, Glycine max
aactaaggaatgaaggaaggaaggaagagtgagcgtgaaagatgccttcggcgaggctttcagggtcaccaaggctcgacgttgctattgacatgggcaatccatttctcaatctcactgttgatggtttccttgagatcggagctgtcgcagccacgcgatcagctgctgaagatacttatcatattatccgatacgggaatatctcaagtcatgatttcgagaaaacgttgaagaagatgtgtatagaaggtgtatattgggg

SEQ ID NO: 107435 - DNA, 276 bp, Glycine max
aaagagagtcacaagccaattctgaaccacacactcacttatttgtttctttcaactcactcacagagtactggcatccatggcggctataggttctctgaatgttccttgttctgcttcttcgcgttcatcgaatgtgggaagaaaaagctttccacgcagcctttcatatactgcatcacaactttgtggagacaagattcacacagattcagtttcattcgcaccaaaaatcggtcgcaatcctgtaattgttacccctaaagcagtttctga

SEQ ID NO: 107436 - DNA, 277 bp, Glycine max
cggctcgagaagtagttgagaactaagaaggagaagcaaatggcttcctcaatgatctcttccccagctgttaccactgtcaaccgtgccggtgccggcatggttgctccattcactggcctcaagtccatggctggcttccccaccaggaagaccaacaatgacattacctccattgctagcaacggtggaagagtgcaatgcatgcaggtgtggccaccagttggcaagatgaagtttgagactctttcctacctgccagaccttgatgatgcac

SEQ ID NO: 107437 - DNA, 287 bp, Glycine max
cctcattccagccacacgcttcagaagacatggcctcattgggtgggttacaaaatgtgagcggcatcaattttcttatcaaagagggtccaaaagtcaatgcaaagttcgagctgaagccgccaccatatccactgaatggtttggagccggtgatgagccagcagacacttgagtttcactgggggaagcaccacaagacttatgtggaaaatctgaaaaaacaagttgttgggacagagcttgatgggaagtcactagaagagggtattgtcacatcatacaat

SEQ ID NO: 107438 - DNA, 287 bp, Glycine max
attccatagttctcagatagggcacgtctctcgcggcctcttctctccctcgcgccgcccacactaaaaggttattgctctattattgtttgacgatggctgatgctcatgggactgataagaacattgaggtgtggaaaatcaagaaattgatcaaagctcttgaggctgccagaggaattgggcaagtatgattttcccttatcatgcctccacgtgatgaaatatctcgtgtcaccaagatgcttggtgatgagtttggaactgcatcaaacatcaaaagcagg

SEQ ID NO: 107439 - DNA, 286 bp, Glycine max
aattgaaattttaaaaatgactgggataaacttaagaattcaattattgaaattgaataagtaaacaatttaattggattggtcgaatggtatcaaaaaaatggagtactaactcccatttcttatttattattgaattaaccgatcaacttgctttgttatcgaacatttctttttgatttcaaaaattttccggaaaaaatttgaatctatttttatatgcgaatcaatcctactacttctggtcctgaggtttctgcgcttgaaaaaaaaaatctgggacgta

SEQ ID NO: 107440 - DNA, 287 bp, Glycine max
cagcctcaacaaccctaacgcgtgcagagcagagagagacgcagccatggggcgaagacccgcgaggtgttataggcaaattaagaacaaaccataccccaagtcacggttttgccgtggtgttcctgatcccaagatcaggatttacgatgttggtatgaagaagaagggtgttgatgagtttcctttctgtgtccatctggttagttgggagaaggaaaacgtttctagtgaggccctggaagctgctcgtattgcttgcaacaagtacatggccaaatttgctg

SEQ ID NO: 107441 - DNA, 283 bp, Glycine max
ggcgtttgcgaaattgcgatttcatgtcatagagaggaaaagaggagatgcggggcggacagagacgaatggcagatcagagcgagcattcgaaaacggcgttgcctccggaggaccaggaccgtcccgttcgggtatacgcggatggcatctacgatctcttccactttggccacgcccgctcccttgagcaagccaagaaatcgtttccgaatacatacttgcttgttgggtgttgcaacgatcaagtcacccacaaatacaaaggcaaactgttatgaca

SEQ ID NO: 107442 - DNA, 286 bp, Glycine max
gaggatgttgataatcttttcaaagtttttgctggtggaaagccggtccccttcactgctgcatctcttgcaccagaagttcagagtgcgattccttctggattagttaggaagagcccttatctgacacactctatctttaacatgtaccaaactgagcatgagttgcttaggtacttgtataagctacaatcaaaagatctctcactatgccacagtatgattccacttggatcttgtacaatgaagctgaatgcaacaactgaaatgatgcctgtgacatggc

SEQ ID NO: 107443 - DNA, 287 bp, Glycine max
tgaagacagcaatatctttggttaaagaaacagctaaaaccaagtttgtagaaacagtagaagcccatttccgcctcaacattgaccctaaatataacgatcaacaattaagagcaacagtaaatctgcctaagggaaccggaaaacccgttaaagtggctgttcttactcaaggtgaaaaattcgatgaagcaaaaaatgcaggagctgatttggtgggtggagaggatctgatagaacagataaaagcaggattcatggagtttgataaactaattgcttctcca

SEQ ID NO: 107444 - DNA, 285 bp, Glycine max
gatgtgccagtcatctcctgcaagctcacctgcaagggcttttgtggagaggaattataaggaactaaagacattgaacccaaaattgccaatattaattcgtgagtgcagtggaattgaacctcaattatgggcaagagatgatttgggtgttgagaaaggcatcaaattggaaggcttgtccgaagcacagatctttaaggcacttgaagatttgtcaaaagcaggacagtctttgaaagcttgatattgctgcttatgcactgtcttaagtggaataaatgc

SEQ ID NO: 107445 - DNA, 281 bp, Glycine max
gtctccgccattgctggttaccgaagatgaagggcagtgccatgcctcgatggtagcatctgcatcttcaccatccctgaaatgtttctccctaaatgaggccggatttaaagaatgcaattacctgggattgtcagattgctcttcggtggacagttctactgtcccgaatttgtctgatgagaaaaaggagaatctgaatttgaaggctactgagttgaggcttggccttccgggatcccagtcacctgaaagggagacagaacttttctcgttgagct

SEQ ID NO: 107446 - DNA, 280 bp, Glycine max
cccgtgttcccatcattgtcaccggtaacgatttctcaacactctatgcacctctcatccgtgatgggcgtatggagaagttctactgggcaccaacaagggaagaccgcattggtgtttgcaccggaattttccgcactgatggtattcctgaacaggacattgtcaagcttgttgacaccttccctggccaatccattgatttctttggtgcactgagggccagagtatatgatgatgaagtgaggaagtgatttctggtgttggtgttgacagtgtt

SEQ ID NO: 107447 - DNA, 283 bp, Glycine max
aactgggaaaggaattctagcacaattgaatctggaaactggaattcccctttatgaagcggagcctcttcttctgtttttcatcctcttcaccctgctaggagccattggaggtttaggtgaccgtggaaaatttgttgatgacgaacctactactggaggtgttattcctccaggcaaaggcttcagggaagctcttggtcttggttcaggtccttatttggattcacgaaagcgaacgagctatatgtgggaagattggctcaatggggtttcgttttct

SEQ ID NO: 107448 - DNA, 282 bp, Glycine max
caatgataagcaggtctatgtaggccattttctgcgaaagcaagatagagagaatgctctcagtaagacaaaatttaataatgtctatgtgaaaaacttatcagagtcaaccacggatgaagagttgatgaaattttttggagaatatggtaccattactagtgctgtaataatgagggacgcagacggtaaatcaaggtgttttggctttgtcattttgaaaacccagatgatgctgccaaagctgttgaaggacttaatgggaagaagttgatgataagg

SEQ ID NO: 107449 - DNA, 283 bp, Glycine max
gctgcagtgagagtagcagagcaagaacaagtagttccactaaacaaagggtagaagggactttccaccccacttctggaaaccagactttctgatggtgctgaagttgaaatggaagtgatacctatgggtgtcaacaatcgtgacatttcaaacacattcaggatcacctctccattggttgttgatgaagctatgcttgaaaaagtgcttgggcctccaaaatttgatggaagagaagctgaggatcgtgttgctacccctggggcatctgttgggcttg

SEQ ID NO: 107450 - DNA, 283 bp, Glycine max
caatcccaatcagctcctcttaccgtggaagaacagataataactatttatactggaacgaatggttatcttgattcattagaaattggacaggtaaggaaatttcttgttgagttacgtgcttacttaaacacgaataaacctcaattcaaagaaatcatatcttctaccaagacattcactggggaagcagaagtccttttgaaggaagctattcaagaacagatggaactctttttactacaggaacaggtagaaaaaaattgattaatcatttaataac

SEQ ID NO: 107451 - DNA, 269 bp, Glycine max
gagagagagaagagatatacactgccaagaagaagaacatgaaaattcagtgcgatgtgtgtgagaaagccccggcaaccgtgatttgctgcgcagatgaggcagctttgtgtgccaaatgtgacgttgaagttcatgctgcaaacaagcttgcaagcaagcaccagaggcttctccttcaatctttatctaacaagcttcccagatgtgacatatgtcaagataagccagctttcatattttgtgttgaggacagagcactcgtctgt

SEQ ID NO: 107452 - DNA, 282 bp, Glycine max
gaggttgcataactgaacaaacaaagcaaccctatgtcgaaggtggtttgtgtcaccggagccagttgcgaccttggatcattggtggccctcctcctcctccagcgtggttatacggtccatgccaccgtccaagacatcaatgatgaaaatgagacgaaacatttggaggaaatggaaggagcaaagagtcgtctccatttttttgaaatggatcttcttgacatcgactccattgccgctgccataaagggttgctccggcgtaatccacctcgcatgt

SEQ ID NO: 107453 - DNA, 277 bp, Glycine max
acattatgccggggagctgcctttgttgactgctgactatggatcctctgagggatggatagcagcaaatgtgaacccacaacttcctcccgagtatgccacttatgccgtgcttcctcacattggttactttgaattcattcctctcttagagcttgagaacaccaagcctctgggcctgactcaagtcaaggttggtcaagagtatgaaattgttatgacaaatccagcaggtttataccgttatagattgggggatgtggtgaaggttatggat

SEQ ID NO: 107454 - DNA, 272 bp, Glycine max
agctctcagagctacaagggactcaacttctgaacacaactaggagtgtgaaacaatatgtggagaatgaatataggagattggaggaagaaattatactccctaacaagaagcttttcccttctcctcttacacttgatgacttcttctgggcatttggaattctaagatcaagggcattttcccgccttcgctacgaaaatctagttgtgattccatttgctgacttcataaatcatagtgccagagtaacaacagaagatcatgcttat

SEQ ID NO: 107455 - DNA, 275 bp, Glycine max
gtgaacttatggctgacggggtggttctgttggatacatgggccagcatgtttgggatgagggttaggattgcattagctgaaaagggtgttgagtatgaatacaaggaagaaaatctcaggaacaagagtcctttgcttttgcaaatgaacccaattcacaagaaaattccagttctgatccataatggcaaaccaatttgtgaatctgcaattatagtgcagtacattgatgaggtctggaatgataaagctccaatcttgccctctgaccct

SEQ ID NO: 107456 - DNA, 213 bp, Glycine max
tgtttcttacaaggctctactctactgcttcaccttctgttctagaaaattcagtggtgatacatggcttcggctcatctctctgtagccaaaccagtccttcaggcaattgtgaaaagcttctctgaattctctggcctccgcatctcatcaggcttccttccctattgcaagagaatcttcagaggatgtccattctgtcattgccttcca

SEQ ID NO: 107457 - DNA, 147 bp, Glycine max
gagttggtttaactgccctgactatggcggaatattttcgagatgtcaatgaacaagatgtacttctatttatcgacaatatctgtcgcttcgtccaagcaggatctgaggtatctgccttattgggtcgaataccttctgctgggg

SEQ ID NO: 107458 - DNA, 279 bp, Glycine max
aaaataaatgcaaataccacaaagacttatgctacaagaaccatatttttcttgaaaaatgatggaactttgacgccattggccattgagttaagtaagccacatcctcagggtgaagcatatggtcctgttagtgaagtctacgtgccttcgagtgaaggagttgaagcttacatttggttactggcaaaggcttacgttgttgtgaatgatgcttgctaccatcaaatcattagccattggctaaacactcatgcggttgtggagccattcgtcata

SEQ ID NO: 107459 - DNA, 276 bp, Glycine max
cttgcaattgaagttgaagtcttgcccttctctcttcaactccaaacacaagacatcatcatccatggctgcctccgtctccactgtcggagctgtcaacagagctcttttgaacctgaatgggtctggacctggggtttcagctcccagttcatccttctttgggagcagcttgaagaaggttattggctcaagggtccccaacacaaagatttcctctggaagcttcaagattgttgctgtagaagagaagaaagagattgaagagacccagca

SEQ ID NO: 107460 - DNA, 280 bp, Glycine max
cttcctcaccgattgctagaatggaatttcgatgctcagtcatatcttttaccattctcttctctcttgctcttgcaggagagagccatgtccatgcatcgctacctgaggaagattattgggaagctgtttggccaaacactcccattcccactgcactgcgagagcttctaaagcctctccctgcaggtgttgaaaccgatgaactccctaagcaaattgatgatacacagtacccaaaaacattcttctataaagaagaccttcatccaggcaaaac

SEQ ID NO: 107461 - DNA, 278 bp, Glycine max
ctgcaggacactcctattcacagtgttgctgctggagttggagctggtgaaggagttgttacagagatcataatcacatttggattagtgtacacggtgtatgccacagcagcagaccctaagaagggttcattgggcacaattgcacccattgccattggtttcattgttggtgccaacatcttagcagcagggccattctctggcgggtccatgaaccctgcacgctcctttggccctgctgttgtcagtggtgactttcatgacaactggatcta

SEQ ID NO: 107462 - DNA, 275 bp, Glycine max
ccctacctctcccttcaagatgcagatcttcgtcaagaccctcaccggcaagaccatcacccttgaggtggaaagctctgacaccatcgacaacgtcaaggccaagatccaggacaaggaaggaatccccccggaccagcaacgtctcattttcgccggaaagcaacttgaggacggccgtacccttgctgactacaacattcagaaggagagtactcttcacctcgtcctccgtctccgtggtggcatgcagatcttcgttaagacactcaccg

SEQ ID NO: 107463 - DNA, 196 bp, Glycine max
tgccattctcatcctcctctgtctctctctctccaccattgccatggatccttacaagctccggccatccagcgccttcaattctcccttctggactacaaattctggtgctcctgtttggaacaacaactcctctttaaccgttggagctagaggtccaattctgcttgaggattatcatcttgtggagaagctt

SEQ ID NO: 107464 - DNA, 272 bp, Glycine max
cggctcgagtggtctcacttgactcgattgcaagtgatccacgacacactgttcgcttcacaaaagcttcgaatccaattcctcagtaacatctgcaagaactcttctcagtcaccatgccaccaaagcctttagactatgggtcaataaatgaaaacgtgaagaagagtcaatatgctgtcagaggtgaattataccttcgagcttctgagcttcagaaagagggcaaaaagattatatttactaatgttggcaacccacatgcattggga

SEQ ID NO: 107465 - DNA, 274 bp, Glycine max
cgacgacagcagccttgtgcggcactatgatgagcagctccttcctgaggagaaaagcagtggtcacaagcctgaaggcattccccaatgctaacgcagtgtttggtgtaaagggtggacgtggaggtggtgtgactgccatggctagcttcaaggtgaagctgataaccccagagggagagaaagaatttgaatgcccagatgatgtatacattcttgaccaggcagaggaggaagggcttgagcttccctactcatgcagggctggttcttg

SEQ ID NO: 107466 - DNA, 275 bp, Glycine max
gattccgaagagaaaagaaaagatgtttgagccacaacagctatacactcgcgcgaagaccgaggaattcgacctcgaatcaggagaaaccctctacccagggctgagcgtcggcgagaaccagctccgatggggtttcatccgcaaggtctacggcatcctctccgcgcagatcgtcctcaccaccctcgtctccgtcaccaccgttttctatactccaatcaatgacctcctcaagggcaattccaccctcctcctcatcctcctcttccttc

SEQ ID NO: 107467 - DNA, 276 bp, Glycine max
gtagttgagaactaagaagaaggaaatggcttcctcaatgatctcctccccagctgttaccaccgtcaaccgtgccggtgccggcatggttgctccattcaccggcctcaaatccatggctggcttccccacgaggaagaccaacaatgacattacctccattgctagcaacggtggaagagtacaatgcatgcaggtgtggccaccaattggcaagaagaagttcgagactctttcctacttgccagacctcgatgatgcccaattggcaaagga

SEQ ID NO: 107468 - DNA, 277 bp, Glycine max
ggctgctagagcagacaacttttactatcccccagaatgggaaccgaatcagggttcgctgaacaagtttcatggtcaacatgccttgcgagagagggcgagaaaattagatcagggtatcctgattataaggtttgagatgccttttaatatatggtgtggaggatgcaattcaatgattgcaaagggtgtccggttcaatgcagagaaaaaacaagtcgggaattattactcaacaaagatatggagcttcactatgaaatctgcctgctgtaaa

SEQ ID NO: 107469 - DNA, 277 bp, Glycine max
cttgtctttgccaagatgggaatcaaccccatcatgatgagtgccggagagttggaaagtggaaatgcaggagagccagcaaaactgatcaggcagagataccgtgaagccgcagacttgatcaagaagggaaagatgtgtgctctcttcatcaacgatcttgatgcaggagctggtcgtcttggtggaaccacccaatacactgtcaacaaccagatggtgaatgccaccctcatgaacattgctgataaccccaccaatgtgcagcttcctggta

SEQ ID NO: 107470 - DNA, 277 bp, Glycine max
atcagactagagagagtaagagtaagagaagagatggaaagagtagcatcagtatctcggccactgaaaatatacttcctcccattcttctcaccggggcacctaatccctctggtccagctggctcgcttggtggcggcacgaggccagcacgtgaccatcatcaccacccccgccaacgctcaactcttcgaccagaacatcgacaaggacaccgcctccggccaccacatccgcgtccacatcatcaagttccccaacgcccacgtagggctac

SEQ ID NO: 107471 - DNA, 265 bp, Glycine max
cgatgaggctgttgcatatggtgcggctgttcaggctgcaatcttaagtggtgagggcaatgagaaggttcaggatcttctcctcctggatgtcacccctctgtctcttggtttggagactgccggtggtgtgatgactgtcctgatccctaggaacactacaattccaacaaagaaggaacaagttttctcaacatactctgacaaccagcctggtgtgcttatccaggtctttgagggtgaaagagcaaggaccagagataac

SEQ ID NO: 107472 - DNA, 276 bp, Glycine max
caaaaaggtaaactttttgcaacaaccatggttgcaatggcagcagcaacagcatccacccagttgattttctcaaagccttgttccccttcacgtctatgccccttccaaccatgtgtctttgacactaaacaagtgctatcaagtggcaggagaaggcatgtggggggttctggagttaggtgcatggctgtgggggaagcagcaaccactgggacaaagaagagaagtggatatgagcttcaaacactcactagctggttgctgaagcaggag

SEQ ID NO: 107473 - DNA, 272 bp, Glycine max
ggatattcttggcaccaagctttccattctcatccctgctattccagctgccatcgttgctgagtgctttggctttggaagaccttggatttttatattaagcttacttggacttacaccacttgctgaacgtgtgagcttcattacagaacaagttgccttttacactggtcccacagttggaggacttctgaatgctacatgtgggaatgttactgagctcatgatagcaatatttgcccttagcagtagcaaaattgccgtggtcaagt

SEQ ID NO: 107474 - DNA, 273 bp, Glycine max
tcaagatgggtatttctagggattccatgcacaagaggcgtgccactggtggcaagaaaaaggcttggagaaagaagagaaagtatgagcttgggcgtcaggcagcaaacaccaagttatcaagcaacaagacaatcaggaggattcgtgttagaggtggcaatgttaaatggagggcattgaggctggatactggcaattactcatggggtagtgaagcagttactcgcaagactcgtattctagatgttgtttacaatgcctcaaacaacg

SEQ ID NO: 107475 - DNA, 274 bp, Glycine max
ctcgagccgcgcaatatcttcaactctatctgcaacagccaactttctcgttcgtcgatcacaaaaatggcggcgaaacttcaaatatttacgggattgccccccgcgccatttcaatcttcctcctccactctctgcgtactcaagaagcctctcactacctccttcttcggcactgcacgagtggaagttctgaaacttcgagtgatgaggattgcgaacctgcgcgcggtggaggtgctctcggtgctcgcatgaacctctttgacaggtt

SEQ ID NO: 107476 - DNA, 221 bp, Glycine max
tttgaaattatttgtataaaatcaaacatctccaatttacatcatccaaatgtgacagagcttgtaggttattgctcagagtatggacaacacctcttggtctatgagtttcataaaaatggatcactgcatgacttctttcacctatcagatgactatagtaaaccattgatatggaattcccgtgtcaagattgctttggggactgcacgtgctctaga

SEQ ID NO: 107477 - DNA, 273 bp, Glycine max
ctagcttttactcattatctctctttctctctctctcagaggttctagaaagatccactccgaaatggacggtgcgccacaatccgccggtgccggaggtccggcgccgttccttctgaagacctacgacatggtggacgatgcctccaccaacgacatcgtttcgtggagctctaccaacaacagcttcgtcgtgtggaaccctcccgagttcgctcgcctccttctcccgacctatttcaagcacaacaacttctccagcttcatccgtca

SEQ ID NO: 107478 - DNA, 239 bp, Glycine max
tccccaaccaacagaagttagaaaaccctagactataccattatgcaatattctcagataacatattggcaacagctgttgttgtgaattctactgttgcccatgctaaggacacctcaaatcatgttttccacattgttactgataggctcaattatgcggcaatgaggatgtggtttttggtgaatccaccaaaaaaggcaaccattcaagttcagaacattgaagactttacatgg

SEQ ID NO: 107479 - DNA, 210 bp, Glycine max
tcttcaatgccggttccctctactacaagtcgttcttgcctgatgattctgtttacgacaaggagcgacccggagttacatggccgatgcagttgaatgctccacttgaggtcgtggatcctgagattgctgatatcattgagcttgagacagctaggcaatggaaggggctagaattgataccgtcagagaattgcacctctgggtctg

SEQ ID NO: 107480 - DNA, 260 bp, Glycine max
tcgttggcttgctaccaggttgggtggatatatggttctgtgacagaggatatcttgactggatttaaaatgcattgccatggttggcggtctgtgtattgcattcctaagcggcctgcattcaaggggtctgcgcctatcaacctttcagatcgtctgcatcaagttcttcggtgggctcttgggtctgttgagatttttttcagcagacattgtccaatctggtatggttatggtggtgggttgaatggttggaacga

SEQ ID NO: 107481 - DNA, 267 bp, Glycine max
ctgttagagcccttcagagaaccgtgcctgctgcagttcctgctatcgttttcttgtctggtgggcagagtgaggaggaggcatccgttaacctcaatgccattaaccaggtcaatggaaagaagccatggtcactctctttctcctttggaagggcacttcaacagagcacccttaaggcatggagtggaaaagaggagaatgtgaagaaggctcaggaagcccttttggtaagagccaaggccaactcagaggcaactctgggaa

SEQ ID NO: 107482 - DNA, 270 bp, Glycine max
gcaaaactaaagcccaaaaacccataccaagatgctcctccgaagccactgttgctacctcggcataatcgccgggctagcagtgttcctcgcaacgacgtcgttcgccgacgcgcaatcctgcaacggcatcctcgtctcatacgcctacaccggcggcctgcggttgccgcccaacgtctccgactcggctaagcagccgtaccggttcgagtcgacggtgacggttctcaacaacggcctcgacgagctcaagtcgtggaaggtctt

SEQ ID NO: 107483 - DNA, 271 bp, Glycine max
gaaatggcgatggcaatggcgcttcgcaggctttcatcttcaattgacaagcctctgcgccctctcttcaatgccggttccctctactacaagtcgactttgcctgatgaagctgtttacgacaaggagcgacccggagttacatggccgaagcagttgaatgctccacttgaggtcgtggatcctgagattgctgatattattgagcttgagaaagctaggcaatggaaggggctagaattgataccgtcagagaatttcacctctgtgt

SEQ ID NO: 107484 - DNA, 266 bp, Glycine max
agagaacccccgtgttcccatcattgtcaccggtaacgatttctcaacactctatgcacctctcatccgtgatgggcgtatggagaagttctactgggcaccaacaagggaagaccgcattggtgtttgcaccggaattttccgcactgatggtattcctgaacaggacattgtcaagcttgttgacaccttccctggccaatccattgatttctttggtgcactgagggccagagtatatgatgatgaagtgaggaagtggattt

SEQ ID NO: 107485 - DNA, 265 bp, Glycine max
ggaattgatgtgcgcagtaaatcaagaacaatatcaaagcctgttgaagatccctctgagctccctaaatggaactatgatggatctagcactggacaggcacctggtgatgatagtgaagtaatcctatatcctcaagcaattttcaaagatcctttccgtggcggtaacaatattttggtcatttgcgattcttacaccccacaaggtgagcctatccctacaaacaagagacacagagctgctgaagatttcagtaacccaa

SEQ ID NO: 107486 - DNA, 265 bp, Glycine max
caaaaatgttggtgttgtattaatgggtgatggtttgatgatacaagagggaagttcagtaaaagcaacaggaagaattgctcagatacctgtaagtgaggcttatttgggtcgtgttataaatgccctggctaaaccaattgatggtcgaggagaaatttcagcttcggaatctcgattaatcgaatctcctgctcccggtattatttcgagacgttccgtatatgagcctctccaaacaggacttattgctattgattcgatg

SEQ ID NO: 107487 - DNA, 269 bp, Glycine max
ctcattcttcatccatagacatggccaccgtcacttctgcagccgttgctattccctcattcactggcctcaaggcaagcgcaggcaaagtgagtgccgcagttaaagtctcagctccccaagccacaaggttgggcatcaaggcttcgctgaaagacgttggagtcgctgttgtggccactgccgcgagtgcagtgctggcttgcaacgccatggccattgaagtgttgctgggtggtgatgacgggtctctggctttcgttcccaac

SEQ ID NO: 107488 - DNA, 270 bp, Glycine max
tcagtaaaagcaacaggaagaattgctcagatacctgtaagtgaggcttatttgggtcgtgttataaatgccctggctaaaccaattgatggtcgaggagaaatttcagcttcggaatctcgattaatcgaatctcctgctcccggtattatttcgagacgttccgtatatgagcctctccaaacaggactttatgctattgattcgatgatccccataggacgtggccaacgagaattaattattggagacagacaaacggggtaaaac

SEQ ID NO: 107489 - DNA, 269 bp, Glycine max
cgttctgcttcgcgtggaccaacaagaagtgtaagttttcattcaatggccagcgctcagctctcagcaatatcttcgtcgatctctacggcgtcgtttgaagggcttcgaccttcggctgttcagtttgcttccgcgggcagaattagaattggcaatctctcccaaaggtctttccggggcttggttgtcaaagccgccaccgttgttgcccccaaatacaccgcgattaagcctctgggagacagagtgctgataaaaattaagga

SEQ ID NO: 107490 - DNA, 269 bp, Glycine max
cggtcgagaaggcagaaagcaagctcatcctagagttttaaaaatggcagcagcctcctccatggctctctcttccccatccttggctggcaaggccgtgaagctgggcccatcagcccccgaagtcgggagggtcagcatgaggaagaccgtcaccaagcaggcctcctccggaagcccatggtacggcccagaccgcgtcaagtacttgggcccattctctggcgagcccccgtcctacctcactggcgagttcccaggtgactacg

SEQ ID NO: 107491 - DNA, 215 bp, Glycine max
ggggctagaattgatactgtcagagaatttcacctctgtgtctgtgatgcaagcggttggatcggttatgaccaacaaatacagtgaggggtaccctggtgcaagatattatggtggaaatgagtatattgacatggctgaaacactgtgccaaaagcgtgccctagaagcttttagattggatcccgctaaatggggagtgaacgtgcagcctc

SEQ ID NO: 107492 - DNA, 263 bp, Glycine max
atcaaagagaatggctcaagcaatggcatcaatggctggcttgcgtggttcctctcaggctgtgttggaaggtagccttcaggtgagtggctccacacgcttgaatgtgaggagtggaagcagggtggcctcagtcacacgtgcagggttcacagttagagcacaacaacaacaagtgagtggtgaggtacaaagcagccgtagggcagtgctttcacttgttgctgctggtttagccactggctcttttgttcaggctgtgc

SEQ ID NO: 107493 - DNA, 262 bp, Glycine max
tgccattgaaggagaaagaagactcttcattcgtagtgatgaactggatgctgcttggtcactctttacacctgtactgaaggagcttgaagagaagaagataattccagagtactatccttatggtagtaggggtcctgttggtgctcactatcttgcagccagacacaacgtgcgatggggtgaccttgggacagacgtagaccattaaccctcgcattttgttgcacttctgatcggcctaagatgttagctattatgc

SEQ ID NO: 107494 - DNA, 240 bp, Glycine max
caggcccaacgacacagtgcttctactgatcaacaacttcggaggcatgtcaaatttcgagctcgaagctctgacagcatccactcgcaggcttttgaagaaagactggagcatcgcacctgaacgcctctacgtctcagcattcgagacctcgctgaatgcacctggctggtctctttcgttgctcaacgtctccggcatcgaacgaaccaccggcacatccgttgcagaccttctgaa

SEQ ID NO: 107495 - DNA, 263 bp, Glycine max
catggctgtggtgtgtataggttttggtgtcatgattgcacccgtctatattgctgaaatttctcctgccattgctaggggatctcttacctctttccctgagatatttataaattttggaatccttctcggctacatatcaaactatgcattttcgaggcttccatcacatataaatttcaggataatgcttggtgtgggacttatcccttaactggtaattgctattgcactgtttgtcatacctgaatccccaagatggc

SEQ ID NO: 107496 - DNA, 265 bp, Glycine max
gggatttactggtattcgtatccaaggtgattccaaacttgtttgcatgcagattgatggttcctggaaggtcaagaatgaaaacttgtctacattgtataatgtggcaaaagaactcaaggataaattttcctcattccagatcagtcatgttctaaggaacttcaactctgacgctgatgctcaagcaaatttggccataaatcttgcagatggccaagttcaagaagagtgtgtgtaattcactcatggcagctgatgatta

SEQ ID NO: 107497 - DNA, 261 bp, Glycine max
gaattgaagaatgtaagaggggatggaactggagagcgcaaggaatgggataggatctatgattatgatgtctacaatgacttgggcaacccggatagcggtgataaatatgcacgccccgttcttggtggttcagccttaccttaccctcgcagaggaagaaccggaagaggaaaaactagaaaagatcccaacagtgagaagccgagcgattttgtttaccttccaagagatgaagcatttggtcacttgaagtcatca

SEQ ID NO: 107498 - DNA, 258 bp, Glycine max
ctcgagccggacaaaattctgccgtgtccgcgctgcaacagcatggacaccaagttctgctactacaacaactacaacgttaaccaaccccgctatttctgcaaggcgtgccaaaggtactggaccgctggcggcaccatgcggaacgtgccggtgggagcggggcgaagaaagaacaagaactcagcctcgcactaccgccacatcacaatctctgaagctcttcaagcggccagaattgatgcccccaacggaact

SEQ ID NO: 107499 - DNA, 262 bp, Glycine max
ctaagatttgaaaaagctatttgaagcctggtatgaaaaacggcaaatgaaaaaaatctattccccacttctggaaggactgctggcactatacctaggtttcgagtggatccaaaatggttacgtgacagactgataatattcttgctcccattatcacacatggcatatattccactgtgatattgggacatggcctttggaagataaatgaccaccggcgtagactacgtcaaagaatccaacagctcaagtcagaaga

SEQ ID NO: 107500 - DNA, 256 bp, Glycine max
ctaagacttcggtgggatctaggttagcaaccagcgatctgggacttttctttctcccccacaccacacccagattcaaaaactcgctctgctctgctctgcaattccccttccgtttcgtttcgatctcaaaacatgttcttcttcgattggttctatggcattctagcttccctcggtctctggcagaaagcagccaaaattctcttccttggtctcgataatgcagggaagaccacacttcttcacatgctca

SEQ ID NO: 107501 - DNA, 266 bp, Glycine max
caaaggttgctgtaggagataagattgcagtagtgctaagtgctaacacctgcagtgaacaatggcctctgcatcagcatctctgctcaagtcttcacttgttcttgacaagtctgagtgggtgaagggacaaacccttcgccaaccttctgcatcagttgtgagatgcaaccctacaaccccatcaggcctcaccatcagagctggttcctatgctgatgagctcgttaagaccgcgaaaacagtggcttcaccagggaggggtt

SEQ ID NO: 107502 - DNA, 264 bp, Glycine max
aattgctctcttattggtttcagccattctaattattcgaaatctgcaaaccattcccgctttcggtcagaatttctttgaatatgttcttgaattcattcgagacgtgagcaaaactcaaattggagaagaatatggtccgtgggttccttttattggaactttgtttctatttatttatgtttctaattggtcgggggctcttttaccttggaaaatcatacaattacctcgcggggagttagctgcacccaaaatgatata

SEQ ID NO: 107503 - DNA, 266 bp, Glycine max
ggcaagaatggttggagggttgagctttctcacaactctagaggtggaggtggtggtcgtggtggtcgctctggtggttctgatttgaaatgttacgagtgtggtgaacctggtcattttgctcgtgaatgccgcatgcgtggtggttcaggaagacgccgtagccgtagtccgcccagattccgtaggagcccaagttatgggcgaaggagttacagtcctcgtgggcggtcccctagcaccgcaatttgtcacctcgtggacgt

SEQ ID NO: 107504 - DNA, 247 bp, Glycine max
tgaaattttaataaaccgcgatcacaggttgccgcaccttaaaaccggaaacaaaagcaatcgttacttgatttcaagaatttctcaatttcttcctacttctttgtgtacgatttcttaagggaaagaaaatcactctctgtgctggtcacagacttcgtgaatcattttcttttccactcctagtttattcaatgaacactctcctatttgatataggacttcgtgtcagatttaaactttttct

SEQ ID NO: 107505 - DNA, 259 bp, Glycine max
tctcgagccgattcggctcgagattcttcatcacttcattcaacatagctccccttagcttgagtcaccaatggctgctgcggttagtgctgcagtctcttttccatccaccaagtctacctctcttccaagcaggacctccctcattgccccagagagagttgtgttcaagaaggcttcattgcaaaacagagatgtttctagcagtggacgggtagtttccatcagagctcaagtcaccactgaggcaccagccaag

SEQ ID NO: 107506 - DNA, 259 bp, Glycine max
tctggctcctctgcgtgctcgttgaatccatcctaagtgacttgcttgctgaaggcgacacgaggtcggtagaaactaagaatgggggaagagaatgaagaaacaaaaacatttaaggatttgggcttatccgagtcattggtggaagcttgcgaaaaattgggttggaaaaatccattaaagatacagacagaagcaattcctcttgcattggaaggaaaagatgtgataggacttgcccaaactggttccggtaaga

SEQ ID NO: 107507 - DNA, 259 bp, Glycine max
caaggcagaaagcaagctcatcctagagttttaaaaatggcagcagcctcctccatggctctctcttccccatccttggctggcaaggctgtgaagctgggcccatcagcccccgaagtcgggagggtcagcatgaggaagaccgtcaccaagcaggcctcctccggaagcccatggtacggcccagaccgcgtcaagtacttgggcccattctctggcgagcccccgtcctacctcactggcgagttcccaggtgact

SEQ ID NO: 107508 - DNA, 265 bp, Glycine max
ctcgagccgaatcggctcgaggtctcgcacgtgctcacagtgcgactacaacggccacaaatcgcggacatgcaccgacggtggcgccgccgcttcctgcggcgggtctcccagggagaacggcatcatgctgttcggcgtaagagttatgaccgaagctaactcctccttccggaagagcgccagcatgaacaacctctcacagtacgacgcggaatccaacgccgccgacgccggctacgcctccgacgacgttgttcatgcc

SEQ ID NO: 107509 - DNA, 262 bp, Glycine max
gaacaatgtcctttttgagggtattctccttaagcctagcatggttacacctggagccgagtccaaggacaaggccagtcctcagacagttgctgattacaccctcaagctccttcacaggagaattccccctgctgtccctggaattatgtttttgtctggtggacagtctgaggctgaagctaccctcaatttgaatgccatgaaccaatctccaaacccgtggcacgtgtcattctcgtatgccagagccctcaaaaac

SEQ ID NO: 107510 - DNA, 263 bp, Glycine max
ggaagatgagtttgagggcatcagagatagcgaagaagttgaatctgcaacctcacccagaaggtgggttttacgtggagacattccgagaccattccgtccagctttcgacctctcagctcccccccgaatacaaagtggatcgccctgtatcgacctccatctattttctcgttccttctgggagtgtgtctcgcctccatcgcataccctgcgccgaaacctggcatcattacatcggcgaccctctcaccgtagtggaa

SEQ ID NO: 107511 - DNA, 265 bp, Glycine max
ttagctttttctattcttctattaactgatttatgtataggattccattcaacccatggttgggaactagtgattggtttcgtctataaagattttggatttgctcaaaatgatcaaattatatctggtcttgtttccacttttccagtcattttagatacaattttaaaatattggatttttcgttatttaaatcgcgtatctccatcacttgtagtgatttatcattcaaatgatgattgactgacaaaatgattcacttatc

SEQ ID NO: 107512 - DNA, 260 bp, Glycine max
ctgacaagcagcaggaattttctcatctttctagtgaaccaattttggtaccgaactcctcatttacttcttatcctccacctggtggtagatctcatcaggcttctccaagtcagaattcaggccacttaaaccttccttatcatgctacaggagctcagatggcattatcaccaccaaatcgatctcatttccccaattctgcattacagttgagtggattttaccatgggtccacttttggtggaaacatgcgtcaa

SEQ ID NO: 107513 - DNA, 268 bp, Glycine max
atactttctgcgcttcttggcggcgacgcggcggcggcggcgtcttcgccggagagttctacttctagagtctcctccttccactcgtcgccgcgctggcagctctacttcaacgagatcaaagataccgataagctcgttgtgatagatttctcggcgtcgtggtgcggtccttgcaaattcatagagccagcgattcacgccatggccgacaagttcaacgacgttgacttcgtcaagatcgacgtcgacgaattacctgatgtgg

SEQ ID NO: 107514 - DNA, 267 bp, Glycine max
tgcaattgaagttgaagtcttgcccttctctcttcaactccaaacacaagacatcatcatccatggctgcctccgtctccactgtcggagctgtcaacagagctcttttgaacctgaatgggtctggacctggggtttcagctcccagttcatccttctttgggagcagcttgaagaaggttattggctcaagggtccccaacacaaagatgtcctctggaagcttcaagattgttgctgtagaagagaagaaagagattgaagagc

SEQ ID NO: 107515 - DNA, 258 bp, Glycine max
ctctacactggttctgcaccagtatacacacagctgcatcgtcactgacaccaggaactactgcagaatggtaacatcatactgcagttctgaaactgtcgattaccaatgtcagtgagtatcaagatattgctcagcagatgttgcccaacatggcgcgtgactactacgcatctggtgcagaggaccagtgcactctgccatttgactgatatgccttctccagcatattaccacggccacctactcttattcatg

SEQ ID NO: 107516 - DNA, 258 bp, Glycine max
tgcaattgaagttgaagtcttgcccttctctcttcaactccaaacacaagacatcatcatccatggctgcctccgtctccactgtcggagctgtcaacagagctcttttgaacctgaatgggtctggacctggggtttcagctcccagttcatccttctttgggagcagcttgaagaaggttattggctcaagggtccccaacacaaagatttcctctggaagcttcaagattgttgctgtagaagagaagaaagaga

SEQ ID NO: 107517 - DNA, 242 bp, Glycine max
aacacattgtggttggaattcaacacttgaagggataggtgctggattgccaatgattacctggcctctatttgctgatcaatttttgaatgagaagcttgttactaaagtgttgaagattggtgtgagcgtaggggtagaggttcccatgaagtttggagaggaagagaaaacaggggtgttggtgaagaaggaagatattaatagggcaatatgcatggtgatggatgatgatggagaag

SEQ ID NO: 107518 - DNA, 267 bp, Glycine max
gcgagttgttgtaaagctagccttgttgcagccatggccacccacgcggctctagcttctacaaggatccccactaacaccaagttgccatccaaggcttcacactctttcccaacccaatgcgcctcaaagagacttgaggtgacagaattctctgggctaagatccacttcatgtgtgacatctgctaacgatgctagagaatcttccttttttgatcttgtagcttcccaactcactcccaagacaatgggatcatcaactcct

SEQ ID NO: 107519 - DNA, 267 bp, Glycine max
ctcgagccactcgagccgctaaaaactgggatgaccctactaccaagtatgtggagaaatgcaagtataccaagagatggttcatcaccaaagtccctaagatatattggaagcatggtagctgatgttcaccgcacattgctttatggaggtatttttctgtatccggctgataaaaagagtccaaatggaaaacttcgtgtactctatgaagtcttcccaatgtcattcttgatggaacaagcaggaggacaggctttcactggc

SEQ ID NO: 107520 - DNA, 268 bp, Glycine max
cactcttgttgccttcatggccaagccagtgtccattgaggtatggaacccaagtggcaaatacagagttgtcagcaccaaaccaatgcctggaactcgttggatcaatcttctcattcaaaatgatgttcgccttgaaatatgtaccgagaagaaaacgattttgtcagttgaagacatcattgctttgattggtgataagtgcgatggagttattggacagttgactgaagactggggagaagagttgttctctgctttaagcaaa

SEQ ID NO: 107521 - DNA, 256 bp, Glycine max
ttccgaaccaacgcaatgatggaatggaagggtcttgcgttcttctgcagttctgatagctagccatgttggcatgaagatttaagcgggaaaataataagacaacgtatataacgttttcacaaagtggctttttttttattatcacaaggagtatgtgttgaatgattattgagttgcagcactgatcagttcttagaacatgaattcagcatccccgcagtttgtttccccgagaagtatgagtgtgtacgat

SEQ ID NO: 107522 - DNA, 258 bp, Glycine max
gtaaaagaatccagaaattgcaatagaaaagaaaaagagaggtttgagatgatttttcaatcttttatactggataatctagtattcttatgcatgaagataattaattcgatagttgtggtcggactctattatggatttctgaccacattttccatagggccctcttatctcttccttcttcgagctaggcttgtggaagaagggaccgagaagaaaatatcagcaacaactgggtttattacgggacagctcata

SEQ ID NO: 107523 - DNA, 238 bp, Glycine max
cgaagcagcatttcaagatgaagttcaacattgcgaatcccaccactggttgtcagaagaagctggagatcgatgatgacctgaagctacgagcattttgggacacgaggatctcacaagaggttgtcggtgatgctctgggcgaggaattcaaaggctatgtcttcaaaattactggaggttgcgacaagcaaggatttccaatgaagcaacgagtgttgacccctggtcgtgttcg

SEQ ID NO: 107524 - DNA, 245 bp, Glycine max
ctagagcgagaaagtgagaggagagagaaagtagcagatcctccatggcctccaccaaggaacgtgaaaacttcgtctacgtcgccaagctcgccgaacaagccgaacgctatgaagaaatggtggaagcaatgaagaatgtggcgaactaaacgtggaattgacggtagaggagcggaaccttctgtcggttgggtacaagaacgtggtgggtgctcgtaggcttcgtggaggatctttcctcg

SEQ ID NO: 107525 - DNA, 266 bp, Glycine max
aagaaactaacatgaagggcttatacggttacaaggtttttgtttccattgctcttatcctgggtgatggcatatacaatttcaccaagattctaatttctacagtcctcaatgttaatgaaagaatgaggagcaagaataataaaaatgtagctgctgatcggcacgagaatcctaccgaggaccttaaacaaactgatgaatttctaagggagaccattcccctgcggattggagtcattggatacgttgttttcacaatgatt

SEQ ID NO: 107526 - DNA, 274 bp, Glycine max
ggtatttctagatatataactaaaaagaatcgacagaatacgcctagtcgattggaattgagaaaattttgtccccgttgttgcaaacatacaattcacgcagaaataaagaaatagatcaaattgatcgcttgtgtgttacccttcgaccaaagaacttaacatgtaaaatgatctatttttcttatctatatagatagatctatctgtattctatcatttacagttgaatatttacaatatcagtatataccacatatattaaaaaataaca

SEQ ID NO: 107527 - DNA, 252 bp, Glycine max
tgagcttgcagcagcgatttctcatttcatttttcacacttcaacaatcctgcacaccttcaaatacatcatcctcggtggaggagtttccgctggttatgcggcgagggagtttgccaaacagggcgttaagccaggggagttggtatcatttcgaaagaagcggtagcaccttatgaacgtcctgctctgagcaaggcttacctttttccagagtcccctgctagacttcctgggttccatgtctgtgtt

SEQ ID NO: 107528 - DNA, 210 bp, Glycine max
ctgatgaggatctgcggaatatgatggaggaatgtcatgatctacaaggcggctgaggatcaaataagcttaggatttttctgttctctttgaactatttggatgatactcagttcggtataggtagcatggatggtgattctgaatccagtatgtagttgctgttaatggtatggacatgggttcaagaaacaaatcaatcctttgggg

SEQ ID NO: 107529 - DNA, 267 bp, Glycine max
ctcgaccgatgcagaggagtttcgtttggcccaaatttgtggactaaacattattattcaggtggatgacttggaagaagtcagtgaatattaccaaaacagaggttgcttcaatgagctcatatctctcatggagagtggtttaggttagaacgggcacatatgggcatctttactgagttaggagttctgtacgctagataccgccctgagaagcttatggagcatatcaaactattctcaacccgcctcaatattcctaaactc

SEQ ID NO: 107530 - DNA, 246 bp, Glycine max
ccagattagtaccacaaaaatggagaaatagaataactgaatatcgtatagctcaaaataaagatttaaccaaatgcaattcatatgaaaaaagccaattaattctttacaaagaacaacaagtaaacgcattaaaaaaaaaaattagaaacaatatagatacgatcttttatcctataattttatcaattatgcagataagaaagactcatatatttatggatatagatccctatttcaagtaaa

SEQ ID NO: 107531 - DNA, 277 bp, Glycine max
cagagagaaagttgttgtaaagccttgttgctgccatggccacccacgcggctcttgcttctacaaggatcccttcaaacacaaggttcccatccaaggcctctcactctttcccaacccaatgcgccttaaagagacttgaggtgacagattctctgggcttagatccacttcatgtgtcacatatgctaacagtgctagagaatcttccttttttgatcttgtagcttcccaactcactcccaagaccaggatcactcctgtgagggagagacat

SEQ ID NO: 107532 - DNA, 267 bp, Glycine max
agagtgttaagtgatttattagataatcgaaaacagaaaatcttgagaactattcgaaactcagaagaattacgggaaggggccattgaacagctggaaaaagcccaagcccgcttaaggaaagtcgaaacggaagcagatcgtttcgggtgaatggctattctgagatcgaacgagaaaaatggatttaaataattcgatttagaggactttggaacaattgggaaattacaaaaacgaagccattcattttgaacaacaaagagt

SEQ ID NO: 107533 - DNA, 273 bp, Glycine max
tgctccgccgaatcggctcgagctatcggcgttcaatttgctccacgatggcggcctccgaggctctcaacggcacaaccagcacctccatcaggcacgcgttcggcaacgtcctcgcgttcttcatacttctcatgatcggcgtttcgccttctcgatccgtctcttctccgttataaagtatgagagtggtattcacgagtttgatccttatttcaactatagagtcactcagtttttgacaaagaatgggatatatgatttctggaactg

SEQ ID NO: 107534 - DNA, 229 bp, Glycine max
atcatgtagttcaaatacccttaatggcacaggaggaaattctgtcttctagtgcaagtgatttcagaactgcaatggtgagtaaaaatagcaaacctcaagctactgcaatgcatgtgggagctatagaaattatcattgatagttcgcaagtcctgattgcaacatagttggtgcaatgcttttggttgatacttatcataccaatcctgaaaatgcagttcgtagt

SEQ ID NO: 107535 - DNA, 248 bp, Glycine max
ggtggccaatccattgatttctttggtgcactgagggccagagtatatgatgatgaagtgaggaagtggatttctggtgttggtgttgacagtgttgggaagaagcttgtgaactcaaaagatggacctccaacctttgagcaagccaagatgatcctggagaagccctgctgtatggtaacaggcttgtccaagaccaggagattgtccagagattcaattggctgacaagtacttgaacgaggctg

SEQ ID NO: 107536 - DNA, 280 bp, Glycine max
acggcgctaccggaccagcgcagatccgacgggatgctcctcacgccgtgcggcacgccggcctacgtggcgccggaggttctcaagaagaagggctacgatgggtcgaaggctgatatatggtcctgcggggtcatcctctttgctctctttctggctatttgccctttcaaggtgaaaatgtgatgagaatttacagcaagtctttcaaagccgattatgcattccccgaatggatttcccctgcggccaaaaacttgatctccaatttactcgttgt

SEQ ID NO: 107537 - DNA, 282 bp, Glycine max
ctcgtgtggggtgtggtagtgtggcaacgacacgtatcaacttcaataatcgcatcgcagaagcagtttccggtgcatctcatcgtctccgaaaatgaacgacgcagatgtctcgaagcaaatccagcagatggtgcggttcatccgccagaagctgaggaaaaggccaacgagatctctgtctccgccgaagaggaattcaatatcgagaagctgcagttggtcgaagccgacaagaagaagatcaggcaagaatacgaacgcaaagagcgccaagttgaa

SEQ ID NO: 107538 - DNA, 268 bp, Glycine max
tgtcttgcaattgaagttgaagtcttgcccttctctcttcaactccaaacacaagacatcctcatccatggctgcctccgtctccactgtcggagctgtcaacagagctcttttgaacctgaatgggtctggacctggggtttcagtcccagtacacccttctttgggagcagcttgaagaaggttattggctccagggtccccaccacaaagatttcctctggaagcttcaagattgttgctgtagaagagacgaagagattgaaga

SEQ ID NO: 107539 - DNA, 249 bp, Glycine max
tgcaagtgctgtgtgtccgtatttggcattggagacatgtcggcaatggcgtttgagtaataaaactgtaaatctgatgaggaatggaaagatgcctactgtatcgattgaacaggcacagaagaactattgcaaggctgtaaagcaggtcttcttaaaattctttccaaaatgggcatctcattgctatcaagttactgtggtgcacaaatatttgaagtctatggattagggaaggaagttgttgat

SEQ ID NO: 107540 - DNA, 266 bp, Glycine max
tcgatatttggatgtaaggaccccggaagagttcgatgctggacacgctcctggcgcaattaacataccttatatgttcagagttggatcagggatgacaaagaacagcaactttattagagaggtgtcttcacagtttaggaagatgatgaaattattgtcgggtgtgagcttggtaaaagatctatgatggccgcaagtgacttgctagctgctgggttcactggactcacagacatggctggtggttatgctgcatggacaca

SEQ ID NO: 107541 - DNA, 226 bp, Glycine max
gcgagatatggcgatggcaatggcgcttcgcaggctttcatcttcaattgacaagcctctgcgccctctcttcaatgccggttccctctactacaagtcgtctttgcctgatgaagctgtttacgacaaggagcgacccggagttcatggccgaagcagttgaatgctccacttgaggtcgtggatcctgagattgctgatattattgagcttgagaaagctaggc

SEQ ID NO: 107542 - DNA, 265 bp, Glycine max
caccaccacaatcatgagactcatattgctttccggccacgagcgtgccttcacccaggtcaagttctccaaggagggcgaccttatcttctccgtttccaaggatcacaccgtctgcgcgtggtacagcgcctatggcagcgtttcggcacatacaagggccaccagggtgccctctggaccgtcgatgtcgacccttacacccgccttctcgcgaccggcggcgacgacaacaccatgaggctatgggaggtggagactggaa

SEQ ID NO: 107543 - DNA, 263 bp, Glycine max
atatttcaagataagatgaaagaacaggaagcattgaaaaggagactaaaggcaagaataaagtatgcaaggttccttcaggatacagtcaaagaaatggcaaaagaagttcagaactcccgcagtggagaactaaagaaacagccgaagatcttgatgaatttttaaacacaattagaagaggtgcactgtctcctaatgggaaatttggggcttgctagttgtttaacgatgaacttactctagatatctaagcaggcccg

SEQ ID NO: 107544 - DNA, 268 bp, Glycine max
ggcagaaagcaagctcatcctagagttttaaaaatggcagcagcctcctccatggctctctcttccccatccttggctggcaaggccgtgaagctgggcccatcagcccccgaagtcgggagggtcagcatgaggaagacgtcaccaagcaggcctcctccggaagcccatggtacggcccagaccgcgtcaagtacttgggcccattctctggcgagcccccgtcctacttaattgcggattcccaagttgcttagggctgggacat

SEQ ID NO: 107545 - DNA, 262 bp, Glycine max
ctcaacttgaactatccatacatagccactttacactcactcttgtgttgttgccttcatggccaagccagtgtccattgaggtatggaacccaagtggcaaatacagagttgttagcaccaaaccaatgcctggactcgttggatcaatcttctcgttcaaaatgatgctcgccttgatatatgtaccgagaagaaatcattctgtcagttgaagacatcattgctttgattggtgataagtgtgatggagttattggaca

SEQ ID NO: 107546 - DNA, 204 bp, Glycine max
ctgaggttgaagcaaccttgaacttgaatgctatgaaccagtctccaaacccatggcacgtgtccttctcctacgccagagctctccaaaacacctgcttgaagacatggggtggactccctgagaacgtgaaggctctcaagatgcactccttttccgtgccaagtccaactcactcgctcagcttggaaagtacactgccga

SEQ ID NO: 107547 - DNA, 263 bp, Glycine max
tagcggacgaagatgccttctttgctgattacgctgaggctcaccaaaagctttccgagcttgggtttgctgatgcctaagcaacgtttaggggattgttgaagaggcatggtgcccataatatttctctaaaaaatgaatggcactggttttaaatgccaatgtgggttccccagattttagatagcttttgaatgtattttgctggacgtgacgatgattgggaagttgggttgttgtttttatttgtggttgatactttt

SEQ ID NO: 107548 - DNA, 268 bp, Glycine max
atagtgcatagcgtttttcattgtgcattattcaatggccaccacagcagctctatccggaaccatggtgagcacctccttcatgaggaagcaacctatgacgaccaagagcctaaagacattccccaacgctctttttggtctgaaaggtggacgaggtggtcgtgtaacttgcatggcctcgtacaaggtgaagctcatacccccaaagggagatggggtgttaaaatgcccagatgatgtcctaattgttgacaaggctgaggaa

SEQ ID NO: 107549 - DNA, 272 bp, Glycine max
aatggcggctctcagaaaagccgtgttctttgtaatcgctcaatgcttcaccttttccgcatatgctgcaaggtttgaaatcacaaaccgatgcacatacactgtctgggctgcgtctgtgcctgttggcggtggcgtgcaataaacccgggccagtcatggtccgtggacgtgcctgcatgaacgaaaggggcccgcgctttgtcccgaaccggctgcaacttcgacggttcgggccgcggtggatgccagatcggtgactgctggggtgt

SEQ ID NO: 107550 - DNA, 256 bp, Glycine max
caaaaacaaagaaaaaaaaaaacccttagccaacacaaccatcatggccacctctgctattcagcaatcagcattcactggtcaaactgctctgaagcagctcaatgagttcgtccgcaagaccggtggcgccggaaaggtcgcactaacatgcgccgcaccgtcaagagtgctcctcagagctttgggtatggccctgaccgtcccaagtacttgggtccattctcggagcagattccatcatacctgaccggag

SEQ ID NO: 107551 - DNA, 142 bp, Glycine max
atggatcctgggtcttggggatcttggttgtcaggggatgggaataccagtgggaaaactttctttatatacaggacttggaggaatccgcacttcagcttgtttacccattacaattgatgtgggcacaaacatgagaagc

SEQ ID NO: 107552 - DNA, 259 bp, Glycine max
ggaatagacttgacggttacagttttgactactggcttctggcctagttacaaatcttttgatctcaatcttccagcagaaatggttagatgtgttgaagttttcaaggaattttatcaaacaaaaactaagcaaggaaacttacttggatttattccttgggaacctgcaacattagtgggaaattcgatccaaaaactgttgagctgattgtaacaacttatcaggcttcggcattgcttctatttaattcctcaga

SEQ ID NO: 107553 - DNA, 235 bp, Glycine max
cggctcgagaagtagttgagaactaagaaggagaagcaaatggcttcctcaatgatctcttccccagctgttaccactgtcaaccgtgccggtgccggcatggttgctccattcactggcctcaagtccatggctggcttccccaccaggaagaccaacaatgacattacctccattgctagcaacggtggaagagtgcaatgcaatgcaggtgtggccaccagttggcaagaag

SEQ ID NO: 107554 - DNA, 231 bp, Glycine max
  unsure (1)..(231): unsure at all n locations
gttagaagaggttgcataactgaacaaacaaagcaaccctatgtcgaaggtggtttgtgtcaccggagccagtggcgaccttggatcatnggtggccctcctcctcctccagcgtggttatacggtccatgccaccgtccaagacatcaaggatgaaaatgagacgaaacatttggaggaaatggaaggagcaaagagtcgtctccatttttttgaaatggatcttcttga

SEQ ID NO: 107555 - DNA, 225 bp, Glycine max
gaggagggcatttggtttaccttgaaattggagatggcatattacaggaagtaaagcatgcccagctagagtatgagatttcatgcctggacataaatcccattggtgaaaaccccaatcacagtaatctagcagcagttggaatgtggacagacataagtgttagaattttttctcttcctgatctgagtctcatcacaaaggaacaattaggaggggagatca

SEQ ID NO: 107556 - DNA, 220 bp, Glycine max
gtgtttctgtaaccatggcatccaccactctatcccctacaaccccttctcagctatgctcaggaaaaagtgggattttcagttcctcacaggcacttcttatgaagccagtgaagaggcagatgatggggaagagcaagggattgagaattgcatgccaagccaccagcatttccgctgatagagtccctgacatgggcaaaagacagctcatgaatct

SEQ ID NO: 107557 - DNA, 223 bp, Glycine max
ctttacagtgtttctcttccttcttcttcttcttcttcttcttcttcgttgaatcgcgattgttctgtgcgagagaaagaagagagagatcgaaaatggcgttggctttcgacgagttcggaaggccgttcataatcctgaaggagcaggagcagaagagcagactccgaggattggacgctcagaaagccaacatctccgccggcaaagccgtggctcgcat

SEQ ID NO: 107558 - DNA, 222 bp, Glycine max
ctccgcagcagccacacttcttcgccgtttcagctgaagagccatccgcaggtaagcaatggttaagcataataatgttatccccaatgggcacttccggaaacactggcaaaactatgtgaagacttggtttaatcaaccagcccgaaagaccagaagacggttggctcggcagaagaaggctgtcaagattttccccaggcctactgctggatctctcag

SEQ ID NO: 107559 - DNA, 220 bp, Glycine max
gtttcactgcataaatttgagagaaaactctgcaaacatgttggtttatcaggacctccttacaggtgatgagcttctctcggactccttccgttacaatgaaattgagaatggaatgctgtgggaagttgaggggaagtgggttgttaagggagcagttgatgttgacattggtgcaaacccttctgctgagggtggagaagatgagggagtcgatgac

SEQ ID NO: 107560 - DNA, 221 bp, Glycine max
gactcattcgccttcaagccagggaaatacaacgcccagaagttgtgcctggaaccaacttccttcacggtgaaggcagagggcgtggccaagaacgccccatccgaattccagaacatcaagctcatgactcgtctcacctacaccctggacgagattgagggtcccttcgaggttacatccgatggaaccgtgaaattcgaggagaataacggaattga

SEQ ID NO: 107561 - DNA, 229 bp, Glycine max
gtggaattgggggaccattaagagaaatttctcgatttagctcaacttcaattaccgggttgaataacaatgagtaccagataacaagaggaaaggaactcaatcgcattgctggagtggacaagacttgcaattttgtcaaggctgacttcatgaaaatgccattcccagacaacagttttgatgcagtgtatgcgattgaagccacttgccatgcaccggatgctta

SEQ ID NO: 107562 - DNA, 229 bp, Glycine max
aaataggacttttcggtggagctggagtgggtaaaacggtactgattatggaattaatcaataacattgccaaagctcatggaggtgtatctgtatttggcggagtaggtgaacgtactcgtgagggaaatgatctttatatggaaatgaaagaatctggagtaattaatgaacaaaatattgcagaatcaaaagtagctctagtatatggtcaaatgaatgaaccgcc

SEQ ID NO: 107563 - DNA, 217 bp, Glycine max
ttgaggggtgtggtgtttcctgcatcaatgtatatgaggatgctgcagttctgaaactttctggggacaaaatattgtcatcacgtcttataattgatgccatgggaaacttctcccctgttgtaaaacagataggaggttagaggaagcctgatggtgtttgccttgtcgttggaacatgtgcacgtggctttgaaacaaactccactagtgatgt

SEQ ID NO: 107564 - DNA, 223 bp, Glycine max
ataccatactcattaaagtccacacacacagagcaacactgcactgtgtggaaacgaaacatggcaagagtggtggcactccaacagaaccaactatctttctctaccttagcttcctctctttctgacttcagtggaaccagacttcaaactcaacttcagttcaagagacagcaatgccatccaaaagggtctttctacgtctccgcatcgagcaccaaga

SEQ ID NO: 107565 - DNA, 227 bp, Glycine max
gtctctaccggtacgtgcctgcaagtttatgaaaaaaacggtcctggcctcatctcctgtgcatggtttccaagtgggaaatatatactttctggcctcagtgacaagagcatttgcatgtgggatttagatgggaaagaagtggagtcttggaaaggacaaagaacccttaagatttctgatttggaaataacaggtgatggggaacacatgctgagtatttgtaa

SEQ ID NO: 107566 - DNA, 219 bp, Glycine max
tgttgatgtgcagcgcactcatcgtattaaaggaatgattaaaatggtggccacagttggtattcctgagaatacaggtatagcattggcctgtgctatgaatagttcttttagggggcgcgccagttctgatatttacaccatctgctctcaagactgtgaattatggaatcctgcttgcacataagcaatgactatgtcatttaatccaaacccgtg

SEQ ID NO: 107567 - DNA, 222 bp, Glycine max
cagacactgagtatagtggctgagttcccagaaagatttaaagttgtgagccttgctgctggctctaatattactcttcttgctgaccagattaaaacatttaagcctgaagttgttggtcttagaaatgagtctttaattgatgaactcaaagaggctttggctgatgtggatcacaaacccgaaatcatccctggagagcaaggagtcattgaggccgct

SEQ ID NO: 107568 - DNA, 224 bp, Glycine max
cgcgtttcgcaatttccccaaatctcacgcctagggtttctatcgcaaaccctcactcccttcattaaggtcgcgcgcgaagggatttcgaagcttcggaaggaaaaaaaaaaagatgaaacctgttttctgcggaaacctggatttcgacgcgcgtcaatccgacgtggagaggctcttcagaagatacggcaaggttgatagagtcgacatgaaatccggat

SEQ ID NO: 107569 - DNA, 222 bp, Glycine max
ggatgcaagacccaacagcattccaaggagtgaagccaccccagtttcctgaacaagaacaactcaagtgtccacgttgtgactccaacaacaccaaattctgctactataacaactacaacctctcgcagccacgccacttttgcaagaactgcagaaggtactggactaaaggtggcgctttgagaaacatccctgttgggggtggaagcagaaagacca

SEQ ID NO: 107570 - DNA, 219 bp, Glycine max
aaattctctgtctctctctctctctctcgatcaatcatggctttgcccaatcagcaaaccgtcgattaccctagtttcaaactcgtcatcgtcggtgacggtggtacaggaaagacaacgttcgtgaaaaggcatcttaccggtgaatttgagaagaaatacgaaccgaccattggagtggaggttcacccattggatttcttcacaaactgtggaaag

SEQ ID NO: 107571 - DNA, 218 bp, Glycine max
gtcgtgttctctctctgcttcagcttcggcttcgagaagggtcgattgggtccccaagctgtttcttctctgtttctgacaaactttataacccttatcaaacatgagtggtcgcttttctcgcacaatttatgttggcaacctgccctctgatataagagagtcagaaattgaagatctattctacaagtatggccgtataatggatattgaattga

SEQ ID NO: 107572 - DNA, 216 bp, Glycine max
ggaagctgtggagaagggtcatggtgacttaaaagaaaagccttggtggcctaaaatgcagacaactgaagatctcattcaatcatgctctattatcgtttggacagcttcggctctccatgctgctgttaattttggacaatatccttatgggggcttaatcctgaaccgtccaactctagccagaaggtttatcccagctgaaggaaccccaga

SEQ ID NO: 107573 - DNA, 218 bp, Glycine max
tctcgagccgattcggctcgaggccatggccacccacgcggctcacgcttctacaaggatagcttcaaacacaaggttccactccaaggcctctcactctttcccaacccaatgcgccttaaagagacttgaggtgacagaattctctgggcttagatccacttcatgtgtcacatatgctaacagtgctagagaatcttcctaacttgatcttgtag

SEQ ID NO: 107574 - DNA, 138 bp, Glycine max
ccttaaagcagcttagtactcttgctttgcaatataacaagttaactggtcaaattcctcttagcttggggaacttggagaagctaagcaggcttaatttgagcttcaacaactttagtggtactgttccagcaacac

SEQ ID NO: 107575 - DNA, 221 bp, Glycine max
cgaaacgtgttgtgctcaaaatgcaatgggaagggctcaaagtctggggcttcaatgacctgtgctggttgccagggtactggcatgaaggtgtctattaggcaccttggtccttctatgattcagcaaatgcagcatccttgcaatgagtgtaagggtactggagagacaatcaatgacagagacaggtgccaacagtgcaagggagagaaggttgttca

SEQ ID NO: 107576 - DNA, 220 bp, Glycine max
ctggctaatgcttctccagagcagcaaaggacgatgctgggtgagaatctctacccccttgtggaacagttagagcctgataatgctgccaaagtgacaggcatgcttcttgagatggaccagactgaagttctgcatttgcttgagtcgccagaagccctgaaagcaaaggtggctgaggcaatggacgtcctaaggaatgttgctcagcagcaggctg

SEQ ID NO: 107577 - DNA, 217 bp, Glycine max
ctcaaaaatgtgtcgacgccaccaaaattgcaggattcgcccttgccacctcagctctcgttgtttctggagcgagtgcagaaggtgttccaaagaggctaaccttcgacgaaatccagagcaagacatacttggaagtgaagggaactggaactgctaatcagtgcccaaccattgaaggtggagtggactcatttgccttcaaggcagggaaata

SEQ ID NO: 107578 - DNA, 209 bp, Glycine max
cccagttttgattggattcgtgtttacttaatttaacagggttacaaaatgtgagcggcatcaattttcttatcaaagagggtccaaaagtcaatgcaaagttcgagctgaagccgccaccatatccactgaatggtttggagccggtgatgagccagcagacacttgagtttcactgggggaagcaccacaagacttatgtggaaaat

SEQ ID NO: 107579 - DNA, 214 bp, Glycine max
ggtcatgagaccaccggttcagtgctgacctggacactttatcttctaagcaaggattcttcctcattggcaaaagcacaagaagaggtagacagagttttacagggaaggcgacctacctatgaagatattaaaaatcttaagttcttgacacgctgcattattgagtcactccgtctctatccacatcctcccgtattgataagaagagctc

SEQ ID NO: 107580 - DNA, 224 bp, Glycine max
cagacatgatcaagaagggaaagatgtgcgctctcttcatcaacgatcttgatgcaggagctggtcgtcttggtggaaccacacaatacactgtgaacaaccagatggtgaatgccactctcatgaacattgctgataaccccaccaatgtgcagcttccaggtatgtacaacaaggaagagaacccccgtgttcccatcattgtcaccggtaacgatttctca

SEQ ID NO: 107581 - DNA, 224 bp, Glycine max
  unsure (1)..(224): unsure at all n locations
atttgcaattgaagttaaaagccttagccttccctacaactccagacttgtanacatctgtanncatnnnttnctncgtctccactgtcnnanctttcaacanacctcttttnaacctnaatngttctggagctggagcttcagctcccagttcagccttctttgggaccagcttgaagaaggttattgcctcaagggtccccaacagcaaggtttccggtggg

SEQ ID NO: 107582 - DNA, 218 bp, Glycine max
gccgtttctaattaatgataggtgtcaagtggaagtgcagtgatgtatgcagctgaggcatcctaacagaccaggcagaccttgaatgagaagataggccaactaaactctgccattgataatgtatcttcccgtttgagaggtggcaacaacgtacctgctgcaaagatagaaagtgatcctgaggtggaagcaaccatgtgagacgcattcagttt

SEQ ID NO: 107583 - DNA, 218 bp, Glycine max
caagacagacctgtctttgctgcccctgcccccatcatcaccccaactgtgagagaggatatggcaaaggaatacgagcaagctattgaagaactccagaaattgttgagggagaagagtgaagtcaaagccacagctactgagaaagtggagcagataacagcttctctgggaacatcatcatctgatggcatcccatcatcagaagcctcagacag

SEQ ID NO: 107584 - DNA, 217 bp, Glycine max
gagaaaatatggacaaaagatatcaaagggcaatccttgtcctcgggcctattatcgctgcaacatgggaactgcatgtccagttcgcaagcaggttcaaaggtgtgctgaagatgagagtgttgtcatcacaacctatgaggggaatcataatcattcactcccaccagcagccaggtccatggcgtgcacaacatcagcagcactgaaaatgttc

SEQ ID NO: 107585 - DNA, 213 bp, Glycine max
ttttaaaattttacaatattgttgcaaatcctccaaataaatacatagtcattgtgtagggtacttcagatgaagttgtagattgctcacatggcaagcaactctgggaactgtgtaaagagaagtacgaaccactgtggctcaaaggaggaaaccattgtgatttggagctctttcctgagtacatcaggcatctgaagaagttcataacaa

SEQ ID NO: 107586 - DNA, 213 bp, Glycine max
gtttctaagaatgatgatgatcattacatgtatgagactcaatttagttgtaacaataatattactagtttcattgatagttgcattgagagtttcaatttaggtgatattgacaaatacaatgatatttatttttatagttacatttttttgaagggcagaaattgtattgaaagcgataattctagtactagtataattactagtacgaat

SEQ ID NO: 107587 - DNA, 213 bp, Glycine max
gcatggagcccgtggagaagtgtttgcgggatgccaagatggataagagtaccgtccatgatgttgttcttgttggtggttctactaggattcccaaggttcaacagttgttgcaggacttcttcaacggaaaggaactttgcaagagtattaacccagatgaagctgttgcttatggtgctgcagtgcaggctgcgattctcagtggcgagg

SEQ ID NO: 107588 - DNA, 214 bp, Glycine max
taactattcctgagactgagtctgcccataccataatttacctcatagtgtcgacatggtttgcgaggaagagttgttgattgaaaaagtgtgctcgatctatgaacaaatctcaagcctcgagagtctcaaaccttgcaagaatgtcgacatgcttttcaccaaactagtcctgacatgcatacccccaagcccaatcgaagtcacaaagcta

SEQ ID NO: 107589 - DNA, 220 bp, Glycine max
cactcctacaccggcgaccaaaggcttctcgacgcgagccaccgtgacctgaggcgcgccagggcggcagctctcaacattgtccccacttcaacaggagcagcaaaggcagtggcccttgtcctcccaaccctcaagggccaactcaatggcattgcactccgtgtgccaacaccaaacgtctcagtggtggacctcgttgttcaggtctcaaagaaga

SEQ ID NO: 107590 - DNA, 218 bp, Glycine max
ctcgagccgcttcaccagcaggtgctcaagaatgaagcatacatagctggagatataggaacctctcttcaggaatcatttttcagaatggacgagatgatgcgtggtcaaagggggtggagggaaatagcaattttgggtgataagataaacaagtttaatggtaagatagaagggttgatttggtctccacgaagcagagatattaaggagcaaga

SEQ ID NO: 107591 - DNA, 213 bp, Glycine max
cttgtgttctctggtcggacagtgaaatacttttctaatctgaggagtactttaggtcctggagttgatggttgggccatctctctgaaagcaatgatgagcatagttgtgggcatgggatttgcaatctgtttcctgtattggtgggtgaacaattatgttcctcttcctacacgtagcaagaagaagaaggagaagcccaagatgggaaca

SEQ ID NO: 107592 - DNA, 212 bp, Glycine max
cataaacgggtggtgcctctcttccatctccccagccaaaacctctctcaggaaggccacattacgcccttccgtcttcgcaacccttaacactccttcttctccttcctcttcatcttccttcccctctctcattcaagacaggcctgtttttgctgcccctgcccccatcatcaccccaactgtgagagaggatatggcaaaggaatacg

SEQ ID NO: 107593 - DNA, 210 bp, Glycine max
gcaaaggattctacccgccgctcgatgggaattgcgcttcaaggcgtctcgtagggctaatccgcctcacgagggtcaccaacggcacgtgcctttggggggccgaggccccctactgctggtcggcaaacggacggcgggcgcacgcgtcgcttctagcccggattctgacttagaggcgttcagtcataatcgcacgcacggtagctt

SEQ ID NO: 107594 - DNA, 268 bp, Glycine max
  unsure (1)..(268): unsure at all n locations
gccgcgacttcgacgaattcgaccacgcctccgattccgactccgccgccgaatccgttcaccccgacgagcttgacatttccaagctcgacttgccctcgcgcctcgtcgagtctctccagagccgtggaattactcaacttttccccattcagagagcgtttgnagtacctgaatagnaaggaggagtatctcattgcgcgaccaagaccggtaccggaaagacgtcagtggcggcattcctattattaaagcctcactgaagatg

SEQ ID NO: 107595 - DNA, 275 bp, Glycine max
cacagctggtgtgagattaagaatggctgtgttatggtcacagctcatgcagtattaggaaagaagttgttctgcatagagtggaagaaccagcggaagctagctatattcagtccagaggacaattcatggaaaatggtaccagttccgttgacaggaagctcaagcattgattttcgaattgggatactagatgaaaagttgttgctattccctctggaagctgaaactgcttttcaaacattgctgtatgatccaaatgcaactctggggtc

SEQ ID NO: 107596 - DNA, 272 bp, Glycine max
aattgtgaagggaaccatgacaaccacgcattcctacactggagaccagaggcttttggatgcttcacaccgtgacttgagaagagccagggctgcagcacttaacattgtcccaaccagcacaggagctgccaaggccgtgtctctagtgttgccacagctgaagggcaagctcaatggaatagcgctccgtgtgcctacacccaatgtttcagttgttgaccttgttgtgaatgttgagaagaagggtcttactgctgaagatgtgaatg

SEQ ID NO: 107597 - DNA, 273 bp, Glycine max
gagaaagaggcagatagaaaaaaagagcgacttttgagttcaaaagatgactaacttcccattgatcaacttggagaagctcagtggtgaggaaagaaacgataccatggaaaaaattaaagatgcttgtgaaaactggggattctttgagctggtgaatcatggcattcctcatgacatattggacactgtggagaggtgaccaaagagcactacaggaaatgcatggaagagaggttcccaaggaattagtggcaagcaaaggtctagatg

SEQ ID NO: 107598 - DNA, 272 bp, Glycine max
ggaataaaggttactctattccatggtcgtggaggcagtattggtcgtggtggtggcccaacatatctggctattcagtcccaaccccctggctctgtgatgggaacgcttcggtctactgagcagggagagatggtagaggctaagtttgggttgccacagatagctgttagacaacttgagatatacacaacagctgtactacttgcaacccttcgtccacctatcccaccccgagaagaaaaatggcgtaatgtcatggaagagatctc

SEQ ID NO: 107599 - DNA, 273 bp, Glycine max
ggactctctctcttcttcacatgctcattggctttcagcatatctatggcagaggcaaaactaaggtatgctgttgttactggagcaaacaaagggataggatttgagactgtaaaagagctggcctcaaatggagtcaaggtggtgctcacagcaagagatgagaaaaaaggccatgaagcctttgagagattgaaagagtgtggtttctctgatttggtaatttttcaccaccttgatgtcactgaatctgctagtatttcttcactagta

SEQ ID NO: 107600 - DNA, 276 bp, Glycine max
ggcagaaagcaagctcatcctagagttttaaaaatggcagcagcctcctccatggctctctcttccccatccttggctggcaaggccgtgaagctgggcccatcagcccccgaagtcgggagggtcagcatgaggaagaccgtcaccaagcaggcctcctccggaagcccatggtacggcccagaccgcgtcaagaacttgggcccattctctggcgagcccccgtcctacctcactggcgagttcccaggtgactacggctgggacactgctggg

SEQ ID NO: 107601 - DNA, 279 bp, Glycine max
gcaagtggcccgaggtttcaagatctttgtcaggcaggagttaagggacttatcacagcaattgatcgttttgagccaaaaagaagacttcagctatctacatacagtttattttggataagacattctatcgttcgttccataaccctctcaagcttcacacgtgttccttttggacttgaaagggttagagtagatatccaaagaacaaaacttaagttaacatttgaagctccagaggtcaccaacggaagaagagttcgtagaaagaattgggat

SEQ ID NO: 107602 - DNA, 269 bp, Glycine max
tcgggattgtcaagaacgatgactccgatttgtaccggaagcttgttattgcttccgcttggaggaaacagatgccgaagctcgcgctttcgcttggtctcgctcagcaaatgcctgatatgattgaagagttgatcagcaaagggcagcagcttgatgcggttcactttacctatgaagtgggtctggtggaaaagttccctcctgttcccttgttgaagtcttttctcaaggatgctaagaaagttgcggcttctattttggaagat

SEQ ID NO: 107603 - DNA, 267 bp, Glycine max
cccagttttgattggattcgtgtttacttaatttaacagggttacaaaatgtgagcggcatcaattttcttatcaaagagggtccaaaagtcaatgcaaagttcgagctgaagccgccaccatatccactgaatggtttggagccggtgatgagccagcagacacttgagtttcactgggggaagcaccacaagacttatgtggaaaatctgaaaaaacaagttgttgggacagagcttgatgggaagtcactagaagagattattg

SEQ ID NO: 107604 - DNA, 271 bp, Glycine max
atagcatagaagaagcagaaagagaagcattagcaaaagcaagaagaactagtctaagcagaaatggcctcttcagtgatggcatctgtggccctcaaacctgcccctttcactgttgagaagtcctcagttagaggccttccctccctctcaaggaactcctcttcattcagagttgtggccagtggtggcaagaagatcaagactgacaagccttatggaattaatggtggcatggctttgagggaaggagttgatgcatctggcagga

SEQ ID NO: 107605 - DNA, 271 bp, Glycine max
gaaaaaaaatctcaaaataaaacaaccaaaccacacacttcacaccctcttcaacatcctcagcaagtacaagaacaagaagaaacaatgtcttgctccaatctcacaatgttggtgtcctcaaaaccttccctttccgatccctccaatctctccttccgctctgtcctcaacccttttcagctcccttcacaaaacccaacttcatgcactccttcacgctcctcaaccacccaaattcagtgtggtctgagagaactcagaacccgca

SEQ ID NO: 107606 - DNA, 270 bp, Glycine max
aagagattgaagagacccagcagaccgacaaggacagatggaagggtcttgcctatgatatctcagacgaccaacaagacatcacaagaggaaagggtttggttgactcccttttccaagctccacaggatgctggaactcactatgcagtcatgagctcctacgagtacctcagcactggacttcgccagtacttggacaacaaaatggatggattctacattgctccagcttttatggacaagcttgttgttcacatctccaagaact

SEQ ID NO: 107607 - DNA, 225 bp, Glycine max
tgattttgatattgcacgataaattcggctacatattctctaatagcaaagctgtccttgatgaagtaaacaacctttctcttctattagccttcacaattctgctcaacagtgttcaaccagttctctcgggggtggcagtgggatcagggtggcaatcatatgttgcatacataaatttgggttgctactatattattggggtgcctcttggagatttgatgg

SEQ ID NO: 107608 - DNA, 272 bp, Glycine max
gaagaaaatgaaagtccttgttttctttgttgctatagttctagcagcatggcattgccatggctcagaccatgaccatgaccatggccacacctaccaaattttccctctgagaatgaaaactggccatggtggccactacattccggaggtatcatgccaaagttggaggcttggtgtggaagcacacaacgtcattgactggaaaaccgttcctcaagattgcgagggatatattgggaactacatgcttggcgaaccatatagatcag

SEQ ID NO: 107609 - DNA, 276 bp, Glycine max
taaaagccttagccttccctacaactccaaacatgaagacatcttcatccatggctgcctccgtctccactgtcggagctgtcaacagagctcttttgaacctgaatggttctggagctggagcttcagctcccagttcagccttctttgggaccagcttgaagaaggttattgcctcaagggtccccaacagcaaggtttccggtggaagcttcaagattgttgctgtagaagagaagaaagagattgaagagaaccagcagaccgacaaggaca

SEQ ID NO: 107610 - DNA, 268 bp, Glycine max
attgaagttgaagtcttgcccttctctcttcaactccaaacacaagacatcatcatccatggctgcctccgtctccactgtcggagctgtcaacagatcttttgaacctgaatgggtctggacctggggtttcagctcccagttcatccttctttgtgagcagcttgaagaaggttattggctcaagggtccccaacacaaagatttcctctggaagcttcaagattgttgctgtagaagagaggaaagagtttgaagagaccagcag

SEQ ID NO: 107611 - DNA, 266 bp, Glycine max
tgacaatcttggacgaatcaatggggtgtatgctggggcaacatgacgaatccgggaagaaagagcgcgctgtttactacctaagtaagaagttcacgacctgtgagatgaattactccttgctcgaaagaacgtgttgtgctttagtatgggcgtcccatcgcttaaggcagtacatgctgagccatactacctggttgatatccaaaatggacccggtcaagtacatctttgaaaagccagctctcacaggacgaatcgcccgg

SEQ ID NO: 107612 - DNA, 267 bp, Glycine max
atagaaatggctaaaaacgagttgaggcttttgggtgcttggttcagtccatatgccctgagggtgcagattgcccttaacctcaagggtctagattatgaggttgttgaagagaccttgaatcccaaaagtgatctgcttcttaagtccaaccctgtgcacaagaaaatcccagttctactccatggagataaagtcatatgtgaatctgcaatcatagtagagtacatagatgaggtttggtccaacaatgctctctccatcctt

SEQ ID NO: 107613 - DNA, 255 bp, Glycine max
ggctcgagcatcttcccaaccactactactagcctcactgcagatctacattgcatcgctgtccatgactaccatcgttagcatcaaggcccgccagatcttcgacagtcgtggcaatccaactgtcgaggtggatttgacttgctccgatggtacttttgccagagctgctgttccaagtggtgcatccactgggatttatgaggcccttgaattgagagatggaggatctgactaccttggaaagggtgtatc

SEQ ID NO: 107614 - DNA, 268 bp, Glycine max
caggaacagaaatatttacttgccaagtttgtgctgatccaagtgctagaagttgtgatgggacttgcgtgtaacattcttagaattctcaatgtcttaggtgcaaagagaagatgccaagtttgagatgattttactatatttttcatattggactgtcttcctctataattttgagttaaagtgtccacttaaattgaaaaataaaaaaaaaaaaaaaaaaaaaaggaggaatagttaacactgtcaaaaaaaagaacaatggggg

SEQ ID NO: 107615 - DNA, 259 bp, Glycine max
caagaaagaacagcaccacatactgttatgattaacctcttgcattagaaactgccttggaacattcatgggcaatccaatagccatgatttcaaagagccacagataaaaatcttttaaaggtaacagagcttacatttgcagataaagatggtagctgaggttctcctcttgttcctgtggagaattatcctgggctcaatgatgttggcatggtagcctggattatggaaatgtgtacccctgagttcccatctgg

SEQ ID NO: 107616 - DNA, 272 bp, Glycine max
aagaaactaacatgaagggcttatacggttacaaggtttttgtttccattgctcttatcctgggtgatggcatatacaatttcaccaagattctaatttctacagtcctcaatgttaatgaaagaatgaggagcaagaataataaaaatgtagctgctgatcggcacgagaatcctaccgaggaccttaaacaaactgatgaatttctaagggagaccattcccctgcggattggagtcattggatacgttgttttcacaatgatttccata

SEQ ID NO: 107617 - DNA, 260 bp, Glycine max
aaaaaactttcgaaagattttatccaattgaaattttaaaaatgactgggataaacataagaattcaattattgaaattgaataagtaagcaatttaattggattggtcgaatggtatcaaaaagatggagtactaactctcaaatcttatttattattgaattaaccgatcaacttgctttgataacgagcatttcttttagatttcaaaaattttccggaaaacatttgaatctatttatatatgcgaatcaatccta

SEQ ID NO: 107618 - DNA, 262 bp, Glycine max
ggtttgagccctgctgagcttcttgactcgccggttctccttaattcttccaacattctgccatctccaacaactggagcatttgttgctcagagcttcaattggaagagcagttcaggggggaatcagcaaattgtcaaggaagaagacaaaagcttctcaaatttctctttccaaacccgatcaggacttcctgcttcatccacagcaacatacaacacctcaaatgtcacagttcaaacacaacagccatggagttttc

SEQ ID NO: 107619 - DNA, 262 bp, Glycine max
ctcgagccgctgtcatacccacttccccttcaagagcacacgcccagatcagcgttaacaacgtcttacaactgcgaaacaaaaccaatctgaaatgtccgaccaacaagagatttacgctgcgttccccaacgtccctcaggctcctcctgattccatcttccaattgaccgctcgttacgtcgccgacaagcatccgaacaagatcaacctgggtgtcggggcatacaggacggacgatgggaaaccttgggtcttgccc

SEQ ID NO: 107620 - DNA, 264 bp, Glycine max
gagagacttgatcattgagagccacgaccacgcgtttcaggtgaaggaaggggagatgctgttcgggtaccaaccattcgcgacgaaggatcctaggatcttcgagagggccgaggagtttgtcggggacaggttcgtcggggaggaaggggagaagctcctcaagcacgtgctgtggtccaatgggcctgagactgagtctccaacacttgggaacaagcaatgcgccggaaaagacttcgtcaccttggtttcgaggctttt

SEQ ID NO: 107621 - DNA, 266 bp, Glycine max
ctaaagcttgctctaatcagtttgtgtggtgttgtgttctcccttgctctcctaaccgccgcttttcgcgaaagcgaaatccactcaccaatggttagtgccattcaatcctctcaattcaacaacaacaacacctgccctgattacaaaacagctttgaactctgctgaatggacttgcatgacatgcctaaaggcttcaccatcttgtggttattgtgctgctgatgacaagcttttacccggggcatgtttgatagccaatgt

SEQ ID NO: 107622 - DNA, 267 bp, Glycine max
tacaaaggttgctgtaggagataagattgcagtagtgctaagtgctaacacctgcagtgaacaatggcctctgcatcagcatctctgctcaagtcttcacttgttcttgacaagtctgagtgggtgaagggacaaacccttcgccaaccttctgcatcagttgtgagatgcaaccccaccacgccatcaggcctcaccatcagagctggttcctatgctgatgagctcgttaagaccgcgaaaacagtggcttcaccagggaggggt

SEQ ID NO: 107623 - DNA, 263 bp, Glycine max
acaaggcagaaagcaagctcatcctagagttttaaaaatggcagcagcctcctccatggctctctcttccccatccttggctggcaaggccgtgaagctgggcccatcagcccccgaagtcgggagggtcagcatgaggaagaccgtcaccaagcaggcctcctccggaagcccatggtacggcccagaccgcgtcaagtacttgggcccatcttggcgagcccccgtcctacctcactcgagttcccaggtgactaacggct

SEQ ID NO: 107624 - DNA, 271 bp, Glycine max
tacatttgtaaaagccttgctttattgccattggatctcctttccttaggactgtcttaaagatacatattgaacctgagctactgcataaggattctgtccttaaagtggaaagcagacaagatcttattttctataagggtgggaaactagttcttagtaatagtgctctggctaaattcatcagtggttacaagaaatatgggaggattggtgaactttcaaaacttttacttagtattcaaggggaactaaattcagtggcagggtc

SEQ ID NO: 107625 - DNA, 269 bp, Glycine max
ctcgagccgctcgtcgtgtttctctctgttctgattcgagatccgccatgtccatgctctacagattctctctcctcctccctctcttcctctctacggcctttgcttccgagtcagatcataggtatcaacaagatgaccagttaacctttggggtgaacaaagttggtccttataacaatccacaagaaacgtacaattattacagcctaccattttgccgttcacctggtaatcctgcacacaaatggggtggtcttggtgaggtc

SEQ ID NO: 107626 - DNA, 245 bp, Glycine max
ctagaagttgtgatgggacttgcgtgtaacattcttagaattctcaatgtcttaggtgcaaagagaagatgccaagtttgagatgattttactatatttttcatattggactgtcttcctctataattttgagttaaagtgtccacttaaattgaatttggtgccttttccttttgtcctaaaaaaaaaaaaaaaaaagaaaaaaaaaaaaaaaaaaaggggggccccccaattagtaacccctt

SEQ ID NO: 107627 - DNA, 273 bp, Glycine max
tggcctcaaaacgctttgtcgtttgtggttattgagtcctgagtgatcttgtcatccgacctttgccatgacaggtgcgcttgcatggcaggtcaaaaaatgttaataaaaaaagttttattggtttggggacagatcgcacgggggttgcccggggtctcttcctcttgtgtggtgtggtgtttgctgtgctctccttttcgttatgccttttattattacctatctgtcgctccactccgtattacgactctggatcagaggatacatcag

SEQ ID NO: 107628 - DNA, 247 bp, Glycine max
ctaaaacatctccagtgggttcttcttcttctattacaacaacgtcgctaaagaccatgaccatggccatggccacgatcctgctcctgttcacggtcttcgcggtttcatcggccctagacatgtcgataatctcgtacgacaacgcccacgccgccacgtcgcgcagcgacgaggagctgatgtccatgtacgagcagtggctagtaaagcacggcaaggtgtacaacgcgctcggagagaagga

SEQ ID NO: 107629 - DNA, 241 bp, Glycine max
cgaaaactagaggccagggtctgtagtgtgcgggtgggtttgtttatctcaaacacagaacagaggtgtagagaagaaagctctcaaaagtatggcggcggagtcatcactgagggtggcgactcccactatttgcaacctcaatggttctcagagaagaccaaccactctctctccgcttcgcttcatgggttttagccctcgaccctctcactctctcacttcctcttcccttccacac

SEQ ID NO: 107630 - DNA, 263 bp, Glycine max
ctttgtgtacgatttcttaagggaaagataatcactctctgtgctggtcacagacttcgtgaatcattttcttttccactcctagtatattttttgaacactctcctatttgatataggacttcgtgtcagatttaaactttttctgtttttttctcagttctctgtaaaatcacgatttaaagctggtgaaattttggattagtgctcccactctcctatctggtataggacttcgtgggtagacttttctacttctctcct

SEQ ID NO: 107631 - DNA, 254 bp, Glycine max
cctggcggcttccaccgcagctatgtcagaaatgcttggaaaccccgtgagcctgagaggcgccaccaggtctgctccatcaccgtctacacctgttactttcaagaccgttgcgcttttctccaagaagaaggcagcaccacctcctccaaagaaaaagcctgctgctgtatcccccgccaatgaggaactcgccaagtggtatggtcctgacagaaggatcttcttgcctgagggtctcttggaccgatcag

SEQ ID NO: 107632 - DNA, 259 bp, Glycine max
atgctatcaagagcatcacttcttgctgaagtggcatccaagggtgtgatgtcttgtgtaactcaggaagtgaaggacatttaccatcttttggaacatgagttttatccctcagatcttgcattaaaagcactgcccttaataactaaaatctcaaagttagggggcaagctttctactgcgtcatctgttccagaagtgcaattagctcagtatgtttgctggcatggaaagactggctaccatgaggttgctgcaa

SEQ ID NO: 107633 - DNA, 264 bp, Glycine max
tggttgccattctcatcctcctctgtctctctctctccaccattgccatggattcttacaagctccggccatccagcgccttcaattctcccttctggactacaaattctgttgctcctgtttggaacaacaactcctctttaaccgttggagctagaggtccaattctgcttgaggattatcatcttgtggagaagcttgcaaactttgacagggaacgtatcccagaacgtgttgtccatgccaggggagctagtgcaaagg

SEQ ID NO: 107634 - DNA, 265 bp, Glycine max
gtagccctaggaacaggaaaaaaacaaatggaaaaacaactacaggaacttgaaatatcataccctgacaaggccagaggagtggcaaaattcaatgttcccctagcccacatgataattgctggagctgattttatattggttcctagcagatttgagccttgtggtctcattcagttacaagctatgcgctatggatctgtaccaattgttgcctcaacaggtggattagttgacactgtcaaagaaggtttcactggatttc

SEQ ID NO: 107635 - DNA, 254 bp, Glycine max
taaacttgcccatatactgatgtttctagccatgtttaagtttttccttaaactaactatgctgtcagggaagatattttcactcaagttgtcaatttactatctctactagctggatattgatttccttgtggcatgaacgagttattttataatttgattttatgcttttgtaaaaaaaaaaaaaaaaaaaaaaaaaaaaaaaaaaaaaaaaaaaaaaaaaaaaaaaaaccggggaaaaaaaagcgggtttt

SEQ ID NO: 107636 - DNA, 266 bp, Glycine max
gtcaacttggaagaatttgttatgactaaagacgaattctccggagctgatataaaggcaatatgtactgaagctggtttacttgctctacgagaacgtcgaatgaaggtgactcatgccgactttaagaaggccaaggataaagtgatgtttaagaagaaagaaggggtgcctgaagggctgtatatgtgaaaaactatcctctattatctctggccctcttgtctttctttaacgttctagttatgcgaacaaatgccattcat

SEQ ID NO: 107637 - DNA, 272 bp, Glycine max
tgtctaattgaaattttaaaaatgactgggataaactttagaattcaattattgaaattgaataagtaaacaatttaattggattggtcgaattgtatcaaaaaaatggagtactaactcccatttcttatttattattgaattaaccgatcaacttgctttgttatcgaacatttctttttgatttcaaaaattttcctgaaaaaatttgaatctatttttatatgcgaatcaatcctactacttctggaccagaggtttctgcgcttgaa

SEQ ID NO: 107638 - DNA, 270 bp, Glycine max
gcagcttccaggtatgtacaacaaggaagagaacccccgtgttcccatcattgtcaccggtaacgatttctcaacactctatgcacctctcatccgtgatgggcgtatggagaagttctactgggcaccaacaagggaagaccgcattggtgtttgcaccggaattttccgcactgatggtattcctgaacaggacattgtcaagcttgttgacaccttccctggccaatccattgatttctttggtgcactgagggccagagtatatga

SEQ ID NO: 107639 - DNA, 266 bp, Glycine max
tgcaattgaagttgaagtcttgcccttctctcttcaactccaaacacaagacatcatcatccatggctgcctccgtctccactgtcggagctgtcaacagagctcttttgaacctgaatgggtctggacctggggtttcagctcccagttcatccttctttgggagcagcttgaagaaggttattggctcaagggtccccaacacaaagatttcctctggaagcttcaagattgttgctgtagaagagagacagagattgaagaga

SEQ ID NO: 107640 - DNA, 264 bp, Glycine max
gtagccctaggaacaggaaaaaaacaaatggaaaaacaactacaggaacttgaaatatcataccctgacaaggccagaggagtggcaaaattcaatgttcccctagcccacatgataattgctggagctgattttatattggttcctagcagatttgagccttgtggtctcattcagttacaagctatgcgctatggatctgtaccaattgttgcctcaacaggtggattagttgacactgtcaaagaaggtttcactggattt

SEQ ID NO: 107641 - DNA, 262 bp, Glycine max
cgggaaggaattttggaatgtaataatatcgattcatacagatacagaagaaagggttctctattgattcaaacgctctacctacgagatagggatagagaaagaggaaaaaaccgaggatttcacatagtacttttggtcgaaaatccgctcgattttttttcgtacttttcgctcaatgatgaaatgggtcagattctacaggaccaaaccttgtgggagttacggaatgatggaagaaaagccataaaaaaaagtaaat

SEQ ID NO: 107642 - DNA, 236 bp, Glycine max
  unsure (1)..(236): unsure at all n locations
ttttcttctataataataaaattaagaaattttcatggtaaccattcgtgcagatgaaattagtaaaattatccgtgaacgcattgagcaatatattacgatagtanaaattgtaaatacgggtaccgtacttcaagtaggcgacggtattgctcgtatcaatggctttattaaattattggcaggtaaattaggggaatttgaagagggtactgtaagcattgctttgaatttgg

SEQ ID NO: 107643 - DNA, 256 bp, Glycine max
ccttatcctgtttctttcaatggaagtcatttctgcttctagcttgaatcccaacgctccgatgttcgtgccactcgcctatcggacggtggaggatttctccgaccagtggtgggacctcgttcactcctccccctggttccgcgactactggctccgcgagtgcttccaagatccccagttccaaaacgacgacgctttcgacttcgactttgacctagatctccaagatgaagatgaaagggaacgaaaggaa

SEQ ID NO: 107644 - DNA, 261 bp, Glycine max
cagattcctaccagcatccagccttccttattgttgatggagtgtcttccatttgtgctcttgatttccgcatggatgaatggggagttgatgtggcaataactggctcccagaaggccctttcccttcccactgggataggtattgtggttgcaggccctaaagctattgaggcctcaaaacatgctaaatcacttagagttttctttgactggaaagactacctcaaattctaccagctaggaacctattggccataca

SEQ ID NO: 107645 - DNA, 263 bp, Glycine max
atgctatcaagagcatcacttcttgctgaagtggcatccaagggtgtgatgtcttgtgtaactcaggaagtgaaggacatttaccatcttttggaacatgagttttatccctcagatcttgcattaaaagcactgcccttaataactaaaatctcaaagttagggggcaagctttctactgcgtcatctgttccagaagtgcaattagctcatatgttccagcactggaagactgaggacatcaagaggttggctgcaacagg

SEQ ID NO: 107646 - DNA, 267 bp, Glycine max
ctcgagccgtgaggactaccgttctccagcaattccagctatgacaaaaacttcgcttgaggctgtctagaagcttttcaagaccactactggaaccccatttctcatccctacaactggtactggtgcttgggagagtgctctcacaaacacactgtctcctggggatctaattgtatcgttcctgattggccaattcagcttgctttggattgatcagcagcaacgcctgaagttcaatgttgatgttgttgagagtgaatgggg

SEQ ID NO: 107647 - DNA, 266 bp, Glycine max
agcattttaccggcaaaaccttcccaatgtgacaaatctgcttgctaccatcttgatcttcctaattgtgatatacttccaaggatttcgtgtggttttgcctgtgagatcaaagaatgcccgtggacagcaggggtcttatccaatcaagttattttatacctccaacatgcccattattcttcagtctgcccttgtttccaatctctacttcatttctcagcttctacacagaaagtacagtggaaacttcattgtagatctat

SEQ ID NO: 107648 - DNA, 265 bp, Glycine max
gtgcttcctctgcaattacagctgttgccatctctacgccgagttccgggcagaagaatggatcaggaggttgttttcttagtggaaggaaattgagggtgaaaaaggagagagcagcaattggaggacgatcgatgggcactacagtgtgcgcagttgctgagcctgacagacctctatggttcccaggcagcacccctcctccatggcttgatggcactctacctggagacttcggctttgaccctcttggtcttggatctga

SEQ ID NO: 107649 - DNA, 267 bp, Glycine max
gaaaaatcctacagttgtttttgtgttaggtggcccaggcagtggaaagggtacccagtgtgcaaatattgtcgaaaattttgggtatactcacctcagtgctggtgatcttctgcgagcagaaatcaaatctggttctgaaaatggcacaatgattcagaatatgattaaagaaggaaaaattgttccctctgaggtaacaattaagctcttacaaaaagcaatgcaggaaagtggcaatgaccaatgtcttattgatggttttcc

SEQ ID NO: 107650 - DNA, 271 bp, Glycine max
atgaagttcttggtaatgtgaacaacaagtttgtccataaaagctggagcaatgtaaaatccatccatgttgttcacattaccaagaacttcatgaccctgcccaacatcaaggttcctctcattcttggtatctggggaggcaagggacaaggaaaatctttccaatgtgagcttgtctttgccaagatgggaatcaaccccatcatgatgagtgctggagagttggaaagtggaaatgcaggagagccagcaaaactgatcaggcagag

SEQ ID NO: 107651 - DNA, 268 bp, Glycine max
catgccaccaaagcctttagactatgggtcaataaatgaaaacgtgaagaagagtcaatatgctgtcagaggtgaattataccttcgagcttctgaacttcagaaagagtgcaaaaagattatctttactaatgttggcaacccgcatgcattgggacagaaaccactgagcttccctcgccaggttgttgctttgtgccaagctccattcctacttgatgatcctaatgttggactgctattccctgctgatgcaatgcaagagcta

SEQ ID NO: 107652 - DNA, 272 bp, Glycine max
ctctcttccatctccccagccaaaacctctctcaagatggccacattaggcccttctgtcttcgcaaccgttagcactccttcttctccttcttcttcttcttcttcttccttcccttctctcattcaagacaggcctgtctttgctgcccctgcccccatcatcaccccaactgtgagagaggatatggcaaaggaatacgagcaagctattgaagaactccagaaattgttgagggagaagagtgaactcaaagccacagctgctgagaa

SEQ ID NO: 107653 - DNA, 267 bp, Glycine max
ctagtttcttacaagcctctactatactgcttcaccttctgctctagaaaattcagtgctgaaacatggcttcggctactctctctgtagccaaaccagcccttcaggcaaatgggaaaggcttctctgaattctctggcctccgaagctcatcaggcttccttcccttttctagaaaatcttcagaggatttccattctgtcattgccttccagacctatgcagttggaagcagtggaggatacaagaagggtgtgacagaagcaa

SEQ ID NO: 107654 - DNA, 263 bp, Glycine max
cacctttgttcactcttcttctcttgcggctagggttttagcgcactcttctagatttaaggaagatgggtaaggaaaaggttcacatcagtattgtggtcattggccatgtcgactctgggaaatccactaccactggtcacctgatttacaagcttggaggcattgacaagcgtgttattgagaggtttgagaaggaagctgctgagatgaacaagaggtctttcaagtatgcctgggtgctggacaacttaaggctgagc

SEQ ID NO: 107655 - DNA, 270 bp, Glycine max
gtaataataaccaaaacagcagagagaagagaaggtgtagacaaacacaatctctaatggcactcaggatgtgggcttcttccactgccaatgcactcaaagtctcttctacctccagacctcatctcttgcatcctttttctttctccagatgcttgtcttccgtcttggatggacttaagtatgcagattcacacgaatgggtcaagcacgaaggctcagtcgccaccattggtatcactgaccatgcccaggaccatcttggagagg

SEQ ID NO: 107656 - DNA, 266 bp, Glycine max
tatgcttgtctcaaagattaagccatgcatgtgtaagtatgaactaattcagactgtgaaactgcgaatggctcattaaatcagttatagtttgtttgatggtatctactactcggataaccgtagtaattctagagctaatacgtgcaacaaaccccgacttctggaagggatgcatttattagataaaaggtcaacacaggctctgcctgttgctttgatgattcatgataactcgtcggatcgcacggcctttgtgccggcga

SEQ ID NO: 107657 - DNA, 266 bp, Glycine max
gcagaaagcaagctcatcctagagttttaaaaatggcagcagcctcctccatggctctctcttccccatccttggctggcaaggccgtgaagctgggcccatcagcccccgaagtcgggagggtcagcatgaggaagaccgtcaccaagcaggcctcctccggaagcccatggtacggcccagaccgcgtcaagtacttgggcccattctctggcgagcccccgtcctacctcactggcgagttcccaggtgactacggctgggac

SEQ ID NO: 107658 - DNA, 266 bp, Glycine max
gatagtgattccactataggagaaagttctaataatctcgatgaaagtcaaaaatataagcatttgtggcttgaatgcgaaaattgttatggattaaattataaaaaattttttaaatcaaaaatgaatatttgtgaatactgtggatatcatttgaaaatgggcagttcagatagaatcgaacttttgattgattcgggtacttggaatcctatggatgaagacatggtttctctggatcctattgaatttcattccgaagagga

SEQ ID NO: 107659 - DNA, 267 bp, Glycine max
ccataccgaacactcttcttcaatcaagcgaaggtggtctcgattgcaagtgctccacgatacactctacgcttcacaaaaccttcaaacccaattccacagaattcttctgatacaccatgccaccaaagcctttagactatgggtcaataaatgaaaacgtgaagaagagtcaatatgctgtcagaggtgaattataccttcgagcttctgaacttcagaaagagggcaaaaagattatctttactaatgttggcaacccgcatg

SEQ ID NO: 107660 - DNA, 265 bp, Glycine max
ggggaagtgggggtattatttgatcagaagtacaaagctcttcaaaacccaaacaacagctccacggaccacccctactgctctgctctgcaatggccgacgaggaacctgttgatcagaagagatatcttgaagagtcttgcaaaccaaaatgtgtaaaaccattactggaataccaggcgtgcattaaaaggatacatggtgatgattctgggcagaaacactgcactggacaatattttgattattggtcttgtattgacaa

SEQ ID NO: 107661 - DNA, 266 bp, Glycine max
aatctttctacaccacatcgtacagaatttttggctttacaaaactaccgtgtctggtaaagggttcgttaacatttccagtgaaaaaagttgttagctaaaagaagaccaagtttttagtgttgtagaaggaagagaagagttaacatgaaaattcagtgtgatgtgtgtgagagagctccggcaacagtgatttgttgtgcggatgaggcagctttgtgtgccaaatgtgacgttgaagttcatgctgcaaacaagcttgcaag

SEQ ID NO: 107662 - DNA, 264 bp, Glycine max
taccagcgaatcggctcagaagcattgaattcaaaccacttaagttcactccttgtgttttgctttcttcctcaaaaccaaacatgtcgaacacatgcggcaactgcgactgcgctgacaagactagctgcaccaagggaaacagctatggtgttattgtagagactgagaagagctacatcgagactgttgtcatggatgttccagcagctgagcatgatgggaagtgcaagtgtggcactaactgcacttgcacggactgca

SEQ ID NO: 107663 - DNA, 269 bp, Glycine max
ccataccgaacactcttcttcaatcaagcgaaggtggtctcgattgcaagtgctccacgatacactctacgcttcacaaaaccttcaaacccaattccacagaattcttctgcttcaccatgccaccaaagcctttagactatgggtcaataaatgaaaacgtgaagaagagtcaatatgctgtcagaggtgaattataccttcgagcttctgaacttcagaaagagggcaaaaagattatctttactaatgttggcaacccgcatgca

SEQ ID NO: 107664 - DNA, 269 bp, Glycine max
ctcgagccgcataacacaaacacaacacaatacacaaaagcagtaaccagagaaaatggctagtgtcttttctgcatgttcaggttctgctgttcttttctacagcagaaactcctttccctcaaaaggatctttcattcacctcaaaaggcctctctctgccaactgtgtagcttctttggggactgaggtatcagtgtctccagcagtagacactttctggcagtggcttaaagaagagggtgttgtctctgccaagaccccagtga

SEQ ID NO: 107665 - DNA, 265 bp, Glycine max
gtcaggtgatgtcattctcttcattgatgaagttcacatacttgttcaggcagggacaattgggagaggaaataagggatctggccttgacatagctaatttacttaaacctgcacttggaaggggtcaatttcagtgtattgcatcaaccaccctagatgaatacagactttattttgagaaagacacggcattggctcgacggtttcaacctgtttgggttgatgagccgagtgaggatgacgcaatcaagatacttatgggt

SEQ ID NO: 107666 - DNA, 264 bp, Glycine max
tgaaggtttcatgaatttcattcacagggatgaggaggtcaattacttcccttcaaggtatgatcctgttcgtcatgcagaaaggttccccatacctcctgctatctgcagtggaaggcgtgaaaagtgtggaattgagaaggagaacaacttcaagcagcccggagagagataccggtcttgggcacctgacaggcaagatagatttgctcgccgatgggttgatgctttatctgacccacgggtcaccatgagatccgcagt

SEQ ID NO: 107667 - DNA, 262 bp, Glycine max
cgattttctacatcgtgatgtaatgcttgggtgctatttgtggcgctggcgtggtgaagggtttcgaggggaaaacaaaatacggtgcgttgaatggtggtgccaactttgttgcccctggttacaccaagggtgatggtcttggtgctgagattgttggcactttcatccttgtttacaccgttttctccgccaccgatgccaaacgtagcgccagagactcccacgtccccattttggcacccttgccaattgggttcgc

SEQ ID NO: 107668 - DNA, 263 bp, Glycine max
ctctttatcatttggacagtgtctcggcacttttaatgatggttacattgaagagacttgcaagcactggttacactctcatagtgaccatctatcagagcagcacagaagtctttggcctttttgaccacatatgtttactttcaaatggaaataccctcttctttggagaaacattagcttgcttgcagcacttctcaaatgctggatttccttgcccaatcatgcaaagtccttctgatcactttctacgtgcaattaat

SEQ ID NO: 107669 - DNA, 264 bp, Glycine max
ctcaaccaaatctcagttttgagttcaactcaactaaactattagctccttatccctatatgccaacctctcctctctaccatcctccctcaccattcgttctttttcatccaaagatacctctttgaaacaggattggaggacaaagtccaaacctatcccaccaggtggcacataccctgcaaaagatcattgcagtcgttgtgggttgtgtgatacttactatattgcccatgtcaagaatgcatgtgctttcttgggaga

SEQ ID NO: 107670 - DNA, 265 bp, Glycine max
cttaggaaaatccttttaactggatcaggaggtgctttcagagaatggcctgctgaaaagatgaaagatattaagcttgctgatgcattaaagcatcccatatggagtttggggagaaaaataactattgactctgctacccttttcaataagggtctagaagtaattgaagcacattacttgtttggagcaagctatgacgatattgagattgttattcatcctcaatctatcatacattccttggttgaaacgcaggattcat

SEQ ID NO: 107671 - DNA, 265 bp, Glycine max
gcagctcaagaaaaatctgcaaagaataaaacaagaggaggaaatgcaacttacttgttgatataaacttcagacagagcgagttgttgtaaagctagccttgttgcagccatggccacccacgcggctctagcttctacaaggatccccactaacaccaagttcccatccaaggcttcacactctttcccaacccaatgcgcctcaaagagacttgaggtgacagaattctctgggctaagatccacttcatgtgtgacatatg

SEQ ID NO: 107672 - DNA, 263 bp, Glycine max
gtttgctacaagcaaggggtgttaattggacatctataaggccagtctacatctatggacccttgaactacaaccctgttgaagagtggttcttccatagattgaaagcgggacgcccaattcctatccccggctcaggaatacagataacccaacttggtcatgttaaggatttggcaaaagcttttatccaggttcttggtaatgagaaggccagcaaggaagtattcaacatctcgggagataagtatgtcacatttgat

SEQ ID NO: 107673 - DNA, 262 bp, Glycine max
ggaattttataaagaacaaaaagaggaagttgaggaactaaaactgaacatagaaaaagcaacttctgatgttaacagattgagggtggcttctgtgtcactaaaatcaaaactagaagaagagaagtcggttctcgcatcccttaagcaaagtgaggaaaaggcttcggctgcggttgtgaatctccaagctgaactggagaagtctaggtcagccatagctttcattcaaatgaaagaaaatgaagcaagagagatgatg

SEQ ID NO: 107674 - DNA, 262 bp, Glycine max
gagcaaacatatcgcccccttcttttgtatctgattgacatgtgtatggttgaggaatttcaatttttctgtgttgttatcgaagatgagaatcccagttcagttgcaagactgggttactatgaaatgttgatgtggttaaaagataataacgaagaaaagattcaaggtatttgtgacaatattgcagagaataaaggtgaagatacatctgatatacaagaaaattatttattagctctttgtgaaagtgaacggatgg

SEQ ID NO: 107675 - DNA, 260 bp, Glycine max
gcgcgctgaagtttgctaggttcatgagcaggttcgggaagagttaccgaagcgaggaagagatgagggagaggtacgagatattctcgcaaaacctcaggttcatccgctcccacaacaagaaccgcttgccctacactctctctgttaatcattttgctgattggacttgggaggagttcaaaagacacagattaggcgctgcccaaaattgctctgccactcttaacggcaaccacaagctcactgatgctgttctt

SEQ ID NO: 107676 - DNA, 261 bp, Glycine max
attgaatcgactaaaaaatgaaatgaatcatttcatattgatagtattgctatgcttagtccccaaagaaccagatttcgtaaacaacatagagagagaatgaaaggaatatcctatcgagggaatcatatttgcttcggaagatatgctcttcaagcacttgagccagcttggataacatctagacaaatagaagcgggacggcgggcaatgtcacgaaatgttcgccgaggtggacaaatatgggtacgcatatttcca

SEQ ID NO: 107677 - DNA, 260 bp, Glycine max
aaaacaaagaaaaaaaaaaacccttagccaacacaaccatcatggccacctctgctattcagcaatcagcattcactggtcaaactgctctgaagcagctcaatgagttcgtccgcaagaccggtggcgccggcaaaggtcgcactaacatgcgccgcaccgtcaagagtgctcctcagagcatttggtatggccctgaccgtcccaagtacttgggtccattctcggagcagattccatcatacctgaccggagaattc

SEQ ID NO: 107678 - DNA, 260 bp, Glycine max
cccgtgttcccatcattgtcaccggtaacgatttctcaacactctatgcacctctcatccgtgatgggcgtatggagaagttctactgggcaccaacaagggaagaccgcattggtgtttgcaccggaattttccgcactgatggtattcctgaacaggacattgtcaagcttgttgacaccttccctggccaatccattgatttctttggtgcactgagggccagagtatatgatgatgaagtgaggaagtggatttct

SEQ ID NO: 107679 - DNA, 261 bp, Glycine max
gcagtaacagctagacaaaatggtgcccaaggaattggactttgcaggacagaacatatgttttttgcttcagacgagaggataaaggccgttagaatgatgataatggcagttacaccagagcagaggaaggctgcactggacctgttgctaccttatcaaagatcagattttgaggggatcttccgtgcaatggatggtctcccagtaacaattcgattgttagaccctccacttcatgaatttcttccagagggtgac

SEQ ID NO: 107680 - DNA, 263 bp, Glycine max
caagtagttgagaactaagaagaaggaaatggcttcctcaatgatctcctccccagctgttaccaccgtcaaccgtgccggtgccggcatggttgctccattcaccggcctcaaatccatggctggcttccccacgaggaagaccaacaatgacattacctccattgctagcaacggtggaagagtacaatgcatgcaggtgtggccaccaattggcaagaagaagttcgagactctttcctacttgccagacctcgatgatg

SEQ ID NO: 107681 - DNA, 265 bp, Glycine max
tcctcagtagtgcgattttcgattctcttctctgcaactatgcctaaccctaaggtcttcttcgacatgaccatcggcggtcaacctgccggccgcatcgtgatggagctctacgccgacgtgactccgagcaccgccgagaacttccgcgcgctctgcaccggcgagaagggcgccgggcggagcggcaagcccctccactacaaaggctcgtccttccaccgcgtgatcccgaacttcatgtgccagggcggcgacttcaccg

SEQ ID NO: 107682 - DNA, 261 bp, Glycine max
ctcgagccgttctcctctcacccttataaaaacactcattttaactcccacttttgcatttccacctatctatctatccatctatcttttctaacatggctgctgggactggactctttgcagagattttggatggagatgcgtacaagtactatgctgatggagagtggaagaaatctgcttctgggaaaagtgtttccatcatcaaccccactaccagaaagactcaatacaaagttcaagcttgttcacaagaggagg

SEQ ID NO: 107683 - DNA, 262 bp, Glycine max
gttatctgtttcccgccatatatccaataagctttaaccatgtctgcctttgttggaaagtacgcagatgagcttatcaagaatgccaagtacatagccacacctgggaagggcatcttggcagcagatgagagcactggcaccattgggaagcgcctatcgagcattaacgttgagaacattgaggccaaccgccaagctcttcgcgagcttctcttcaccgctccagatgccctccaatacctctctggtgtcatcctct

SEQ ID NO: 107684 - DNA, 260 bp, Glycine max
ctttagccatcactaacactcagtctctgaattggggctgagggtttcgagtaacgtttatttttcacgagtttaagatatcatgggtaaagagaaggttcacatttacattgtggtcattggccatgttgactctgggaagtcaaccaccactggccacttgatttacaagcttggaggtattgacaagcgtgttattgagaggtttgagaaagaagctgctgagatgaacaagaggtcattcaaatacgcctgggtgc

SEQ ID NO: 107685 - DNA, 257 bp, Glycine max
ggcgcagatgccctacactgtgcttcttcctaccagtggggaaggccttactttcagaggaattcccaacagcatctctatctaatgagagtgtgtggtgtgtggtgtgtggttttctttccttccaacgtacctctcattgacaaataaacgtgcaaacttatgtgtgcataattttcttatgtatgcttaagttttgtaattggatgctatctagtttttcatatctaatagggtgttgtgtcagtttttatgta

SEQ ID NO: 107686 - DNA, 260 bp, Glycine max
ataaacatcaagatttcagttccaaacaaaacttatcaaaatctcatatactgattcagttctatacataaccatcgagatttactatcaaaccaaaaattctcaaaatctcttcacctctgtgatgaccatggaatacagaaccttagaactcaacatcatatccgcaaaggacatcaagaacgttaacctcttctccaagatggacgtatacgccgtcgttacgctctccggcgaccctctccaccctcagggcgcca

SEQ ID NO: 107687 - DNA, 261 bp, Glycine max
cttccagatatcattgatcatgtggttcaattcagtagtgatcagtatggtagccgctttattcagcagaaattagaaacagcatcagtacaagagaagaccaagatatttcctgagatcattcctcatgctcgtgccttgatgactgatgtttttggaaattatgttatacaaaaattttttgagcatggtacagatagtcaaagaaaggaattagccagccaacttacaggtcatgtcttacctcttagtctgcaaatg

SEQ ID NO: 107688 - DNA, 255 bp, Glycine max
agagtaaaattatataaatatattgttattctctaagctttaattccgaattttcaattttctgttggatattgaaccttgcttttatggtttatgcagtcattcttctattttaaaaaaaaaaaaaaaaaaaaaaaaaaaaaaaaaaaaaaaaaaaaaaaaaaaaaaaaaaaggggggccccaataaaagtacgtgtaccaccggggaattttttgcgggaggggaacggggggggaaaaaattttcccaaaag

SEQ ID NO: 107689 - DNA, 257 bp, Glycine max
gcgagaaatggcgatggcaatggcgcttcgcaggctttcatcttcaattgataagcctcttcgccctctcttcaatgcgggttccctctactacaagtcgtctttgcctgatgaagctgtttacgacaaggagcgacccggagttacatggccgaagcagttgaatgcttcacttgaggtcgttgatcctgagattgctgatattattgagcttgagaaagctaggcaatggaaggggctggaactgataccgtcag

SEQ ID NO: 107690 - DNA, 255 bp, Glycine max
atacaaaggttgctgtaggagataagattgcagtagtgctaagtgctaacacctgcagtgaacaatggcctctgcatcagcatctctgctcaagtcttcacttgttcttgacaagtctgagtgggtgaagggacaaacccttcgccaaccttctgcatcagttgtgagatgcaaccccaccaccccatcaggcctcaccatcagagctggttcctatgctgatgagctcgttaagaccgcgaaaacagtggcttc

SEQ ID NO: 107691 - DNA, 260 bp, Glycine max
tcttctcttaaaagagcctttgctttttctttaggcctttccgaattaagtacttgtttcattttctctcgaagcaagaaaaatgttcatcgagagtttcaaggttgagagtcctaacgtgaagtacacagagactgagattcagtccgtgtacaactatgaaaccactgaacttgttcacgagaacaagaatggcacttatcagtgggttgtcaagcccaaaactgtcaaatatgaatttaaaaccaacacccatgtcc

SEQ ID NO: 107692 - DNA, 279 bp, Glycine max
tcgcatgtaggcattcggatcgaggaacagttacatgtcttctgtgaggaaaatggcatgtgagattcttgagctgatggcagaaggattgaagattcaacaaaaaaatgtgtttagcaagcttcttatggataaagagagtgactctgtttttagggtgaatcactaccctgcttgccctgaacttgtgaatggtcaaaacatgatagggtttggagaacacacggacccacaaatcatttctctacttaggtccaacaatacttcaggccttcagat

SEQ ID NO: 107693 - DNA, 258 bp, Glycine max
gccccataccatactcattaaagtccacacacacagagcaacactgcactgtgtggaaacgaaacatggcaagagtggtggcactccaacagaaccaactatctttctctaccttagcttcctctctttctgacttcactggaaccagacttcaaactcaacttcagttcaagagaaagcaatgccatccaagagggtctttctacgtctccgcatcgagcaccaagcaaatcctactaataggaggcaccaggttta

SEQ ID NO: 107694 - DNA, 255 bp, Glycine max
gtaatatacataagtaacataaccaatggaagcgcgtgcaggagccaatcagcgtattgcaagaatctctgctcatcttcagcctccaaatttccaggaagggagtgatgttcttcttaagagtgctgagtgcagagcaaagggtggggcacctggattcaaagttgcaattttgggggctgctgggggaattggtcaacccctttctatgctgatgaagatgaacccattggattcagttcttcatctttatga

SEQ ID NO: 107695 - DNA, 255 bp, Glycine max
gttgcccagaagtactgttccagccttctctaattggtatggaagctactggaattcatgaaacgacgtacaactccatcatgaaatgtgatgttgatattagaaaggatctgtatggaaacatcgtgcttagtggagggtctactatgtttccgggaattgctgatcgtatgagcaaggaaattggtgctcttgcactcagcagcatgaaaatcaaggtggttgcacctcctgagagaaagtacagtgtctgga

SEQ ID NO: 107696 - DNA, 257 bp, Glycine max
aggaattgttgtaactttttgattcctaaattctctaaaattcgaaattctaatttcgttaggggaaagagattgtttgtgtgtgagtgagtatggctggaaaaggcgagggtcctgctatcggaatcgatttgggaacgacgtactcttgcgtcggcgtgtggcaacacgatcgtgttgaaatcatagccaacgatcagggtaacagaactaccccatcctacgtggctttcaccgacacagaacggttgatcggc

SEQ ID NO: 107697 - DNA, 256 bp, Glycine max
acttcctactccaaccgcacttctgctccgcaattatcatgggcaaggtcaagatcggaatcaacggatttggaagaattggccgtttggtagccagagtggctctgcagagagacgatgttgaactcgttgccgttaacgaccctttcatcaccaccgattacatgacatacatgtttaaatacgacagtgttcatggacactggaagcatcacgatgtcaccgttaaggacgagaagacccttctcttcggtga

SEQ ID NO: 107698 - DNA, 258 bp, Glycine max
tacaaaggttgctgtaggagataagattgcagtagtgctaagtgctaacacctgcagtgaacaatggcctctgcatcagcatctctgctcaagtcttcacttgttcttgacaagtctgagtgggtgaagggacaaacccttcgccaaccttctgcatcagttgtgagatgcaaccccaccaccccatcaggcctcaccatcagagctggttcctatgctgatgagctcgttaagaccgcgaaaacagtggcttcacca

SEQ ID NO: 107699 - DNA, 263 bp, Glycine max
gtgtattctacttcagaaccaacaccatttcccagtggacctggcagtgacattgcaaaggacaccagaaacgaggaggtgtctatgcttgaaaatgtgtactggaaggagtttggacttcttgtttttgtttgggtttcattccttggaatacagattgccatgaaccagacaagcaaatgttcaacaatatattgggtactgaacatgttgcagattccaatttcagttggggtatctggatatgaggcagcttccttgta

SEQ ID NO: 107700 - DNA, 253 bp, Glycine max
atctcgagcgaatcggctcagggctcgagggaacgttagggaacattgcccctgaagacttctcaagaaacttcggtacacgtgtctaacaagtctgacatttacagctatggaatgttgttgctagagatggtgggaggaagaaagaatacaaatatgtcagctgaggaaattttccaagttctataccctgaatggatccataatttgctggaaggtagagactttcaagttactattgaggatgagggag

SEQ ID NO: 107701 - DNA, 251 bp, Glycine max
tcaaaacactcataacacaaagcacaaagcaaagctcatccttgagttaaaaaatggcagcagcttcttccatggctctctcatccccatccttggctggcaaggccgtgaagctgggcccatcagccccagaagtgggaagggtgagcatgaggaagaccgtcaccaagcaggtctcctcaggaagcccatggtacggcccagaccgagtcaagtacttgggcccattctctggcgagcccccgtcctac

SEQ ID NO: 107702 - DNA, 253 bp, Glycine max
gcttgaagaaggttattgcctcaagggtccccaacagcaaggtttccggtggaagactcaagattgttgctgtagaagagaagaaagagattgaagagacccagcagaccgacaaggacagatggaagggtcttgcctatgatatctcagacgaccaacaagacatcacaagaggaaagggtttggttgactcccttttccaagctccacaggatgctggaactcactatgcagtcatgagctcctacgagta

SEQ ID NO: 107703 - DNA, 104 bp, Glycine max
gaaagaacttatccatttcttgcaattttagttgtgtacccataactccatgcatgcaactcgttgagctatctcaataaatgccgtttgtatgtgttacaaaa

SEQ ID NO: 107704 - DNA, 252 bp, Glycine max
agagaatccccgtgtgcccatcatcgtcaccggtaacgatttctccacactctatgcgcctctcatccgtgatgggcgtatggagaagttctactgggcaccaacaagggatgaccgcattggtgtctgcactggaatttttcgcaccgattcaattcctgaacaggacgttgtcaagattgttgacaccttccctggccaatccattgatttctttggtgcactgagggccagagtatatgatgacgaatg

SEQ ID NO: 107705 - DNA, 258 bp, Glycine max
cgcacactgtcacaggtgtagcggcgaaactgaggtcgtagaaagaatggcgaaaacgacgtcgttgttgctctttacactgctcctcttcggaaccttagctctcatccaggcgaagaaatcgaaggaggatttgaaggaagtgacccacaaggtttactttgatgttgagattaatggaaaagaagcaggtcgtattgtgatgggtctttttggaaaggctgttccaaaaactgcagaaaactttcgagctctttg

SEQ ID NO: 107706 - DNA, 257 bp, Glycine max
gcgaatctcacaccgtatagtgatggccgagaccgatgttcccgagacgcccgctgcttcagagacgcccgctactggtccatctgtgaaggagtttacgctagaagatgtcaagtcgcacaatttggcaaaggactgctggatggtcattcgggacggaggtatccgcaaggtttatgatgtaacgactttccttgacgatcatccgggcggccctgcgatcatggtagacgtagctggacaggatgccactgacg

SEQ ID NO: 107707 - DNA, 263 bp, Glycine max
caacatttctctctcccttagctagtttttaccaatggctgctgcggttagtgctgcagtctcttttccatccaccaagtctacctctctcccaagcaggacctccatcattaccccagagagagttgtattcaagaaggcttcattgcaatacagagatgtttgtagcagtggaagggtagtttccatcagagctcaagtcaccactgaggctccagccaaggttgaaaaagagtccaagaaacaggatgaaggtgtggttg

SEQ ID NO: 107708 - DNA, 241 bp, Glycine max
atggaacgtgcgttgggtgatcttggacccgacaacggggagaatggaatacaagataagaagaaacgaaccttctgttaaaggaacgattatatttgacgccaatagcacgatcaccatatctcctgtgaatttccacgggcttccagagtctgatgggtgctgcttctatattgggacaccacagaaaaaggattacttcctctgtgccgagactcctggtgcagctagagcgtgggtg

SEQ ID NO: 107709 - DNA, 251 bp, Glycine max
ctcgagccgcgggtcttgtcggagcacccgcgtgtggtgacgtcatgaaactccagattacggttgatgacaaaacggggaagatcgtcgatgctcgcttcaaaaccttcgggtgtggatccgctattgcttcctcctccgtcgctactgaatgggttaaggaaaagcaaatagaggaagttttgaccattaaaaacactgaaattgcaaagcatctttcacttccaccagtcaagcttcactgcagcatg

SEQ ID NO: 107710 - DNA, 251 bp, Glycine max
attagttcattctctttgcgcagttccctatctctcctttcaagatgcagatcttcgtcaagacactcatcggtcagaccatcacccttgaagtggaaagctctgacaccatcgacaacgtcaaggcgaagatccaggacaaggaaggaattcgcccggatcagcaatgtgtcatcttcgccggaaagcagctcccggacggatgtaccctcgccgactacaacatccagaaggagtcaacacttcagctt

SEQ ID NO: 107711 - DNA, 252 bp, Glycine max
ctcctatttgctgatgagaatgttgacattgctgttattgaggctgggttagggggtgcacgagatgcaacaaatataatatccagctctgggcttgttgcatcagtcataaccactgtaggtgaagaacatttggcagctcttgggggttctttggaaacaattgcaatggcaaaggcaggaatcataaaacaagaccgcccattggtgttgggtggcccatttgtccctcatattgagcgcattattcga

SEQ ID NO: 107712 - DNA, 253 bp, Glycine max
attagttcattctctttgcgcagttccctacctctcctttcaagatgcagatcttcgtcaagaccctcaccggaaagaccatcacccttgaggtggatagctctgacaccatcgacaacgtcaaggccaagatccaggacaaggaaggaattcccccggatcagcaacgtctcatcttcgccggaaagcagctcgaggacggccgtaccctcgccgactacaacatccagaaggagtcaactcttcaccttgt

SEQ ID NO: 107713 - DNA, 254 bp, Glycine max
ctcaatcgcaaattttctcccccaaatcgtagatctacggttaaattggtgtagtgtggtaagatgggaggaggatttagagtgcttcacttagttaggccatttctctcgtttcttcctgaagttcaaactgctgacaggaaagtgccatttagagagaaggtcatatacactgtgatctctcttttcattttcctggtttgtagtcagctccctctatatgggatacactcaacaacaggtgctgatccatt

SEQ ID NO: 107714 - DNA, 249 bp, Glycine max
aattgtagtgctggcgattcatccactgaaccctatatcgttggacactacttattacttgctcatgaatctgctgccacattatacaagacaaaatatcaggctcgtcaaaaaggacaaattgggatcactaatccaacacactactttttgccaaaatctcaaagtgctgcagattacaaggcagcaagtagagctctggacttcttctttggttggtattctgatccggttttctatggtgactat

SEQ ID NO: 107715 - DNA, 249 bp, Glycine max
tgcctgttccacacagagtccaatattatgcattcatcgcatatctgaggaagatcaatgaccttcccactagtaaagtcgtgtgccacaaggaccatccttttcttgaaagatgatggcaccttaaagccattggccatcgaattaagtttgccacatcctaggggagatgagtttggtgccgttagtagagtcgtcttgcccgcagaccaaggtgctgaaagtacaatttggctaattgccaaggca

SEQ ID NO: 107716 - DNA, 254 bp, Glycine max
ctgcgtcttcagcgacgggtcgttttgctacattccgaaggacaccaagtgtcctatgcagatttcgacttacttcagaatcaacgcgttggagacagggcagtttgagaggactttgattgtcgccgatgatcggagctctgtggagtatctggaagggtgcactgcgccttcctatgaccggaatcagctccatgccgcggtggtggagttgtattgcggcgagggggcggagattaagtactccacggtgc

SEQ ID NO: 107717 - DNA, 255 bp, Glycine max
gcaaaatttaaaatttactggcagccaacctatcaagtgattcagccaatcaacggtgacccattcattggaagcctggaaaccccagttacatccagccctttgatcgcatggtacttgtccaacctgcccgcatacagaaccgcagtgagcccactactaagagggatcgaggtgggcctggcccacggataccttctggtgggcccattcgtgaaggccgggcctcttaggaacaccgagatcgccgggcaa

SEQ ID NO: 107718 - DNA, 246 bp, Glycine max
ccttgagttaaaaaatggcagcagcttcttccatggctctctcatccccatccttggctggcaaggccgtgaagctgggcccatcagccccagaagtgggaagggtgagcatgaggaagaccgtcaccaagcaggtctcctcaggaagcccatggtacggcccagaccgagtcaagtacttgggcccattctctggcgagcccccgtcctacctaaccggtgagttcccaggcgactacggctggg

SEQ ID NO: 107719 - DNA, 245 bp, Glycine max
agcagaatggcttctactcaatgtttcttgcaccaccatgctcttaccacccctgccagatccccatcacaacgcatcatggttagcaccaagcctaaccagcttgtttgcaaggcacagcagcaagaggatattgatgtcagcccaatctctcgccggttagctctaaccgtgctcattggtgctgctgctgctggctccaaagtccaacctgctgatgcagcttatggggaagctgccaatgt

SEQ ID NO: 107720 - DNA, 244 bp, Glycine max
attcctccaccaagaagaaggatgtcaacttttacaaggcacaaggtctttcagtgggttcatcccttgtagaagaagataagttggatcttgctacatcactacttgcaaaagccaaggaaaagggggtgtctctcttgttaccaagtgatgtggtgattgcagacaaatttgctcctgatgctaatagcaaggtcgtgccagcatctgccatccctgatggctggatgggattggatattgg

SEQ ID NO: 107721 - DNA, 247 bp, Glycine max
ctctgttctcaccaatggcatcaacaatatcagcaatggccatgatcaacgccaaatgcgtcaacccaaagttccccaatcccaccaagctcgcaccatcaaaaccctcccttcagatcaaccttccaaagggcctcatagcctcacccgaaagcactaaactttcccccgcgacagcaatcgcaggagcaatattcacaaccctcggaacctgcgacgccgcattcgctgttcaacaaatagccga

SEQ ID NO: 107722 - DNA, 245 bp, Glycine max
gcaaaatggggtgaatggcttggtagattcaaagctggttcagtgatttacattgcatttggaagtgaacactctttgcagcaaaaccaattgaatgagttgttgttgggtcttgagctaacaggaatgccattttttgcagcacttaagccccctattgagtttgagtccattgagaaagctctcccaaaagggttcatagaaagggttcaagaaagaggggttgtgtatggggggtgggtgca

SEQ ID NO: 107723 - DNA, 248 bp, Glycine max
cgttgccattctcatcctcctctgtctctctctctccaccattgccatggatccttacaagctccggccatccagcgccttcaattctcccttctggactacaaattctggtgctcctgtttggaacaacaactcctctttaaccgttggagctagaggtccaattctgcttgaggattatcatcttgtggagaagcttgcaaactttgacagggaacgtatcccagaacgtgttgtccatgccaggg

SEQ ID NO: 107724 - DNA, 246 bp, Glycine max
cttgcaccctttgtcaaggtccttgatcagaaattcggtatcatcaagggtaccatgaccaccactcactcctacaccggtgaccaaaggcttcttgatgcgagccaccgtgacctgaggcgtgcaagggcagcagcactcaacattgtccccacttcaacaggagcagcaaaggcagtggcccttgtcctcccaaccctcaaaggcaaactcaatggcattgcactccgtgtgccaacaccgaac

SEQ ID NO: 107725 - DNA, 245 bp, Glycine max
attggatgtaagcaataatcatttggtgggaaagattccaagccttataaaaaacttgtcaggattgaacgaactttgtttgtctaataaccattttgaaggatccattccattagaacttggagaacttgaatatctaacttctttagatctctcccaaaataattttattggtcttgttccatcatttacaaattcttccgtggcatttatccatttgaacaacaatcgtttgagtggattgt

SEQ ID NO: 107726 - DNA, 248 bp, Glycine max
ctataagctagtttatcgtgaggagaatatgaagttgtttgttttctttgttgctgcagtagttttggtagcatggccatgccatggcgcaggctaccaaaggttccctctccgaatgaaaactggctatggtgagcgttcttcggaggtaaaatgcgcaagttttaggcttgctgtggaagcacacaacatccgagtctttaaaaccattcctgaagagtgcgttgaaccaacaaaggactacatta

SEQ ID NO: 107727 - DNA, 255 bp, Glycine max
ccaaaacagcagagagaagagaaggtgtagacaaacacaatctctaatggcactcaggatgtgggcttcttccactgccaatgcactcaaagtctcttctacctccagacctcatctcttgcatcctttttctttctccagatgcttgtcttccgtcttggatggacttaagtatgcagattcacacgaatgggtcaagcacgaaggctcagtcgccaccattggtatcactgaccatgcccaggaccatcttgg

SEQ ID NO: 107728 - DNA, 244 bp, Glycine max
agatacttctcttccttgtgttatatattgccatggaaacagtggatgtagggcagatgccaatgaagctgctgtaattcttcttccttcaaatattactgtttttacccttgacttctcggggtcaggcttatctgatggagactatgttagtcttggttggcatgaaaaagatgatctcaagatggtggtgtcatatttgaggagcaacaaacaaatatctcgtataggtctttggggacga

SEQ ID NO: 107729 - DNA, 246 bp, Glycine max
gaagaaagtggaggccaaaaatacattggagaattacgcctataacatgaggaacacaattaaagatgataagattgcttccaagctgtctgctgatgataagaagaaaattgaggatgcaattgagcaggctatccaatggctcgatggaaaccaacttgctgaagctgacgaattcgaggacaagatgaaggagttggagagcatttgtaaccccatcatagcaaagatgtaccaaggagctgg

SEQ ID NO: 107730 - DNA, 243 bp, Glycine max
attttatccaattgaaattttaaaaatgactgggataaacttaagaattcaattattgaaattgaataagtaaacaatttaattggattggtcgaatggtatcaaaaaaatggagtactaactcccatttcttatttattattgaattaaccgatcaacttgctttgttatcgaacatttctttttgatttcaaaaattttccggaaaaaatttgaatctatttttatatgcgaatcaatcct

SEQ ID NO: 107731 - DNA, 245 bp, Glycine max
ggtgcctctcttccatctccccagccaaaacctctctcaagaaggccacattaggcccttctgtcttcgcaaccgttagcactccttcttctccttcttcttcttcttcttcttccttcccttctctcattcaagacaggcctgtctttgctgcccctgcccccatcatcaccccaactgtgagagaggatatggcaaaggaatacgagcaagctattgaagaactccagaaattgttgagggag

SEQ ID NO: 107732 - DNA, 244 bp, Glycine max
tggtcatcgttgggatctccatacgccggatctgctaaaatacgcttgatccatatgggcctcctcgaccacttgtgggacgacaccgtcgccggcccaaggccggaaaacggtctcggcaagctccgaaaacaccacaccttcactttccgacctagctccggcaaggaaacggagggcgggagcgtgagatcgtacggagacgaatcgtcggaggaagcgacgagagtgacgcgtagtatca

SEQ ID NO: 107733 - DNA, 244 bp, Glycine max
gcaattgaagttgaagtcttgcccttctctcttcaattccaaacactagacatcatcatccatggctgcctccgtctccactgtcggagctgtcaacagagctcttttgaacctgaatgggtctggacctggggtttcagctcccagttcatccttctttgggagcagcttgaagaaggttattggctcaagggtccccaacacaaagatttcctctggaagcttcaagattgttgctgtagaa

SEQ ID NO: 107734 - DNA, 243 bp, Glycine max
ctctctccttcgatgatattgaagctaattttgccccaacagtcaaaggttctggagaatatgggatcttatatttggcagaaccacaggatgcatgtacagaattgacaaataaagttgaacaacttcccaatgcgagttcaccttttgctttggtggttagagggggatgtagctttgaggaaaaagtcagaagggcacaaaaggctggcttcaaagctgtaattgtctatgacaatgaag

SEQ ID NO: 107735 - DNA, 244 bp, Glycine max
aaggaatctctgcagtttggagagctggaatggcttacagatgtgggtatttttggtgaacaatttgctcaggaagccttggctgcagctgaagtacctcagcttccagtaactcataacagtagcagtgttgcttcatacagaacttccaaatcctacatgtcccacaaaaagcctaggattgaagtcctaaatgatgatgatgatgagtattttactgtgcctgatcttggctaagtgtgtg

SEQ ID NO: 107736 - DNA, 246 bp, Glycine max
caaaagattgttgaaaaataccaaaactcaaatattgagattcatacttttaaccagagccagtatcctcgattggttgttgaggactttttgccattgccttccaaagggcatactgacaaggatggatggtaccctcctggccatggtgatgtcttcccatcattattgaacagtggcaaacttgatgcactattgtcacatggtaaagagtatgtgtttgttgccaattcggataacttggga

SEQ ID NO: 107737 - DNA, 252 bp, Glycine max
agcatctgaagaggcttaatgccccaaagcattggatgcttgacaaactgggtggtgcatttgctcctaagccctcatctggaccacacaaatcgagggaatgcctgccactcatactcattttgcgaaaccggctgaagtatgctctaacataccgtgaagtcattgctattctgatgcagcgacatgtccttgttgatggcaaagtcaggactgacaaaacataccctgctggttttatggatgttgtat

SEQ ID NO: 107738 - DNA, 251 bp, Glycine max
ttatgcttagtgttgcacagtagtttattttaggtccttaacaggtcttcatcatccagcgacttggttcctttttaccggagtgtgcagtcatttaactctcatttttgcaggttccttcaacaggaaatctgttctttttggcatccattgccaccttttaaatggctgcatatctgagaacatagctaccgggttctggagttaggaatctttgttactggtgttggcacctgatgtttttagctcgg

SEQ ID NO: 107739 - DNA, 288 bp, Glycine max
catgcacggatttgggctcgagcgaaaacagagaagaagaggcaattgctgagaagatgggatgtgaggaacatagctattgttgctcacgttgaccatgggaaaactactctcgttgatgccatgctcaaacaaactaaggtatttcgtgataatcagtttgttcaggaaaggataatggactcaaatgatttggagcgtgaaagatgaatcacaatactgagtaaaaatacatctgtcacttataaagatgcaaagattaatataatagatactccaggtcactct

SEQ ID NO: 107740 - DNA, 265 bp, Glycine max
tgcaattgaagttaaaagccttagccttccctacaactccaaacctgaagacatcatcatccatggctgcctccgtctccactgtcggagctgtcaacagagctcttttgaacctgaatggttctggagctggagcttcactcccagttcagccttctttgggaccagcttgaagaaggttattgcctcaagggtccccaacagcaaggtttccggtggaagcttcaagattgttgctgtagaagagaagaaagagattgaagag

SEQ ID NO: 107741 - DNA, 265 bp, Glycine max
aaaggttgctgtaggagataagattgcagtagtgctaagtgctaacacctgcagtgaacaatggcctctgcatcagcatctctgctcaagtcttcacttgttcttgacaagtctgattgggtgaagggacaaacccttcgccaaccttctgcatcagttgtgagatgcaaccccaccaccccatcaggcctcaccatcagagctggttcctatgctgatgagctcgttaagaccgcgaaaacagtggcttcaccagggaggggta

SEQ ID NO: 107742 - DNA, 265 bp, Glycine max
tgcaaagagggactgggttgctatttatgatgagtgtgcctctgttttatatcaggagattgattacaccaaggaagctgctaatgcagaactatttgcaagtaactttaaaaacttggattatgtgaaagtccctacaagcatctgggattataccacgccacagattctgacaatggagtatgttcctgggattaaaataaatagaatacaagctttagatcaactgggtcttgaccgcaaaaggttagggcgatatgcagtt

SEQ ID NO: 107743 - DNA, 259 bp, Glycine max
atcacaccgaacaacacaacagagtagagagacagagcattatggatgttggagctgtgacgcaagccactgaagatgtgcttcggtggtggaggctacgatgatgatctcctctggcacacggaccttaagccccacgctgcagggaactactcaattgcagtggtacaagctaattcatccttggaagaccaagctcaagttatcacctctccctccgcaacctatgttggcgtacacgacggacacggtggtcctg

SEQ ID NO: 107744 - DNA, 265 bp, Glycine max
gttaatttggtagatttcttccaagtggtttatgtcttttaggtatggaaccttgaaaccttgcagtgtttagagacactaacagagcacacatctgttgtgatgtctgttctctgctgggaccaattccttttatcttgtcattggataaaacagtgaaggtatggtatgctactgaaagcggaaacttggaagtgacatatactcacaacgaagaaaatgtgaaattcgatgttttctcagaattgtgtggaatcaattctta

SEQ ID NO: 107745 - DNA, 260 bp, Glycine max
cagagaggactttttcgctatgatgttaccgcctgtgaaaccaaggtgattcctggtgaatatggtctcgttgcccagcttaacgagggtcgtcacctcaagaagaggccaactgagttccgagttgataaggtccttcaccctttgatgaaaacaaattcaactttaccaaagtcgggcaagaagaggtcctcttccaatttgaagctagcgaggatggacaagtccagttctttccaaatgctccagttgatgttgac

SEQ ID NO: 107746 - DNA, 262 bp, Glycine max
agcagaatggtctccacatgctgataaggcactgaacagtgaatatcatttattatactttggcctacaatgatctcttgtgagaaaatggttaagaaatttctagtatgaaaaagggccgggaggtgtttggtgtgattggatgttgtggagttctcctattatggtgcacctgcacaaactcctaaagaacaattatatacggagcttgctgatggcttaaggggaagtgattcatgtgttggctctggttctcaggttg

SEQ ID NO: 107747 - DNA, 263 bp, Glycine max
caagatctctccaaggatcctccttcccacgagattctttggtgggaaaaatccaagaggtttgaaatttgaaggcagggaagatggattatttcaatgcaccaggaagaaaccatctctttgttccatggccggttaaattccggaccagatcatccgggccatgaacagaaacaatgaggactaccgttctccagcaattccagctatgacaaaaactttgcttgaggatgtcaagaagattttcaagaccactactggaa

SEQ ID NO: 107748 - DNA, 235 bp, Glycine max
caatcccaatcagctcctcttaccgtggaagaacagataataactatttatactggaacgaatggttatcttgattcattagaaattggacaggtaaggaaatttcttgttgagttacgtgcttacttaaacacgaataaactcaattcaaagatatcatatcttctaccaagacattcactggggaagcagaagtccttttgaaggaagctattcaagtacagatggctctctt

SEQ ID NO: 107749 - DNA, 264 bp, Glycine max
  unsure (1)..(264): unsure at all n locations
tgctgtgaagaaaatcaagcgaagaaatgggccacatagaggagagtanngctccttgtcactagcaatggccaaggccgatttttgggtcatgttcttctctcttgtcatgggctgtggatcgggcttgacaatcataaataacatgggtcagatttgtcaatcattgggagacaacaatgtcaatgtttatgtgtcggttatcagcatatccaacttccttggtcgtgttggtggcggctacttctcagaggttatagtaag

SEQ ID NO: 107750 - DNA, 264 bp, Glycine max
aaaacatctccagtgggttcttcttcttctattacaacaacgtcgtccaagaccatgaccatggccatggccacgatcctgctcctgttcacggtcttcgcggtttcatcggccctagacatgtcgataatctcgtacgacaacgcccacgccgccacgtcgcgcaggacagggtagctgatgtccatgtacgagcagtggctagtaaagcacggcaaggtgtacaacgcgctcggagagaaggagaagaggttccagatcttc

SEQ ID NO: 107751 - DNA, 261 bp, Glycine max
agcttttctggcaatgaaaatatactcacctttggtacacagcatgctctggacccgctaacgctgttgaaagctcgggtgaacaactatggtcgtgcaagtgctctgatccagcacgactggactccaagaactcgattttcgcttgttggtgaggtggatactggggccatcgaaaagagtgcaaaggttggtcttgctgtggccttgaaaccatagaccaagtcgttttgtgagtgatatatgggatgcttctcgtgg

SEQ ID NO: 107752 - DNA, 260 bp, Glycine max
gctacctaaaccctagtctccatacatcaacttgggaggttaaagagacggcaacgttgtgctgtccgccttgaccgagccagagcttcgtcttggccctcgattttgccctgtaaaactaatcccagtcacaacagcaataatcaatggcaccgaaacagaccaaggctgagaagaagatcgcttacgatgcgaagctgtgcgacctaatggaggagtacggcgaaatcctcgttgtaaactccgacaacgtgggatcg

SEQ ID NO: 107753 - DNA, 261 bp, Glycine max
aattgaagttaaaagccttagccttccctacaactccaaacattaagacatcatcatccatggctgcctccgtctccactgtcggagctgtcaacagagctcttttgaacctgaatggttctggagctggagcttcagctcccagttcagccttctttgggaccagcttgaagaaggttattgcctcaagggtccccaacagcaaggtttccggtggaagcttcaagattgttgctgtagaagagaagaaagagattgaag

SEQ ID NO: 107754 - DNA, 261 bp, Glycine max
ggccatggtgctaagcttgatgttctggaatcaaagattgcttcagatacttcacacactataaaggcaatttgcattgttcacaatgagactgcaactggggtcaccaatgacttggccaaagtgagacaaattcttgattcctagcagcatccagccctccttattgttgatggagtgtcttccatttgtgctcttgatttccgcatggatgaatggggagttgatgtggcaataactggctcccagaaggccctttcc

SEQ ID NO: 107755 - DNA, 258 bp, Glycine max
cacagaaacagttgggtcggaagtcagagatgtacctgtggtgaaataatttgcagtgaatgggaatcatcagtgctggggattgggtggctcatgatgatatcccattcagtgcaaattattttaccacagaaagagttgggtctgaagtcagacatgtacctatgttgttgtacgtatactacacaatgttgctccaaagggaaaatttattgcatttgtatcaactgagtcagagacaggtcagccggcaattga

SEQ ID NO: 107756 - DNA, 261 bp, Glycine max
aattgaaatgtctcagaccaagaaattgacgccgaatctggatcagcagagcatgaaggtgctgaatctcaccgtgctccagcgaatcgatccgtacatcgacgagattctcttcactgccgcgcatgtctccttctacgacttcaacatcgaaagcaaccagtggagtcgcaaggatgttgaaggatctctcttcgttgtcaagaggaattcacaaccacggtttcagtttatcgtaatgaatcgccggaatacagataa

SEQ ID NO: 107757 - DNA, 260 bp, Glycine max
cgtgaatgagtcaacttatgcttcattcattgattgtgtcgtgttgtgttctgtgttaccatgctgcttagaacagcgtcctctctctctctcttcaacgccaacggcgagcatatactactcccttcctctgttcgctactctcagggcaaacacttggtgccatgcgctaccaagaactccaataaccggcccttaaccggcgtcgtatttgaaccctctgaagaggtcaagaaggagctcgaccttgttcccactgt

SEQ ID NO: 107758 - DNA, 260 bp, Glycine max
tgccaagctggtggtctcacattttttgctcccagcgaagagaggctcgagtctggattgtacagtagaagttaccttgaaaatcagatggctgttgccctgggtggaagggttgccgaagaggttatttttggccagaaaatgtcaccaccggagcatcaaacgacttcatgcaagtttcacgagtggcaaggcagatggttgagagatttggattcagcaaaaaaattggacaagttgccattggtggacctggtgga

SEQ ID NO: 107759 - DNA, 260 bp, Glycine max
aaacaaagaaaaaaaaaaacccttagccaacacaaccatcatggccacctctgctattcagcaatcagcattcactggtcaaactgctctgaagcagctcaatgagttcgtccgcaagaccggtggcgccggcaaaggtcgcactaacatgcgccgcaccgtcaagagtgctcctcagagcatttggtatggccctgaccgtcccaagtacttgggtccattctcggagcagattccatcatacctgaccggagaattcc

SEQ ID NO: 107760 - DNA, 258 bp, Glycine max
gaaaagataatcctcacccattttcttcgtagccaaacactctgaaattctcagttatgtcgtggcaagcgtatgtggatgatcacctactgtgtgaaatcgatggtaaccacgctcactcacgccgctatcatcggccaagacggaagcgtttgggctcagagcaccaacttccctcagttcaaacctgaggaaataactgccatcaataatgactttaatgagcctggatcacttgctccaactggattgtatatc

SEQ ID NO: 107761 - DNA, 258 bp, Glycine max
gcctatgatatctcagacgaccaacaagacatcacaagaggaaagggtttggttgactcccttttccaagctccacaggatgctggaactcactatgcagtcatgagctcctacgagtacctcagcactggacttcgccagtacttggacaacaaaatggatggattctacattgctccagcttttatggacaagcttgttgttcacatctccaagaacttcatgaccctgcccaacatcaaggttcctctcattctt

SEQ ID NO: 107762 - DNA, 247 bp, Glycine max
tagtccagattagtaccacaaaaatggagaaatagaataactgaatatcgtatagctcaaaataaagatttaaccaaatgcaattcatatgaaaaaatccaattaattctttacaaagaacaacaagtaaacgtttaaaaaaaaaaattagaaaacaatatagatacgatcttttatcctataattttatcaattatgcagataagaaagactcatatattgatggatatagatccctatatcaagt

SEQ ID NO: 107763 - DNA, 256 bp, Glycine max
cttgaaaactgggaacctacacaagactcctacatggtggtgaatgcacctgggatgcaacctctcaaaatatgtttgagccaacaagggaaggaggtagcaaatgctgtctcagtatgggaatggactggatctgccttggatgagggagctgaagcatcacagtggttctcagattatttaggaaaaccatgtcaactggtccgcttcaattcagcttctgaagttcgaccagtggatcctgattacgtcaagg

SEQ ID NO: 107764 - DNA, 256 bp, Glycine max
gacaagacttgcaattttgtcaaggctgacttcatgaaaatgccattcccagacaacagttttgatgcagtgtatgcgattgaagccacttgccatgcaccggatgcttatggatgctataaagagatttttagagtgttaaagcctggtcaatattttgctgcttatgaatggtgcatgaccgattcttttgatccccaaaacccagagcaccaaaaaatcaaggcagaaattgagattggtgatgggctacctg

SEQ ID NO: 107765 - DNA, 249 bp, Glycine max
agtccagattagtaccacaaaaatggagatatagaataactgaatatcgtatagctcataataaagattcaaccaaatgcaattcatatgaagaaagccaattaattctttacaaagaacaacaagtagacgcatataaattcaaatttgtcatctatatggatacgatcttttatcctagaattagagcaattatgcaggtaagtaagactcataaatttagggttatagatccctatgtcaaggaag

SEQ ID NO: 107766 - DNA, 251 bp, Glycine max
gtggatttctggtgttggtgttgacggcattgggaagtagcttgtgatctcaaaagatggacgtccaacctttgatcagcccaagatgactctggagaagctcttgacgtatggtaacatgcttgtccaagacaagagaatgtcaagagagtcgaattggctgacaagtacttgaacgaggctgcacttggaaatgctaacgaggatgctattaacaggggaactttcttccaatcttgaattggaggcaa

SEQ ID NO: 107767 - DNA, 255 bp, Glycine max
cggctcgagaaggactacaagtctgctctaaaggcatttgaagaagtcctactatttgatcctaacaaccaggttgcccggcctaggagagattctttgaagggacttgttgatgcaaccaaaggagttactgtcatcaagtcaacagagaagaagtgagtgtcattgtatcaactcactatgaatatggcattgttaaatacatagttttcaataacttggttgtgttggaaggaattttggctctattggtgt

SEQ ID NO: 107768 - DNA, 255 bp, Glycine max
tggtgatattatgaccagctagtgcaactttgcaatttagaaagttagcagattgtgattttctcaagagaaactttaagcagatgtctaatgttttatgggtggctcctgaggacaaggcgagtttatggtcacaacttcattatgtttcgtgcaataatctggaaatgcaagaagcttatcttgtcaatctcgtaaatgtgttacgagaattgtatttgcacagtccagaggaagctcgccaattgagaagga

SEQ ID NO: 107769 - DNA, 256 bp, Glycine max
  unsure (1)..(256): unsure at all n locations
acaaaacaccctttccttcttcttcttcttcttcttcgttccgatcagattcttcgaattctgaatcaaaattcatcgaagaagaaggagaaggagatgtatagcaatttcaaagagcaagcaatagagtagtgaaacaagcggtagatgaagacaataagggaaactacgcgaaagcgttntcaactttacatgaacgcgttggagtatttcaaaacgcacctcaagtacgagaagaaccctaagatcaaggagg

SEQ ID NO: 107770 - DNA, 252 bp, Glycine max
atcgagataactagaaacagtgtgatgaaaatgaaggtccttgttttcttcgttgctacaatttttgtagcatggcaatgccatgcgtacgatatgttccctctccgaatgaacactggctatggtgcccgtactccggaggtgaaatgcgcaagttggaggcttgctgtggaagcacacaacatctttggctttgagaccattcctgaagagtgcgttgaagcaacaaaggaatacatccatggcgaacaa

SEQ ID NO: 107771 - DNA, 254 bp, Glycine max
caaaggttgctgtaggagataagattgcagtagtgctaagtgctaacacctgcagtgaacaatggcctctgcatcagcatctctgctcaagtcttcacttgttcttgacaagtctgagtgggtgaagggaaaacccttcgccaaccttctgcatcagttgtgagatgcaaccccaccaccccatcaggcctcaccatcagagctggttcctatgctgatgagctcgttaagaccgcgaaaacagtggcttcacc

SEQ ID NO: 107772 - DNA, 256 bp, Glycine max
tgctactacaaaggttgctgtaggagataagatattgaagtagtgctaagtgcctaacacctgcagtgaacaatggcctctgcatcagcatctcttctcaagtcttcacttgttcttgacaagtctgagtgggtgaagggacaaacacttcgccaaccttctgctgcatcagttgtgagatgcaaccccaccaccctttcaggcctcacaatcagagctggttcctatgctgatgagctcgttaagaccgcgaaaa

SEQ ID NO: 107773 - DNA, 254 bp, Glycine max
gtgaaaatgttcagaaaccagtacgacacggacgtgaccacatggagccctgcggggaggctgttccaggtggagtacgctatggaggcggtgaagcagggctcggcggcgatagggctccgatcgaagaccacgtggtcctcgcatgcgtcaacaaggccaactccgaactctcctcgcaccagaagaagatcttcaaggtcgacaatcacatcggcgtcgccatcgctggcctcaccgacgatggccgcgtc

SEQ ID NO: 107774 - DNA, 251 bp, Glycine max
tcgggattagcaagaacgatgactccgattcataccggaagcttgttattggttccgcttggaggaaacagatggcgaagctcgcgctttcgcttggtctcgctcagcaaatgcctgatatgattgaagagctgatcagcaaagggcagcagcttgatgcggtgcacgttaccgatgaagtgggtctggtggaaaaggtccctgttggacccttgttgaagtcttctctcaaggatgcgaagaaagttgcg

SEQ ID NO: 107775 - DNA, 226 bp, Glycine max
cacagaaacagttgggtcggaagtcagacatgtacttgttgtgatatagtttgctctgcatgggaatcatcagtgctggggattgggtggctcatgatgattccgttggagtgcgaattatttcaccaagatacagttgggtcggaagtcagacatgtacctattttgttgttcgtatactcactatgttgctccaaagggaaaatttattgcatttgtatcaact

SEQ ID NO: 107776 - DNA, 253 bp, Glycine max
tgcctcactacaagctgcagctaccttcatgcaacccaccaaggttggcatatcctctcgcaacctcaaatctacacaatgcatttctaaggcttttggcttggaacctgctgcagctaaactcacttgctcccttcagcctgatctcaaagaatttgctcaaaaatgtgtcgacgctaccaaaattgcaggattcgcccttgccacctctgctctcgttgtttctggagcaagtgcagaaggtgttccaaaa

SEQ ID NO: 107777 - DNA, 254 bp, Glycine max
attcattcttattgtttcttacttacccttctgccatccctcactattccatttcttagtgacttagtacagattacaaataagaagaagaaattatcaacaaatggcatcatcttggactccacggcagaacaaattgtttgaacaagccctggctttatatgacagggaaacccctgacagatggcagaatgtggccaatgtggtgggaagatcagttgaggatgttaaaaggcactatgatgacctcaaag

SEQ ID NO: 107778 - DNA, 250 bp, Glycine max
cagcagttggtgcggtggaatcactagtcaagataaaaacaggtgatctaatttcattatcagaacaagaggtggtggattgtactacatcctctagtagggggtgcggtggatgagatatacaacatggctatatctacatcagaaagaatggcatcagtctcgaaaaggattacccttaccgtggtgacgagggtaaatgtgactcaaatacagcaaatgctattagtactattgatggcacggatgg

SEQ ID NO: 107779 - DNA, 253 bp, Glycine max
ttgaagtagtgctaagtgcctaacacctgcagtgaacaatggcctctgcatcagcatctcttctcaagtcttcacttgttcttgacaagtctgagtgggtgaagggacaaacacttcgccaaccttctgctgcatcagttgtgagatgcaaccccaccaccccatcaggcctcacaatcagagctggttcctatgctgatgagctcgttaagaccgcgaaaacagtggcttcaccagggaggggtattttggc

SEQ ID NO: 107780 - DNA, 250 bp, Glycine max
tgtattttaggggtcaaattaaatgatgttgatcttttagaatttcttcagcaggttataaacatcataataagatccctttctaagttatctccctttagaaattggatgttttatgtctttttaacttccaatttatcattaccttccaggttgctgacactgatggatcatcaacaatgccaccatctgtcttacgagtgctaaatttgaaagcatgcagaggtgcaattatgtttggggactcatt

SEQ ID NO: 107781 - DNA, 248 bp, Glycine max
ggaattgttgtaactttttgattcctaaattctctaaaattcgaaattctaatttcgttaggggaaagagattgtttgtgtgtgagtgagtatggctggaaaaggcgagggtcctgctatcggaatcgtttgggaacgacgtactcttgcgtcggcgtgtggcaacacgatcgtgttgaaatcatagccaacgatcagggtaacagaactaccccatcctacgtggctttcaccgacacagaacggtt

SEQ ID NO: 107782 - DNA, 254 bp, Glycine max
agggtctctgcctctgcaattcagcgggctcaagtgctccccactctcatcttcttctctcttctccaaaccttctctttggacccaacaatcccaaaagcgcgtttcaattaccattgcgaactcaatagcaatagccaatgcgcagaacaaagagagagcgaggcttaagaaactcttcgaagaagcctacgagagatgccgcaatgctccaatggaaggtgtttccttcaccatcgaagacttcactgctg

SEQ ID NO: 107783 - DNA, 252 bp, Glycine max
gtataaaggaagggattactcgatccatttccatatcgatcatgatatatataataattcgagcacccatttcaaacgcatatccaatttttgcacagcagggttatgaaaatccccgagaagcaaccggtcgtattgtctgtgccaattgccatttagctaataagcccgtggatattgaggttccacaagcggtacttcctgatactgtatttgaagcagttgttcgaattccttatgatatgcaagtga

SEQ ID NO: 107784 - DNA, 249 bp, Glycine max
cagctcgaggacggccgcaccctcgccgactacaacatccagaaggaatcaacccttcacctcgtcctccgtctccgtggtggcatgcagatcttcgttaagaccctcaccggcaagactattaccctagaagtcgaaagctccgacaccatcgacaacgtcaaggctaagtattcaggacaagggagggaatccccccagaccagcagaggctgatcttcgccgggaagcagctcgaggacggacgca

SEQ ID NO: 107785 - DNA, 251 bp, Glycine max
aagaactctccaaggatcctccttcccacgaaattcatttggtgggaaaatccaagaagagggtggaatttcaagccagggaagatggattatttcaatgcaccaggaagaaaccatctctttgttcctgggccggttaacatcccggaccagatcattcgggccatgaacagaaacaatgaggactaccgttctccagcaattccagctatgaccaaaacactgcttgaggatgtcaagaagattttcag

SEQ ID NO: 107786 - DNA, 248 bp, Glycine max
ctttggtggccacagcaacaataacaatggcagcctcactacaagctgcagctaccttcatgcaacccaccaaggtgggcatggccactcgcaacctcaaatctacacaatgcatttctaaggcttttggcttggaacccgctgcagctaaactcatttgctcccttaagcccgatctcaaagattttgctcaaaaatgtgtcgacgccaccaaaattgcaggattcgcccttgccacctcagctctc

SEQ ID NO: 107787 - DNA, 246 bp, Glycine max
gggaacccactatgagcacataatcataatcatgaagaaagcatggagcataagctctggtctcaaactcacagttcctgctgcatctgatcgtgattcatttacaaagttccggtctgagcctgaaagtggaacgtttaaggctggtgacttgcttgtcaataatgaaggagttcgaattgtctctgagaatgaagtggaagctccacccccgatcaggccacaagataaccagttaagtttggc

SEQ ID NO: 107788 - DNA, 241 bp, Glycine max
tgtgatgatgaaccatttgctggactagcttttaagatcatgagcgatccattatgtaggttcccttacgtttgtcacggtgtatgctcgaaagctaggtgccgggtcgtatgtactcaatgcaaacaaagggtaaaaggagagaattggtagacttgtagaaatgcatgcaaacagcagagatgatgttaaagtggctttagctggtgatattattgctcttgcaggtttgaaagatact

SEQ ID NO: 107789 - DNA, 250 bp, Glycine max
ggtggcacaggaaagacaacctttgtgaaaaggcatctcaccggagaattcgagaagaaatatgagccaaccatcggtgtggaggttcacccattggattttttcacaaactgtggaaagattcgattctactgctgggatactgctggacaggagaagtttggtggcctcagagatggatactatatccatgggcaatgtgctattataatgtttgatgttactgcccggctaacatacaaaaatgttc

SEQ ID NO: 107790 - DNA, 238 bp, Glycine max
  unsure (1)..(238): unsure at all n locations
atcgagccgaatcggctcgaggtgaagggaaacaacagcaaagaaagtggnaactacctctagcggacaacgcgattccagatctagaaagctcgtcgaaacaacctacgccgtcgacaacacctaccttctgttttcagcgtatcttgtcttcgccatgcagctcggcttcgccatgctctgcgccggctccgtcagagccaaaaacaccatgaacatcatgctcaccaaggtcctc

SEQ ID NO: 107791 - DNA, 228 bp, Glycine max
gtctaaaaggacggaggaattgaaggaaattagacaaatgaccaccgaacaaattaacgaagaggttgtcgaccttaagggcgagcttgtcatgcttcgccttcagaaatcggctcgcaacgagttcaagtccagcgaattcggtcgcatgcgcaagaggattgctcgcatgcttactgtgaagcgggaaagagaaattgaggagggtatcaataagaggttgtccag

SEQ ID NO: 107792 - DNA, 204 bp, Glycine max
gaagattttgaaagcagatctattagtggaaggaagctttgatgaggcagtgagaggagttgatggtgtctttcatatggcgtcccctgtgcttattccttatgatgagaacgttcagcaaaatttgattgatccctgtataaaaggaactttgaatgtgcttaactcttgtcgtaaaagcaactgtgaaacattttgtgctca

SEQ ID NO: 107793 - DNA, 246 bp, Glycine max
attctggcgaaggttatcgagtactgcaagaagcacgttgaggcgaacagtgctgatgagaagcccagtgaggatgtgctcaaggcttgggacgtggatttcgtcaacgttgatcaggccactctcttcgatctcattctggctgcaaactacttgaacatcaagagccttttggaccttacttgccagacagtagcagacatgatcaagggaaagactcctgaggaaattcgcaagacattcaac

SEQ ID NO: 107794 - DNA, 243 bp, Glycine max
aagaactgcccggatcttgtggtgtttcgtttatgtataattgggcggtataggccggatcctgtgactgaggaacccatggatgagggttttggtgctattgttatgaattgcaagaagctcactcggcttgctatgtctggtttgctgactgatcgtgtttttgagtacattgggatgtatgggaaattggttaggacgctgtcagttgcctttgctggggacactgacgtcggccttaaa

SEQ ID NO: 107795 - DNA, 242 bp, Glycine max
aaacaacatgtgttccgcagagaaggacgggatcatgctcttcggcgtgcgcctcaccgtcgtggataaccaccccacctccttcagaaagagcgctagcatgaccaacctttctcagtacgagtctccaccaccgcacgatcccaacgcagggtatgcctcagacgacgtcgttcacccctcccgtcacacccgcgaacgcaagcgaggggttccgtggacggatgaagagcacaggctgt

SEQ ID NO: 107796 - DNA, 250 bp, Glycine max
gaaagacaatggcagacactgaggatattcaaccactcgtatgcgataatgggacaggaatggttaaggctggttttgctggagatgatgctccgagggcagtgtttccaagcattgttggtcggccacgtcacaccggtgtgatggttgggatggggcaaaaggatgcatatgttggggatgaggctcagtccaagcgtggtatactaactctgaaatatcccattgagcatggtattgtcagtaactg

SEQ ID NO: 107797 - DNA, 245 bp, Glycine max
gggcgtgtgggagttgttgaatcgggaagcaaaaaaaatgagaatccatcacatagcatgcctccaagacaattattcctatctgatcgtagacgagagcacgaaggaagccgcggcggtggacccggtcgaaccggagaaggttcttgaagttgccagctcgcacggcctcactctcaaattcggcctcaccacccaccatcactgggatcatgctggtggaaacgacaagataaagcagctgg

SEQ ID NO: 107798 - DNA, 243 bp, Glycine max
gtggaccaacaagaagtgtaagttttcattcaatggccagcgctcagctctcagcaatatcttcgtcgatctctacggcgtcgtttgaagggcttcgaccttcggctgttcagtttgcttccgcgggcagaaatagaattggcaatctctcccaaaggtctttccggggcttggttgtcaaagccgccaccgttgttgcccccaaatacaccgcgattaagcctctgggagacagagtgctga

SEQ ID NO: 107799 - DNA, 241 bp, Glycine max
ttgcaattgaagttgaagtcttgcccttctctcttcaactccaaacacaagacatcatcatccatggctgcctccgtctccactgtcggagctgtcaacagagctcttttgaacctgaatgggtctggacctggggtttcagctcccagttcatccttctttgggagcagcttgaagaaggttattggctcaagggtccccaacacaaagatttcctctggaagcttcaagattgttgctg

SEQ ID NO: 107800 - DNA, 242 bp, Glycine max
ctataacggcacaacaaagaaactatctctttctagaaacgtattctgctcaaaatgtaaagggaaaggttcaaaaagtggaacagctggtaggtgttttggatgccaaggcactggtatgaaaattacaagaaggcagattggactaggcatgattcaacaaatgcaacatgtctgtcctgactgcagaggatctggtgaggtcattaacgagagagataaatgtcctcagtgcaaaggaa

SEQ ID NO: 107801 - DNA, 242 bp, Glycine max
cggttatcccggactgcgttccggaaaaagtggcctacttgaaatgaaagaaagggcgagcactcttgtgtttcaaccccactatcactatactattcatagttgtggggcactgtgtacttacagcctctacgataagcaagtgaatggggccggtgcgtggcgaacggaacggttcatcaagccatttctcgcctcaaccccctaaataggaagacgggtactttacaaatagggggtaa

SEQ ID NO: 107802 - DNA, 220 bp, Glycine max
agcagaccgacaaggacagatggaagggtcttgcctatgatatctcagacgaccaacaagacatcacaagaggaaagggtttggttgactcccttttccaagctccacaggatgctggaactcactatgcagtcatgagctcctacgagtacctcagcactggacttcgccagtacttggatcacaaaatggatggattctacattgcttcagcttttat

SEQ ID NO: 107803 - DNA, 237 bp, Glycine max
cctccgagcccaagatcagtgctgagaaagcggtgcaactgtgtgatcggaacttcggcgttggagctgacggagttatctttgtcttgcctggcatcagtggcaccgattataccatgaggatttttaactctgatggtagtgagcctgagatgtgtggcaatggagtgcgatgctttgccaaatttgtttctcagcttgagaatttacatgggaggcatagttttaccattcata

SEQ ID NO: 107804 - DNA, 241 bp, Glycine max
ataacacaaagcacaaagcaaagctcatccttgagttaaaaaatggcagcagcttcttccatggctctactcatccccatccttggctggcaaggccgtgaagctgggcccatcagccccagaagtgggaagggtgagcatgaggaagaccgtcaccaagcaggtctcctcaggaagcccatggtacggcccagaccgagtcaagtacttgggcccattctctggcgagcccccgtcctac

SEQ ID NO: 107805 - DNA, 249 bp, Glycine max
gtttcccgccatatatccaataagctttaaccatgtctgcctttgttggaaagtacgcagatgagcttatcaagaatgccaagtacatagccacacctgggaagggcatcttggcagcagatgagagcactggcaccattgggaagcgcctatcgagcattaacgttgagaacattgaggccaaccgccaagctcttcgcgagcttctcttcaccgctccagatgccctccaataactctctggtgtca

SEQ ID NO: 107806 - DNA, 242 bp, Glycine max
gcaggggaaaatgcacttgcaagatatgaccgtgaagcttataatcaaatccttttaaatgctagaccaaatggtgttaaccaatttggtcctccaacactaaaaatgtatggtgtcacataccttcgtttgtcagataagttaatgcagcaaacaaactttaatatattcaaagcctttgtgagaaagatgcatgctaatctggaatattgtccagacccagagaagtactatcatttcac

SEQ ID NO: 107807 - DNA, 241 bp, Glycine max
gttactattgaatcgattggattgacatggcgagcgcgatggttgaggacgccaacttcgaagatgaccagctcgccaatatgaccaccgacgacgtcgtcagagcttctcgtcttctcgacaacgagattcgcatcctcaaagaagagttgcagaggaccaatttggagttggaatcgtacaaggacaagatcaaggagaatcaggagaagattaagctcaataagcagttgccctacct

SEQ ID NO: 107808 - DNA, 236 bp, Glycine max
aatttccatggcttctgcggatgttgaataccgatgctttgttggtgggctcgcttgggccactgacaactacgatctggagaaagccttctctcagtacggtgacgtcgttgaatcgaaggtccgcatcgcatatgatctgacacaattcggatccggaatttctccatcccgttctgatctgtgatctctgatctatttgcgttacttgttctatgatatgatacttgtgttac

SEQ ID NO: 107809 - DNA, 241 bp, Glycine max
gcgccgtcaatgccgcggaatcgagctcatcgcctccgagaacttcacctccttcgccgtcatcgaggccctcggcagcgctctcacgaacaaatactccgagggcatgccgggcaaccgctactacggcggcaatgaatacatcgaccagatcgaaaacctctgccgctcacgcgccctccaagccttccacctcgacgcccaatcctggggcgtcaacgtccagccctactccggctcc

SEQ ID NO: 107810 - DNA, 239 bp, Glycine max
cggttatcccggactgcgttccggaaaaagtggcctacttgaaatgaaagaaagggcgagcactcttgtgtttcaaccccactatcactatactattcatagttgtggggcactgtgtacttacagcctctacgataagcaagtgaatggggccggtgcgtggcgaacggaacggttcatcaagccatttctcgcctcaaccccctagataggaggaggggtactttacaaataggggg

SEQ ID NO: 107811 - DNA, 236 bp, Glycine max
gaacttagaaatggagagcaatttgaagaaatgactttaaatctttgtgtactgacccccaatcgaattgtttgggattcggaagtgaaggaaatcattttatctactaatagcggacaaattggagtattaccaaatcatgcgcctatatctacggctgtggcaataggtattttgagaatacgtcttcttaaagaccaatggttaacgatggctctgatcggcggttttgctag

SEQ ID NO: 107812 - DNA, 235 bp, Glycine max
gtgggtgataaagttggagttggtgtgatagtggagtcttgcaaggaatgtgaaaattgccaacaggatctggagaattactgtccccgccctgtgtttacctataactctccttattatgatgggacacgaacccaaggtggttattctaacattgtggtcgtgcaccagcgttatgtgctccggtttcctgagaacttgccccttgatgctggtgctcctctgctgtgtgctg

SEQ ID NO: 107813 - DNA, 236 bp, Glycine max
gtgctcattgagatacaggataccctgaaatcgagccctccagaaaacaaggtcatgaaaagagcaagtttgattggcatcttgactacaaccttgttctatgtgctatgtggctgcctaggttatgcagcatttggaaacgacgcaccagggaatttcctcacagggttcggtttctacgaacccttttggctaatagactttgctaacatctgcatagccgtacacttggttgg

SEQ ID NO: 107814 - DNA, 232 bp, Glycine max
gcgttgccattctcatcctcttctttctctctctaccattgccatggatccctacaagcaccggccatccagcgccttcaattctcccttctggactacaaattctggtgctcctatttggaacaacaactcctctttaaccgttggagctagaggtccaattctgctggaggattatcatcttgtggagaagcttgcaaattttgatagggaacgtatcccagaacgtgtt

SEQ ID NO: 107815 - DNA, 228 bp, Glycine max
ctcgagccgctcgagccgcgcgggtgaggtagaacccttccactgtggtgactctgcgatgggtgcctacacgtatgtttcagagctatggcgcaagaagcagtctgatgtcatgcgcttcttgcagcgggtgaggtgctgggagtataggcagcaaccttccattgttcgtttgacaaggtctacccgccctgacaaggctcgtcgcttgggcttcaaggctaagca

SEQ ID NO: 107816 - DNA, 207 bp, Glycine max
caactatggaagttaggaacactgccgcctggtcttataacattctggaaacgcacttttcaactgcaccgatcttgtgcatgtgttgggtcttcggctataaccccaattatcaaccaaaaagagattgaacggggctgctgttatacactacaatggaaacatgaaaccgcggctggagataagtattcccaagttccgaggtta

SEQ ID NO: 107817 - DNA, 222 bp, Glycine max
caatgagtggggctactcccaaagggttgtggatttggctgacattgttgccaacaagtggaagtgagagccatcaaattctgaattggtaattcaattattatatgtatgtaccatgccattgtagttttgtatgcttactactactactactaccactacaaacacttgttgcttcatttttcattctaaaacttgtactgagaaacagaaccatcaatt

SEQ ID NO: 107818 - DNA, 277 bp, Glycine max
gcacgaccggttcttcggcttaccactgtgtggcacacctcccaaataataagactatgtttatgctctctacgccgccaacaaccacattcttcgctacgcctagggttcttccgtttctctcttcaaaactttcttcttcttcttcttcttctacgcgtcgtcctcgccttgttgctcctccatcactcccaaggttaaatccaaagataacaacaattgctacctcgtctccgctaaacattctcccgctaacatgtccgcttcggtttcgtca

SEQ ID NO: 107819 - DNA, 274 bp, Glycine max
ctttctcgttcttactttgacggtttctagagagagaaagtgatggccggagttaatccaaacggcgtcgccgattttgcggcggttccgacgcatggcggacagttcattcagtacaacatatttggtaacctcttcgaggttacgacgaagtaccgtcctccgatcatgcctatcggacgcggcgcgtacggaatcgtttgctcactgttgaataccgagacgaacgagctggtggctgtgaagaagatagcgaacgctttcgacaatcaca

SEQ ID NO: 107820 - DNA, 272 bp, Glycine max
ctcgagccgctcttcaactccaaacacaagacatcatcatccatggctgcctccgtctccactgtcggagctgtcaacagagctcttttgaacctgaatgggtctggacctggggtttcagctcccagttcatccttctttgggagcagcttgaagaggttattggctcaagggtccccaacacaaagatttcctctggaagcttcaagattgttgctgtagaagagaagaaagagattgaagagacccagcagaccgacaaggacagatgg

SEQ ID NO: 107821 - DNA, 273 bp, Glycine max
gagaagtaggatggcctactgaaggggacaagaatgccaacgcaggcaatgctttgagattctataatggccttctgccaaggcttgcagcaaatagaggcaccccaggccgccctggatacattgaagtttatctatttggactcatcgacgagatgccaagagcattgcgccaggaaacttcgaacgccattggggaatattcagatacgatggacaacctaagtttccaatggacctttctggtcagaaccaaaacaaatttctcatagg

SEQ ID NO: 107822 - DNA, 275 bp, Glycine max
acgattcgtgagaggggcagtagccgagattccgtgagttgcaaaaatgaagacgattctttccaccgagaccatgaacatcccggacggcgtgagcatcaaagttcatgccaaggtcatcgaagttgagggcccccgcggaaaattggtgcgagacttcaagcatttgaatctcgattttcagctcattactgacgaaaacggtaaaagaaagctgaaaatcgacgcgtggtttggttctcggaaaacatccgccgccattcgcaccgccttga

SEQ ID NO: 107823 - DNA, 271 bp, Glycine max
tgcaaaaccaaagtgctttgagttttaactaagtcacgggagttagttaaaactcaaaacactttgttttttcactttcagttcccccacgcgccaccaccaccacccatgggttgcacggcgtcgaagcactgttaacgaggacacggtgcggggtgcaaggagcggcgccgcctcatgaaggaggcggtctacgcgcgccaccacctcgctgctgcccactccgactactgccggtccctccgcctcaccggctccgccctctccacct

SEQ ID NO: 107824 - DNA, 270 bp, Glycine max
ggtttcatgaatttcattcacagggatgaggaggtcaattacttcccttcaaggtatgatcctgttcgtcatgcagaaaggttccccatacctcctgctatctgcagtggaaggcgtgaaaagtgtggaattgagaaggagaacaacttcaagcagcccggagagagataccggtcttgggcacctgacaggcaagatagatttgctcgccgatgggttgatgctttatctgacccacgggtcacccatgagatccgcagtgtctggata

SEQ ID NO: 107825 - DNA, 271 bp, Glycine max
atcaccgatgttttggaaacattccgtgtcatttcagagcttccctcagacaacttcggtgcctacatcatatcaatggcaacatccccatctgatgtgcttgctgttgagcttttacaacgtgaatgccatgtgaagcagccactaagggtgggccactgtttgaaaagcttgctgatcttgaggccgctccggctgcggtggcacgtcttttctctatagattggtacagaaaccgcattgatgggaagcaagaagttatgatagggta

SEQ ID NO: 107826 - DNA, 287 bp, Glycine max
attcggctcgaggaaatattggcaattcaccagtttatggagatatggatccacaacggttaaggggattagctaggggaagtttgaatgctaaagacggtcaatcaattgcaaatgatggatcaataggctctccaatgcaatctacttcatctaagatcaacatgccacagatccaacaatccacctcccatcaacaacaggatcctttgcatccacaacaattggtgcagaataaccggaaaaggaaggggcctacatcttcaggaccggccaacagtactggt

SEQ ID NO: 107827 - DNA, 272 bp, Glycine max
ttcggttctttacttgttgggttgttctgatcttctctcatagcaatcaaatcacactcccatcttctcatctcgtaaaccctaaaccccgttttcagtgacatcgagatcgatcgaacatggatgaggagtacgatgtgatcgtgttgggcagggtctcaaggagtgcattctcagcggtcttctctccgtcgatggcctcaaggttctgcacatggacaggaatgactattacggaggagaatccacttcgctcaatcttattcagcttt

SEQ ID NO: 107828 - DNA, 273 bp, Glycine max
aaacttgaagataagatgaagggaactgttgttgagggaactatacagaagttatttgaagggcatcatatgaactttgtcgaatgcatcaatgtggactataaatcaactagaaaggagtcattttatgaccttcagcttgatgtgaaaggctgtcctgatgtttatgcttcctttgacaagtatgttgaagttgaacgtcttgaaggggataacaaatatcatgcggaacaatatggtttgcaggatgctaagaagggtgtcctgttcatt

SEQ ID NO: 107829 - DNA, 271 bp, Glycine max
ctatcacgaccccactctgacggttcctagagagagaaagagacggccggagtaactccacacggcgtcggcgaatttgcggcggtaccgacgcatggcggacagtgcattcagtacaacatatatggcaacctcttcgaggttacgacgaagagcgtcctaccgatccacgcctatcggacgcgcgccgtacggaatcgctgctcactgttgaataccgaagacgaacgagctggaggccgcgaatacgatagcgaagctgtcgacaatc

SEQ ID NO: 107830 - DNA, 271 bp, Glycine max
gttgcatcaccgcaagtccacaacatggctgccactgccgctgcaggcatagcttccttgttttcttcttctattaacagtgtcaaatgtcttcgttcctccaagaactgctccattatagacccccttataaccacagtgccctcaaaccgtgcatgtttgtgtcacacttggtggaacctttgtccattgggggtgccattaattcgcacaagttgtgggggcctagaatttctgctgctgttgcacaagaagaggctgttgttgtggc

SEQ ID NO: 107831 - DNA, 268 bp, Glycine max
agcgttgccattctcatcctcctctgtctctctctctccaccattgccatggatccttacaagctccggccatccagcgccttcaattctcccttctggactacaaattctggtgctcctgtttggaacaacaactcctctttaaccgttggactagaggtccaattctgcttgaggattatcatcttgtggagaagctgcaaactttgacagggaacgtatcccagaacgtgttgtccatgccaggggagctagtgcaaagggtttc

SEQ ID NO: 107832 - DNA, 269 bp, Glycine max
cacctttgttcactcttcttctcttgcggctagggttttagcgcacttcttctagatttaaggaagatgggtaaggaaaaggttcacatcagtattgtggtcattggccatgtcgactctgggaaatccactaccactggtcacctgatttacaagcttggaggcattgacaagcgtgttattgagaggtttgagaaggaagctgctgagatgaacaagaggtctttcaagtatgcctgggtgctggacaaacttaaggctgagcgtga

SEQ ID NO: 107833 - DNA, 266 bp, Glycine max
cggactgatgctgttctgttggtgacgattgtttccacattgagacgaaatctgacgatgaaacgtggagcattattgtcagtgcttgcgttcgccttcgcggcggcgatctgggcggcgaacggcaacgacaacctcgtcccgcctaggcggaagtgtacggcaatggccgaatattcgacatcagtcaccggtaccaacccgagatgccggaatgggaatcgaataacggcattgggcagttcctgtggcttcccaagagcatg

SEQ ID NO: 107834 - DNA, 266 bp, Glycine max
aagaaaatgaaagtccttgttttctttgttgctatagttctagcagcatggcattgccatggctcagaccatgaccatgaccatggccacacctaccaaattttccctctgagaatgaaaactggccatggtggccactacattccggaggatcatgccaaagttggaggcttggtgtggaagcacacaacgtcattgactggaaaaccgttcctcaagattgcgagggatatattgggaactacatgcttggcgaacaatataga

SEQ ID NO: 107835 - DNA, 266 bp, Glycine max
ctgaatttgaaggtggtatttatcacggacggattcagctgccttcagaatatcccttcaaacctccttcgtttatgttgctcacacctagtggccgttttgagacccaaaccaagatttgcttgagcatatcaaatcatcaccctgagcttggcaaccatcatggagcgtaaggactgctttagtcgcactgattgcattcatgcccaccaacccaaatggcgcgttgggctcattaaactacaagaaagaagacaggcgtgcct

SEQ ID NO: 107836 - DNA, 271 bp, Glycine max
attgctccagcttttatggacaaacttgttgttcacattaccaagaacttcatgaccctgcccaacatcaaggttcctctcattcttggtatctggggaggcaagggacaaggaaaatctttccaatgtgagcttgtctttgccaagatgggatcaaccccatcatgatgagtgctggagagttggaaagtggaaatgcaggagagccagcaaaactgatcaggcagagataccgtgaagccgcagacttgatcaagaagggaaagatgtg

SEQ ID NO: 107837 - DNA, 270 bp, Glycine max
ggtttgagccctgctgagcttcttgactcgccggttctccttaattcttccaacattctgccatctccaacaactggagcatttgttgctcagagcttcaattggaagagcagttcaggggggaatcagcaaattgtcaaggaagaagacaaagcttctcaaatttctctttccaaacccgatcaggacctcctgcttcatccacaacaacataccagccttcaaatgtcacagttcaaacacaacagccatgcagttttcaggaggcca

SEQ ID NO: 107838 - DNA, 270 bp, Glycine max
aacacaaggcagaaagcaagctcatcctagagttttaaaaatggcagcagcctcctccatggctctctcttcctcatccttggctggcaaggtcgtgaagctgggcccatcagcccccgaagtcgggagggtcagcatgaggaagaccgtcccaagcaggcctcctccggaagcccatggtacggcccagaccgcgtcaagtacttgggcccattctctggcgagcccccgtcctacctcactggcgagttcccaggtgactacggctgg

SEQ ID NO: 107839 - DNA, 267 bp, Glycine max
attgaagacgttcgatcacacggtggaattaagaagttcagatctgctgcttactccaactgcatccgcaagtcatcctgagattccctatgttgtgtgacgtcatagcccccgtagtcttgcatctgctatattattctagtctcttctttcccttttcttgttctcttccttgcccttttgttctctctacctataagcaagactttgtttctttttgagtcaagatggctggctcagctataggtgtcgaaggctacgagaaaa

SEQ ID NO: 107840 - DNA, 265 bp, Glycine max
gcacatctgttaaaagataacgcaggtgtcctaagatgagctcaacgagaacagaaatctcgtgtggaacaaaagggtaaaagctcgtttgattctgatttccagtacgaatacgaaccgtgaaagcgtggcctatcgatcctttagtcttcggaatttgaagctagaggtgtcagaaaagttaccacagggataactggcttgtggcagccaagcgttcatagcgacgttgctttttgatccttcgatgtcggctcttcctatc

SEQ ID NO: 107841 - DNA, 262 bp, Glycine max
cgcagagtagagcagcacagaagagggaaaacggcaccgccgccgtagaagataacaaccatggtgcacgtctccttttacaggaactatgggaagacattcaagaagccgcgtcgtccgtacgagaaggagcgtctcgacgcggagttaagctggttggtgagtacgggcttcggtgcaagagagagctgtggagggtgcagtacgcgctcagccgcatccgcaacaacgcgcggaacctcctcaccctcgacgagaagaa

SEQ ID NO: 107842 - DNA, 264 bp, Glycine max
gtttcttacaaggctctactctactgcttcaccttctgctctagaaaattcagtggtgatacatggcttcggctactctctctgtagccaaaccagcccttcaggcaaatgggaaaggcttctctgaattctctggcctccgcagctcatcaggcttccttcccttttctagaaaatcttcagaggatttccattctgtcattgccttccagacctatgcagaaccgatcagtggaggatacaagaagggtgtgacagaagcaa

SEQ ID NO: 107843 - DNA, 265 bp, Glycine max
caatcccacacgcttcctactctcccctttcaccacttttctgctcccccttgagaaagaatttgaatcatcaaaattaaaaactcgcaccaacaatggccccaagagacagccgagccaccgcgttcgccggaccaggcccaggcccatcaccggcccacaaagagatccgctaccgaggcgtccggaaacgccctggggccgctacgccgccgagatccgcgaccccggcaagaaaacgcgcgtctggctcggcaccttcgac

SEQ ID NO: 107844 - DNA, 266 bp, Glycine max
ttcttccaggagattctccttgaagcaccaaaagaacagtaagagaaggttttctttgttcactgttagagctgattctgatgactctgactgcaatgaggaagagtgtgccccggataaggaagtagggaaggtcagtgtggaatggtagctggggagaagacaaaagtagtgggcacattcccacctcgtcgtaagccgggttggactggctatgttgagaaggacactgctgggcagacaaacatatattcagttgagccagc

SEQ ID NO: 107845 - DNA, 265 bp, Glycine max
ttccttccctcattcttatttttttcctctcttcactttcactctctctctctctctcagccatcatcatgggatcagtgattctcccagatctcggcaccgagattttgattccggtctgcgccatcattggaatagggttcgccctcttccagtgggtcctcgtctccaaggttaagctctccgctgccatagacgcttcccctaacgccgccggcaaaaatggctacaacgattacctcatcgaagaagaggaaggcctcaa

SEQ ID NO: 107846 - DNA, 265 bp, Glycine max
  unsure (1)..(265): unsure at all n locations
gccaacgcatggcttctctctcttgctccgccaacgaccttgccccactcatcaactacaccgncgccgccaactacctctgcgcacaattcgattccatttctagaatgctcttcgaaacaacctaagccgtcgacaacacctacctctgttttcagacgtatcttgtcttcgccattcagctcggcttcgccatgctctgcgccggctccgtcagagccaaaaacaccatgaacatcatgctcaccaacgtcctcgacgccgt

SEQ ID NO: 107847 - DNA, 261 bp, Glycine max
ataacacaaagcacaaagcaaagctcatccttgagttaaaaaatggcagcagcttcttccatggctctctcatccccatccttggctggcaaggccgtgaagctgggcccatcagccccagaagtgggaagggtgagcatgaggagaccgtcaccaagcaggtctcctcaggaagcccatggtacggcccagaccgagtcaagtacttgggcccattctctggcgagcccccgtcctacctaaccggtgagttcccaggcg

SEQ ID NO: 107848 - DNA, 256 bp, Glycine max
attgggaacccaacagaatcagcattattggaatttggatgccttttgagtgctgattttgatgcgtatgcacagcgtagagagtataagatactcaaagttgagccattcaattcagtccgaaagaaaatgtccgtgcttcgtggtcttcctaatggaggagtccgagctttctgcaaaggtgcatcagaaataatattaaaaatgtgtgacaaaactattgattgcaatggggaagttgttgatcttcctgaag

SEQ ID NO: 107849 - DNA, 258 bp, Glycine max
atccatacatagccactttacactcactcttgtgttgttgccttcatggccaagccagtgtccattgaggtatggaacccaagtggcaaatacagagttgttagcaccaaaccaatgcctggaactcgttggatcaatcttctcttcaaaatgatgttcgccttgaaatatgtaccgagaagaaaacgattctgtcagttgaagacatcattgctttgattggtgataagtgtgatggagttattggacagctgactg

SEQ ID NO: 107850 - DNA, 261 bp, Glycine max
gtctggacctggggtttcagctcccagttcatccttctttgggagcagcttgaagaaggttattggctcaagggtccccaacacaaagatttcctctggaagcttcaagattgttgctgtagaagagaagaaagagattgaagagcccagcagaccgacaaggacagatggaagggtcttgcctatgatatctcagacgaccaacaggacatcacaagaggaaagggtttggttgactcccttttccaagctccacaggat

SEQ ID NO: 107851 - DNA, 265 bp, Glycine max
ggtttcatgaatttcattcacagggatgaggaggtcaattacttcccttcaaggtatgatcctgttcgtcatgcagaaaggttccccatacctcctgctatctgcagtggaaggcgtgaaaagtgtggaattgagaaggagaacaattcaagcagcccggagagagataccggtcttgggcacctgacaggcaagatagatttgctcgccgatgggttgatgctttatctgacccacgggtcacccatgagatccgcagtgtctg

SEQ ID NO: 107852 - DNA, 263 bp, Glycine max
aaccaggttcaaaggcgacttctagatgagtccatcgccgacgaaccttctgcagcagtttcaaagccgtggattgaactttattgtggtgcagtctcttcccacgtttcagttcaagaaaaacgagagagaacaagacaagacattagtgtggagtgtgccatctgcctcggagagtttgaagaaggggagtggctgaaacgtcttccacactgcagccatagtttccatgtttcatgcattggtacgtggtttcagtcgca

SEQ ID NO: 107853 - DNA, 260 bp, Glycine max
aagatttcaagagaaataaacaagtcaagggtttgatcaaaataatatattactatggttcgagagaaaataagagtatctactcggacactacaatggaaatgtgttgaatcaagaatagacagtaaacgtctttattatggagctttattctgtctccacttatgaaaggtcaagccgatacaataggcattgcaatgcgacgagttttactcggagaaatagagggaacatgtatcacacgtgtaaaattagaaaaa

SEQ ID NO: 107854 - DNA, 258 bp, Glycine max
ggcttgaacgtgtggctcttcgtccacaccgaggagatcccttccgccatcaagccctacaggaacttccagaaggagaagaagctcgaggacaacgacttcaccggcgccgttttcgaaggcaagttttacggccccgatgaggttaagaacctcgaatccttgcccacgcgcgctgagatttacgccacccttttgggggctttgaagagccctgcttccgctcttgttggcactcttcagtctcctgctagggaa

SEQ ID NO: 107855 - DNA, 255 bp, Glycine max
gtttcactgcataaatttgagagaaaactctgcaaacatgttggtttatcaggacctccttacaggtgatgagcttctctcggactccttccgttacaatgaaattgagaatggaatgctgtgggaagttgaggggaagtggttgttaagggagcagttgatgttgacattggtgcaaacccttctgctgagggtggagaagatgagggagtcgatgacgcagctgttaaggttgttgacattgttgatacattc

SEQ ID NO: 107856 - DNA, 262 bp, Glycine max
ccagtattcataatctttgagttgatatgggcaactggagcagtgaacgtcatcaaaccactcaacaaagtgatctcggtgcagttttgcgtgatggaaaagaagtacttcttcaagcattcaactgggagtccaacaaatacactggtggaataatttagaaggcaaagtttctgacatagctaaagcaggatttacttcagtctggttgccaccaccaacccactccttctcacctgaaggttatactccgcagaacctt

SEQ ID NO: 107857 - DNA, 262 bp, Glycine max
tgtcttgcaattgaagttgaagtcttgcccttctctcttcaactccaaacacaagacatcatcatccatggctgcctccgtctccactgtcggagctgtcaacagagctcttttgaacctgaatgggtctggacctggggtttcactcccagttcatccttctttgggagcagcttgaagaaggttattggctcaagggtccccaacacaaagatttcctctggaagcttcaagattgttgctgtagaagagaagaaagaga

SEQ ID NO: 107858 - DNA, 260 bp, Glycine max
cttcagtttcgttaacgcatccttcgacctcgctactatacccttcaacgacggctattctccgctcttcggagctagcaacgttgttcgctccgaggatggatacggcgtacaactccgcctcgatcgctacacaggttcgggttcatttcctccagtatgtaccagtatggattcttcagcgcgagagtcaagttaccatcgaattatagtgctggtattcgcgtggccttttatacatcaaacggtgatgtgttcga

SEQ ID NO: 107859 - DNA, 260 bp, Glycine max
ggaatcctatggatgaagacatggtttctctggatcctattgaatttcattccgaagaggaaccttataaagatcgtattgattcttatcaaagaaaaacgggattaactgaggctgttcaaacaggtactggtcaactaaatggtattcctgtagctattggaattatggattttcagtttatggggggcagtatgggatccgcagtaggtgagaaaatcacccgtttggtagaatatgctactaatcaacttttacct

SEQ ID NO: 107860 - DNA, 258 bp, Glycine max
gcttgaagaaggttattggctcaagggtccccaacacaaagatttcctctggaagcttcaagattgttgctgtagaagagaagaaagagattgaagagacccagcagaccgacaaggacagatggaagggtcttgcctatgatatctcagacgaccaacaggacatcacaagaggaaagggtttggttgactcccttttccaagctccacaggatgctggaactcactatgctgtcatgagctcctacgagtacctta

SEQ ID NO: 107861 - DNA, 256 bp, Glycine max
ctttgggtcagcagcaaaaggaactggacttaaagctcttgaatttgctctctctatgtgtgattcagtggatatgtatggtttcactgtagatcctggttataaagaatggactagatatttctctgaatcccgtcaaggccataccccgttgcatggtagagcttattaccagatgatggagtgcttggggcttatcaaaattcattctcccatgcgagctgatctgcatcgtgttgtaaaatgggttccaagc

SEQ ID NO: 107862 - DNA, 255 bp, Glycine max
cttcttctcttaaaagagcctttgctttttctttaggcctttccgaattaagtacttgtttcattttctctcgaagcaagaaaaatgttcatcgagagtttcaaggttgagagtcctaacgtgaagtacacagagactgagattcagtccgtgtacaactatgaaaccactgaacttgttcacgagacaagaatggcactatcagtgggttgtcaagcccaaaactgtcaaatatgaatttaaaaccaacaccca

SEQ ID NO: 107863 - DNA, 257 bp, Glycine max
ggcttgaacgtgtggctcttcgtccacaccgaggagatcccttccgccatcaagccctacaggaacttccagaaggagaagaagctcgaggacaacgacttcaccggcgccgttttcgaaggcaagttttacggccccgataggttaagaacctcgaatccttgcccacgcgcgctgagatttacgccacccttttgggggctttgaagagccctgcttccgctcttgttggcactcttcagtctcctgctagggaa

SEQ ID NO: 107864 - DNA, 272 bp, Glycine max
gaacagttacatgtcttctgtgaggaaaatggcatgtgagattcttgagctgatggcagaaggattgaagattcaacaaaaaaatgtgtttagcaagcttcttatggataaagagagtgactctgtttttagggtgaatcactaccctgcttgccctgaacttgtgaatggtcaaaacatgatagggtttggagaacacacggacccacaaatcatttctctacttaggtccaacaatacttcaggccttcagatttttcttagagatggaa

SEQ ID NO: 107865 - DNA, 278 bp, Glycine max
aattcggatcgatctcgagccgaatcggctcgagcattccttgtgttttgctttctaactcaaaaccaaacatgtcgaacacatgcggcaactgcgactgcgctgacaagactagctgcaccaagggaaacagctatggtgttattgtagagactgagaagagttacatcgagactgttgtcatggatgttccagcagctgagcatgatgggaagtgcaagtgtggcactaactgcacttgcacggactgcacctgtggccattaaggaatatgtatg

SEQ ID NO: 107866 - DNA, 267 bp, Glycine max
  unsure (1)..(267): unsure at all n locations
gctaaaattgcagattttggtttggccaggtcctttcaagaggacaagagccacataagtacagctattgcaggaactttggggtatatggctcctgaatacctagctcatggtcagttaacagaaaaggcagacgtattagttttggagtgttgctgctagagatagtcactagctagacagatacaacaggagcaaagtcatgcagagatatgtcatgacagcttagttcacagttgggccatggannagcattttccagggcag

SEQ ID NO: 107867 - DNA, 264 bp, Glycine max
aagccttgttgctgccatggccacccacgcggctcttgcttctacaaggatcccttcaaacacaaggttcccatccaaggcctctcactctttcccaacccaatgcgccttaaagagacttgaggtgacagaattctctgggcttagatccacttcatgtgtcacatatgctaacagtgctagagaatcttccttttttgatcttgtagcttcccaactcactcccaagaccaatggatcaactcctgtgaggggagagacagt

SEQ ID NO: 107868 - DNA, 265 bp, Glycine max
gcgaaatatgcaacaaagggttccagagagaccagaaccttcagcttcaccgaaggggtcacaaccttccgtggaagctaaggcaaaggtccaacaaagaggtaaggaagaaggtttatatctgccccgaacaaacctgcgtccaccacgaccctgcaagagcactcggcgacctcactggcatcaaaaagcattcagcagaaagcacggtgagaagaagtggaagtgtgaaaagtgctccaagaaatacgcagtccaatcagat

SEQ ID NO: 107869 - DNA, 266 bp, Glycine max
ggaagaatcactcccttatccatttccacaccacaccatagacacaaccaacgctctctcttcagcctccattctacgctctcccaaccgccagtctctgacccgaagagcgaaccataatggaagagtaaattaccggaaccgaataaccgtttctccgtgaaagcctccgccaaagagattgcctttgaccagcattcccgctctgctatgcaggccggcattgacaagctcgccgacgctgttgggctcactcttgggcccag

SEQ ID NO: 107870 - DNA, 269 bp, Glycine max
gtcaaaggccagacccttcgccaacctctcgtgagatgtaacccttcctcagcatcagctctcaccatcaaagctgcttcctatgctgacgagctcgtcaaaaccgccaaaacagtggcctcaccggggcgtggtattttggcgatggatgagtcaaatgcaacctgcgggaagcgtttggcatctattgggttagagaacacagaagctaatcggcaggcataccgtaccctacttgtgacagtacctggtcttggtgaatacatctc

SEQ ID NO: 107871 - DNA, 266 bp, Glycine max
tcatggccaagccagtgtccattgatgtatggaacccaagtggcaaatacagagttgtcagcaccaaaccaatgcctggaactcgttggatcaatcttctcattcaaaatgatgttcgccttgaaatatgtaccgagaagaaacgattttgtcagttgaagacatcattgctttgattggtgataagtgcgatggagttattggacagttgactgaagactggggagaagagttgttctctgctttgagcaaagcgcgaggcaaag

SEQ ID NO: 107872 - DNA, 258 bp, Glycine max
ggctcgaggctttacaaaaccactgtgtacgattaagggttcttacaatatttccaatatttcttatagtgaaaaatttgttagctaaaagaagaccaagtttttggtgttgtagaaggaagagaagaataacatgaaaattcagtgtgacgtgtgtgagagagctccagcaacagtgatttgttgcgcggatgaggctgctttgtgtgccaaatgtgacgttgaagttcatgctgcaaacaagcttgcaagcaagca

SEQ ID NO: 107873 - DNA, 267 bp, Glycine max
caacaaccagatggtgaatgccaccctcatgaacattgctgataaccccaccaatgtgcagcttcctggtatgtataacaaggaagagaatccccgtgtgcccatcatcgtcaccggtaacgatttctccacactctatgcgcctctcatccgtgatgggcgtatggagaagttctactgggcaccaacaagggatgaccgcattggtgtctgcactggaatttttcgcaccgattcaattcctgaacaggacgttgtcaagattgt

SEQ ID NO: 107874 - DNA, 262 bp, Glycine max
cacacacacagagcaacactgcactgtgtggaaacgaaacatggcaagagtggtggcactccaacagaaccaactatctttctctaccttaacttcctctctttctgacttcagtggaaccagacttcaaactcaacttcagttcaagagaaagcaatgccatccaaaagggtctttctacgtctccgcatcgagcaccaagaaaatcctaataatgggaggcaccaggtttattggtgtgtttttgtctaggctccttgtc

SEQ ID NO: 107875 - DNA, 263 bp, Glycine max
ggcagaaagcaagctcatcctagagttttaaaaatggcagcagcctcctccatggctctctcttccccatccttggctggcaaggccgtgaagctgggcccatcagcccccgaagtcgggagggtcagcatgaggaaaccgtcaccaagcaggcctcctccggaagcccatggtacggcccagaccgcgtcaagtacttgggcccattctctggcgagcccccgtcctacctcactggcgagttcccaggtgactacggctgg

SEQ ID NO: 107876 - DNA, 259 bp, Glycine max
cttatattccctgaggaggttctacgacgtggaaacgctctttaatggaactttagcttcgactggtcgtgaccgggaaactaccggtttcgcttggtgggccgggaatgcccgacttatcaatttatccggcagatactaggagcacatgtagcccatgctggattaatagtattctgggccggagcaatgaaccttttggaagtggctcatggggtacccgggaagcccatgtatgaacagaggttaattgtacttc

SEQ ID NO: 107877 - DNA, 260 bp, Glycine max
  unsure (1)..(260): unsure at all n locations
gccgctgagctccctttctcctcggtccacagagacaaaatgtaagacaggtgccaacagttcatcacgaaagaaaggactagctgagccgagatcactaactaaaacgaatttaatactaatcgaaaatactaatagaatagaaatagaactgtcttttcatatagatatcccttccacacaacatacgaatcaaaangatctcgaagacccancaacgcacgaaagccgggatctttcagaaaatggattcctattcg

SEQ ID NO: 107878 - DNA, 259 bp, Glycine max
agcttgtgaactcaaaagatggacctccaacctttgagcagcccaagatgactctggagaagctcttgctgtatggtaacatgcttgtccaagaacaagagaatggcaagagagtccaattggctgacaagtacttgaacgaggctgctcttggaaattgaaacgaggatgctattcagaggggaactttcttccagtcttgaattggaggcaaagcaaacttggcaagtaaatatttctgttcggaacagtgttgtac

SEQ ID NO: 107879 - DNA, 265 bp, Glycine max
agaagatggcacaaacgctggcaatgcccgtggcaccttcgctagctatcatctccaattctcgcctctccaacacactctccgttcccgttctgaacaaaccaaaggttcaagggtcaagcatcaagtgcgttcgtgttggcggtgtggagattccgaacaacaagcgaatcgagtactcgctgcagtacattcatggagttggaaggaccagagcgaaacagattctctgtgatatccaaatggataataaaatcacgaagga

SEQ ID NO: 107880 - DNA, 266 bp, Glycine max
aagagaagaagctcatacttggaggcaatgtatcaaaagaacctgtatcagttattccttggaaattaattttatcaaaagcacctgtttgggctttaataatctctcacttctgccataattgggggacatttattctattaacctggatgcctacctactacaatcaggtgcttgctgtttataagtcttctttttttttttttgcagaattcataaatgatttctaaccttttagaatatacatgtccttgacaatgtatcta

SEQ ID NO: 107881 - DNA, 266 bp, Glycine max
gaattctctaaaagagatctttttctgctctttgaagaaagaagggtctttgcttgattttggagatgtctctgctctcagatctcatcaaccttaacctctccgataccaccgagaaggtgatcgcagagtacatatggatcggtggatcaggaatggacctgaggagcaaagcaaggactctcccaggaccagttagcgacccttcagagcttcccaagtggaactatgatggttccagcacaggtcaagctcctggtgaagac

SEQ ID NO: 107882 - DNA, 265 bp, Glycine max
aattgtgaagggaaccatgacaaccacgcattcctacactggagaccagaggcttttggatgcttcacaccgtgacttgagaagagccagggctgcagcacttaacattgtcccaaccagcacaggagctgccaaggccgtgtctctagtgttgccacagctgaagggcaagctcaatggaatagcgctccgtgtgcctacacccaatgtttcagttgttgaccttgttgtgaatgttgagaagaagggtcttactgctgaagat

SEQ ID NO: 107883 - DNA, 257 bp, Glycine max
gagaaacttttcaactgcattaattggtctgagcttcatgtttgcaacatcatggaagttaacattgttggctttggctgttgtacctgttctttctgttgctgttcgcaagtttggccgttacctgcgtgaacttctcataaaactcaagctgcagctgcagttgcttcatcaatagctgaggaatctttggtgcaataagaacagtaagatcatttgcccaagaagattatgaagtaacacgctactcagagaaa

SEQ ID NO: 107884 - DNA, 259 bp, Glycine max
gaacagttacatgtcttctgtgaggaaaatggcatgtgagattcttgagctgatggcagaaggattgaagattcaacaaaaaaatgtgtttagcaagcttcttatggataaagagagtgactctgtttttagggtgaatcactaccctgcttgccagagacttgtgaatggtcaaaacatgatagggtttggagaacacacggacccacaaatcatttctctacttaggtccaacaatacttcaggccttcagattttt

SEQ ID NO: 107885 - DNA, 258 bp, Glycine max
gagaaacttttcaactgcattaattggtctgagcttcatgtttgcaacatcatggaagttaacattgttggctttggctgttgtacctgttctttctgttgctgttcgcaagtttggccgttacctgcgtgaacttctcataaaactcaagctgcagctgcagttgcttcatcaatagctgaggaatcctttggtgcaataagaacagtaagatcatttgcccaagaagattatgaagtaacacgctactcagagaaa

SEQ ID NO: 107886 - DNA, 259 bp, Glycine max
ccgatggagtcaatttggagcctatcttaccagttcttgccaaggtttttgatcaggccttagaaggtggaggggcaaaaaacatcaattttcaggagctggcatcagatttagctcaaattacctttgattatccttttaggatacccccatactttgcccttataattagagctattggggttctggaagggatagctttagtaggaaattctgaatttgccattgttgacgaggcttatccttatattgcacagag

SEQ ID NO: 107887 - DNA, 247 bp, Glycine max
ggctcgagctgctcacagggcacatgcatacaacagagggtgttacacaatacctgaagccatctgacgctggttttcttttgcaaaaggaacttgattaccttgttggggcggtatcaagcccaaaaggccatttgctgccattgttggtggttccaaggtctcatctaaaattggagtgattgagtcacttttggaaaaagttgacattcttcttcttggtggaggaatgatcttcacattttac

SEQ ID NO: 107888 - DNA, 266 bp, Glycine max
ggtaactgtaacctatctggaatgagtgatcctcacgatgaattcaagggaaagaatgtcctgattgagagaaaggaaccttcagaactggcatcaaaatatggcatgtcaattgagacatatcaagaaattcttggagagtgcaggcataagttgtttgaagtaaggtcaaggcgtccaaagccacatttggatgataaggttattgtatcatggaatggactggcaatctcatcttttgctagggcttctaagattctcaaggg

SEQ ID NO: 107889 - DNA, 259 bp, Glycine max
caatctctctctctccaatggccaaagacctcgaaacggagattcaaagtgggttgcctcacaaggactaccacgacccaccccccgccccattctacgaccccgccgagctccgaaagtggtccttcttccgagcctcatcgccgagttcgtcgccaccctcctcttcctctacgtcaccatcctcaccgtcatcggctacaaccaccagacagccaccgccgccgagccctgcagcggcgtcggcgtcctcggcatc

SEQ ID NO: 107890 - DNA, 256 bp, Glycine max
gcttgaaacacataccatatcagcttagaaatcatgggtccaatctaacagaagaggagcttgaaacacataccatatcagcttggaaaggaggaaaatggacaggatttacacaatgttttatccgtgcagggccatacgataatttgaaagatcttgctgtgaagatcctgcaacatggaatttcaacagttcctattattcattcagaagatggttcatttccacagataatacaaaccaataactttcagga

SEQ ID NO: 107891 - DNA, 257 bp, Glycine max
gaacaagtagttgagaactaagaaggagaagcaaatggcttcctcaatgatctcttccccagctgttaccactgtcaaccgtgccggtgccggcatggttgctccattcactggcctcaagtccatggctggttccccaccagaaagaccaacaatgacattacctccattgctagcaacggtggaagagtgcaatgcatgcaggtgtggccaccagttggcaagaagaagtttgagactctttcctacctgccaga

SEQ ID NO: 107892 - DNA, 266 bp, Glycine max
tctcgagccgcggctcgagagcttgttgacaccttccctggccaatccattgatttctttagtgcactgagggccagacgtatatgatgatgaagtgaggaagtggatttctggtgttggtgttgacagtgttgggaagaagcttgtgaactcaaaagatggacctccaacctttgagcagcccatgatgactctggagaagctcttgctgtatggtaacatgcttgtccaagaacaagagaatgtcaagagagtccaattggctg

SEQ ID NO: 107893 - DNA, 255 bp, Glycine max
catcacaacaacaacatggctgccactgctgctgcaggcatagcttccttgttttcttcttctattaacagtgtcaaatgtcttcgttcctccaagaactgctccataatagaccctctcataacaacagtgccctcaaaccgtggcatgtttgggtcacacttggtggaacctttgtccattaattcgcacaagttgtggggacctagaatttctgctgctgttgcacaagaagaggctgttgttgttgtggat

SEQ ID NO: 107894 - DNA, 255 bp, Glycine max
ctaatttattatgatctctaccagtccacacgactagaaaagtttgtcacagcctatgccgcattcttgaaagcaaatggtgaaaccccagtgacttggaaaagggcagcaaccatggatgaggtcctccggaggcagatataattagtcttcatcctgtcttggataaaaccacttatcatctagtcaacaaggaaagactagctaagatgaagaaggaagcaattcttataaattgcagtagagggcctgtta

SEQ ID NO: 107895 - DNA, 254 bp, Glycine max
gaataggccaactattagcaggagattcatgcctgagaaagggtctcctgaatatgatgcgttactaagaaccctgagaaggagtttttgaagactattactggcaagaaagagaccctcattgaccttacaattatagaaattttatcaaggcacgcatctgatgagttctaccttgggcagagtgatggcggtgactactggacttctgatgccgggccattagaggcctttaagaggtttggaaagaatct

SEQ ID NO: 107896 - DNA, 254 bp, Glycine max
aaacactcataacacaaagcacaaagcaaagctcatccttgagttaaaaaatggcagcagcttcttccatggctctctcatccccatccttggctggcaaggccgtgaagctgggcccatcagccccagagtgggaagggtgagcatgaggaagaccgtcaccaagcaggtctcctcaggaagcccatggtacggcccagaccgagtcaagtacttgggcccattctctggcgagcccccgtcctacctaaccg

SEQ ID NO: 107897 - DNA, 257 bp, Glycine max
attcggtggccccaaatatatatctatggcagttgtatattcggtggccccaaatatacaactgccatagatatatggtcaactggttgtgtaatggctgaattacttcttggacagcccttgtttcctggagagagtggagttgatcagccagttgaaatcatcaaggttttgggaactccaaccagggaggagataaagtgcatgaacccaaattatactgaatttaagtttccacagataaaacctcatccgtg

SEQ ID NO: 107898 - DNA, 259 bp, Glycine max
aactatctcccactataaacataaactttcctctctcatagatcaaccctgcaccacactcctcctttcagttctgcaggtggtttttccaattcttgcttggggcagaaactacactgctactaagttcaggaagatcttcttgcaggtctcactattgctagtctttgtattccccagagcattgggtatgccaccttggcacatcttgatcctcaatatggcctttatacaagtgtggtaccaccacttatctatg

SEQ ID NO: 107899 - DNA, 261 bp, Glycine max
ctcgagccgctcgagccgtggccacccacgcggctcttgcttctacaaggatcccttcaaacacaaggttacccatccaaggcctctcactctttcccaacccaatgcgccttaaagagacttgaggtgacagaatctctgggcttagatccacttcatgtgtcacatatgctaacagtgctagagaatcttccttttttgatcttgtagcttcccaactcactcccaagaccaatggatcaactcctgtgaggggagaga

SEQ ID NO: 107900 - DNA, 254 bp, Glycine max
aagaaaatgaaagtccttgttttctttgttgctatagttctagcagcatggcattgccatggctcagaccatgaccatgaccatggccacacctaccaaattttccctctgagaatgaaaactggccatgtggccactacattccggaggtatcatgccaaagttggaggcttggtgtggaagcacacaacgtcattgactggaaaaccgttcctcaagattgcgagggatatattgggaactacatgcttggc

SEQ ID NO: 107901 - DNA, 253 bp, Glycine max
caggcagtgtcatctctcctttgacgacaagatgagcatcccaattccccatcggcagttattcatagacggagactggaaagtccccgtcctcaagaatcggattcccatcatcaacccttccaccaacacatcatcagaggatatcccagcagctactaaggaagacgttgatctcgctgtcgctgccgccaaagctgccctctcccgcaacaagggcgccgattgggcctccgcttccggctccgttcgg

SEQ ID NO: 107902 - DNA, 252 bp, Glycine max
gaattctctaaaagagatctttttctgctctttgaagaaagaagggtctttgcttgattttggagatgtctctgctctcagatctcatcaaccttaacctctccgataccaccgagaaggtgatcgcaagtacatatggatcggtggatcaggaatggacctgaggagcaaagcaaggactctcccaggaccagttagcgacccttcagagcttcccaagtggaactatgatggtcccagcacaggtcaagc

SEQ ID NO: 107903 - DNA, 253 bp, Glycine max
gtaaaaatcccggatgataagatggtgtattacgagaaagttgcggagatgtacgtgggcgatgatgtttctccagatttctacgggtgggtgtttccaaaatgtgaccatgtggctgtaggcactggactgtgacacacaagggggacatcaagaagttccaactagcaacaaggaaaagagcagaggacaagattttgggaggcaagatcatccgagtggaggctcaccctatcccggaacatcctcggcc

SEQ ID NO: 107904 - DNA, 257 bp, Glycine max
caccaccatggccaccgtcacaacccaagcctccgccgcgattttccggccatgtgcctcgaaatcgaggtttctgaccggctcttccggtaaactcaaccgggaagtgactatgaggccaatggggtgcctccttctgcctctttcaaggttgaagccaagaagggagagtggttacctggcttggcctccccaacttacctcaatggcactcttcctggtgacaatggatttgaccctctgggactagctgagga

SEQ ID NO: 107905 - DNA, 256 bp, Glycine max
ctcgagccgataagattgcagtagtgctaagtgctaacacctgcagtgaacaatggcctctgcatcagcatctctgctcaagtcttcacttgttcttgacaagtctgagtgggtgaagggacaaacccttcgcaaccttctgcatcagttgtgagatgcaaccccaccaccccatcaggcctcaccatcagagctggttcctatgctgatgagctcgttaagaccgcgaaaacagtggcttcaccagggaggggta

SEQ ID NO: 107906 - DNA, 273 bp, Glycine max
cttagattataatccgaaaacaaaagagttaagtgaattaaaaacccaagggaggttcatggccaaaggtaaagatatccgagtaattgttattttggaatgtaccggttgtgataaaaagagtgttaataaggaatcaacgggtatttctagatatataactaaaaagaatcgacagaatacgcctagtcgattggaattgagaaaattttgtccccgttgttgcaaacatacaattcactcagaaataaagaaatagatcaaattgatcgc

SEQ ID NO: 107907 - DNA, 288 bp, Glycine max
cagaaaaacaagtagttgagaactaagaagaaggaaatggcttcctcaatgatctcctccccagctgttaccaccgtcaaccgtgccggtgccggcatggttgctccattcaccggcctcaaatccatggctggcttccccacgaggaagaccaacaatgacattacctccattgctagcaacggtggaagagtacaatgcatgcaggtgtggccaccaattggcaagaagaagttcgagactctttcctacttgccagacctcgatgatgcccaattggcaaaggaa

SEQ ID NO: 107908 - DNA, 288 bp, Glycine max
cggctcgagcaatgctggaatcagacccgctattaatgtaggtatttccgtttccagagttggatcggcggctcaaattaaagccatgaaacaagtagctggtaaattaaaattggaattagcacaattcgcagaattagaagcttttgcccaattcgcttctgatctcgataaagctactcaaaatcaattagcaagaggtcaacgattgcgcgagttgcttaaacaatcccaatcagctcctcttaccgtggaagaacagataataactatgtatactggaacgaa

SEQ ID NO: 107909 - DNA, 283 bp, Glycine max
aggtctccaagaattggtaccaattcaagctgcaaatatacttgaacttcaacttatcccacattctccactctcaatggcttcaactctcaaatctggcggaattcatacaggggcaatcaatgatgatttatacaaggaattgtggcatgcatgtgctggtccccttgtcactctccctcgtgaaggggaacgagtctattactttccacaaggtcacatggaacagcttgaggcatctatgtatgagggattagagcagcagatgccttccttcaacctg

SEQ ID NO: 107910 - DNA, 288 bp, Glycine max
tttggcttctgcctttccttttccagggagctcattgacaatggctgaaacaaagtgggtcatgaaggacaaaagatggtctctccatggaatgacagctctagtcacaggaggcacccgaggcatagggcatgccattgttgaagagttagctgagtttggagcaactgttcatatatgtgcacgtaatcaagatgatattgataaatgtttagaagagtggaaaaacaagggacttaatgtgactggttcagtatgtgatttactatgttctgaccaacgtaaaag

SEQ ID NO: 107911 - DNA, 283 bp, Glycine max
  unsure (1)..(283): unsure at all n locations
ggcggctctcagaaaagccgtgttctttgtaatcgctcaatgcttcaccttttccgcatatgctgcaaggtttgaaatcacaaaccgatgcacatacactgtctgggctgcgtctgtgcctgttggcggtggcgtgcaattaaacccgggccagtcatggtccgtggacgtgcctgcaggaacgaaaggggcccgcgtttgggcncgaaccggctgcaacttcgacggttcgggccgcggtggatgccagaccggtgactgcgggggtgtcctcgactgcaaa

SEQ ID NO: 107912 - DNA, 287 bp, Glycine max
aacaagtagttgagaactaagaagaaggaaatggcttcctcaatgatctcctccccagctgttaccaccgtcaaccgtgccggtgccggcatggttgctccattcaccggcctcaaatccatggctggcttccccacgaggaagaccaacaatgacattacctccattgctagcaacggtggaagagtacaatgcatgcaggtgacgccaccaattggcaacaagaagttcgagactctttcctacttgccagacctcgatgatgcccaattggcaaaggaagtcga

SEQ ID NO: 107913 - DNA, 269 bp, Glycine max
atccaattgaaattttaaaaatgactgggataaacttaagaattcaattattgaaattgaataagtaaacaatttaattggattggtcgaatggtatcaaaaaaatggagtactaactcccatttcttatttattattgaattaaccgatcaacttgcttagttatcgaacatttctttttgatttcaaaaattttccggaaaaaatttgaatctatttttatatgcgaatcaatcctactacttctggtcctgaggtttctgcgcttg

SEQ ID NO: 107914 - DNA, 286 bp, Glycine max
tcagcctctaatatttttctcactgtctctccagagaacttgatagagagatggcagctgcaacatctggtgctgtgttaaatgggttgggatcttccttcttgagtggaggaaacaggagccaaacccttctggcctctgctattggaggcaaagttggtgctgctgttactgttaatcccagaagactcattgtggtagctgctgctgcaccaaagaagtcatggctccctggtgttagaggtggtggcaatctcgtcgaccagaatggcttgatggatcgcta

SEQ ID NO: 107915 - DNA, 293 bp, Glycine max
atcattgtcaccggtaacgatttctcaacactctatgcacctctcatccgtgatgggcgtatggagaagttctactgggcaccaacaagggaagaccgcattggtgtttgcaccggaattttccgcactgatggtattcctgaacaggacattgtcaagcttgttgacaccttccctggccaatccattgatttctttggtgcactgagggccagagtatatgatgatgaagtgaggaagtggatttctggtgttggtgttgacagtgttgggaagaagcttgtgaactcaaa

SEQ ID NO: 107916 - DNA, 283 bp, Glycine max
ctctctaccaatccacaactgatggcaggaagattgtcgacgtgctcctcgagcaaaacattgttcccggtattaaagtcgacaagggtttggtaccccttgctggttccaacgacgagtcatggtgccaaggtcttgatggtcttgcctctcgctcggctgcatactaccagcaaggtgcccgtttcgccaaatggcgtactgttgtgagcatccccaacggtccctctgctctggcagttaaggaagctgcctggggtctggctcgctatgcagcaattgc

SEQ ID NO: 107917 - DNA, 284 bp, Glycine max
aacagatctctgatctgaaaatgagtgcatcgaggttcattaagtgcgtcaccgtcggcgacggcgctgtcggcaaaacctgcttgttgatttcctacaccagcaacacttttcccacggactacgtgcccacggtttttgacaatttcagtgctaatgttgtggtggatggaagcaccgtaaacctggggttgtgggatactgctggtcaggaggattataataggcttagacccttgagttatcgaggagctgatgtatttatacttgccttttctctcata

SEQ ID NO: 107918 - DNA, 284 bp, Glycine max
tgcaattgaagttgaagtcttgcccttctctcttcaactccaaacacaagacatcatcatccatggctgcctccgtctccactgtcggagctgtcaacagagctcttttgaacctgaatgggtctggacctggggtttcagctcccagttcatccttctttgggagcagcttgaagaaggttattggctcaagggtccccaacacaaagatttcctctggaagcttcaagattgttgctgtagaagagaagaaagagattgaagagacccagcagaccgacaag

SEQ ID NO: 107919 - DNA, 278 bp, Glycine max
ctcgagccggaattgttgtaactttttgattcctaaattctctaaaattcgaaattctaatttcgttaggggaaagagattgtttgtgtgtgagtgagtatggctggaaaaggcgagggtcctgctatcggaatcgatttgggaacgacgtactcttgcgtcggcgtgtggcaacacgatcgtgttgaaatcatagccaacgatcagggtaacagaactaccccatcctacgtggctttcaccgacacagaacggttgatcggcgatgcggcgaagaa

SEQ ID NO: 107920 - DNA, 248 bp, Glycine max
tggatttgttctttatttctgagaaaattagtgatttttcttttattccggactttatttattttccatttattccacaaggggccacgattgctttttatggaatcgcgggtctctttagtagtttttattttggtgtcgattattattttcgggatataggtcggtggtttgtgatgatctgtcaatagaaataaggggcaaataaggttacgttattgtatcgtatcggggatttgctctggaaa

SEQ ID NO: 107921 - DNA, 253 bp, Glycine max
cacaagcatcctccgacctccacgaaggcaatagctgccgctatagatgagctcttcaacgctgtcaagaatggtacattccagcgactcaagtgcagctacgacggatgggctctaccagctaacctccattcaccgcggtcgcgactccgttatagactacaatgattcgtacctcatcgacatcatcaccatgcacggagtcgacatttccgtttccgaaggcgaatctcccaacagcttgttaattatc

SEQ ID NO: 107922 - DNA, 291 bp, Glycine max
  unsure (1)..(291): unsure at all n locations
aacagatctctgatctgaaaatgagtgcatcgaggttcattaagtgcgtcaccgtcggcgacggcgctgtcggcaaaacctgcttgttgatttcctacaccagcaacacttttcccacggactacgtgcccacggtttttgacaatttcagtgctaatgttgtggtggatggaagcaccgtaaacctggggttgtgggatactgctggtcaggaggattataataggcttagacncttgagttatcgaggagctgatgtatttatacttgccttttctctcataagcaagg

SEQ ID NO: 107923 - DNA, 284 bp, Glycine max; identical to SEQ ID NO: 107918

SEQ ID NO: 107924 - DNA, 284 bp, Glycine max
ctcgagccggaattgttgtaactttttgattcctaaattctctaaaattcgaaattctaatttcgttaggggaaagagattgtttgtgtgtgagtgagtatggctggaaaaggcgagggtcctgctatcggaatcgatttgggaacgacgtactcttgcgtcggcgtgtggcaacacgatcgtgttgaaatcatagccaacgatcagggtaacagaactaccccatcctacgtggctttcaccgacacagaacggttgatcggcgatgcggcgaagaaccaggt

SEQ ID NO: 107925 - DNA, 281 bp, Glycine max
tggatttgttctttatttctgagaaaattagtgatttttcttttattccggactttatttattttccatttattccacaaggggccacgattgctttttatggaatcgcgggtctctttagtagtttttattttgggtcgattattttttgggatataggtggtggttttgatatcttcaataaaaaagggaaaaaggtacgttttgttcgttggggatttctctggaaaaaatcgtcgtattattctcgaaatacctatgaacgagcttcactccatcag

SEQ ID NO: 107926 - DNA, 281 bp, Glycine max
agaagctaagaggcgcagcgtagcaaaagctcgtggaattgctagcaatggcgaggatcaaggtttacgagctgaggcagaagacgaaggctgatctgctgaatcaactgaaggacctgaaggcggagcttgccttgcttcgtgttgctaaggtcaccggtggtgcccctaacaagctttccaagataaaggtggtgaggttgaacattgcccaggttttgacggtgatttctcagaagcagaaggctgcgttgagggatgcctacaagaataagaagtac

SEQ ID NO: 107927 - DNA, 280 bp, Glycine max
gtgaatgccaccctcatgaacattgctgataaccccaccaatgtgcagcttcctggtatgtataacaaggaagagaatccccgtgtgcccatcatcgtcaccggtaacgatttctccacactctatgcgcctctcatccgtgatgggcgtatggagaagttctactgggcaccaacaagggatgaccgcattggtgtctgcactggaatttttcgcaccgattcaattcctgaacaggacgttgtcaagattgttgacaccttccctggccaatccattg

SEQ ID NO: 107928 - DNA, 281 bp, Glycine max
atctgatccatctgaagctgatcgactaagacatcttgcctcacctgctggaaaggatgaatattcagagtgggtgattgcctctcagagaagtctccttgaggtcatggctgaatttccatcagccaaacctccaattggtgtcttttttgcagcagttgctcctcgcctgcagcctagattttattcgatctcctcatctccaagaatggtgccaaacagaattcatgttacctgtgcattagtacatgagaaaatgcccaccggaaggattcacaaag

SEQ ID NO: 107929 - DNA, 283 bp, Glycine max
tctaaaccctaaacaactctttctcttcttccttcgctcgttgttctccctcgcgtagatcgacaatggcggagacagagacgtttgctttccaggctgagatcaaccagctcctcagtctcatcatcaacaccttctactccaacaaggagattttccttcgtgaactcatcagcaacgcctccgatgctttggacaagattcgatttgagagtttgacagataagagcaagctcgatgctcagccagagttgttcattcatattattccagacaagactaa

SEQ ID NO: 107930 - DNA, 280 bp, Glycine max
atattaaatattaaatagaaaaaatggcccgatcatttatcaaaggccaatcttcggtagaagagaaggttcctttggaacacttatttctatttcagtataccggttctctttctttcatttcaaaaaatttatagaatttcgattttgaaatgaaagaaaagtgtggggataaatataaatgacaaaaagatattggaacataatcttggaagagatgatggaagcaggagttcattttggccacggtactagaaaattggatcctaaaatgtcacct

SEQ ID NO: 107931 - DNA, 279 bp, Glycine max
caaagcacaaagcaaagctcatccttgagttaaaaaaatggcagcagcttcttccatggctctctcatccccatccttggctggcaaggccgtgaagctgggcccatcagccccagaagtgggaagggtgagcatgaggaagaccgtcaccaagcaggtctcctcaggaagcccatggtacggcccagaccgagtcaagtacttgggcccattctctggcgagcccccgtcctacctaaccggtgagttcccaggcgactacggctgggacactgctgg

SEQ ID NO: 107932 - DNA, 280 bp, Glycine max
gtattcccaaagacttgtcgagtgaggaagctaatcaatatttgaaggacacatgcttgaagtatgagatcaaatgtcctccccctgagacaactgctcgtttgttggataaacttgttggtcactttttggaagagacgtgtgtaaatcctacattcatcataaaccaccctgagatcatgagtcctttagcaaagtggcacagatcaaaacgaggcctgactgaacgttttgaattgtttgttaataagcatgaactttgcaatgcatatactgaatt

SEQ ID NO: 107933 - DNA, 280 bp, Glycine max
cggcgattgtcccttcaaatgttgaagacaagttgccttttacactggtcccacagtcggaggacttctgaatgctacatgtgggaatgttactgagctcataatagcaatatttgcccttagcagtaacaaaattgctgtggtcaagtattctctgttgggttctattctttcaaaccttcttctggttcttgggacctctctattatgtggtggcattgcaaaccttaaagtggaacaaaaatatgacagaagacaagcagatgtgaactcacttatg

SEQ ID NO: 107934 - DNA, 280 bp, Glycine max
gttcagccttctttgggaccagcttgaagaaggttattgcctcaagggtccccaacagcaaggtttccggtggaagcttcaagattgttgctgtagaagagaagaaagagattgaagagacccagcagaccgacaaggacagatggaagggtcttacctatgatatcacagacgaccaacaagacatcacaagaggaaagggtttggttgactcccttttccaagctccacaggatgctggaactcactatgcagtcatgagctcctacgagtacctcag

SEQ ID NO: 107935 - DNA, 273 bp, Glycine max
aatggacctagtcatcaagatccacagaattctggggcctatatcttccgtccaaatggcacacatcccatacaccatgacaaaaagggtccattgactgtgttgcatggacctgtgctagatgaagtgcaccgacaaatcaatccatggatatatcagattaccagactatactaaggaaacgagcatgttgaagtggagttcataggtggccctataccaattgaagatggaattggcaaagaagttgccctcggatttcaactactatgg

SEQ ID NO: 107936 - DNA, 279 bp, Glycine max
ctctctaccaatccacaactgatggcaggaagattgtcgacgtgatcctcgagcaaaacattgttcccggtattaaagtcgacaagggtttggtaccccttgctggttccaacgacgagtcatggtgccaaggtcttgatggtcttgcctctcgctcggctgcatactaccagcaaggtgcccgtttcgccaaatggcgtactgttgtgagcatccccaacggtccctctgctctggcagttaaggaagctgcctggggtctggctcgctatgcagcaa

SEQ ID NO: 107937 - DNA, 280 bp, Glycine max
gtcttgcaattgaagttgaagtcttgcccttctctcttcaactccaaacacaagacatcatcatccatggctgcctccgtctccactgtcggagctgtcaacagagctcttttgaacctgaatgggtctggacctggggtttcagctcccagttcatccttctttgggagcagcttgaagaaggttattggctcaagggtccccaacacaaagatttcctctggaagcttcaagattgttgctgtagaagagaagaaagagattgaagagacccagcaga

SEQ ID NO: 107938 - DNA, 286 bp, Glycine max
cttccattaacgggtggtgcctctcttccatctccccagccaaaacctctctcaagaaggccacattaggcccttctgtcttcgcaaccgttagcactccttcttctccttcttcttcttcttcttcttctttcccttctctcattcaagacaggcctgtctttgctgcccctgcccccatcatcaccccaactgtgagagaggatatggcaaaggaatacgagcaagctattgaagaactccagaaattgttgagggagaagagtgaactcaaagccacagctgc

SEQ ID NO: 107939 - DNA, 277 bp, Glycine max
ctctctaccaatccacaactgatggcaggaagattgtcgacgtgctcctcgagcaaaacattgttcccggtattaaagtcgacaagggtttggtaccccttgctggttccaacgacgagtcatggtgccaaggtcttgatggtcttgcctctcgctcggctgcatactaccagcaaggtgcccgtttcgccaaatggcgtactgttgtgagcatccccaacggtccctctgctctggcagttaaggaagctgcctggggtctggttcctatgcagca

SEQ ID NO: 107940 - DNA, 277 bp, Glycine max
ctggatttaaggagactactgaaccttcagtttgtctaagtggagatgttgagactaatgagtgtcttgaaagaaatggaggatgttggctagacagacatgctaacataactgcttgcaaggatactttcaggggaagagtttgcgagtgccctgttgtgaacggtgttcagtataagggtgatggttatacaacatgtgaaggttttggacctgcaaggtgttctataaacaatggtggttgttcgtctgaaactaaaaagggactaactttctc

SEQ ID NO: 107941 - DNA, 277 bp, Glycine max
gcctcagttgcatcgaagagagagagagcgagagagagagagagaatggcagcacttggtggcaatcgtgatgtggcaggaagccagaacagccttgagatcgatggtttagctcgctttgctgttgaagaacacaacaaaaaacagaatgcccttttggagtttgaaaaggtagtaagtgcaaaacagcaagtggtttctggtaccttgtacaccatcactttggaggcaaaagatggtgggcaaaagaaggtttatgaagccaaagtttgggaga

SEQ ID NO: 107942 - DNA, 278 bp, Glycine max
tacaattttaaaatattggatttttcgttatttaaatcgcgtatctccatcacttgtagtgatttatcattcaatgaatgattgactgacaaaatgattcacttatcaaattttaatttaaagttttttagctaaaaagaaaataactttgctttttcccttctttttaacccccttaaatgaaaaaaggggttccccgacttggatagggaactatgcgagtgacctacctaatcttattgtagaaattttcaggatcaatgattagaccatgcaaa

SEQ ID NO: 107943 - DNA, 276 bp, Glycine max
cccaaccaaaactcagggtcttggagctggtaaagcagcagatttgacatattgggagagcgcagtcgcatgattgctgatgtttcgaagtctgacaagatcgttgtagagaaatccacagtcccggttaaaacagctgaggcaatagagaagattctgacccacaatagcaagggaatcagattccagattttatcaaaccctgaattccttgctgagggaactgcaatcaaagatctctttaacccagaccgtgttcttattggaggcagggaa

SEQ ID NO: 107944 - DNA, 277 bp, Glycine max
ggcatgatgaacaactgctggttcagagtgaaaaccaatgtgtgcaggccccacaagggtgagataggtatagtgtttgaacaccccacccaaccaggcaaccaatccggcggatggatggcaaaagaaaaacacctagagaaatcatctgagtccaacccaaccctcaagaagagtgtctcctccccattcatgaacaccacctcaaaaacctataccatgtctgaagtcagaaggcacaacaacgccgattcggcttggatcatagtccacggtc

SEQ ID NO: 107945 - DNA, 282 bp, Glycine max
gcagaaagcaagctcatcctagagttttaaaaatggcagcagcctcctccatggctctctcttccccatccttggctggcaaggccgtgaagctgggcccatcagcccccgaagtcgggagggtcagcatgaggaagaccgtcaccaagcaggcctcctccggaagcccatggtacggcccagaccgcgtcaagtacttgggcccattctctggcgagcccccgtcctacctcactggcgagttcccaggtgactacggctgggacactgctgggctttcgg

SEQ ID NO: 107946 - DNA, 274 bp, Glycine max
ctctgctcgggcagctcctgtttggcttgaaactggtgacgcagttgcaaatatgtattctgagctgcgggaggaggctcgtgatcatgcacgtttgcgtaatgcatattttgagcaggcacggcaagcctaccttgttggcaacaaggcccttgcaaaggagctaagtgttaaggggcaactgcacaacgtgcatatgaaagcagcacatggaaaagctcaagaatctatttatcgccagaggaatcctgttgctccagagaatggaagaggg

SEQ ID NO: 107947 - DNA, 275 bp, Glycine max
aaactatgaaaaatgggaaagttgttgcagtgaaaaaattaatttcaggaaattccagcaagatagatgacgactttgaaagtgaagtaatgcttataagtaatgttcatcatagaaatctggttcagcttcttggttgttgcagtaaaggccaagatagaatccttgtctatgaatacatggcaaacaacagcctcgacaaatttttatttggtaactaattaacatgtcaatttccagtagaagcattaagttttactttgtttcccttctat

SEQ ID NO: 107948 - DNA, 272 bp, Glycine max
gcgctttctgcctcggatggtgcttcgggtcttgcttgtcgaagctgatgattctactcgacagatcattgctgcacttctccgtaaatgcggttacaaagttgttgcattttgtgatggcttaaaggcatgggagacattgaagaacaaagcatttgacttagatctcatattaacagaagtggatttgccatcaatatctggattttcacttcttactttaatcatggagcatgacatttgcaaaaacattcctgtcataatgatgtctt

SEQ ID NO: 107949 - DNA, 273 bp, Glycine max
ctgatgggctagagatatgggatgctatcaagtcttgggtggaagaatatgtctcattctactacaagtcagatgaggaacttcaaaaagaccccgagctccaagcttggtggaaagaacttgtagaggtgggtcatggggatttgaaggataagccatggtggcaaaagatgcaaactcgtgaagagttggttgaagcttccgctaccctcatatggattgcttcagctcttcatgctgctgttaactttggacagtatccatatggaggtt

SEQ ID NO: 107950 - DNA, 274 bp, Glycine max
ccttcttcttctgctaaatcaacggccacgatcccatctaccaatctaacggcctccgttcgtcctctccctccccaatattagggtttctctttctttctcttcttctgccaacactttctcgcattttccctcttctttctctctcacgttttccgcttcagttttctcgggaaaatcatggtgaaaggtccaggcctctactctgacattggcaagagagctcgcgatcttctgttcaaggattatcagaatgaccacaagttcaccatca

SEQ ID NO: 107951 - DNA, 276 bp, Glycine max
ctggatttaaggagactactgaaccttcagtttgtttaagtggagatgttgagactaatgagtgtcttgaaagaaatggaggatgttggcaagacaaacatgctaacataactgcttgcaaggatactttcaggggaagagtttgcgagtgccctgttgtgaacggtgttcagtataagggtgatggttatacaacatgtgaaggttttggacctgcaaggtgttctataaacaatggtggttgttggtctgaaactaaaaagggactaactttct

SEQ ID NO: 107952 - DNA, 262 bp, Glycine max
caagtagttgagaactaagaagaaggaaatggcttcctcaatgatctcctccccagctgttaccaccgtcaaccgtgccggtgccggcatggttgctccattcaccggcctcaaatccatggctggcttccccacgaggaagaccaacaatgacattacctccattgctagcaacggtggaagagtacaatgcatacaggtgtggccaccaattggcaagaagaagttcgagactctatcctacttgccagacctcgatgat

SEQ ID NO: 107953 - DNA, 265 bp, Glycine max
caaacccttgaacactatcctcttctcagtctcatacaccaaaccaaaaacctcactttccaatggcaatttcttgggcagcagcaacaacctcaaagctcgcataccctcctcatgtccacttctctccttcaccctcctccaattatctcttccttaaaacccacaaaccctccgccacacacctctcctcttccttcatccaccccaccacaatcctccacctcgccgctgccaacaccaccacccgccgccgctccttcac

SEQ ID NO: 107954 - DNA, 264 bp, Glycine max
ctctgctcgggcagctcctgtttggcttgaaactggtgacgcagttgcaaatatgtattctgagctgcgggaggaggctcgtgatcatgcacgtttgcgtaatgcatattttgagcaggcacggcaagcctaccttgttggcaacaaggcccttgcaaaggagctaagtgttaaggggcaactgcacaacgtgcatatgaaagcagcacatggaaaagctcaagaatctatttatcgccagaggaatcctgttgctccagagaa

SEQ ID NO: 107955 - DNA, 263 bp, Glycine max
caaactgcaaggaagagagcttgatttgctcatcgttatcttgcccgataataatggatctctttatggtgatctcaaacggatatgtgagactgacctaggacttgtttcacaatgttgcttaactaagcatgtcttcaaaatgagcaagcagtaccttgcaaatgttgctttgaaaattaatgtcaaagttggagggagaaacactgtactggttgatgcgctctcacgacgcattcccttggtcagtgacagacctacaa

SEQ ID NO: 107956 - DNA, 259 bp, Glycine max
gcttctagcattgtgatgttgattgcatatgttgtctacattgtctttcaactgtggacacacagggagttatttgaagaagaagatgacggtaaagatggcgaggatggttcagaagaacaagctgtgattggattatggagtggcattgcttggttggttggaatgactgtattcattgctgtgttgtctgaatatgtggtggatacaattgaggatgcatcagattcatggggtttgtctgtgagcttcctaagca

SEQ ID NO: 107957 - DNA, 260 bp, Glycine max
ccgtgatgggcgtatggagaagttctactgggcaccaacaaggatgagaggtgcatagagtgttgagaaatcgttaccggtgacaatgatgggaacacgggggttctctcatccgtgatgggcgtatggagaagttctactgggcaccaacaagggaagaccgcattggtgtttgcaccggaattttccgcactgatggtattcctgaacaggacattgtcaagcttgttgacaccttccctggccaatccattgatttc

SEQ ID NO: 107958 - DNA, 262 bp, Glycine max
gcgcattatagcacaccacacaaaaaagcaaaacagagagaacaactgttactcacacacgccatgggtaaatgaatggtttttgagcaacagcagttaaaagagaaaagggattcagcgaagatgacatcggttggtgtggcaccaacttcgggtttgagagaagccagtgggcatggagcagcagctgcggatagattgccagaggagatgaacgatatgaaaattagggatgatagagaaatggaagccacagttgttg

SEQ ID NO: 107959 - DNA, 284 bp, Glycine max
gtacgtaagctccggatcgagtgataacacgtattctatgaagatattttttgagataaggaagcagaagtatctggaggctttagataagcatgaccggtccaaggctgtagaaatattagtgaaggatttgaaagtgattgctacatttaacgtagaattattcaaggaaatcacgcagcttctgacattggaaaattttagggaaaatgaacaattgtcaaagtatggtgatacaaagtctgcacgagcaatcatgttggttgagctcaaaaagctcattg

SEQ ID NO: 107960 - DNA, 290 bp, Glycine max
gcacgcacgcgtcacgaaatcgcctcgagctgctgtacttcctgacttgcatacttgatggcttcaaagttgcagaagttgcaggccacagcatctcaagcgtctcaatttgtatccagtcgtggaactaactactacaagcaattgctggaacagaacaagcaacacattcaggagcctcctacagtagagaaatgcaacctgttggcaaagcaattgttttacactcgccttgctagtattccgagtcgtaatgagtccttttggaaggaacttgattatgccaagaa

SEQ ID NO: 107961 - DNA, 259 bp, Glycine max
ggcgacaggctcgtgggccaaatcgccaagcgtcaggccgtcgtcaaccccgagaacactttcttctccgtcaagaggttcatcggccgcaagatgtctgaggtcgacgaagagtccaagcaggtctcttacagagtcatccgagacgacaacggcaacgtcaaactcgactgccccgccattggcaaacagttcgctgctgaggaaatttctgcccaggttcttaggaagcttgtggatgatgcttccaagtttttga

SEQ ID NO: 107962 - DNA, 262 bp, Glycine max
ctcgagccgaccgtgttcatggtcttgctggggcatttgctctaggattaaagaaacttgcgaactgtggaagttcaggaccttcccttctttgacactgtgaaggttaagacttctaatgcacatgcaattgctgatgctgctctcaagagtggaataaatttgcgagttgtagatggaaacactatcactgttgcttttgatgaaacaaccacattagaggatgttgataatcttttcaaagtttttgctggtggaaagc

SEQ ID NO: 107963 - DNA, 261 bp, Glycine max
attctccatacctcaacgaagaggttaaagagacggcaacactttgctgtccgccttgaccgagcagagcttcgtcttggccctcgattttgccctaaagtactctcagtcacaacagacaccgtcgtcgtcgtcgtcgtcatcaatggcaccgaagcagaccaaggctgagaagaagatcgcttacgatgcgaactgtgcgacctaatggaggagtacggccagatcctcgttgtgaactccgataacgtgggatcgaac

SEQ ID NO: 107964 - DNA, 263 bp, Glycine max
aagattttgagcacaatggcatccacacaatgcttcttgcaccaccatgccctcaccactccaaccagagcttcatcacagcgcttagttgtgagcaccaaaccaaaccacattgtttgcaaggcacaaaagcaggttgtccaagagggtgaggacactactaacattgtctctcgcaggttggccctcactgttctcattggtgctgctgctgttggctctaaggttgcacctgctgatgctgcctatggagaagctgccaa

SEQ ID NO: 107965 - DNA, 260 bp, Glycine max; identical to SEQ ID NO: 107759

SEQ ID NO: 107966 - DNA, 260 bp, Glycine max
tccaattgaaattttaaaaatgactgggataaacttaagaattcaattattgaaattgaataagtaaacaatttaattggattggtcgaatggtatcaaaaaaatggagtactaactcccatttcttatttattattgaattaaccgatcaacttgctttgttatcgaacatttctttttgatttcaaaaattttccggaaaaaatttgaatctatttttatatgcgaatcaatcctactacttctggtcctgaggtttc

SEQ ID NO: 107967 - DNA, 240 bp, Glycine max
cccgaagaaaaggtcaagagcttctaggcgtgcacccaccactgttctcactacggacaccacgaatttccgagccatggttcaggaattcactggcatcccagcacctcctttcacttcctcctcctcgtctttcccaagaacaaggttagatctctttgccacttctaatgcttcttcttcatccattattagagagcaaacaccttatcttcttagcccctttgcacacaaagtcca

SEQ ID NO: 107968 - DNA, 257 bp, Glycine max
ctcaaagaggaggccaagaagggtctgagtttggggaacaaacccaaaatgcacgagtgttccatttgcggcatggaattctctctgggtcaggcactggggggtcacatgagaaaacacaggggtgccaccagtgagaataataacgaagcgttttcttcttctataaagcaagcaatttcaaaagttccagttttgaaacgatcgaatagcaagagggtcatgtgcttggagatggacctgaatttaacgccttt

SEQ ID NO: 107969 - DNA, 259 bp, Glycine max
catcacaagaggaaagggtttggttgactcccttttccaagctccacaggatgctggaactcactatgctgtcatgagctcctacgagtaccttagcactggacttcgccagtacttggacaacaacatggatggattttacattgctccagcttttatggacaaacttgttgttcacattaccaagaacttcatgaccctgcccaacatcaaggttcctctcattcttggtatctggggaggcaagggacaaggaaaa

SEQ ID NO: 107970 - DNA, 259 bp, Glycine max
attctccaagaataagagaatccaaaagtctctcaaaaaataaccatgatgatgcatgtcctttgcttctcagtgttcctagcagcagcaatgcaaggaacactggcggttgaatacagtgtcaccaacaacgccctctcaacccctggtggtgttcgtttccgtgatgcaataggggacgaatacgccaaacaaacacttgactcagccacccaattcatatggggagctttccagcaaaacgctcctgctgatagaa

SEQ ID NO: 107971 - DNA, 258 bp, Glycine max
gtttcttacaaggctctactctactgcttcaccttctgctctagaaaattcagtggtgatacatggcttcggctactctctctgtagccaaaccagcccttcaggcaaatgggaaaggcttctctgaattctctggcctccgcagctcatcaggcttccttcccttttctagaaaatcttcagaggatttccattctgtcattgccttccagacctatgcagttggaagcagtggaggatacaagaagggtgtgacag

SEQ ID NO: 107972 - DNA, 257 bp, Glycine max
agtcactgctctgtttcaccgagtttgggcgtttagatcagaaccaaatcgtgttctcttccattggcaaacatggcaactcaaatgagcaagaagagaaagtttgttgcggacggagtgttctttgccgaactgaacgaggttctgacacgtgaattggcggaggacggttactccggcgtcgaagttagggttacgccgatgcgcaccgagatcatcatcagagccaccagaacccaagccgttctaggtgagaa

SEQ ID NO: 107973 - DNA, 256 bp, Glycine max
ctcgagccgatttcgttcctctattcgctacgtcgtcgttagggtcgtcttcggatcggtgcaacttgactgcgccggcgtgaattccgacgctgcgagtggcaccgaattgcgatagcggtgacgaatatgaaggttttcgttaagactctcaaaggcactcacttcgaaatcgaagtgacgccgcaagacacggtttctgaagtgaagaaaaatatagaaactgttcagggtgcagatgtctatcctgctgcac

SEQ ID NO: 107974 - DNA, 250 bp, Glycine max
ccaaggatcctccttcccacgagattctttggtgggaaaaatccaagaggtttgaaatttgaaggcagggaagatggattatttcaatgcaccaggaagaaaccatctcattgttccagggccggttaacattccggaccagatcatccgggccatgaacaggaacaatgaggactaccgttctccagcaattccagctatgacaaaaactttgcttgaggatgtcaagaagattttcaagaccactact

SEQ ID NO: 107975 - DNA, 256 bp, Glycine max
ctcgagccgctcgagccgcaggaagattgtggattggtagagagtttcctgccatcagttctggattggcagagagtttcctcaaagagaatggcaccagagatgtactgaccaagtcctggaactgatggcaggaagattgttgacgtgctcctcgagcaaaacattgttcccggtattaaagtcgacaagggtttggtaccccttgctggttccaacgatgagtcatggtgccaaggtcttgatggtcttgcct

SEQ ID NO: 107976 - DNA, 257 bp, Glycine max
tgtaaatgaaggggactacactcatcagatctctaacattataagcaacgcttcctgcaccacaaactgtcttgctccctttgtgaagatcctggatgaagagtttggaattgtgaagggaaccatgacaaccacacattcctacacaggagaccagaggcttttggatgcttcacaccgtgacttgagaagagccagggctgcagcactgaacattgtcccaaccagcactggagctgccaaggctgtgtctctag

SEQ ID NO: 107977 - DNA, 259 bp, Glycine max
ctcgagccgcagagaaaccctaggtaagaagaaaagatgccggctggtcatggtttgagatcccgcaccagagattccttctctcgtcctttcaggaagaagggaaccatcgccctcaccacatacctgagaacctaccacgtcggcgactatgttgacgtcaaggttaacggtgccgttcacaagggaatgccccacaaattctaccatggccgcaccggacgcgtctggaatgtcaccaaacgtgctgttggcgtcg

SEQ ID NO: 107978 - DNA, 257 bp, Glycine max
cttatggtggatacctaggcacccagagacgaggaagggcgtagtaagcgacgaaatgcttcggggagttgaaaataagcgtagatccggggattcccgatataggtcaacctttcgaactgctgctgaatccacgggcaggcaagagacaacctggtgaactgaaacatcttagtagccagaggaaaagaaagcaaaagcgattcccgtagtagcggcgagcgaaatgggagcagcctaaaccgtgaaaacggggt

SEQ ID NO: 107979 - DNA, 259 bp, Glycine max
ggggggtggtaagcttgatcttggaggctggagggaagagattaatgtgcagaaacacaagtttccattgggttacaaaacattccaggacgccatttccccgcagcatgctattgaggttcttgatgagttgacaaatggggatgctattgttagtactggggttgggcagcatcaaatgtgggctgcacagttttacaagtacaagagaccgaggcagtggttgacctcggggggtcttggagccatgggttttgga

SEQ ID NO: 107980 - DNA, 256 bp, Glycine max
gcaaaatttaaaatttactggcagccaacctatcaagtgattcagccaatcaacggtgacccattcattggaagcctggaaaccccagttacatccagccctttgatcgcatggtacttgtccaacctgcccgcatacagaaccgcagtgagcccactactaagagggatcgaggtgggcctggcccacggataccttctggtgggcccattcgtgaaggccgggcctcttaggaacaccgagatcgccgggcaag

SEQ ID NO: 107981 - DNA, 255 bp, Glycine max
actcgagccgattcggctcgagaatcagcttgtgctcgatgaggcagagcggagtttgcacacatgctttgtgtgttgttaactgtttggttgccaagaggtttctcattgccggcggtggtgcccctgagattgagctctccaggcagctgggtgcctgggctaaggtgttgcatgggatggagggttactgtgtgagggcattcgctgaggcgcttgaagttattccctatactctggctgaaaatgctggtt

SEQ ID NO: 107982 - DNA, 255 bp, Glycine max
tctcgagccgattcggctcgagaatcagcttgtgctcgatgaggatgagcggagtttgcacgatgctttgtgtgttgttagcgtgtttggttgccaagaggtttctcattgccggcggtggtgcccctgagattgagctctccaggcagctgggtgcctgggctaaggtgttgcatgggatggagggttactgtgtgagggcattcgctgaggcgcttgaagttattccctatactctggctgaaaatgctggtt

SEQ ID NO: 107983 - DNA, 257 bp, Glycine max; identical to SEQ ID NO: 107696

SEQ ID NO: 107984 - DNA, 253 bp, Glycine max
acctcgcatcttgctccttaccggttcccctcccaagccctgtgataaccctattggagatcattaacttttgaagtcgattaagaataagattgattactgtagattacacgggattgaaattgtgtataatttggctcatttggatgtggaacttgctgggtattgggctaagttgcctatgattcggaggttgatgctgtcgcatcctgaggtggagtggatttggtggatggatagtgatgcttttttt

SEQ ID NO: 107985 - DNA, 253 bp, Glycine max
ctcatcttcagcctccaaatttccaggaagggagtgatgttcttcttaagagtgctgagtgcagagcaaagggtggggcacctggattcaaagttgcaattttgggggctgctgggggaattggtcaacccctttctttgctgatgaagatgaacccattggtttcagttcttcatctttatgatgttgtcaacacccctggtgtcactgctgatgttagccacatggacactggtgctgtggttcgtggctt

SEQ ID NO: 107986 - DNA, 253 bp, Glycine max
gggtttctctttctctttctctgtctgcttcttcactttctctcgtttcaatcgaaaaaaatcatgggcagaaaattcttcgtcggtggcaactggaaatgcaatgggaccactgaggaggtgaagaagattgttactactttaaatgaagctaaagtccctggagaagatgttgtagaagttgttgtgagccctccttttgtgttccttccttttgtaaaaagtttgctgcgccctgatttccatgtctcgg

SEQ ID NO: 107987 - DNA, 252 bp, Glycine max
acaaaggttgctgtaggagataagattgcagtagtgctaagtgctaacacctgcagtgaacaatggcctctgcatcagcatctctgctcaagtcttcacttgttcttgacaagtctgagtgggtgaggggacaaacccttcgccaaccttctgcatcagttgtgagatgcaaccccaccaccccatcaggcctcaccatcagagctggttcctatgctgatgagctcgttaagaccgcgaaaacagtggctt

SEQ ID NO: 107988 - DNA, 250 bp, Glycine max
tgcgttgttggatgcccagtggaaggaccaatccctccatcaaaagtggcatatgtagctaaagaactatatgatatgggttgctttgaaatctcacttggggacacaattggagttggtactcccggaactgtagttccaatgcttttggctgtaatggctgttgtgccagcagagaagcttgctgtccacttccatgacacttatgggcaatcccttccaaatattcttgtgtcccttcaaatgggga

SEQ ID NO: 107989 - DNA, 252 bp, Glycine max
caatccttcaaggagttgccagttcgatcagttaaggtctggtctcgtgttgctgtagggatgactacaaatggaaactctgttggttcaggctacaagatcttatgggtgggttgtgatggagaatatgaagtatacgactcagtcagaaattcttggagtcgtccgggaaacatgcctgcgggtatgaagctgccattgtcaatcaactttaggtctcaagctgtctctattggcagcacactttacttc

SEQ ID NO: 107990 - DNA, 250 bp, Glycine max
tagaactactcacccgttgtctctttttcaaccatggtttttcaggttattgttgtttttgtttttttattattcaaaatattaagatacaccgtactgtgttgtgctcgtgcagataagtattaataggccagagagaaggaatgcgttccgcccccacacggtgaaggagcttatgcgtgctttcactgatgccagggaagatagctctattggggtcgtcattctcactggcaagggaaccgaggca

SEQ ID NO: 107991 - DNA, 254 bp, Glycine max
gaatatgatgcatgtacaattccaaatgattgtggttcattggttgttgccaaggttggaaatcacaaacaaattgttggtttccatgttgctggaagcaaaggaagactgggatatgcttcattgataccatatgttgagccagttgtgcaagctcaaagtgctgaagtttactttgacttcttccctgtggaggttgatagtcaagagggagttgctcacattggtgaattgaaatctggtgtctatgttcc

SEQ ID NO: 107992 - DNA, 251 bp, Glycine max
ctcgagccgcttcaccagatctcactctcactctcactctgttttgctcagtgcagagaagacaagaaaatatggcggtgatggcggttcaccaattcgcgcaatgcatcacttgccacgcttggagccccgatcaatccatggttgctttatgtccaaacaataatgaagtgcacatctataggttggttgaagacaaatgggaaaagttgtatgttcttcaaaagcatgaccaggtaatttctgggata

SEQ ID NO: 107993 - DNA, 247 bp, Glycine max
ggctgtcaaatttgtctgcactattgtttttgctccagcaaagtctaaaatccggtggtgcagctgatgccactcctgtaaaaaaaccaccaaatccgacatccctctttggaagaatgactatgggttttcgttcatctccttcttctgccaaccttcctaccccaccattggacgttgtacgcaaagtagaagctaaatatcctgctttgcttttcaagcaacagctcacagcctatgtggagaa

SEQ ID NO: 107994 - DNA, 248 bp, Glycine max
atcatccatggctgcctccgtctccactgtcggagctgtcaacagagctcttttgaacctgaatgggtctggacctggggtttcagctcccagttcatccttctttgggagcagcttgaagaaggttattggctcaagggtccccaacacaaagatttcctctggaagcttcaagattgttgctgtagaagagaagaaagagattgaagagacccagcagaccgacaaggacagatggaagggtcttg

SEQ ID NO: 107995 - DNA, 247 bp, Glycine max
ctagtttcttacaagcctctactatactgcttcaccttctgctctagaaaattcagtgctgaaacatggcttcggctactctctctgtagccaaaccagcccttcaggcaaatgggaaaggcttctctgaattctctggcctccgaagctcatcaggcttccttcccttttctagaaaatcttcagaggatttccattctgtcattgccttccagacctatgcagtttaaagcagtggaggatacaa

SEQ ID NO: 107996 - DNA, 254 bp, Glycine max
cggctcgagggagagtttctggtcccatcataccgtggaagctctttcttggaccccaagggaagaggtgcctctacaggttatgacaatgcagttgctttgcctgctggtggaagaggagatgaggaggaacttgccaaggaaaacaacaagagtgcctcatcatccaaggggaaaatcaccttcagtgtcaccaagaccaagcctgagaccggcgaggttatcggtgtgttccagagtcttcagccgtccga

SEQ ID NO: 107997 - DNA, 266 bp, Glycine max
tacaactacaaaggttgctgtaggagataagatattgaagtagtgctaagtgcctaacacctgcagtgaacaatggcctctgcatcagcatctcttctcaagtcttcacttgttcttgacaagtctgagtgggtgaagggacaaacacttcgccaaccttctgctgcatcagttgtgagatgcaaccccaccaccccatcaggcctcacaatcagagctggttcctatgctgatgagctcgttaagacgcgaaaacagtggcttca

SEQ ID NO: 107998 - DNA, 254 bp, Glycine max
atcgagcgctcgagccgctcgagccgctcaagcctatggagatcatacctgtataataacaaaatagcatttggagcctaacttaggtggtctcactgttgagcaggctatccaaaacaagaagttgttcatcttagatcaccatgactatctcattccatatttgaggaaaataaatgcaaataccacaaagacttatgctacaagaaccatatttttcttgaaaaatgatggaactttgacgccatgggcca

SEQ ID NO: 107999 - DNA, 240 bp, Glycine max
agcgagaaatggcgatggcaatggcgcttcgcaggctttcatcttcaattgataagcctcttcgccctctcttcaatgcgggttccctctactacaagtcgtctttgcctgatgaagctgtttacgacaaggagcgacccggagttacatggccgaagcagttgaatgcttcacttgaggtcgttgatcctgagattgctgatattattcagcttgagaatgctaggcaatggaaggggc

SEQ ID NO: 108000 - DNA, 265 bp, Glycine max
gctcgagcgattcggctcactttggtagctccgattacacatctgcgatggactcggtgtgcagaaggattggagtaacagagaagtgcaagaaggaaagctttcagaaccaaattctcatacaaggatgtgagaaaatgggcttgaaagtagagtctgtggctataaattcctcagcagatcactattgtggttcatgctgttatggttgcagaacaggagataagaagggaactgactccacttggttggttgattctgtagg

SEQ ID NO: 108001 - DNA, 273 bp, Glycine max
agctgcctcactctctcactctctcaggagtatataatctgagcgatgtcagatctcgaggctcccttgcgccctaagaggaagaaggtttgggtggactattttgttcagtttcgatggatccttgttatttttgtggaccttcccatctccttcaccatttatttccttacataccttggggatgtaagatccgagtggaagtcctataagacgcgtcagaaggaacatgatgagaatgtgaagaaggttatcaaacgtctcaaacagagg

SEQ ID NO: 108002 - DNA, 274 bp, Glycine max
cgttgcatcaccgcaagtccacaacatggctgccactgccgctgcaggcatagcttccttgttttcttcttctattaacagtgtcaaatgtcttcgttcctccaagaactgctccattatagacccccttataaccacagtgccctcaaaccgtggcatgtttgtgtcacacttggtggaacctttgtccattgggggtgccattaattcgcacaagttgtgggggcctagaatttctgctgctgttgcacaagaagaggctgttgttgtggct

SEQ ID NO: 108003 - DNA, 281 bp, Glycine max
tctctggccataccatatcagtaataaacctcatagtgtcgacatggtttgcgaggaagaattgttgatagaaaaagtgtgctcgctctatgaacaaatctcaagcctcgagagtctcaaaccttgcaagaatgtcgacatgctgttcaccaaactagtcctgacatgcatacccccaagcccaatcgatgtcacaaagctaaacaaaaccgttcaagacattcgatcccaccttataaaactatgtggtgaagccgagggacacttagagagccactact

SEQ ID NO: 108004 - DNA, 282 bp, Glycine max
ctcacaaacgcctaagttgaaaagtattgtagaaagactatttgatcattgtggataccacgttcctgagtttataagtgatgaagatgcaattaaacggttgggaattttgctgcggaaaattgagggaagtccacttttgttggtacttgatgatgtttggcctggatcagaagccctcattgagaaatttcaattccagatgtctgattataaaattgtggtgacttcaagggttgcatttcctaaatttggaaccccatatgttttaaaaccacttgc

SEQ ID NO: 108005 - DNA, 222 bp, Glycine max
gtgccttgagctcttctttgaaattgcagagaacaaggaggattacaacaagttctatgaggctttctctaagaacttaaagcttggtatccatgaggattcccagaacaagggaaagattgctgaattgctcaggtaccactccaccaagagtggtgatgagctgacaagcctcaaggattatgtgaccaggatgaaggaaggtcagagtgacatctacta

SEQ ID NO: 108006 - DNA, 267 bp, Glycine max
atttctgaatcagtgaagaatcttagattctgtgggaaaagcttctcaatctttgacgaagataaacaacaatgtcttcacttgcggctgctagagcagacaacttttactatcccccagaatgggaaccgaatcagggttcgctgaacaagtttcatggtcaacatgccttgcgagagagggcgagaaaattagatcagggtatcctgattataaggtttgagatgccttttaatatatggtgtggaggatgcaattcaatgattg

SEQ ID NO: 108007 - DNA, 268 bp, Glycine max
ctttatcttttctctatagctccgtccaaacatgactctccgcaaccaccaagagctcttggttgctcttgcaattctatattttcttgccacctcactcccttcagtttcagctcatggcccatatgcatgggatggggaggccacatataaattcactacttaccaccctggccaaaactacaaaggtttatccaatgtcaaaaactacttccaccatctcggctacatccccaatgcaccacacttcgacgacaacttcgatgac

SEQ ID NO: 108008 - DNA, 267 bp, Glycine max
catttgtgcctagtacaatgatggctcagataaataccctttttgtgaagcaaggtactactcttgacagacacctcggaagcttcaaaattcccccagcaagtttggctgcatttgttactgtgtccttgcttgtttgcattgtgctctatgatcgcttctttgtgaagatcatgcaaaggtttaccaagaaccccagaggcattacccttcttcagaggatgggaattggccttgtaatccacacactgatcatgatcattgcat

SEQ ID NO: 108009 - DNA, 273 bp, Glycine max
ggcagatagaaaaaaagagcgacttttgagttcaaaagatgactaacttcccattgatcaacttggagaagctcagtggtgaggaaagaaacgataccatggaaaaaattaaagatgcttgtgaaaactggggattctttgagctggtgaatcatggcattcctcatgacatattggacactgtggagaggttgaccaaagagcactacaggaaatgcatggaagagaggttcaaggaattagtggcaagcaaaggtctagatgctgtccaaa

SEQ ID NO: 108010 - DNA, 266 bp, Glycine max
tctcgagccgaatcggctcgagaagcattgaattcaaaaacttacagttcattccttgtgactttgctttcttcctcaaaaccaaacatgtcgaacacatgcggcaactgcgactgcgctgacaagactagctgcaccaagggaaacagctatggtgttattgtagagactgagaagagttacatcgagactgttgtcatggatgttccagcagctgagcatgatgggaagtgcaagtgtggcactaactgcacttgcacggactg

SEQ ID NO: 108011 - DNA, 263 bp, Glycine max
ctcgagccgcaagtgtggaattgcaattgagccatcttatccccttaagaatggtccaaatccacctaatcctggaccatcacccccttcacctgtgaagccaccaaatgtctgtgacaactactacagctgtgctgatagtgctacttgttgctgtattttcgagttcggaaatgcttgctttgagtggggttgctgtcctcttgagggtgctacctgctgtgatgaccactacagttgctgccctaacgactatcccatct

SEQ ID NO: 108012 - DNA, 263 bp, Glycine max
gggcatttgctcttggaataaagaaacttggaactgtggaaattcaggaccttcccttctttgacactgtgaaggttaagacttccaatgcacacgcaattgctgatgctgctctcaaaagtggaataaatttgcgagttgttgatggaaacactatcactgttgcttttgatgaaacaaccacattagaggatgttgataatcttttcaaagtttttgctggtggaaagcccgtctccttcacagctgcatctcttgcacca

SEQ ID NO: 108013 - DNA, 266 bp, Glycine max
agatcgtattgattcttatcaaagaaaaacgggattaactgaggctgttcaaacaggtactggtcaactaaatggtattcctgtagctattggaattatggattttcagtttatggggggcagtatgggatccgcagtaggtgagaaaatcacccgtttggtagaatatgctactaatcaacttttacctcttattctggtatgtgcgtccggaggagcgcgtatgcaagaaggaagtttgagcttgatccaaatggctaaaatct

SEQ ID NO: 108014 - DNA, 268 bp, Glycine max
atttggtggctcatctgtttctggttgaagtgtttgtgcagcatggccatggtaggcggaaccatgatggctgcgtatttgcgtgtatccatgcccacttccccacagtcccccaccactacgaggaggagatgcagaaatctgaaaacttcttgctccgttaacagacccaaaattccaatgccccctctcaaccctaaagacccctttctctccaagctcgcttccgtcgctgcttcttcccctgaaacgctcctcaacactccca

SEQ ID NO: 108015 - DNA, 276 bp, Glycine max
agggagatatagtggggattgatatgatgaaggtgtttataaggttgttttgttgaattgtgtttttgggatggcaatattgtacgaaccagcaataaaactcatccaccagatgagctagcatgggcgattcttgtcttacttctatgtcaatggagaatcaccacccctccacgctcttgtcaatggactcaagtgcatcttctcacgaggaactggatttggagatgaatcgccaaatcatactcactcgtccgcccgatattaacctgcccc

SEQ ID NO: 108016 - DNA, 279 bp, Glycine max
agggatttactggtattcgtatccaaggtgattccaaacttgtttgcatgcagattgatggttcctggaaggtcaagaatgaaaacttgtctacattgtataatgtggcaaaagaactcaaggataaattttcctcattccagatcagtcatgttctaaggaacttcaactctgacgctgatgctcaagcaaatttggccataaatcttgcagatggccaagttcaagaagagtgtgtgtaattcactcatggcagctgatgattatgttttgggtttg

SEQ ID NO: 108017 - DNA, 261 bp, Glycine max
ctctaatattctcatactcacagctactttatcatttttctccctttcttttcttcttctgttcagcttagacactcatttttattagttttgttgctgagtgtgtgtgaaactgtgaaagagagttatggcaggaggtggtggagctccagcacctaagattgatgagccacaacctcatcccccgaaggatcagttaccgaatgtttcttactgcattacgagtcctcctccatggcctgaggccatacttcttggttt

SEQ ID NO: 108018 - DNA, 261 bp, Glycine max
ctgaagaagaaggtagcaaaacggttgaaagggaagaagtatctggtagtgcttgatgacatctgggaaacccaaatatgggatgaggttaaaggagcccttccagatgaccacacaggtagtagaatactcataacaagtcgcatcaaagaggtggcatactatgctggaactgcgcttccctactaccttcccatcctcaatgaaaatgaaagctgggaactcttcacaaagaagatttttcgaggtgaagaatgcccg

SEQ ID NO: 108019 - DNA, 260 bp, Glycine max
  unsure (1)..(260): unsure at all n locations
gctcaccagcagggcaattttccagttgatgaagaactatactatctatgctgtgtttatcaccattcgnattgtgnttggtttcttgtttattgcgttgatctggaagtttgattttgcacccttcatggttttgattattgccatactcaatgatggtaccattatgactatatccaaggatagagtgaaaccatcaccacttcctgatagctggaaactgagggagatatttgctactggcgttgtgctaggaagtt

SEQ ID NO: 108020 - DNA, 263 bp, Glycine max
caaaaccctatctctcaccaacttccgctacttcctactccaaccactttcttttttcccgcagtcatgggcaaggtcaagatcggaatcaacggatttggaagaattggccgtttggtggccagggtggctctgcagagagacgatgttgaactcgttgccgttaacgatcctttcattaccaccgattacatgacatacatgtttaaatacgacagtgttcacgggcactggaagcatcacgatgtcaccgttaaggatga

SEQ ID NO: 108021 - DNA, 264 bp, Glycine max
tcagcctctaatatttttctcactgtctctccagagaacttgatagagagatggcagctgcaacatctggtgctgtgttaaatgggttgggatcttccttcttgagtggaggaaacaggagccaaacccttctggcctctgctattggaggcaaagttggtgctgctgttactgttaatcccagaagactcattgtggtagctgctgctgcaccaaagaagtcatggctccctggtgttagaggtggtggcaatctcgtcgacc

SEQ ID NO: 108022 - DNA, 264 bp, Glycine max
ggtgattgaaggaaccggggtgtttgtagacagagaaggtgcagggaaacacattcaagcaggagctaagaaggtgctcatcactgctcctggtaaaggagatatccccacctacgtggttggtgtcaatgagtatgactacagccctgatgaacccatcatcagcaatgcctcttgcaccactaactgccttgcaccctttgtcaaggtccttgatcagaaattcggtatcatcaagggtaccatgaccaccactcactccta

SEQ ID NO: 108023 - DNA, 272 bp, Glycine max
attggtgctttccaatgctatgacaagtatatgttgagtagcttaaaagctgctgctgaagctcacggtaagcctgaatggggaagcacaggccctactgatgctggccactataacaactggccagaagacactcaatttttccgcaaagaaggtggtggatgggatggtccatatggtgagtttttcctcacttggtactctcagatgctgttggaacatggtgacaggattctctcatcagccacgtcgatctttgacaacactggagt

SEQ ID NO: 108024 - DNA, 279 bp, Glycine max
cattattctcgttttcaatatgcagatcttcgtcaaaaccctaaccggtaaaacgattacgctagaggtcgagtcctccgacacaatcgataacgtgaaagctaaaatccaagacaaggaaggcattccaccggatcagcagcgtttgatcttcgccggtaaacaactcgaagacggcagaactctcgccgattacaatatccagaaagaatcgacgctccacctcgtcctccgccttcgcggtggcatgcaaatcttcgtcaaaaccctaaccggtaa

SEQ ID NO: 108025 - DNA, 264 bp, Glycine max
gaaaaaaaaaaacccttagccaacacaaccatcatggccacctctgctattcagcaatcagcattcactggtcaaactgctctgaagcagctcaatgagttcgtccgcaagaccggtggcgccggcaaaggtcgcactaacatgcgccgcaccgtcaagagtgctcctcagagcatttggtatggccctgaccgtcccaagtacttgggtccattctcggagcagattccatcatacctgaccggagaattccctggggactag

SEQ ID NO: 108026 - DNA, 257 bp, Glycine max
ggcagcctcactacaagctgcagctaccttcatgcaacccaccaaggtgggcatggccactcgcaacctcaaatctacacaatgcatttctaaggcttttggcttggaacccgctgcagctaaactcatttgctcccttaagcccgatctcaaagattttgctcaaaaatgtgtcgacgccaccaaaattgcaggattcgcccttgccacctcagctctcgttgtttctggagcgagtgcagaaggtgttccaaaga

SEQ ID NO: 108027 - DNA, 260 bp, Glycine max
gtagttgagaactaagaaggagaagcaaatggcttcctcaatgatctcttccccagctgttaccactgtcaaccgtgccggtgccggcatggttgctccattcactggcctcaagtccatggctggcttccccaccaggaagaccaacaatgacattacctccattgctagcaacggtggaagagtgcaatgcatgcaggtgtggccaccagttcgcaagaagaagtttgagactctttcctacctgccagaccttgatg

SEQ ID NO: 108028 - DNA, 259 bp, Glycine max
ctgacaatggagtatgttcctgggattaaaataaacaaaatacaagctttagaccaactgggtgttgaccgcaaaaggttagggagatatgcggttgagtcatacttggaacaaattttatcacatggtttcttccatgctgaccctgtgagtttgtacttttagaatcaatatcagaaatctctttatatattatgttacattatatatggattagctatctggtaaattgtatagtaaagccaaaatgttaactgtc

SEQ ID NO: 108029 - DNA, 256 bp, Glycine max
ttcgagcgattcggctcactagtttcttacaagcctctactatactgcttcaccttctgctctagaaaattcagtgctgaaacatggcttcggctactctctctgtagccaaaccagcccttcaggcaaatgggaaaggcttctctgaattctctggcctccgaagctcatcaggcttccttcccttttctagaaaatcttcagaggatttccattctgtcattgccttccagacctatgcagttggaagcagtgg

SEQ ID NO: 108030 - DNA, 262 bp, Glycine max
ttctcgagccgattcggctcgagctcacaagggacgacggataagacgttgctgttccacctaagtttccaagcttccggaaggaagcagctctgcaggggaatttggaggctgttagagtcccaacttcggtgcctgtgcgtgtagcatacgaacttcttctagctggtcatcgatatttggatgtaaggactccagaagagttcaatgctggacacgctcctggcgcaattaacataccttatatgttcagagttggatc

SEQ ID NO: 108031 - DNA, 263 bp, Glycine max
gcagcagccacacttcttcgccgtttcagctgaagagccatccgcaggtaagcaatggttaagcataataatgttatccccaatgggcacttccggaaacactggcaaaactatgtgaagacttggtttaatcaaccagcccgaaagaccagaagacggttggctcggcagaagaaggctgtcaagattttccccaggcctactgctggatctctcaggcctattgttcatggccagactctgaaatacaacatgaaagtcag

SEQ ID NO: 108032 - DNA, 267 bp, Glycine max
atcaaagcaagctaagaaaaagaaaagagaagttaccaaggggaagaccaagaaatctgacagtaagatatcaaagagttctaacacgaaaaaggaagaggaaatgtggatggatgaagaagatttagatgcacctgtgcgtagcgataggtcaattcttcatgctgtgaaatggcagcggatcatattggatgaggcacactatataaaatctagacattgtaacactgctaaagcagttcttgctttagagtctacctacaaatg

SEQ ID NO: 108033 - DNA, 255 bp, Glycine max
ttctttattgtggaaacaaaataagaaagtttcacccacaagttctgctaaatttagagtgatggcaattaagtctgacaatagcatcatcaacaggctagagggtctacttaatttggatatcactccattcacggacaagataattgctgagtacatttggattggggggacaggaattgatgtgcgcagtaaatcaagaacaatatcaaagcctgttgaacatccctctgagctccctaaatggcactatga

SEQ ID NO: 108034 - DNA, 258 bp, Glycine max
cttttgataaagaagttcaaataaagacttgttcaaaactgttgaaggaagccaattggtgatgaaggcagaagtgtagacacaatacccccaaaatgagataggcacatgtgattggaattgtaaagatatggccactttaaggagatgatgatgttttctttcagctatggagttttgctgaggtcatttccacaccggagaactgaaaagtaacaccttttggtgtaaaagtctgtcatagctaattctatttat

SEQ ID NO: 108035 - DNA, 260 bp, Glycine max
  unsure (1)..(260): unsure at all n locations
atcanttttatggactcttctcagcttatgcacctcaaatttcgggacgtataatgctgccacttaacatgacatctgatgatgaaccaatttacgtaaatgctaagcagtaccatggaatcattagacgtcggcagtcccgtgccaaagctgtacttgatcacaaattgactaaacgtcgcaagccctatatgcacgaatcacgccatctccatgcaatgcggcgaccaagaggatgtgggggtcgcttcttgaanact

SEQ ID NO: 108036 - DNA, 259 bp, Glycine max
caagtagttgagaactaagaaggagaagcaaatggcttcctcaatgatctcttccccagctgttaccactgtcaaccgtgccggtgccggcatggttgctccattcactggcctcaagtccatggctggcttccccaccaggaagaccaacaatgacattacctccattgctagcaacggtggaagagtgcaatgcatgcaggtgtggccaccagttggcaagaagaagtttgagactctttcctacctgccagacctt

SEQ ID NO: 108037 - DNA, 263 bp, Glycine max
aacagcttgaggatggtcgaacccttgccgactacaacatccaaaaggaatccactctccacctcgtgcttcgcctcaggggtggcatgcaaatctttgtcaagactttgactggcaagaccatcaccctcgaggtcgaatcctcggacaccattgataatgtcaaggccaagatccaggacaaggagggtatccctccagatcagcagaggttgatatttgctggtaaacaacttgaggatggaagaacccttgctgattac

SEQ ID NO: 108038 - DNA, 269 bp, Glycine max
ccctaaacgactctatctctcttcgttttgttcttccttgcgctcctcctcgttcgttcgttctccctcgcgtagatcggcaatggctgagaccgagacgtttgctttccaggctgagatcaaccagctcctcagtctcatcatcaacaccttctactccaacaaggaaatcttccttcgtgaactcatcagcaacgcctctgatgctttggacaagattagatttgagagtttgacggacaagagcaagctcgatgctcagccagagt

SEQ ID NO: 108039 - DNA, 286 bp, Glycine max
aggactcacaaaggagcagatgacaagtcctacggctgtgtcttccaagaagaagatgagacaaaaagaattggtgtggcactctcaaaagacctaatggctgtggcaggagaggccctaaagaccaacatcacaacactaggacccttggtcctccctatgtcagaacagcttcttttctttgccacattggtggctaggaaagtgttcaagatgaagataaaaccatacatcccagatttcaagttggcctttgagcatttttgcattcatgctggagggaggg

SEQ ID NO: 108040 - DNA, 287 bp, Glycine max
gtagtattattcttccattccgttctacatataatcattcataatgggtgttttcacattcgaggatgaaatcaactcccctgtggctcctgctactctttacaaggccctagttacagatgccgacaacgtcatcccaaaggctcttgattccttcaagagtgttgaaaacgttgagggaaatggtggcccaggaaccatcaagaagatcactttccttgaggatggagaaaccaagtttgtgctgcacaaaatagaaagcattgatgaggcgaacttgggataca

SEQ ID NO: 108041 - DNA, 285 bp, Glycine max
ggaaaatctttccaatgtgagcttgtctttgccaagatgggaatcaaccccatcatgatgagtgctggagagttggaaagtggaaatgcaggagagccagcaaaactgatcaggcagagataccgtgaagctgcagacatgatcaagaagggaaagatgtgcgctctcttcatcaacgatcttgatgcaggagctggtcgtcttggtggaacacacaatacactgtgaacaaccagatggtgaatgccactctcatgaacattgctgataaccccaccaatgtgc

SEQ ID NO: 108042 - DNA, 282 bp, Glycine max
gagtcgagcgctcgagccgctcgagccggtcctgttatttctcagcgcgtaaagcatggctttgttggtggagaaaaccacgagtggtcgcgagtacaaggtcaaggacctttcccaggccgacttcggccgcctcgagatcgagctggccgaggttgagatgcccggcctcatggcctgtcggaccgagttcggcccctcccagcccttcaagggggcccgcatcaccggctccctccacatgaccatccagaccgccgttctcattgagaccctcaccgc

SEQ ID NO: 108043 - DNA, 278 bp, Glycine max
ttaacatatacaaattctctgtgttgtgttgtgtacttgtgttaattgtgttgttgttgtaggaaatttaagtgaagagagaatgatgatgaagtctgctatgtgtgcattggtgcttgtggcactggttgtggttgaagtggggcccatggctgaggctgcggtgacttgcaacccaacacagttgactccttgtcttccggcaattaattcaggttctgcaccttcgagtgcttgttgccagaagctgaaggagcaaaagccatgcttctgtggct

SEQ ID NO: 108044 - DNA, 281 bp, Glycine max
aaaacactcataacacaaagcacaaagcaaagctcatccttgagttaaaaaatggcagcagcttcttccatggctctctcatccccatccttggctggcaaggccgtgaagctgggcccatcagccccagaagtgggaagggtgagcatgaggaagaccgtcaccaagcaggtctcctcaggaagcccatggtacggcccagaccgagtcaagtacttgggcccattctctggcgagcccccgtcctacctaaccggtgagttcccaggcgactacggctg

SEQ ID NO: 108045 - DNA, 174 bp, Glycine max
ctcacctactatgttattggatttgatccaaatgttgggaggttgttcaagcagtatctcattctactgtttatcggccagatggcttcggcactatttcgtgctaatgcagcactgggtagaaacatgattgtttccaacacatttggagcctttgcagttcctgaggtccct

SEQ ID NO: 108046 - DNA, 277 bp, Glycine max
cctctttctccatggctcttgctggctctgtggttgagcttcaagcctcttcagtaaagaagaaaactgcagtttccagaagttggattctgctggaccactatggcaaaggcactgttcttgatgcggataagtatgctatcatgcgcctggttcaaattcacgccagagatcttcggattctcgaccctctcttatcgtatccttccaccattttgggcagagagaaagtcattgttctcaatttagagcacattaaagctatcatcactgcaga

SEQ ID NO: 108047 - DNA, 188 bp, Glycine max
gcatgtgtttgtgtagaggcttttggatgcttcacaccgtgacttgagaagagccagggctgcagcactgaacattgtcccaaccagcactggagctgccaaggctgtgtctctagtgttgccacagctgaagggcaagcttaatggaatagcgctccgtgtgcctacacccaatgtttcagttgttg

SEQ ID NO: 108048 - DNA, 284 bp, Glycine max
taacgggttggaacaattgtgatctctgatgaagtttatggtcaccttgcatttgggagcaagccttttgtaccgatgggagtttttggctctactgttcctgttctcactcttggctcactttctaagagatggatagttcctgggtggaggcttggttggtttgtgacaaatgatccatctggcacttttagagaaccaaaggtagtcgagcgtatcaaaaagtattttgatcttctaggaggtccagcaaccttcttgcaggctgctgtacctcagataat

SEQ ID NO: 108049 - DNA, 284 bp, Glycine max
attggacttctttgtttgctttcaacttacaatttctgtggaggagtttgtaacatggctgctctaccaacggcggacttagtgacgcaaatgcaacacatgtagcaagttgtgatgtgagggtgttgcatccagtgttcaaggtttacggtggggccactgcgttctccggccccgttgtcaccgtgaaggtgtttgaagacaacgtgttggtgagggagcttcttgagacgaaaggcgaaggaagagtattggttgttgatggacgaggaagcttgaggtgt

SEQ ID NO: 108050 - DNA, 287 bp, Glycine max
  unsure (1)..(287): unsure at all n locations
ggganagttcctgagccttcttgaacaacccggtcctccccttcgagaacatgacttgtctgctgttggcattgttgattcttttgatctcgatcttccctcgacccattggcttaatttctcgctctctcagagcacaaacatgcccaactgaacgagaaattagagctggtgttttgggaggagtagcaattcgacggttgaagatgcgaaggaaggcaccacactaagtaaggttgcgagaatggaaagcgtttacctcaaatgaccagagaggttggctggaa

SEQ ID NO: 108051 - DNA, 279 bp, Glycine max
ggcctcaaaacgctttgtcgtttgtggttattgagtcctgagtgatcttgtcatccgacctttgccatgacaggtgcgcttgcatggcaggtcaaaaaatgttaataaaaaaagttttattggtttggggagagatcgcacgggggttgcccggggtctcttcctcttgtgtggtgtggtgtttgctgtgctctccttgacgttatgccttttattattacctatctgtcgctccactccgtattacgactctggatcagaggatacatcagaggattc

SEQ ID NO: 108052 - DNA, 273 bp, Glycine max
caacaaatatggaaagtactggtgttggtgtttttggtctgtggaggttgaggttttggacctgctcggagccagggagattgcggtgcgtgcttgggacgaggccctcaacacccaacctgaaaagctcatttggaatgttatgggcatgatgaacaactgctggttcagagtgaaaaccaatgtgtgcaggccccacaagggtgagataggtatagtgtttgaacaccccacccaaccaggcaaccaatccggcggatggatggcaaaaga

SEQ ID NO: 108053 - DNA, 179 bp, Glycine max
ctctagccgattcggctgaggtttgttgctgtaactcgtacgtcttctggtgttgtgctgtgtatgtgtttgtttagtctctcacctgagaatgtcttgctgcggtggtaactgtggttgcggaagctcctgcaagtgcggcaacggctgcagacggtaacattttcgttgtagcattg

SEQ ID NO: 108054 - DNA, 282 bp, Glycine max
ggactccagaagagttcaatgctggacacgctcctggcgcaattaacataccttatatgttcagagttggatcagggatgacaaagaatagcaactttattagagaggtgtcttcaaattttaggaaagaagatgaaattattgttgggtgtgagcttggtaaaagatctatgatggccgcaagtgacttgctagctgctgggttcactggactcacagacatggctggtggttatgctgcatggacacaaaatggacttccaacagaactatgaagtgttt

SEQ ID NO: 108055 - DNA, 283 bp, Glycine max
ggctcgagccgctcgagccgctcgagccggtcctgttatttctcagcgcgtaaagcatgggtttgttgggggagaaaaccacgagtggtcgcgagtacaaggtcaaggacctttcccaggccgacttcggccgcctcgagatcgagctggccgaggttgagatgcccggcctcatggcctgtcggaccgagttcggcccctcccagcccttcaagggggcccgcatcaccggctccctccacatgaccatccagaccgccgttctcattgagaccctcaccgc

SEQ ID NO: 108056 - DNA, 281 bp, Glycine max
gaaggaaggaagagtgagcgtgaaagatgccttgggcgaggctttcagggtctccaaggctcgacgttgctattgacatgggcaatccatttctcaatctcactgttgatggtttccttaagatcggagctgtcgcagccacgcgatcagctgctgaagatacttatcatattatccaaaaggggaatatctcaagtcatgatttcgagaaaacgttgaagaagatgtgcaaagaaggtgtatattggggaactatagctggcgtttatgttggaatggaa

SEQ ID NO: 108057 - DNA, 246 bp, Glycine max
aaattgaagttttaaattaatggtttggatagaagtatgatacttgatagaacattatggcggaagttgatccatgtaaccgaccccacctagtgggataatgcgttgttgttgttgttgttgtatatgtaacagttagaagataagttttgccactttctttttactgcagcagattaatatgttccccactctaaatgggaactaaatatttggaatgaaagttttgccatccattatcatttt

SEQ ID NO: 108058 - DNA, 273 bp, Glycine max
agaagaacaagtagttgagaactaagaaggagaagcaaatggcttcctcaatgatctcttccccagctgttaccactgtcaaccgtgccggtgccggcatggttgctccattcactggcctcaagtccatggctggcttccccaccagaaagaccaacaatgacattacctccattgctagcaacggtggaagagtgcaatgcatgcaggtgtggccaccagttggcaagaagaagtttgagactctttcctacctgccagaccttgatgatg

SEQ ID NO: 108059 - DNA, 258 bp, Glycine max
gagggatacaaattcgaccctaatggagaatatgtgcgacgctggcttccagaacttgcaagattaccaacagagtggatacatcatccttggaatgcaccagagtcagtgctacaagctgctggaattgagttaggatcgaactatcctcttccaattgtgggaatagatgcagcaaaaaccagattactagaagcgctatcagaaatgtggcaacaagaggcagcttcaagagctgcaatggagaatggaactgag

SEQ ID NO: 108060 - DNA, 271 bp, Glycine max
catctcattcccgtccccggcgactgagtagcggtctcttcccaactcggaactcagtccattccgcatttcaattttctcttcacttggcaaagcccaaaccaaaccctggctgaagaagagaattgactgagaagaagaacacagaaatgggctccgaactgattttcagagggcacgagacccagcccgtggacgacgcgtactcaccaaagccccacaaaccctggctcaccgtgactcgcccgattcactacatgctccgtgagca

SEQ ID NO: 108061 - DNA, 273 bp, Glycine max
agaatggcaactatgactggtgtgagcctttcatgccccagggttttcttcaacgcatcagcctcaccgcaaaacgcgcatgctgtaaagttctcacttccacccagccaagcagtgcgaccgggtagtatcaagttgggtcgcgtgatgaggatccgacccgttcgcgctgcgcctgagcgcatatcggagaaggtggaggagagcataaagaacgcgcaggaggcgtgcgccggcgatccgacgagcggcgagtgcgtggcggcgtgggac

SEQ ID NO: 108062 - DNA, 275 bp, Glycine max
acagatcaattgcaacggttgaattttgactgaagacaaagttagaaaaaaaaaacatgtcttgctccgtcgcggtttccaattcgccggtgttctctccttcttcttccctcttctgctcgaagccctccatcatctcttcttcgccggaatccctctccctctctctgtcgcatctcaaaccttcgaactcttctacgtcgtcgtcttgttcttcgccttctgctgctgctgcttcttcttctccttcttctccgtttcgacttcgccttccc

SEQ ID NO: 108063 - DNA, 182 bp, Glycine max
gtttcttacaagcctctactatactgcttcaccttctgctctagaaaattcagtgctgaaacatggcttcggctactctctctgtagccaaaccagcccttcaggcaaatgggaaaggcttctctgaattctctggcctccgaagctcatcaggcttccttcccttttctagaaaatcttca

SEQ ID NO: 108064 - DNA, 278 bp, Glycine max
atttctgaatcagtgaagaatcttagattctgtgggaaaagcttctcaatctttgacgaagataaacaacaatgtcttcacttgcggctgctagagcagacaacttttactatcccccagaatgggaaccgaatcagggttcgctgaacaagtttcatggtcaacatgccttgcgagagagggcgagaaaattagatcagggtatcctgattataaggtttgagatgccttttaatatatggtgtggaggatgcaattcaatgattgcaaagggtgtc

SEQ ID NO: 108065 - DNA, 283 bp, Glycine max
caactacaaaggttgctgtaggagataagatattgaagtagtgctaagtgcctaacacctgcagtgaacaatggcctctgcatcagcatctcttctcaagtcttcacttgttcttgacaagtctgagtgggtgaagggacaaacacttcgccaaccttctgctgcatcagttgtgagatgcaaccccaccaccccatcaggcctcacaatcagagctggttcctatgctgatgagctcgttaagaccgcgaaaacagtggcttcaccagggaggggtattttg

SEQ ID NO: 108066 - DNA, 275 bp, Glycine max
cggctcgagtgatgtcccatccctatgacgttggtcaactatatatattaagcacaggccaaggcgagtcccagaaagatgccaaatatgatcagttttttcttggtgattatcgacctctgattcaagacactcatggtaacgtactagaccaggttagttgatcacttgcttgctactcttttcatttaagaaactgttcaaacctaggatgtactgatacaacatgggttacagttacgatgacattgacacagaaatatggcaaatttgag

SEQ ID NO: 108067 - DNA, 275 bp, Glycine max
cgaagggctatatagcataaacatttgagtcttcattgcacaatgtcgacctcttccattaacgggtggtgcttctcttccatctccccagccaaatcctctctcaagaaggccacattaggcccttctgtcttcgcaaccgttagcactccttcttctccttcttcttcttcttcttcttccttcccttctctcattcaagacaggcctgtctttgctgcccctgcccccatcatcaccccaactgtgagagaggatatggcaaaggaatacga

SEQ ID NO: 108068 - DNA, 267 bp, Glycine max
cgcgataacagtggcttcaccaaggatgggtattttggccatggaggagtccaatgctacctgtgggaagcgcttggcttcaagtgggctagacaacactgaagctaaccgccatgcataccgtagcctccttgtgacagttccaggacttggtcagtacatctctggtgccattctctgtgatgaaactctctaccaatccacaactgatggcaggaagattgtcgacgtgctcctcgagcaagacattgttcccggtattgaagt

SEQ ID NO: 108069 - DNA, 265 bp, Glycine max
cttaacaacagcacaaagcgggttactgtctgttcaagctaccatctctctctctctttcttagtgcctccttgccagaagttaaaatggcccaagagactttcctattcacatctgaatcagtgaacgaggggcaccctgacaagctctgtgaccagatctccgatgctgtgctcgatgcatgcttggagcaggaccctgacagcaaggttgcctgtgaaacctgcaccaagaccaacatggtgatggttttcggagagatcac

SEQ ID NO: 108070 - DNA, 269 bp, Glycine max
tgaaaattctctttagagagatagagagaggaagaaagaatggcagcttgcactgtctactcaacacaatctctgagcacaaattgctccatctcaaccccatcaaagacgcaactcagtttttttccaccaaaagcaggtaggtttctggaggaacagcaagaagggcagctgcagcagcagaagaagctatgtgataacatgtgcagcaggtgactcacagacagtggtgattggcctggctgcagactcagggtgtgggaagagca

SEQ ID NO: 108071 - DNA, 206 bp, Glycine max
ctccattggttcttcatctgcatgcacacacttgcatagttttggaaaccaagaatttttgaagggtagcatcaacaagaagttctggaaatggagatcaccaatgtcagcgagtatgaagctattgcaaagcagaagttgccaaagatggtgtttgactactacgcatctggtgcagaggaccagtggactctgcaggagaacag

SEQ ID NO: 108072 - DNA, 244 bp, Glycine max
tgcaattgaagttaaaagccttagccttccctacaactccaaacagcaagacatcatcatccatggctgcctccgtctccactgtcggagctgtcaacagagctcttttgaacctgaatggttctggagctggagcttcagctcccagttcagccttctttgggaccagcttgaagaacgttattgcctcaagggtcgccaacagcaaggtttccggtggaagcttcaagattgttgctgtaga

SEQ ID NO: 108073 - DNA, 278 bp, Glycine max
cacctttctcctaaaacatctccagtgggttcttcttcttctattacaacaacgtcgtccaagaccatgaccatggccatggccacgatcctgctcctgttcacggtcttcgcggtttcatcggccctagacatgtcgataatctcgtacgacaacgcccacgcccccacgtcgcgcagcgacgaggagctgatgtccatgtacgagcagtggctagtaaagcacggcaaggtgtacaacgcgctcggagagaaggagaagaggttccagatcttcaa

SEQ ID NO: 108074 - DNA, 132 bp, Glycine max
tcagaaccggcctgcagagttgattgccaagtttttggatgagaaacttcgtgcaggtaacaaaggcacttcagaagaagagttggagggtacacttgataaagtcctggttttattcaggttcattcaggg

SEQ ID NO: 108075 - DNA, 274 bp, Glycine max
gacgacctttacagtgatggcctgcccttgcaagatgaaattttgaagaaaattccattgttacaagtgctcacaaagatacaagaatgcagccaggggcttcttaagtatgacactcccaagattatttctaaggacaagttttcctggctgcgagatgatgaattttcccggcaagcaatagcaggagtcaaccctgttaacattgaggggcttaaagttttcccactggtgagcaaactcgacccggaaacatatgaccaccaagattctg

SEQ ID NO: 108076 - DNA, 190 bp, Glycine max
ctcaaccttctaagtgctctggggtttccactaatgtccttcttgtgagagggccaagagaacactttcatcgactgctcagaccaccattgaaattgattctctatacgagggaattgatttctactccactgttactcgtgccagatttgaggagctcaacatggatctcttcaggaaatgtatggag

SEQ ID NO: 108077 - DNA, 272 bp, Glycine max
aagtagttgagaactaagaaggagaagcaaatggcttcctcaatgatctcttccccagctgttaccactgtcaaccgtgccggtgccggcatggttgctccattcactggcctcaagtccatggctggcttccccaccagaaagaccaacaatgacattacctccattgctagcaacggtggaagagtgcaatgcatgcaggtgtggccaccagttggcaagaagaagtttgagactctttcctacctgccagaccttgatgatgcacaatt

SEQ ID NO: 108078 - DNA, 268 bp, Glycine max
ctggtggaatgatgtcagtcccttatgacatgggtggtctgccaatccgcgatgctgtgggacagccaatggccattcaagctttggccacggctcttgcaaatgctccccctgaacagcagaggactatgctcggtgaagctttatacccgcttgtggatcagctggaacacgatgctgcagcaaaggttactggcatgcttctggagatggaccagcctgaagttttacatctgattgagtcaccagatgctctgaaggcaaaagt

SEQ ID NO: 108079 - DNA, 265 bp, Glycine max
caagtagttgagaactaagaagaaggaaatggcttcctcaatgatctcctccccagctgttaccaccgtcaaccgtgccggtgccggcatggttgctccattcaccggcctcaaatccatggctggcttccccacgaggaagaccaacaatgacattacctccattgctagcaacggtggaagagtacaatgcatgcaggcgtggccaccaattggcaagaagaagttcgagactctttcctacttgccagacctcgatgatgcc

SEQ ID NO: 108080 - DNA, 188 bp, Glycine max
tgaacagatgcagatcttcgtgaaaactttgaccggtaagaccatcacccttgaggtggagtcctccgacaccatcgataacgtgaaagctaagattcaagacaaggaagggatcccacctgaccagcagagacttatctttgcgggtaaacagcttgaggatggtcgaacccttgccgactacaaca

SEQ ID NO: 108081 - DNA, 273 bp, Glycine max
gggctatatagcataaacatttgagtcttcattgcacaatgtcaacctcttccataaacgggtggtgcctctcttccatctccccagccaaaacctctctcaggaaggccacattacgcccttccgtcttcgcaacccttaacactccttcttctccttcctcttcatcttccttcccctctctcattcaagacaggcctgtttttgctgcccctgcccccatcatcaccccaactgtgagagaggatatggcaaaggaatacgagaaagcta

SEQ ID NO: 108082 - DNA, 271 bp, Glycine max
tgatggttcatggtatggaaattggggagtttgcttcacttatggctcttggtttgcacttggaggtctagcagctgctggtaagacttacaccaattgtgctgccattcgcaaagccgttaaatttctacttacaacacaaagagaggacggtggatggggagagagttatctttcaagcccaaaaaagatatatgtacctctagaaggaagccgatcaaatgttgtacatacagcatgggctcttatgggactaattcatgctggacag

SEQ ID NO: 108083 - DNA, 259 bp, Glycine max
caagattgttgctgtagaagagaagaaagagattgaagagacccagcagaccgacaaggacagatggaagggtcttgcctatgatatctcagacgaccaacaggacatcacaagaggaaagggtttggttgactcccttttccaagctccacaggatgctggaactcactatgctgtcatgagctcctacgagtaccttagcactggacttcgccagtacttggacaacaacatggatggattttacattgctccagct

SEQ ID NO: 108084 - DNA, 263 bp, Glycine max
cagtggtgccttatcgctgtggttatcatcttcttcttcctctttcttagatctcttctttctctacgccgcacgccgaaaccatggccggaaaaggagagggtcctgctatcggaatcgatctcggaaccacctactcttgcgtcggtgtgtggcaaaatgaccgcgttgaaaccatcgccaacgaccaagggaccagaaccacgccgtcttacgtcggatccctgacaccgaccgtctcatcggtgatccggccaagaatc

SEQ ID NO: 108085 - DNA, 269 bp, Glycine max
gagattttatccaattgaaattttaaaaatgactgggataaacttaagaattcaattattgaaattgaataagtaaacaatttaattggattggtcgaatggtatcaaaaaaatggagtactaactcccatttcttatttattattgaattaaccgatcaacttgctttgttatcgaacatttctttttgatttcaaaaattttccggaaaaaatttgaatctatttttatatgcgaatcaatcctactacttctggtcctgaggtttc

SEQ ID NO: 108086 - DNA, 175 bp, Glycine max
caccagtgttccatatttcagagaaacaagctttatcatctccctctctagtgttcaccgtacagaggtgtcaaccggagctggtggctcctgctaaacccactcctcgcgtggttaaacccctctccgacatagatgaccaacagggcttgcgtttccaaattccattcatact

SEQ ID NO: 108087 - DNA, 188 bp, Glycine max
ctcataacacaaagcacaaagcaaagctcatccttgagttaaaaaatggcagcagcttcttccatggctctctcatccccatccttggctggcaaggccgtgaagctgggcccatcagccccagaagtgggaagggtgagcatgaggaagaccgtcaccaagcaggtctcctcaggaagcccatggta

SEQ ID NO: 108088 - DNA, 269 bp, Glycine max
  unsure (1)..(269): unsure at all n locations
gctttctcttccttcataatttctcaactttcaaatctccattcagcttcattttcctgaatagaaaaaaccctttctgggagaaagattatagccttcagctggaaaaggatcattcatcttgaaagaagagtatgtgtgtgacaatctttatagttctaaggagggtgcaagagagaactgaatgtgctgtgatggcaactcgtagatatgcttgtggaagagctgatgaggcnactcatccagactcgatgaggggcactttggct

SEQ ID NO: 108089 - DNA, 287 bp, Glycine max
cctcaaccgtctcggatgagatgatcgtgttcagggagcttaacaagcttgaagtccaaggggttacgggaataatgttcaagaaggcctttgaccaggttgaaggccaaggacatcaatcttcaagtgaccgagaagttcaaggagcgggtggtggacgaagctacaaccctagctatggtgcacgcccgctgaggcgagccatcatgaggctgctggaggacaccttgctgagaagatgctcgcagggagtaaggaggcgatctgcatatagatgtgatcgaggg

SEQ ID NO: 108090 - DNA, 293 bp, Glycine max
  unsure (1)..(293): unsure at all n locations
accttgctctatactacacagtacacacactagaagaataattgctttcaatctccaataatttttaagccttcccctttcttgctcttttcttttcttcttatccgactcagtcacccctacaaaaccaataaaccttgttgttctacccgttcaaaatgatggttccacagggctccattggggcaacctccaaaaaagaacccctctaatgcaagtaccagtcctggtggacctcaatgganatcacttgtgggttaactgtgagcagcagtactcatccanaaacgtac

SEQ ID NO: 108091 - DNA, 293 bp, Glycine max
gaagaagatcaacctcgtcctgatcaccctccacagcgaccaagcaggccgaacaacaagaaccacgtggcagaggatgtcagactagaaatggggttgaggaaaatatttgcaccatgaagcttcacgagaacattgctcgcccttcacgtgctgacttctacaacccaaaagctggtcgcattagcaccctcaacagtctcaccctcccagccctccgccaattcggactcagtgcccaatatgttgtcctctacaggaatggaatttactctccacattggaacttgaag

SEQ ID NO: 108092 - DNA, 293 bp, Glycine max
gaaaaggaaaaccctaagagatgaagagaactcctatcttgttccctctcttctttcttctttgtgccttcacctcatatctaccttcagccaccgctgatgatgatcatgtgtacgacactgacggcgataagcttcaatacggtgtcaattatttcgtgttgccagtgataagaggaaatggcggtggaatacaagtagcaaaagcaggaaacgaaacttgccctctgactgtggtgcaatctggcaacgagctctctgaggggttaccgataaagattgcatctcgatcc

SEQ ID NO: 108093 - DNA, 179 bp, Glycine max
tattcaaaccttgctctatactacacagtacaccaacttgaagaaatattggcttccatcctccactactttttagccctctctctttcttgctcttttcttttcttcttatccgactcagtcacccctacataaccaataaaccttgttgttctacccgttcaaaatgatggttccac

SEQ ID NO: 108094 - DNA, 289 bp, Glycine max
  unsure (1)..(289): unsure at all n locations
cgctngagcggattcggctcgtgcttagttctttgcgatttctatagttcaattatgggacagccttcagtctctctctctgttctctttgcctgctactcttgtcgagtgcatgcttcgcgagtagctccagctagctcatcgagtgccgacccatcaacctcaacgcgttggaacccgaccaccgcgttgagtccgacgttgtgtgattcagagatggtgctctcagcaccctgagctgaaatgcgccggtgtcactgcctacagactcgacctcaaccgcaatggc

SEQ ID NO: 108095 - DNA, 295 bp, Glycine max
ctcatcgatctacacacatacttagtttctccaactacacgacggacaagcatggggaagcctgcgaagatcggagagtggggtggatacgccggcgatcgtcgggatctgagggctactccggaccggctgatcgaggtgaaggtcacggcggacaacagcagctgcatccgctccatctccttcatctacatcggagccgatggcaaaccgtacgaggaggggccatggggtttcggccatgctggcacggagtacaagattgatctgtgcaggttcgacgagagcttgacgg

SEQ ID NO: 108096 - DNA, 289 bp, Glycine max
tcatgtagttcaaataaccctaatggcacaggggaattctgtctctagtgcaatgcttccagaatgcaatggtgagtagaaatagcaagcctcaagctactgcaatgcatgtgggagctatagaaattatcattgatagtttcgcaagtcctgactgcaacatagttggtgcaatgcttttggttgatacttatcataccaatcctgacaatgcagttcgtagtatttttgtcgcgcctttcagatgcggaatgcctattcgggtggttacactttcgaataccattgt

SEQ ID NO: 108097 - DNA, 275 bp, Glycine max
  unsure (1)..(275): unsure at all n locations
tggtgatgaaaaattgatgcgtgaaaggacacacctgctgttgggcctgttgttccaggatggcatttgtcagtagatgtctggagagttgaatgtggaatccttctggatttccgctcacagttatttgcaatagcatttttaatgagatgctcattagatatagctatgaaaaattactgcgccaggctanagctccaagtatgtttttacaatctttcaaaaattctgtttctttgtgtgtgtatggtgatgataacttaattagtgttcat

SEQ ID NO: 108098 - DNA, 301 bp, Glycine max
  unsure (1)..(301): unsure at all n locations
gtgatgataacttaattagtgttcatgaatacgtcaagccttactttagtggttctacattgaaaagctttctagctggtcataatatcaccattactgatggtattgacaagactagtgcaactttgcactttagaaagttagcagattgtgattttctcaagagaaactttaagcagatgtctaatgttttgtgggtagctcctgaggacaaggcgagtttatggtcacaacttcattatgtatcgtgtaatgatctgganatgcaagaagcttatcttgtcaatctcgctaatgtgtt

SEQ ID NO: 108099 - DNA, 301 bp, Glycine max
caaccgcaatggcctccacttgccaacttactcaacttatccccggatgattatcatcggccaaggggaaggagcacttggagttgcaattccaggatgtcctgagacgtttgaggagccacaagaacaatcaaacagaagaggctcaaagtcgcagaagcagcagctacaggacagtcaccagaagattcgtcacttcaatgaaggagacgtactcgtgcattctcctggtgttacttactggacctacgaacactggcgatgaaccagttgttgccatcagtcttcttgacacctctaa

SEQ ID NO: 108100 - DNA, 176 bp, Glycine max
tcgggactttcactagccgcagcagcctcaggaggaagaataaaggatgtctcacaggaagttcgagcacccaaggcacgggtcactgggatttctccccaggaagcgtgctgctcgtcacaggggaaaagtgaaggcattccccaaggatgacccatccaaggcacccaagctca

SEQ ID NO: 108101 - DNA, 291 bp, Glycine max
  unsure (1)..(291): unsure at all n locations
gactcgtgctatcatcaacttgtcagccattggttanacactcatgcagttgttgagccattcatcatagcaacaaacaggcatctcagtgttgttcaccctatttataaactccttcaccctcactatcgtgacaccatgaacataaatggccttgctcggttatcactggtcaacgacggtggcgttatagaacaaacatttttgtggggaaggtattctgtggaaatgtctgctgtagtttacaaggattgggtttttacagatcaagcattgcctgctgatcttata

SEQ ID NO: 108102 - DNA, 291 bp, Glycine max
gcgtgaggacttatggatcacctccaaactctggtgttcagatcatgcttcagaagatgtgcccaaagcattggataaaacattgcaggatttgcaacttgattaccttgacctctatctgatccactggccagtgcgcatgaaaagcggatcagttggattcaagaaggaatatctcgatcaaccggacattcccagcacatggaaagcaatggaggcactctatgactcaggcaaggcaagagccataggagttagcaatttctcttcaaaaaagcttcaagatctcat

SEQ ID NO: 108103 - DNA, 263 bp, Glycine max
taattattaacacttccttagttcaatatggggaagcccttcactctctctctttcttccctttgcttgctactcttgtcgagtgcatgctttgctattagctccagcaagctcaacgagtgccaactcaacaacctcaacgcgttggaacccgaccaccgcgttgagtccgaaggtggtttgattcaaacatggaactctcaacaccctgagctgaaatgcgccggtgtcactgtgtccaaactcaccctcaccgcaatggc

SEQ ID NO: 108104 - DNA, 283 bp, Glycine max
gcccttggtttcctgtttttcagtgagtgctgcttcgctttcagttccagagagcagcctcagcaaaacgagtgccagatccaaaaactcaatgccctcaaaccggataaccgtatagagtcagaaggagggctcattgagacatggaaccctaacaacaagccattccagtgtgccggtgttgccctctctcgctgcaacctcaaccgcaacgcccttcgtagaccttcctacgacaacgggtcccaggaaatctacatccaacaaggtaagggtaattttg

SEQ ID NO: 108105 - DNA, 263 bp, Glycine max
atcagtcatcaccatgggcaagctaattttttccccttggtttcctgttttcagtggctgctgtttcgctttcagtttcagagagcagcctcagcaaaacgagtgccagatccaaaaactcaatgccctcaaaccggataaccgtatagagtcagaaggagggctcattgagacatggaaccctaaacacaagccattcagtgtgcgggtgtcgcctctctcgctgcaccctcaacgcaacgccttcgtagaccttcctacac

SEQ ID NO: 108106 - DNA, 256 bp, Glycine max
tggtgatgataacttaattagtgttcatgaatatgtcaagccttactttagtggttctaaattgaaaagctttctagctggtcataatatcaccattactgatggtattgacaaaactagtgcaactttgcaatttagaaagttagcagattgtgattttctcaagagaaactttaagcagatgtctaatgttttgtgggtggctcctgaggacaaggcgagtttatggtcacaacttcattgatgttcgtgtaat

SEQ ID NO: 108107 - DNA, 292 bp, Glycine max
gtgttaaataggtggatggactgccaaccccaatgcaggatgttcaaggttacaattgattggtttatttcctctcaggaatgtgttcccaggacttattgtgttttaaatccacaaaatccttttgtgttaaataggtggatggggaaactgactttcccccagggcacttcccgaaatgttaagagaatgcctctttctatagggggaggagctggtgcaaagaatgctattctcatgaatatgccaaatgcctggtctttcattgtggagatattttgttggagatctc

SEQ ID NO: 108108 - DNA, 181 bp, Glycine max
gacattttgatagacctcgatcacaggctgccgcaccttaaaatcggagacaagatcaatcgttacttgatttcaagaatctctcaatttcttcctacttctctgtgtacgattacttaagggcaagcaactcactgtctgagctggtcacagacttcgtgaatcattttctattccactc

SEQ ID NO: 108109 - DNA, 289 bp, Glycine max
aaggaaaaccatttcttctgaagataaaccttttaactagatttggcacgtttgctcagtgcccgaatctagttcaaggaaaaccatttcttctgaagataaaccttttaacttgagaagccgcgaccccatctactccaacaagcttggcaagttctttgagatcaccccagagaaaaacccccagcttcgggacttggatatcttcctcagtattgtggatatgaacgagggagctcttcttctaccacacttcaattcaaaggcgatagtgatactggtaattaat

SEQ ID NO: 108110 - DNA, 291 bp, Glycine max
  unsure (1)..(291): unsure at all n locations
attcgagcgaatcggctcgagttcaaaccttgctctatactaaccagtacacacactaactgaataatggcttccatcatccactactttttagccctctctctttcttgctcttttcttttcttcttatccgactcagtcacccctacaaaaccaataaaccttgttgttctacccgttcaaaatgatggttccacagggctccattgccgtaacctccanaaaagaacccctctaatgcaagtaccagtcctggtggacctcaatggaaatcacttgtgggttaactgt

SEQ ID NO: 108111 - DNA, 293 bp, Glycine max
tcaatatcctagtataccttaataaataatttaagatactatgatgagagcacggttcccattactgttgctgggacttgttttcctggcttcagtttctgtctcatttggcattgcttactgggaaaaagagaaccccaaacacaacaagtgtctccatagttgcaatagcgagagagactcgtacaggaaccaagcatgccacgctcgttgcaacctccttaaggtggagaaagaagaatgtgaagtaggtgaaattccacgaccacgaccacgttcacaacacccggaga

SEQ ID NO: 108112 - DNA, 294 bp, Glycine max
agcttgctcatcaagtccaagaaccaacctaccttttgcaatctcaattcaatggcgtcctctctcattgcgaagcgcttcctctcctcttccctcctctccaggtccctccttcgccccgccgcttccgcttcccaccgctctttcaacaccaacgccatgcgccagtatgacaaccgcgccgacgaccacagcaccgacatcgatcgtcactccgaacgctctttccctagcactgcgcgccgcgacgatatcttctcagatgtgttggatccattttttccgactcggagt

SEQ ID NO: 108113 - DNA, 289 bp, Glycine max
cctcaaaccggataaccgtatagagtcagaaggagggctcattgagacatggaaccctaacaacaagccattccagtgtgccggtgttgccctctctcgctgcaccctcaaccgcaacgcccttcgtagaccttcctacaccaacggtccccaggaaatctacatccaacaaggtaagggtatttttggcatgatatacccgggttgtcctagcacatttgaagagcctcaacaacctcaacaaagaggacaaagcagcagaccacaagaccgtcaccagaagatctat

SEQ ID NO: 108114 - DNA, 267 bp, Glycine max
atttacaccatctgctctcaagactgtgaattgtggaatcctgcttgcacaaaagcaatgactatgtcatttaatccaaacccgtgttctgatgcatggagtttggaatttctgaagcgtactggatttcattgcgatatcatttgtgtcactggatggactgccaccccaatgcaggatgttcaggttacaattgattggtttatttcctctcaggaatgtgttcccaggacctattgtgttttaaatccacaaaatccttttgtg

SEQ ID NO: 108115 - DNA, 272 bp, Glycine max
cagctacttgaatatatctatcagcaagaacatagtccctgatgaaatcaaagggagggtgcttcatcattccttccctgtttctcttttcctgccccgcaatgtccgattggagcacaaaacattgaagcttctgaagtattggacctggcaatttgttattgttaggccagtatgttccattctgattattgcactccagcttcttgggctgtaccccagctgggtcagctggacgtttagtattatactgaacttttcagtctccatgg

SEQ ID NO: 108116 - DNA, 287 bp, Glycine max
caaaaaatcaagaacaatggcttatgctaggcttgctcctatggctgtcttcttgcttgccacttccaccataatgttcccaacgaagatagaagcagcagattgtaatggtgcatgttcacctttcgagatgccaccgtgccgctcacgtgattgtcgttgtgtccctataggactagttgctggtttctgcatacatccaactggactttcatctgttgcgaagatgatcgacgaacatcccaacttatgtcaatctgatgatgaatgcatgaagaaaggaagtg

SEQ ID NO: 108117 - DNA, 289 bp, Glycine max
ctatttttcaagtaacttaaggtttcaaacctaggaagttggaagtcatggcagcaacattgatggcagcaacaacaagttctggtactcttaaagcaactcctttccttggccaaggcaagggtgccaatgccaatgctcttagggatgttgtctccatgggaactgggaagtacaccatgggcaatgatttgtggtatggaccagacagagtgaaatacttgggacccttctcagctcagaccccttcatacttgaaaggagaattccctggggattatggatggga

SEQ ID NO: 108118 - DNA, 287 bp, Glycine max
  unsure (1)..(287): unsure at all n locations
gcggtttcctttgttggtgttgctgggaactgttttcctggcatcagtttgtgtctcattaaaggtgagagaggatgagaataaccctttctacttgagaagctctaacagcttccaaactctctttgagaaccaaaacggtcgcattcgtctcctccagagattcaacaaacgctccccacaacttgagaaccttcgagactaccggattgtccagtttcagtcanaacccaacacaatccttctcccccaccatgctgacgccgatttcctcctctttgtcctta

SEQ ID NO: 108119 - DNA, 280 bp, Glycine max
  unsure (1)..(280): unsure at all n locations
tggaatcaaatggcaacagtgagaacacattgaattttgattctagcaagcagagcttttgtcaattctctattgatcttcttggtggaggaattttagtggacaaaactggagattggatcacacttatacaaaattctccaattagtaacttgttgagagttgctgcttggaagaaaggctgtttaatggttaagattgtgatgtctgggaatgcagcagtncaaaggagtgattgggctcattggtacagtgtttntaacaacagcacagtacagag

SEQ ID NO: 108120 - DNA, 244 bp, Glycine max
tcggcattcggctcgagcaagctggtacagtttggagagattcaggaaaaagttgtattgaaattttcacaagaggaatttcttacagcttggtcaacccaggtgcgtcctgcaacaactctgttggctgatgggtgtccatatttgtatgctatggtgcatgatagttcagtgtctacaataccaggtgattttgtcattggtgttaagttgacaaccataaacaatatgtgtgcatatgggc

SEQ ID NO: 108121 - DNA, 276 bp, Glycine max
ctcgagccgcagaagccccactcaaccaccacacctctcctcgttcacgctaccccttactgctcttcttctacctttcaagttttaaaagtataaagatggcagagacattcctatttacctcagagtcggtgaacgagggacaccctgacaagctctgcgaccaaatctccgatgctgtcctcgacgcttgcctcgagcaggacccagacagcaaagttgcctgcgacacatgcaccaaaaccatcttggtcatggtcttcggagaaatcacga

SEQ ID NO: 108122 - DNA, 254 bp, Glycine max
ctttcttcttcttcttctcttcttcttcaagattgcgacgacgatccaagtgatagacactcgttgcgatggaacttgtagctgaatccgagcgaactctgtacccatacgtgactggatcctctgtagtcgctatcaaatacaaagatgggattctaatggccgctgacatgggaggttcgtatggatctaccctgcggtataagagtgttgagcgtatcaagcctattggaaagcattctcctcctggtgct

SEQ ID NO: 108123 - DNA, 241 bp, Glycine max
  unsure (1)..(241): unsure at all n locations
tgcggtttcctttgttggtgttgctgggaactgttttcctggcatcagtttgtgtctcattaaaggtgagagaggatgagaataaccctttctacttgagaagctctaacagcttccaaactctctttgagaaccanaacggtcgcattcgtctcctccagagattcaacaaacgctccccacaacttgagaaccttcgagactaccggattgtccagtttcagtcaaaacccaacacaat

SEQ ID NO: 108124 - DNA, 283 bp, Glycine max
accgattgctagaatggaatttcgatgctcagtcatctcttttaccattctcttctctcttgctcttgcaggagagagccatgtccatgcatcgctacctgaggaagattattgggaagctgtttggccaaacactcccattcccactgcactgcgagagcttctaaagcctctccctgcaggtactgaaatcgatgaactccctaagcaaattgatgatacacagtacccaaaaacattcttctataaagaagaccttcatccaggcaaaacaatgaaagta

SEQ ID NO: 108125 - DNA, 283 bp, Glycine max
aaaattcttccaccaagttatggggttccttgtgttgcttcttttctccctcttaggtctctcttctagttccagcatatcaactcatcgttccatattggaccttgacctaaccaagtttaccacacagaaacaggtgtcttcactgttccaactatggaagagtgagcatggacgtgtctaccataaccacgaagaagaggcaaagagacttgagattttccagatcacttgaactatatcagggacatgaatgcaaaccagaaatcaccccatctcatcg

SEQ ID NO: 108126 - DNA, 283 bp, Glycine max
  unsure (1)..(283): unsure at all n locations
gttgctgcttggaagaaaggctgtttaatggttaagattgtgatgtctgggaatgcagcagtcaaaaggagtgattgggcctcattggtacaagtgtttttaacaaacagcaacagtacagagcattttgatgcatgtaagtggacaaaatcggaaccacattcctgggaattgatcttcccaatagaggtatgtggtcctaataatggttttgaaatgtggagttctgagtgggcanatcaaacttcatggcatttgagtctcttattgacaatgcaaacag

SEQ ID NO: 108127 - DNA, 289 bp, Glycine max
gcaacagtgagaacaccattggattttgaatctaacaagcagaacctttgtccattttccaatgaccttctcggtggaggaatcctagtgggacaaaactggagattggatccacacttatacaaaattctcccattagtaacctgttgagagatgctgcctggaagaaaggctgtttaatggtccagattgtgatgtctgggaatgcagcagtcaagaggagtgattgggcctcattggtacaagtgtttttaacaaacagcaacagtacagagcattatgatgcatg

SEQ ID NO: 108128 - DNA, 189 bp, Glycine max
actcgagcgaatcggctcgaggcgaagagaatggctcccaagggattaatctttttggctgtggtatgcttctcagcacagtcactgagttcgtgtcttgcggaggataatggacttgttatgaacttctaccaggcatcatgccctcaagctgaagacatcaatcaagaacaagtcaagcttctctac

SEQ ID NO: 108129 - DNA, 288 bp, Glycine max
aatatcctagtacaccgtattaaagaatttaagatatatgatgatgagagcgcggttcccattactgttgctgggagttgttttcctggcatcagtttctgtctcatttggcattgcgtattgggaaaagcagaaccccagtcacaacaagtgcctccgaagttgcaatagcgagaaagactcctacaggaaccaagcatgccacgctcgttgcaacctccttaagcgtggaggaagaagaagaatgcgaagaaggtcaaattccacgaccacgaccacaacacccgg

SEQ ID NO: 108130 - DNA, 257 bp, Glycine max
ccttaataaataatttaagatactatgatgagagcacggttcccattactgttgctgggacttgttttcctggcttcagtttctgtctcatttggcattgcttactgggaaaaagagaaccccaaacacaacaagtgtctccagagttgcaatagcgagagagactcgtacaggaaccaagcatgccacgctcgttgcaacctccttaaggtggagaatgaagaatgtgaagaaggtgaaattccacgaccacgacc

SEQ ID NO: 108131 - DNA, 252 bp, Glycine max
attggtccttaaacactcatcagtcatcaccatggccaagctagttttttccctttgttatctgctgttcagtggctgctgcttcgccttcagttccagagagcagcctcagcaaaacgagtgccagatccaaaaactcaatgccctcaaaccggatcaccgtatagagtcagaaggagggctcattgagacatggagccctgccgacaagccattccagactgccggtgttgccctctctcgactgcacct

SEQ ID NO: 108132 - DNA, 95 bp, Glycine max
agcaaagcaatggctacttcaaagttgaaaacccagaatgtggttgtatctctctccctaaccttaaccttggtactggtgctactgaccagcaa

SEQ ID NO: 108133 - DNA, 262 bp, Glycine max
tgcagaccgagctagctagctagcaagcaagcacagagatggaggcatagcgaggccatgccctcatgtgcttggcacgtgcttcactcttcctctgcgctctaaccctatccgctgctcacggaagcaccacggttcaagacatcgcgagaaagttgaacactcggggacaacgagcttctgcgcacggagaagaagttcaaggttttcatggagaattacgggaggagctactccacagaggaggagtatttgcgccgtt

SEQ ID NO: 108134 - DNA, 279 bp, Glycine max
ggatgtcttacgttgctcataacgttaatcagccccaagagaaagatttgttggaaggaaatttttcctttgatattaaatctcgctctagattggaaaaagtttcctctacaaaagcacaatttgttagtggaaaaaccttcaaatatgatatcgttggtgctggttcacattcttcagaagatttttctgaaaaggaagatcaagaaaaacccaaaaagattgatgccagattgagacaaagaatagatcctcaatacaatgaggttcggctcagat

SEQ ID NO: 108135 - DNA, 279 bp, Glycine max
attgtctttgaacactcatcaccatggccaagcttgttctttccctttgtttccttcttttcagtggctgcttcgctctgagagagcaggcacagcaaaatgagtgccagatccaaaagctgaatgccctcaaaccggataaccgtatagagtcggaaggtgggttcattgagacctggaaccctaacaacaagccattccagtgtgccggtgttgccctctctcgctgcacccttaaccgcaatgcccttcgtagaccttcctacaccaacggtcccc

SEQ ID NO: 108136 - DNA, 276 bp, Glycine max
gcaggacgcacctgagttgaccaagctgtaagaactctgttggctgatgggtgcccatatttgtatgctatggtgcatgatagttcagtgtctacaataccaggtgattttgtcattggtgttaagttgacaaccataaacaatatgtgtgcatatgggctcaatcctggtatttcaggttctcgtcttttgggcaccattcctcagtccatttcacagcaaactgtttggaatcaaatggcaacagtgagaacaccattgaattttgattctagc

SEQ ID NO: 108137 - DNA, 148 bp, Glycine max
cttgcaagggttcagcaagattattctagaggcctcatacgacaccaaattcgaggagataaacaaggttctgtttggtagagaggaggggcagcaacaaggggaggagaggctgcaagagagtgtgattgtggaaatctcaaagaaa

SEQ ID NO: 108138 - DNA, 264 bp, Glycine max
gtatgtgtcattcaagaccaatgatagaccctcgatcggaaaccttgcaaggggcaactcattgttgaacgcattgccagaggaagtgattcagcacacttttaacctaaagagccagcaggccaggcaggtgaagaacaacaaccctttcagcttcctggttccacctcaggagtctcagaggagagctgtggcttagagagccctttttgcatgtgctaccacacttttgtccttttgggctctagctagtgctggtagcag

SEQ ID NO: 108139 - DNA, 249 bp, Glycine max
cggctcgagcaaacttaattattaacacttccctagttccatatggggacagccttcactctctctctttcttccctttgcttgctactcttgtcgagtgcatgctttgctattagctccagcaagctcaacgagtgccaactcaacaacctcaacgcgttggaacccgaccaccgcgttgagtccgaagtggtttgattcaaacatggaactctcaacaccctgagctgaaatgcgccggtgtcactg

SEQ ID NO: 108140 - DNA, 277 bp, Glycine max
aaacaattcaattcaatctgcctcgatcatggagaggaaaacatttgggtttttgttcttgctcctccttgtcttagcttctgatgtgacggtgaagagagcagaggcgaaagattgcttgacaaggaggcacgggttccagggtagatgcttattcgacaggcaatgtgcacatgtgtgcaggagcgatggtttcatcggtggtcagtgccgaggccctcttcgcaaatgcttttgcagcaggccatgttgatcgaaattactactgccaaagagg

SEQ ID NO: 108141 - DNA, 278 bp, Glycine max
gttcaatatcctagtacaccgtattaaagaatttaagatatactatgatgagagcgcggttcccattactgttgctgggagttgttttcctggcatcagtttctgtctcatttggcattgcgtattgggaaaagcagaaccccagtcacaacaagtgcctccgaagttgcaatagcgagaaagactcctacaggaaccaagcatgccacgctcgttgcaacctccttaaggtggaggaagaagaagaatgcgaagaaggtcaaattccacgaccacga

SEQ ID NO: 108142 - DNA, 280 bp, Glycine max
gggaaccaagagcaagagtttctaaaatatcagcagcagcagcaaggaggttcccaaagccagaaaggaaagcaacaagaagaagaaaacgaaggaagcaacatattgagtggcttcgcccctgaattcttgaaagaagcgttcggcgtgaacatgcagatagtgagaaacctacaaggtgagaacgaagaggaggatagtggagccattgtgacagtgaaaggaggtctaagagtcacagctccagccatgaggaagccacagcaagaagaagatgatg

SEQ ID NO: 108143 - DNA, 178 bp, Glycine max
ctctctccattggtccttaaacactcatcagtcatcaccatggccaagctagttttttccctttgttttctgcttttcagtggctgctgcttcgctttcagttccagagagcagcctcagcaaaacgagtgccagatccaaaaactcaatgccctcaaaccggataaccgtatagagt

SEQ ID NO: 108144 - DNA, 273 bp, Glycine max
  unsure (1)..(273): unsure at all n locations
atcacacttatacaaaattctccaattagtaacttgttgagagttgctgcttggaagaaaggctgtttaatggtcaagattgtgatgtctgggaatgcagcagtcaaaaggagtgattgggcctcattggtacaagtgtttttaacaaacagcaacagtacagagcattttgatgcatgtaagtggacaaaatcagaaccacattcctgggaattgatcttcccaatagaggtatgtggtcctaataatggttttgaaatgtggangttctga

SEQ ID NO: 108145 - DNA, 271 bp, Glycine max
catcatgttggtgcctcagcagctgacactggagactcatctctgcagttgtcaagagctgctagcattgttatggtgattgcatattgtgcttaccttgtcttccaactgtggactcacaggcagctatttgaagcccagaatgaagatgatgaagagggtggcagtgattcagaagcagtgataggattctggagtgggtttacttggctggttgggatgactatgaccattgctttgttgtctgaatatgtggtgcaaacattgaggt

SEQ ID NO: 108146 - DNA, 199 bp, Glycine max
ctcggtattctgctcgagctttatgattatttggtgaagaaaaagttgcacaacactgctaaagcattcatgacagaagggaaggtttctcctgatccagtagcaattgatgctcctggaggttttctttttgagtggtggtctgttttctgggatattttcattgtgatgacagatgagaaacattctgatactgctg

SEQ ID NO: 108147 - DNA, 278 bp, Glycine max
cagatggtgaacaagtcctcaagtttccaccacctcatgtcattcaagtgagtaagtctgcatggatgaccgatgaagaatttgcaagagagatggttgcgggtgtaaatccatgcgtaattcgtggtcttcaagagtttcctccaaaaagcaatctggatcctacaatctatggtgagcataccagtaagataacagcagatgcccttgatctagatggatacacagtggacgaggcactagcaagtcggaggttatttatgttagattaccatgat

SEQ ID NO: 108148 - DNA, 280 bp, Glycine max
  unsure (1)..(280): unsure at all n locations
ctcgagcgattcggctcagagcaaagcaatggctacttagctaagttgaaacccagcatgtggttgtatctcactccctaaccttaaccttggtaatggtgctaatgaacaacaagggcaaacttcagcggaaacctgttcctttcagctgggaacagttcgtgccgaagcaaccanacatgatcctccaaggagacgctattgtgacctcctcgggaaagttacaactcaataaggttgacgaaaacggcaccccaaaaccctcgtctcttggtcgcgc

SEQ ID NO: 108149 - DNA, 272 bp, Glycine max
agcgccttcttcactctctctctttcttccctttgcttgctactcttgtcgagtgcatgctttgctattacctccagcaagttcaacgagtgccaactcaacaacctcaacgcgttggaacccgaccaccgcgttgagtccgaaggtggtcttattgaaacatggaactctcaacaccctgagctgcaatgcgccgctgtcactgtttccaaacgcaccctcaaccgcaacggctccacttgccatcttactcaccttatccccaaatgatc

SEQ ID NO: 108150 - DNA, 275 bp, Glycine max
atactatgatgagagtgcggtttcctttgttggtgttgctgggaactgttttcctggcatcagtttgtgtctcattaaaggtgagagaggatgagaataaccctttctacttgagaagctctaacagcttccaaactctctttgagaaccaaaacggtcgcattcgtctcctccagagattcaacaaacgctccccacaacttgagaaccttcgagactaccggattgtccagtttcagtcaaaacccaacacaatccttctcccccaccatgct

SEQ ID NO: 108151 - DNA, 272 bp, Glycine max
ggattctcttctttattccttttgtaatttcattcattcttaatctttgtgaaaaataatgttcatcgagaattttaaggttgagtgtcctaatgtgaagtacaccgagactgagattcagtccgtgtacaactacgaaaccaccgaacttgttcacgagaacaggaatggcacctatcagtggattgtcaaacccaaatctgtcaaatacgaatttaaaaccaacatccatgttcctaaattaggggtaatgcttgtgggttggggtggaa

SEQ ID NO: 108152 - DNA, 252 bp, Glycine max
aagtttcgcctttgttgattttagtgatcctcgagatgctgatgatgcaagatataacttggatggtcgggatgttgatggaagtcgtattattgtggaatttgcaaaaggggctcctcgtgggtcccgggaatatttggggcgaggtcctcctcctggctctggacgctgctttaattgtggccttgttggtcattgggcacgggattgcaaagctggggattggaagaataagtgttaccgctgtgggaa

SEQ ID NO: 108153 - DNA, 272 bp, Glycine max
ctatataagatataggatatgaacatgtgtccgaggtgcaagttctgaagattagagtctatctgcagggatggctgctagtatagatgacatccaatcgaaggttgcacaagatatggttgaggaatggttcgattgtgttgatgaggaggattcctttgaggaagtttctttaagtgcagcacttaatggtgttgagggtttggactatatggaaagaattcctcttgccacatctgagggattcctcatgtgctttcacgcaaaaatgg

SEQ ID NO: 108154 - DNA, 172 bp, Glycine max
gagaacaccattgaattttgattctagcaagcagagcttttgtcagttttctattgaccttctcggtggaggaatcttagtggacaaaactggagattggatcacacttatacaaaattctccaattagtaacttgttgagagttgctgcttggaagaaaggctgtttaatg

SEQ ID NO: 108155 - DNA, 278 bp, Glycine max
attagatctgctgttttaaatcctgagttgcctcagaattctcgcctccatattcttgaggaattcaatgcgggcctgtttgattatctaattgcaacagatcttagccagatcaaaggaaaaggatgaagtgcctaaggaaagtaatgttggatcatggaagtctaggcaacatgctaagataaaattagattctgaatttggagttgtaaggggaattgactttaaaaatgtatacacggttataaactttgaaatgcctgaacatgtagcgggat

SEQ ID NO: 108156 - DNA, 275 bp, Glycine max
cttaaacactcatcagtcatcaccatggccaagctagtttactccctttgttctctgcttttcagtggctgctcgttcgctttcagttccagagagcagcctcagcaaaacgagtgccagatccaaaaactcaatgccctcaaaccggataaccgtatagagtcagaaggagggctcattgagacatggaaccctaacaacaagccattccagtgtgccggtgttgccctctctcgctgcaccctcaaccgcaacgcccttcgtagaccttccta

SEQ ID NO: 108157 - DNA, 270 bp, Glycine max
agggttttagcgcagttcttctagatttaaggaagatgggtaaggaaaaggttcacatcagtattgtggttattggccatgttgactctgggaagtccactaccactggccacctgatctacaagcttggaggcattgacaagcgtgttattgagagatttgagaaggaagctgctgagatgaacaagaggtctttcaagtatgcctgggtgcttgataagcttaaggctgagcgtgaaagaggaatcacaattgatattgccttgtgga

SEQ ID NO: 108158 - DNA, 274 bp, Glycine max
gagaaaggggtggtgtagagtctgacatagatgattatgatcactcgagtggtaagggcgtagacactacagctgctcaagccagaagaggacaggatatccaaggaattcctttggatagccttaatctcactagagatagatatcggcaaactaggcttgcgcaatacaagaattatgaaaatatccctggttccagggacaagtcggggaaggattgtcagaataccaaaaaaggatactccttttatgacttcagaaaaaattcaagatc

SEQ ID NO: 108159 - DNA, 175 bp, Glycine max
ctagaacaaaggacaacaatcttctcgggaagttcgagcttacagggatccctccagcaccaagaggagtgcctcagatcaatgtctgcttcgacatcgacgctaacgggattctgaatgtctctgcagaggataagactgctggtgtgaagaacaagatcacgatcacaaacga

SEQ ID NO: 108160 - DNA, 272 bp, Glycine max
ctttgaacactcatcaccatggccaagcttgttcttaccctatgtttccttcttttcagtggctgcttcgctctgagagagcaggcacagcaaaatgagtgccagatccaaaagctgaatgccctcaaaccggataaccgtatagagtcggaaggtgggttcattgagacctggaaccctaacaacaagccattccagtgtgccggtgttgccctctctcgctgcacccttaaccgcaatgcccttcgtagaccttcctacaccaacggtcc

SEQ ID NO: 108161 - DNA, 274 bp, Glycine max
gaataagtacagtagaattcgacagtgtccggcgaggaggcggaggcgaatatgaggaagaagttcggcacccgattccccgcggctcgtatcaatcagataatgcaagcagatgaggatgttggacagattgcactagcagttcctgttttagtttcgaggtctcttgaattgtttttacaagatctaattgaccgtacttatgaaattactcttcaaagtggagcaaagacactgaattccttccacctgaagcactgtgtgaagaggcaca

SEQ ID NO: 108162 - DNA, 270 bp, Glycine max
catcgatctacacacatacatagtttcttctactacacgacgccaaacatggggaagcctgcgaagatcggagagtcgggtggatacgccggcgatcgtcgggatctgagggctactccggaccggctgatcgaggtgaaggtcacggcggacaacagcagctgcatccgctccatctccttcatctacatcggagccgatggcaaaccgtacgaggaggggccatggggtttcggccatgctggcacggagtacaagattgatctgtgc

SEQ ID NO: 108163 - DNA, 269 bp, Glycine max
cttgttttcaatgatgatatccaaggcaagaaagaaaaaccttgcaggtttgttagcagcactcaagatggttagtgggaccctggcagagatgacttatttgttccttggtgctggggaggctggaactggtattgcagaacttattgctcttgagatttcgaaacagacgaatgctccaattgaagagtgccgcaagttggtttggctggtggactcaaagggtttgattgttgatctcgtaaaggctcacttcagccattcaagaa

SEQ ID NO: 108164 - DNA, 272 bp, Glycine max
tttgttctgtatcaggcaatttctgttcggacaagaaagccgcagccgtgaattggattgaagggcgtggcaagtctgtggtgtgtgaggccataattaaggaggatgttgtgaagaaggtgttgaaaaccagtgtggaggccctggtcgaacttaatatgctcaaaaaccttacgggctcagccatggctggtgctcttggtggcgtcaattgtccatgctagcaatattgtgtctgctatctacattgccactggtcaggatcctgccca

SEQ ID NO: 108165 - DNA, 272 bp, Glycine max
gaatcttagtggacaaaactggagattggatcacacttatacaaaattctccaattagtaacttgttgagagttgctgcttggaagaaaggctgtttaatggtcaagattgtgatgtctgggaatgcagcagtcaaaaggagtgattgggcctccattggtacaagtgtttttaacaaacagcaacagtacagagcattttgatgcatgtaagtggacaaaatcagaaccacattcctgggaattgatcttcccaatagaggtatgtggtct

SEQ ID NO: 108166 - DNA, 271 bp, Glycine max
cttggaactttgttactctcacacatgtctcgctccgtgcctttggtttcaatcatttttgtcttgcttctgcttctggtggccactgagatgatggggccaacaatggtggcagaagcaagaacttgtgagtctcagagccaccgtttcaaggggccatgtttgagtgacaccaactgtggctctgtttgccgaaccgaacgtttcactggaggacactgccgtggcttccgtcgcagatgcttctgcaccaaacattgttaattttaaa

SEQ ID NO: 108167 - DNA, 272 bp, Glycine max
gttagcaaaaatcaatagcttcgattattcatgatctggtatgaagtatgaactgtttgactaaaccatacttttgcagattactgatgaaggtggtggaataccaaggagtggtctctcaagaatttttacgtatctctatagtacagcagaaaaccctcctgatcttgatgtacataatgaaggagtaactatggctggatatggttatgggattcctattagtcgtctttatgctcgatatttcggcggggacttgcagatcatctcta

SEQ ID NO: 108168 - DNA, 118 bp, Glycine max
attgaccttctcggtggaggaattttagtggacaaaactggagattggatcacacttatacaaaattctccaattagtaacttgttgagagttgctgcttggaagaaaggctgtttaa

SEQ ID NO: 108169 - DNA, 270 bp, Glycine max
gatcaagaaaaacccaaaaagattgatgccagattgagacaaagaatagatcctcaatacaatgaggttcaggctcagatggaaacaaatttgtttaaattgtctcttgatgatgttgaaactcctaaaggttccatgttggatcttaaaatttctcaatctaaaattgcacttcccaaaaacacagttggaggaaccattctgcgtagtgacctattggcacctttgttgacagagggcaattttagagcaagtgttgatttgcagcgc

SEQ ID NO: 108170 - DNA, 269 bp, Glycine max
gttctgagtgggcaaatcaaacttcatggcatttgagtttccttattgacaatcccaaacagtctacagtttttgatattctcttgggaatttctcaagattttgagattgctggtaatactcttatgccagctttttctgttccacaggctactgccagatcttctgaaaatgcggaatcctctgcatgatctggaatttgtgtttccttttgcttgttcgttggtttaattcattaaaggaaattaggcttgaccctcttgttgagt

SEQ ID NO: 108171 - DNA, 261 bp, Glycine max
cacttattaacactttccttagttcaatatggggaagcccttcttcactctctctctttcttccctttgcttgctactcttgtcgagtgcatgctttgctattacctccagcaagttcacagagtgccaactcaacaacctcaacgcgttggaacccgatcaccgcgttgagtccgaagtggtcttattgaaacatggaactctcaacaccctgagctgcaatgcgccggtgtcactgtttccaaacgcagcctcaaccgc

SEQ ID NO: 108172 - DNA, 265 bp, Glycine max
gcgatactgataagagagataccaacaagaaaagaaaaaaagaagagttgagattccctttgaagaaaagatggcatcccataggcaaagctatgaagctggtcaaactaagggccgaactgaggaaaagacgaaccagacgatgggcaatattggagagaaggctcaagctgcaaaggagaagacccaggaaatggcccaagctgcaaaggagaagacccaacaaacagcccaagctgccaaggacaagacttgcgacattccc

SEQ ID NO: 108173 - DNA, 263 bp, Glycine max
gaagtttttaaactttgtgaggttcattatgaagactagggacaagcttagttgtcaagttggaatcaacccatattctatggactggactggtttggccaatagattactgagtaagggcaacgatattctgtgttgcgattatgctagttttgatggtttgattaccaagcaagttatgagcaagatggcagaaatgatcaacagtctttgtggtggtgatgaaaaactgatgcgtgaaaggacaccctgctgttggcttg

SEQ ID NO: 108174 - DNA, 271 bp, Glycine max
tgtgagcaacactactcatccaaaacataccaagcacccttctgccactccacccaatgctccagagccaacactcaccaatgcctcagttgcccagcggcatcaaggccagggtgccacaaaaacacgtgtggcctcatgtccaccaaccccatcacccaacaaaccggtttgggtgaactaggccaagatgtgcttgcaatccacgccactcaaggctccacccaacaacttggtccattggtcacagtccctcagttcctcttttctt

SEQ ID NO: 108175 - DNA, 270 bp, Glycine max
tgtgattttgtcattggtgttaagttgacaaccataaacaatatgtgtgcatatgggctcaatcctggtatttcaggttctcgtcttttgggcaccattcctcagtccatttcacagcaaactgtttggaatcaaatggcaacagtgagaacaccattgaattttgattctagcaagcagagcttttgtcaattctctattgatcttcttggtggaggaattttagtggacaaaactggagattggatcacacttatacaaaattctcca

SEQ ID NO: 108176 - DNA, 268 bp, Glycine max
tctggtttgcaaaaagacagagggttaattgtggaatattttggaaggatgtcttacgttgctcataacgttaatcagccccaagagaaagatttgttggagggaaatttttcctttgatattaaatctcgctctagattggaaaaagtttcctctacaaaagcacaatttgttagtggaaaaaccttcaaatatgatataattggtgctggttcacattcttcagatgattttcctgaaaaggaagatcaagaaaaacccaaaaaga

SEQ ID NO: 108177 - DNA, 214 bp, Glycine max
gaatccggtcgaagctctgagatgtttgatctgcacaatgttgtcatatctatacctctgcctggaattcgggaagctccaagtgtcagacagatagatggagagtggaagttggactccagaaactctgtgttggaatggtccattctccttattgatcagtcggatcgcagtggttccatggacatttcctgttcccccagctgatccgtca

SEQ ID NO: 108178 - DNA, 249 bp, Glycine max
aaacagtaaagctaacttcaacacctttaattttctaaaagtaattcagcggctgaataccaagcggagaagatgagtcaggagcagccacggcgtcccaaaggccaaaaccccatcaaatacggcgacgtttttgtcgtctccggcgaccttgcacagaagcccgtcgcaccggaagatgctgccatgatgcaaagcgcggaaactcgagtgctcggacaaacccaacccggcggacagcttccgtca

SEQ ID NO: 108179 - DNA, 137 bp, Glycine max
cttgtctttgaacactcatcaccatggccaagcttgttctttccctttgtttccttcttttcagtggctgcttcgctctgagagagcaggcacagcaaaatgagtgccagatccaaaagctgaatgccctcaaaccg

SEQ ID NO: 108180 - DNA, 250 bp, Glycine max
aaaaagtttgctgcgccctgatttccatgtctcggcccaaaattgttgggtccgcaaaggtggtgctaatatgggagaggtaagtgctgaaatgctggtaaatttgggaatcctcttgggtattattggtcacctgaacggaggcagtttttgaatgaatcaatgagtttgtgggagataagttgctatgcacttcaacaggtctgaagttatagctgcatggggaactcttgaacacgtaacggtacac

SEQ ID NO: 108181 - DNA, 270 bp, Glycine max
  unsure (1)..(270): unsure at all n locations
cctagtataccttgatagcttctagctgctcatacgcttaatttcccgatctcataaacaatacaaaaaaccaaaaacctggcttcagtttctgtctcatttggcattgcttactcggaaaaagagatccccaaacacaacaagtgtctccacagttgcaatgnngagagagactcgtacaggaaccaagcatgccacgctcgttgcaacctccttaaggtggagcaagaagaatgtgaagaaggtgaaattccacgaccacgaccacga

SEQ ID NO: 108182 - DNA, 266 bp, Glycine max
ctcgagcgttcacgagaacattgctcgcccttcacgcgctgacttctacaaccctaacgctggtcgcattagtaccctcaacagcctcaccctcccagccctccgccaattccaactcagtgcccaatatgttgtcctctacaagaatggaatttactctccacattggaatctgaatgcaaacagtgtgatctatgtgactcgaggacaaggaaaggttagagttgtgaactgccaagggaatgcagtgttcgacggtgagctta

SEQ ID NO: 108183 - DNA, 190 bp, Glycine max
gcctggtagatttgagagtttcttccaatctagcatggaagttcaacaatcctacttgcaaggattcagcaggaacatttaaaaggcttctaacattacaaaatccaagagattaaccaaggtcctgttaattaaagaggaagggcaccaccaagggaaccgaagctgccagagaacgtgattgtggaaa

SEQ ID NO: 108184 - DNA, 266 bp, Glycine max
ctaccggattgtccagtttcagtcaaaacccaacacaatccttctcccccaccatgctgacgccgatttcctcctctttgtccttagcgggagagccatacttaccttggtgaacaacgacgacagagactcctacaaccttcaccctggcgatgcccagagaatcccagctggaaccacttactatttggttaaccctcacgaccaccagaatctcaaaataatcaaacttgccatacccgtcaacaaacctggcagatatgatg

SEQ ID NO: 108185 - DNA, 299 bp, Glycine max
gtattgtcgcagagaaagaaaaccctagctcaccgtttcaagatgcaaatcttcgttaagaccctcactggtaagaccatcactctcgaagtcgagagttcagataccatagacaatgtaaaggccaaaattcaagacaaggaagggatcccaccagatcagcaacggctcatttttgctggcaagcagcttgaggatggacgtacccttgctgattataacatccaaaaggagtccactctccacttggttcttcgtctccgtggtgggatgcaatctttgttaagaccttgacggga

SEQ ID NO: 108186 - DNA, 295 bp, Glycine max
aaaatccttttgtgttaaataggtggatggggaaactgactttcccccagggcacttcccgaaatgttaagagaatgcctctttctatagggggaggagctggtgcaaagaatgctattctcatgaatatgccaaatgctgttctttcaatgtggagatattttgttggagatctcgtctttgaagtttctaagatgacttctccctacattaaatgtacagtctctttcttcatagcatttggaaatttggctgatgacaccatcaattttgaggcttttcgccacaagctggt

SEQ ID NO: 108187 - DNA, 294 bp, Glycine max
caaccaattcacatcactgaaggaaattatgtcagaaagcaagatgtcagcattgaatatgatgcatgtacaattccaaatgattgtggttcattggttgttgccaaggttggaaatcacaaacaaattgttggtttccatgttgctggaagcaaaggaagactgggatatgcttcattgataccatatgttgagccagttgtgcaagctcaaagtgctgaagtttactttgacttcttccctgtggaggttgatagtcaagagggagttgctcacattggtgaattgaaatct

SEQ ID NO: 108188 - DNA, 289 bp, Glycine max
attcttcagaagatttttctgaaaaggaagatcaagaaaaacccaaaaagattgatgccagattgagacaaagaatagatcctcaatacaatgaggttcaggctcagatggaaacaaatttgtttaaattgtctcttgatgatgttgaaactcctaaaggttccatgttggatcttaaaatttctcaatctaaaattgcacttcccaaaaacacagttggaggaaccattctgcgtagtgacctattggcaaattttttgacagagggcaattttagagcaagtgttga

SEQ ID NO: 108189 - DNA, 290 bp, Glycine max
gagcgaatcggctcgagccgagaacaaaaaaaaaaacgtagttcgctcttctcttgcgcataaaccacaataccaagtaacgagaagaggagtgagagaagatggggttgtcgttcacgaagctgttcagcaggttgtttgcgaagaaggaaatgaggattctgatggtaggtctcgatgctgctggtaagacaaccatcttgtacaagctcaagcttggagaaatcgtcaccaccatccccaccatcggatttaatgttgagactgtggagtacaagaacatcagcttc

SEQ ID NO: 108190 - DNA, 294 bp, Glycine max
gttgggatctccatacgccggatctgctaaaatacgcttgatccatatgggcctcctcgaccacttgtgggacgacaccgtcgccggcccaaggccggaaaacggtctcggcaagctccgaaaacaccacaccttcactttccgacctagctccggcaaggaaacggagggcgggagcgtgagatcgtacggagacgaatcgtaggaggaagcgacgagagtgacgcgtagtatcatgatcgtgaaaccgcccgggtaccagagtggatcgcctccggtttctcccgccggttc

SEQ ID NO: 108191 - DNA, 297 bp, Glycine max
cttgactacaactgatgagagattggtaggcacagaacatgagggctatgatccttttcttggtggaattcaaaaatatgccactcccatgatgcccctagatgaagaaattctttctaaagttgcacaagatatggttgaggaatggtttgattgtgttgatgaggaggattcctttgaggaagtttctttaagtgcagcacttaatggtgttgagggtttggactatatggaaagaattcctcttgccacatctgagggttttcctcatgtgctttcacgcaaaaatggtgaaaa

SEQ ID NO: 108192 - DNA, 288 bp, Glycine max
aggcgaaagactttaggtttggaattgggaattagggttgttcgcgtcacgaagatgatcgaggtggtgttgaacgatcgattggggaagaaggtgcgcgtgaagtgcaacgacgatgacaccatcggcgacctgaagaagctggtggcggctcagacgggcacaagagccgacaagatccgcatccagaagtggtacaccatatacaaggatcacatcactctcaaggattacgagatccacgacggcatgggtctcgaactctactacaactaaacacaaggtgtg

SEQ ID NO: 108193 - DNA, 291 bp, Glycine max
gagaacccaccttttgttgtattgcagatccatccgctctgccaccaggtgaatggaaggaagtggcggtggcggtgcttcaccgtctgcaccggtgaagcagtatttgcacgatttctcgaagctgtttcagtactatctggataaatccactccacattccacgtacacatggattgggactttcgtgatagcatccatctacgttttgcgcgttgtttatatgtcgggtttttacattgtctcttatggactcggaatctaccttctgaatctcttgattggttttct

SEQ ID NO: 108194 - DNA, 291 bp, Glycine max
tattatcattctcatatctctatttttctttattaatatttactttataatctctcttctctttctttttaatttcaaatcattcattttaaaaaacaaacaaacaaacaaataaataaataaataaataaataataatggctactaatattgctatcggtattgatcttggtacaacttattcttgcgttggagtgtggcaaaatgatcgtgttgaaatcattgctaacgatcaaggaaatagaaccactccttcctatgttgctttcactgacactgaacgtttgattg

SEQ ID NO: 108195 - DNA, 291 bp, Glycine max
gacttctccttatattaaatgtacagtctctttcttcatagcatttggaaatttggctgatgacaccatcaattttgaggcctttccccacaagctggtgcagtttggagagattcaggaaaaagttgtattgaaattttcacaagaggaatttcttacagcttggtcaactcaggtgcgtcctgcaacaactctgttggctgatgggtgtccatatttgtatgctatggtgcatgatagttcagtgtctacaataccaggtgattttgtcattggtgttaagttgacaac

SEQ ID NO: 108196 - DNA, 290 bp, Glycine max
agcagttctgatatttacaccatctgctctcaagactgtgaattatggaatcctgcttgcacaaaagcaatgactatgtcatttaatccaaacccgtgttctgatgcatggagtttggaatttctgaagcgtaccggatttcattgtgatatcatttgtgtcactggatggactgccactccaatgcaggatgttcaggttacaattgattggtttatttcctctcaggaatgtgttcccaggacttattgtgagttaaatccacaaaatccttttgtgttgaataggtg

SEQ ID NO: 108197 - DNA, 287 bp, Glycine max
ttcgcaagtcatgactgcaacatagttggtgcaatgcttttggttgatacttatcataccaatcctgaaaatgcagttcgtagtatttttgttgcgcctttcagaggcggaaggcccattcgggtggttacatttccgaataccatcgtgcagattgaaccagacatgaattcaaggtttcagcttttgagtaccactaccaatggtgattttgttcaaggaaaagatctcgcaatggttaaagttaatgtagcatgtgctgctgttggcttgacatcaagttacac

SEQ ID NO: 108198 - DNA, 288 bp, Glycine max
tattgacaaactagtgcaactttgcaatttagaaagttagcagattgtgattttcttaagagaaactttaagcagatgtctaatgttttgtgggtggctcctgaggacaaggcacgtttatggtcacaacttcattatgtttcgtgtaataatctggaaatgcaagaagcttatcttgtcaatctcgtaaatgtgttacgagaattgtatctgcacagtccagaggaagctcgccaactgagaaggaaagctctctctcgtattgaatggctgcaaaaagctgatgtg

SEQ ID NO: 108199 - DNA, 291 bp, Glycine max
aaactgcttaaatcagaattggaagcaatgcgtgattgtgatcctttatctgctcgtcactggattgttaggaacacaaggactgtaaaccgaactgggcatctaactggttacaagctagtacctggctcaaattgtttacctttagctggctcagaggctaagtttttgagaagagcagctttcttgaaacacaacctttgggttactccttatgcccgtgatgaaatgcatcctggaggagagttccctaatcaaaatccgcgcgttggagagggtttggctacttgg

SEQ ID NO: 108200 - DNA, 291 bp, Glycine max
gaagatattcgttatgtggttggatttggtgacttatttgcaccatcatggccatgaagacaaattaccttggtaccgtggaaaggtatccttcattctttaaagtctttcttatgaaaaggactggtctatttgtgtcttgacatacttttgttatgtgtatgagtttaattttcatgcattgttagtgtattttttttatattgttaatcaattaaaaatcatcattgatatgacttgtaaaagtcaataaacatatcatacatggttgaatgataatgccaatacata

SEQ ID NO: 108201 - DNA, 295 bp, Glycine max
gccgcaccttaaaaccggaaacaaaagcaatcgttacttgatttcaagaatctctcaatttcttcctacttctttgtgtacgatttcttaagggaaagaaaatcactctctgtgctggccacagacttcgtgaatcattttcttttccactcttagtttattttctgaacactctcctatttgatataggacttcgtgtcagatttaaacttcttctgtttctttctcagttctctgtttaatttcaagttcaagctggtgaaatcttggattagtgctcccactttcctatctg

SEQ ID NO: 108202 - DNA, 290 bp, Glycine max
ggaatgtgttcccaggacctattgtgttttaaatccacaaaatccttttgtgttaaataggtggatggggaaactgactttcccccagggcacttcccgaagtgttaaaagaatgcctctttctatagggggaggagctggtgcaaagaatgctattctcatgaatatgccaaatgctgttctttcaatgtggagatattttgttggagatctcgtctttgaagtttctaagatgacttctccctacattaaatgtacagtctctttcttcatagcatttggaaatttgg

SEQ ID NO: 108203 - DNA, 290 bp, Glycine max
cttaattagtgttcatcaccatacacacacaaagatacaaaactgctgaaggattgtaaaaacatacttggagctttagcctggcgcagtaatttttttacaatccttcaaaaattttgtttctttgtgtgtgtatggtgatgataacttaattagtgttcatgaatatgtcaagccttactttagtggttctaaattgaaaagctttctagctggtcatgccatcaccattactgatggtattgacaaaactagtgcaactttgcaatttagaaagttagcagattgtg

SEQ ID NO: 108204 - DNA, 287 bp, Glycine max
ggacacacctgctgttggcttgttgttcaaggatggcaatttgtaagaaagatgtttggagagttgaatgtggaatcccttctggatttccgctcacagttatttgcaatagcatttttaatgagatgctcattagatatagctatgaaaaattactgcgccaggctaaagctcatcgtatgtttttacaatctttcaaaaattttgtttctttgtgtgtgtatggtgatgataacttaattagtgttcatgaatatgtcaagcttactttagtggttctaaattga

SEQ ID NO: 108205 - DNA, 286 bp, Glycine max
ctactgcaatgcatgttggagctatagaaattatcattgatagtttcgcaagtcctgactgcaacatagttggtgcaatgcttttggttgatacttatcataccaatcctgaaaatgcagttcgtagtatttttgttgcacctttcagaggtggaaggcccattcgggtggttacatttccgaataccattgtgcagattgaaccagacatgaattcaaggtttcagcttttgagtaccactaccaatggtgattttgttcaaggaaaagatctcgcaatggttaa

SEQ ID NO: 108206 - DNA, 291 bp, Glycine max
acgccgtctccgatctccgacaatggcgacccaaatgagcaagaagagaaagttcgtagctgatggagtgttcttcgctgaactgaacgaggttctgacaagagagttggccgaggacggttactccggcgtggaagttagggttacgccgatgcgcaccgaaatcataattagagccaccagaacccaagctgttctcggtgagaagggaaggagaataagggaacttacctctgtggttcagaagaggttcaagtttcccgagaacagtgtcgaactttatgctgaaaa

SEQ ID NO: 108207 - DNA, 277 bp, Glycine max
gggttttcctcatgtgctttcacgcaaaaatggtgaaaaaggcaaaagaagatttgtttctggggatggtgaagagatgacattgattccgggaaccagtgttgaagaggcttacaacaagctaatagttgaacttgagaaaagtgttcctacattggttggcattgaatgtcccaaggatgagaaacttcctcgtcgcaaaatttttgacaaacctaagacgcgctgcttcactattctccctatggagtttaatcttgtggtccgtcaaaagttt

SEQ ID NO: 108208 - DNA, 283 bp, Glycine max
tgaaaaggaagatcaagaaaaacccaaaaagattgataccagattgagacaaagaatagatcctcaatacaatgaggttcaggctcagatggaaacaaatttgtttaaattgtctcttgatgatgttgaaactcctaaaggttccatgttggatcttaaaatttctcaatctaaaattgcacttcccaaaaacacagttggaggaaccattctgcgtagtgatctattggcaattttttgacagagggcaattttagagcagtgttgatttgcagcgcactca

SEQ ID NO: 108209 - DNA, 286 bp, Glycine max
atcaaatggcaacagtgagaacaccattgaattttgattctagcaagcagagcttttgtcaattttctattgaccttctcggtggaggaattttagtggacaaaactggagattggatcacacttatacaaaattctccaattagtaacttgttgagagttgctgcttggaagaaaggctgtttaatggttaagattgtgatgtctgggaatgcagcagtcaaaaggagtgattgggcctcattggtacaagtgtttttaacaaacagcaacagtacagagcattt

SEQ ID NO: 108210 - DNA, 289 bp, Glycine max
gttgaggaatggtttgattgtgttgatgaggaggattcctttgaggaagtttctttaagtgcagcacttaatggtgttgagggtttggactatatggaaagaattcctcttgccacatctgagggttttcctcatgtgctttcacgcaaaaatggtgaaaaaggcaaaagaagatttgtttctggggatggtgaagagatgacattgattccgggaaccagtgttgaagaggcttacaacaagctaatagttgaacttgagaaaagtgttcctacattggttggcattg

SEQ ID NO: 108211 - DNA, 281 bp, Glycine max
tagatgaagaaattctttctaaggttgcacaagatatggttgaggaatggtttgattgtgttgatgaggaggattcctttgaggaagtttctttgagtgcagcactcaatggtgttgagggtttggactatatggaaagaattcctcttgccacatctgagggttttccccatgtgctttcacgcaaaaatggtgaaaaaggcaaaaggagatttgtttctggggatggtgaagagatgacattgattccgggaaccagtgttgaagaggcttacaataag

SEQ ID NO: 108212 - DNA, 292 bp, Glycine max
gcgacgctgttcttgaggactgaaatgcaccggaataacgaagatgatgctgcactttacattggtgcaattttgttcactatgatcatgaacatgtttaatggttttgctgagctagcactcacaattggaaggcttcccgtgttttacaagcacagagaccaccttttccaccctgcttggacttaccaccctccccaatttcttgttgcgtattcccatttctgtgtttgagtctcttgtttgggttggtgtcacctactacatcataggatttgctcctgatgccagc

SEQ ID NO: 108213 - DNA, 289 bp, Glycine max
ggttgatagtcaagagggagttgctcacattggtgaattgaaatctggtgtctatgttccactgcctacaaaaactaatttggtggaaactcccaaggaatggcaactggatctaccttgtgacaaaattcctagtgtcttgactacaactgatgagagattggtaggcacagaacatgagggatatgatccttttcttggtggaattcaaaaatatgccactcccatgatgcccctagatgaagaaattctttctaaggttgcacaagatatggttgagcgatggttt

SEQ ID NO: 108214 - DNA, 282 bp, Glycine max
ccgaatcttgttaaaaagaagaaggatgtcaagcggacaacacactggtgtcatgcatgcagacagccagttgtgcttgatgggagagatgctgtttgcccttactgcgatggaggatttgtacaagaacttgatgagttggaaggaattgcaccccaccataccttttgctcacaatcaggagagttccatcaaatgcctgacattttcgatgctatacctgcttttatgggacagaggggttctgaccagagatccaggcttatggatgatgctgttgat

SEQ ID NO: 108215 - DNA, 287 bp, Glycine max
gcagaacaaagcagaagagatgatctagaatctctcggatatttgctcatgtattttttgagaggaagtctcccatggcaaggcttgagagctggcactaaaaagcaaaaatatgacaagataagtgagaagaagatgcttactccaatagaggtcttatgcaagtcatatccattggagtttacatcatacttccactactgccgaacgttgcggtttgaagataagcctgattattcttatcttaagagactatttcgggacctattcatccgagaaggttatca

SEQ ID NO: 108216 - DNA, 284 bp, Glycine max
gctgaggataaggagatgtctacctctgtcatcaatgggaatgattccctaactggacacatcatatctacaactattggaggcaaaaatggggaaccaaacagactattagttacatggcagaacgggttgtaggaactggatcatttggaattgttttccaggcaaaatgcttggaaactggggaggcagtggcaattaaaaaggttttacaagacagaagatacaagaatcgtgaactacagttaatgcgtgtgatggatcatccaaatgtgatctctttg

SEQ ID NO: 108217 - DNA, 284 bp, Glycine max
attttgataaaccgcgatcacaggttgccgcaccttaaaaccggaaacaaaagcaatcgttacttgatttcaagaatctctcaatttcttcctacttctttgtgtacggtttcttaagggaaagaaaatcactctctgtgctggccacagacttcgtgaatcattttcttttccactcttagtttatttgctgaacactctcctatttgatataggacttcgtgtcagatttaaacttcttctgtctctttctcagttctctgtttaatttcaagttcaagctg

SEQ ID NO: 108218 - DNA, 283 bp, Glycine max
gcgtagatctgaaatgtatgtggtggagagcaaggtgggcgccatagggtgcatgctggtgtccctcttcttcctcgggacatggcctgctgtcatgactctgctagaaaggcgcggtcgtcttcctcaacacacctaccttgattacaccctcaccaacctcatggctgctgttatcattgctttcacctttggtcagattggcaacgctcaacccaacttcttgtctcagctttctcaggataactggccttctgttctgtttgccatggggggtggagtg

SEQ ID NO: 108219 - DNA, 286 bp, Glycine max
cggctcgaggttttgatggtttgattaccaagcaagttatgagcaagatggcagaaatgataaccagtctttgtggtggtgatgaaaaattgatgcgtgaaaggacacacctgctgttggcttgttgttcaagaatggcaatttgtaagaaagatgtttggagagttgaatgtggaatcccttctggatttccgctcacagttatttgtaatagcatttttaatgagatgctcattagatatagctatgaaaaattactgcgccaggctaaagctccaagtatgtt

SEQ ID NO: 108220 - DNA, 287 bp, Glycine max
attttgtttctttgtgtgtgtatggtgatgataacttaattagtgttcatgaatatgtcaagccttactttagtggttctaaattgaaaagctttctagctggtcataatatcaccattactgatggtattgacaaaactagtgcaactttgcaatttagaaagttagcagattgcgattttctcaagagaaactttaagcagatgtctaatgttttgtgggtggctcctgaggacaaggcgagtttatggtcacaacttcattatgtttcgtgtaataatctggaa

SEQ ID NO: 108221 - DNA, 289 bp, Glycine max
cttcttttgggaaaagattaacaataaaagtgtggagtactgttgctagcaaagatgtttgggatcttcgacaaggggcaaaagataaaggggacagtggtgttgatgccaaagaatgtgttggacttcaacgccataacctccatcggtaaaggtggtgttattgacacagccaccggcatcttaggccaaggcgtcagcttagttggtggagtaattgatactgccacttccttcttaggccgtaatatctccatgcaattgatcagtgctactcagactgatggca

SEQ ID NO: 108222 - DNA, 289 bp, Glycine max
cacaacaggtgcacaatctggtgtatgctatggaagagttggcaacaatctgccatcgccacaagaagtagtttccctttttaaacagtacggcttccaaaggatgagaatctatgatcgaaaccatgaagtcctccaagctctgagagattccaacattgagttgctgctagatcttcctaacatcgacctccaatatgtagcttccagccaagacaacgcaaacagatgggtgcaagacaatgtcagaaacttttggaatgtcagattcaggtacattactgtggga

SEQ ID NO: 108223 - DNA, 270 bp, Glycine max
cctgagtgggctccaattaattgtcgagttcatcgacaaccaattcacatcactgaaggaaattatgtcagaaagcaagatgtcagcattgaatatgatgcatgtacaattccaaatgattgtggttcattggttgttgccaaggttggaaatcacaaacaaattgttggtttccatgttgctggaagcaaaggaagactgggatatgcttcattgataccatatgttgagccagttgtgcaagctcaaagtgctgaagtttactttgac

SEQ ID NO: 108224 - DNA, 282 bp, Glycine max
atttgtaatagcatttttaatgagatgctcattagatatagctatgaaaaattactgcgccaggctaaagctccaagtatgtttttacaatccttcaaaaattttgtttctttgtgtgtgtatggtgatgataacttaattagtgttcatgaatatgtcaagccttactttagtggttctaaattgaaaagctttctagctggtcataatatcaccattactgatggtattgacaaaactagtgcaactttgcaatttagaaagttagcagattgtgatttt

SEQ ID NO: 108225 - DNA, 282 bp, Glycine max
caactcgcaagcatatgaaggttccatgcgaaatcatcaggattcctcagggtgggcactttgcgttcattgacaacccaactgccttccattcagctgttttttatgcttgtcgaaggtttcttacacctgatccagacaatgaatctcttcctaaagggctaacctctgcataggttaggtcttaattttgtgctattcctgtctatatgtattttaatatttttttttactaattaaatttcataattgaatgaaatcatatgtatattgtttcagtaa

SEQ ID NO: 108226 - DNA, 282 bp, Glycine max
  unsure (1)..(282): unsure at all n locations
caccgatctcatgagatccattcaggccgatactccttattgttgcctcgcgttgtggtgtgcaccatgtgtgtcttaccttcttcgcaaacgagctctctatgatgatatgtcaaggtacacatgttgtgctggctacatgccttgcagtggtaggtgtggagaaagtaaatgtcctgaattttgcctttgcactgaggttttcctctgctttggaaattcagtcgcctcaatcgctttctattgcaagatganttaacatcaaatacgcaagtgataatt

SEQ ID NO: 108227 - DNA, 283 bp, Glycine max
gcttcttgttgttggaaagaaaccctagcaagcggaacaatggcagacgttgaggtcgatgtggcggctgcagcagcagcagggcagccgaagaagagaacgttcaagaagttcagtttcaggggcgtggatctcgatgcgcttctggacatgtccaccgatgaactcgtgaagatgttcagtgctcgcgcacgtagaaggttccagagaggcctcaccagaaagcccatggccttgatcaagaagcttcgcaaagcgaaaagagaagctccaccaggtgaga

SEQ ID NO: 108228 - DNA, 282 bp, Glycine max
tgttggtgaagcttgccagaaatatggcagcatctttatgcatcctcagggtctttatataagtttgaaagagaagggaaagatccgtgaagtactaaggaattggcctgagaagaacattcaagtcatagttgtaactgatggagaacggatcctgggtcttggggatcttggttgtcaggggatgggaataccagtgggaaaactttctttatatacagcacttggaggagtccgcccttcagcttgtttacccattacaattgatgtgggcacaaacaa

SEQ ID NO: 108229 - DNA, 281 bp, Glycine max
  unsure (1)..(281): unsure at all n locations
gatggtattgacaaaactagtgcaactttgcaatttagaaagttagcagattgtgattttctcaagagaaactttaggcagatgtctaatgttttgtgggtggctcctgaggacaaggcgagtttatggtcacaacttcattatgtttcatgtaataatctggaaatgctacaagnctatcttgtcaatctcgtaaatgtgttacgagaattgtatttgcacagtccagaggaagctcgccaattgagaaggaaagctctctctcgtattgaatggctgca

SEQ ID NO: 108230 - DNA, 278 bp, Glycine max
cgcaaagttgctgattttggactttcacgacttgccccagttccagatactgaaggaaatgtacctggtcatgtatcaacagtggtaaaggggaccccgggttatcttgatccagagtacttcttgactcgcaatttgactgacaaaagtgatgtttatagtcttggtgttgtacttctggaacttctgactgggaggccacaatctttcatggtgaaaatattattagacaggttaatatggcatacaattctggtggaatatctttggttgttgat

SEQ ID NO: 108231 - DNA, 282 bp, Glycine max
gtgcccgcgggaaccaccgccatggttaatatgtgggccataggaagggacccggaggtgtggctggacccacttgatttcaagcccgagaggttcatgggcctggaggcggagttttctgttctcgggtcggatctgaggctggctccattcgggtcgggtagaagaacctgccccggaaagactttgggtttgagcaccgtgactttctgggtggcgaggcttttgcacgagtttgaatggctaccatctgatgaggggaaggttgatctaacggaggtg

SEQ ID NO: 108232 - DNA, 285 bp, Glycine max
ggccttcacagcattcgttgcggcattttaatcgatttatccaagcaggactgaatgaactaatggagtctaaaggtgggaaaaagaagtctagtagtagtagtagtaaatcattgttctacgaagctcccctcggatacagcattgaagacgttagaccaaacggtggaatcaagaaattcagatctgctgcttactccaactgcgctcgcaaaccttcctgatatccatccagattgatagttcattgcatgcaaccatagttttattaggttttttcttctt

SEQ ID NO: 108233 - DNA, 279 bp, Glycine max
cacaacttcattatttttcgtgtaataatctggaaatgcaagaagcttatcttgtcaatctcgtaaatgtgttacgagaattgtatttgcacagtccagaggaagctcgccaattgagaaggaaagctctctctcgtattgaatggctgcaaaaagctgatgtgcctaccatagcacagattgaagagttccattcgatgcagaggatgatgaatgctcctgattcaaatgacaatatcgatctactgttgagcattgatttgttgggtttacaaggag

SEQ ID NO: 108234 - DNA, 284 bp, Glycine max
agaattccaaagacagagatgactctgattaaggaattagagcaacaaccaaaccaaattgctggccacaaagaactcgctcacaaaagtctccttcagagcgatgcactctatcagtatatacttgaaaccagtgtgtacccaagagagcatgagagcttgaaggagctaagagagttgacggaaaaacacccttggaacctgatggctacaccacctgacgaaggacaacttctaggcatgctacttaagcttatcaatgccaagaacaccatggaaatagg

SEQ ID NO: 108235 - DNA, 279 bp, Glycine max
cctacattaaatgtacagtctctttcttcatagcatttggaaatttggctgatgacaccatcaattttgaggcttttccccacaagctggtgcagtttggagagattcaggaaaaagttgtattgaaattttcacaagaggaatttcttacagcttggtcaactcaggtgcgtcctgcaacaactctgttggctgatgggtgtccatatttgtatgctatggtgcatgatagttcagtgtctacaataccaggtgattttgtcattggtgttaagttga

SEQ ID NO: 108236 - DNA, 286 bp, Glycine max
gaggaattgtttttgattggatccacaaaattcaagatgactccagttactttggcaggccagtttggtgacacgacatacactaaggtgcttgttggaggctcggcctgggagactcaaaaggagacaatgaagaagtattttgagcaatttggtgacatcttggaggccgttgtcatcactgacaaagctactggaagatctaaaggctacggatttgttacttttcgtgaaccagaagctgccatgagagcttgtgtggatcctgctcctgtaatcgacggca

SEQ ID NO: 108237 - DNA, 287 bp, Glycine max
ctcgagccgaatcggctcgaggcagattgtgattttcttaagagaaactttaagcagatgtactaatgttttgtgggtggcacctgaggacaaggcaagtttatggtcacaacttcattatgtttcgtgtaataatctggaaatgcaagaagcttatcttgtcaatctcgtaaatgtgttacgagaattgtatctgcacagtccagaggaagctcgccaactgagaaggaaagctctctctcgtattgaatggctgcaaaaagctgatgtgcctaccatagcacaga

SEQ ID NO: 108238 - DNA, 285 bp, Glycine max
ctcgagccgcttcccaaaaacacagttggaggaaccattctgcgtagtgatctattggcaaattttctgacagagggcaattttagagcaagtgttgatttgcagcgcactcatcgtattaaaggcatgattaaaatggtggccacagttggtattcctgagaatacaggtatagcattggcttgtgctatgaatagttcttttagggggcgtgccagttctgatatttacaccatctgctctcaagactgtgaattatggaatcctgcttgcacaaaagcaatg

SEQ ID NO: 108239 - DNA, 290 bp, Glycine max
tctcgagccgattcggctcgagcagtctacagtttttgatattctcattggaatttctcaagattttgaaattgctggtcatactcttatgccagctttttctgttccacaggctactgccagatcttctgaaaatgcggaatcctctgcatgatctggaatttgtgtattctttcgtttgtacgagtgtctaattcaatacagggtattagacatgaccctcttgtcgagtatgctctgtctatttgaaaatttccacacctcttgtaattgtcgtaaatgtgtgaagt

SEQ ID NO: 108240 - DNA, 261 bp, Glycine max
ctcttgggaatttctcaagattttgaaattgctggtaatactcttatgccagctttttctgttccacaggctactgccagatcttctgaaaatgcggaatcctctgcatgatctggaatttgtgttttctttcgtttgttcgtttgtttaattcaataaaggaaattagacatgaccctcttgttgagtatgctctgtctatttgaaaatttccacacctcttttaattgtcgtaatgatgtgtgaagtgtgtgttatttt

SEQ ID NO: 108241 - DNA, 294 bp, Glycine max
gaaattttgataaaccgcgatcacaggttgccgcaccttaaaaccggaaacaaaagcaatcgttacttgatttcaagaatctctcaatttcttcctacttctttgtgtacgatttcttaagggaaagaaaatcactctctgtgctggccacagacttcgtgaatcattttcttttccactcttagtttatttgctgaacactctcctatttgatataggacttcgtgtcagatttaaacttcttctgtttctttctcagttctctgtttaatttcaagttcaagctggtgaaat

SEQ ID NO: 108242 - DNA, 294 bp, Glycine max
cgtaaatgtgttacgagaattgtatttgcacagtccagaggaagctcgccaattgagaaggaaagctctctctcgtattgaatggctgcaaaaagctgatgtgcctaccatagcacagattgaagagttccattcgatgcagaggatgatgaatgctcctgattcaaatgataatatcgatctactgttgagcattgatttgttgggtttacaaggagcaggtaaagcttttccaaacaagattgtttttgatgataagcttgtgttggctaacacacaagaattctttgatgg

SEQ ID NO: 108243 - DNA, 296 bp, Glycine max
tggtgctttcactgtccaatgtgcatcctgcttcaaatggaggttgattccaacaaaggaaaaatatgaagaaatacgtgagcatatccttgaacaaccttttgtttgtcaaaaagctcgtgagtggcgacctcatgtatcttgtgatgatccagaggatatttctcaggatggcagcagggtttgggctattgataagccaaacattgcacagcctccggctggatgggagcgactgctaaggatcagagctgaaggaagctccaaatttgcagatatatactatatagcaccat

SEQ ID NO: 108244 - DNA, 297 bp, Glycine max
gaaagatgtttggagagttgaatgtggaatcccttctggatttccgctcacagttatttgtaatagcatttttaatgagatgctcattagatatagctatgaaaaattactgcgccaggctaaagctccaagtatgtttttacaatccttcaaaaattttgtttctttgtgtgtgtatggtgatgataacttaattagtgttcatgaatatgtcaagccttactttagtggttctaaattgaaaagcgttctagctggtcataatatcaccattactgatggtattgacaaaactag

SEQ ID NO: 108245 - DNA, 296 bp, Glycine max
ggacaagcttagttgtcaagttggaatcaacccatactccatggaatggactggtttggccaatagattactgagtaagggcaacgatattctgtgttgcgattatgctagttttgatggtttgattaccaagcaagttatgagcaagatggcagaaatgataaacagtctttgtggtggtgatgaaaaattgatgcgtgaaaggacacacctgctgttggcttgttgttcaaggatggcaatttgtaagaaagatgtttggagagttgaatgtggaatcccttctggatttccgc

SEQ ID NO: 108246 - DNA, 291 bp, Glycine max
ttccgggttcacgtttcacaatcactttttgcgcttctctcactcactcactcgtcttcttcctcttcgtgtggttttctttctcgaactcgaacgaagatgcgtgagattcttcacatccagggagggcaatgcgggaaccagatcggagccaagttctgggaggtggtgtgcgcggagcacgggatcgattcaacggggaggtaccaaggggacaacgagttgcaactcgagcgagtcaacgtctactacaatgaagcgagttgcggaaggttcgtgcctagggcggtg

SEQ ID NO: 108247 - DNA, 278 bp, Glycine max
cggctcgaggttggtattcctgagaatacaggtatagcattggcctgtgctatgaatagttcttttagggggcgtgccagttctgatatttacaccatctgctctcaagactgtgaattatggaatcctgcttgcacaaaagcaatgactatgtcatttaatccaaacccgtgttctgatgcatggagtttggaatttctgaagcgtaccggatttcattgtgatatcatttgtgtcactggatggactgccactccaatgcaggatgttcaggttac

SEQ ID NO: 108248 - DNA, 283 bp, Glycine max
gcaaagcgagctcatgaatttgaaaaacatgttgctcatgaaagcctcaaggatcaaattcctgctgttgacaagttgtattctactaaggttaataagtttgcaaaaattatgaaccttagacaaagtgttgttggtgatcttaaacttcttactgatgggaagttgtatgagggtaagcatattcctgtatctaatattagtgcaggggaaaatcatgtagttcaaatacccctaatggcacaggaggaaattctgtcttctagtgcaagtgatttcagaa

SEQ ID NO: 108249 - DNA, 284 bp, Glycine max
gctgttggcttgttgttcaaggatggcaatttgtaagaaagatgtttggagagttgaatgtggaatcccttctggatttccgctcacagttatttgcaatagcatttttaatgagatgctcattagatatagctatgaaaaattactgcgccaggctaaagctccaagtatgtttttacaatctttcaaaaattttgtttctttgtgtgtgtatggtgatgataacttaattagtgttcatgaatatgtcaagccttactttagtggttctaaattgaaaagct

SEQ ID NO: 108250 - DNA, 288 bp, Glycine max
gattttctcaagagaaactttaggcagatgtctaatgttttgtgggtggctcctgaggacaaggcgagtttatggtcacaacttcattatgtttcatgtaataatctggaaatgcaagaagcttatcttgtcaatctcgtaaatgtgttacgagaattgtatttgcacagtccagaggaagctcgccaattgagaaggaaagctctctctcgtattgaatggctgcaaaaagctgatgtgcctaccatagcacagattgaagagttccattcgatgcagaggatgatg

SEQ ID NO: 108251 - DNA, 295 bp, Glycine max
ttttgataaaccgcgatcacaggttgccgcaccttaaaaccggaaacaaaagcaatcgttacttgatttcaagaatctctcaatttcttcctacttctttgtgtacgatttcttaagggaaagaaaatcactctctgtgctggccacagacttcgtgaatcattttcttttccactcttagtttatctgctgaacactctcctatttgatataggacttcgtgtcagatttaaacttcttctgtttctttctcagttctctgtttaatttcaagttcaagctggtgaaatcttgg

SEQ ID NO: 108252 - DNA, 293 bp, Glycine max
aaaatggtggccacagttggtattcctgagaatacaggcatagcattggcctgtgctatgaatagttcttttagggggcgtgccagttctgatatttacaccatctgctctcaagactgtgaattatggaatcctgcttgcacaaaagcaatgaccatgtcatttaatccaaacccgtgttctgatgcatggagtttggaatttctgaagcgtaccggatttcattgtgatatcatttgtgtcactggatggactgctaccccaatgcaggatgttcaggttacaattgattg

SEQ ID NO: 108253 - DNA, 300 bp, Glycine max
gatatttacaccatctgctctcaagactgtgaattatggaatcctgcttgcacaaaagcaatgactatgtcatttaatccaaacccgtgttctgatgcatggagtttggaatttctgaagcgtaccggatttcattgtgatatcatttgtgtcactggatggactgccactccaatgcaggatgttcaggttacaattgattggtttatttcctctcaggaatgtgttcccaggacttattgtgtcttaaatccacaaaatccttttgtgttgaataggtggatggggaaactgactttc

SEQ ID NO: 108254 - DNA, 288 bp, Glycine max
gttggatcttaaaatttctcaatctaaaattgcacttcccaaaaacacagttggaggaaccattctgcgtagtgatctattggcaaattttttgacagagggcaattttagagcaagtgttgatttgcagcgcactcatcgtattaaaggaatgattaaaatggtggccacagttggtattcctgagaatacaggtatagccttggcctgtgctatgaatagttcttttagggggcgtgccagttctgatatttacaccatctgctctcaagactgtgaattatggaa

SEQ ID NO: 108255 - DNA, 276 bp, Glycine max
gtggttacggtggtggtggaagaggcggtggaggcggtgcttgctacaactgtggtgaatcgggacatctggctagggattgcagtggaggcggtggtggggacatgtacggaggaggtggtggtggtggcagatatggaggcggcagtggcgagaggtacgttggtggtggaggcggcggcggcggcggaggaagctgctacagctgtggagagtctaggcattttgccagagattgcccatcaagtgctcgttgcaattactgttaagggttgt

SEQ ID NO: 108256 - DNA, 283 bp, Glycine max
aacttaattagtgttcatgaatatgtcaagccttactttagtggttctaaattgaaaagctttctagctagtcataatatcaccattactgatggtattgacaaaactagtgcaactttgcaatttagaaagttagcagattgtgattttctcaagagaaactttaagcagatgtctaatgttttgtgggtggctcctgaggacaaggcgagtttatggtcacaacttcattatgtttcgtgtaataatctggaaatgcaagaagcttatcttgtcaatctcg

SEQ ID NO: 108257 - DNA, 291 bp, Glycine max
gacctattggcaaattttttgacagagggcaattttagagcaagtgttgatttgcagcgcactcatcgtatcaaaggaatgattaaaatggtggccacagttggtattcctgagaatacaggtatagcattggcctgtgctatgaatagttcttttagggggcgtgccagttctgatatttacaccatctgctctcaagactgtgaattatggaatcttgcttgcacaaaagcaatgactatgtcatttaatccaaacccgtgttctgatgcatggagtttggaatttttg

SEQ ID NO: 108258 - DNA, 288 bp, Glycine max
ggactggtttggccaatagattactgagtaagggcaacgatattctgtgttgcgattatgctagttttgatggtttgattaccaagcaagttatgagcaagatggcagaaatgataaacagtctttgtggtggtgatgaaaaattgatgcgtgaaaggacacacctgctgttggcttgttgttcaagaatggcaatttgtaagaaagatgtttggagagttgaatgtggaatcccttctggatttccgctcacagttatttgtaatagcatttttaatgagatgctca

SEQ ID NO: 108259 - DNA, 295 bp, Glycine max
gcattggcttgtgctatgaatagttcttttagggggcgtgccagttctgatatttacaccatctgctctcaagactgtgaattatggaatcctgcttgcacaaaagcaatgactatgtcatttaatccaaacccgtgttctgatgcatggagtttggaatttttgaagcgtaccggatttcactgtgatatcatttgtgtcactggatggactgccaccccaatgcaggatgttcaggttacaattgattggtttatttcctctcaggaatgtgttcccaggacttattgtgttt

SEQ ID NO: 108260 - DNA, 280 bp, Glycine max
gataacttaattagtgttcatgaatatgtcaagccttactttagtggttctaaattgaaaagctttctagctggtcataatatcaccattactgatggtattgacaaaactagtgcaactttgcaatttaggaagttagcagattgcgattttctcaagagaaactttaagcagatgtctaatgttttgtgggtggctcctgaggacaaggcgagtttatggtcacaacttcattatgtttcgtggtataatctggaaatgcaagaagcttatcttgtca

SEQ ID NO: 108261 - DNA, 188 bp, Glycine max
cacaacttcattatgtttcgtgtaataatctggaaatgcaagaagcttatcttgtcaatctcgtacatgtgttacgagaattgtattggcacagtccagaggaagctcgccagttgagaaggaaagctcactctcgtattgaatggctgcaaaaagctgatgtgcctactatagcacagattgaagag

SEQ ID NO: 108262 - DNA, 275 bp, Glycine max
tgacaccatcaattttgaggcttttccccacaagctggtacagtttggagagattcaggtaaaagttgtattgaaattttcacaagaggcatttcttacagcttggtcaacccaggtgcgtcctgcaacaactctgttggctgatgggtgtccatatttgtatgctatggtgcatgatagttcagtgtctacaataccaggtgattttgtcattggtgttaagttgacagacataaacaatatgtgtgcatattggctcaatcctggtatatcag

SEQ ID NO: 108263 - DNA, 273 bp, Glycine max
gtgatttcagaactgcaatggtgagtcaaaatagcaagcctcaagctactgcaatgcatgtgggagctatagatattatcattgatagtttcgcaagtcctgactgtaacatagttggtgcaatgcgtttggttgatacttatcataccaatcctgatccatgcagtgcgtataatctctgttgcgcttttcagacgcggaaggcccattcgggtggttacatttccgagtaccattgtgcagattggacctggcatgaattcactgtttcag

SEQ ID NO: 108264 - DNA, 286 bp, Glycine max
tttaccagctatacttgttccttttgaaggttagaagtgctacaatacaaacaatggcagctactcaggaagatgtgaagcttttgggtattgtgggaagcccatttgtgtgcagggtccagattgcccttaagttgaagggagttgaatacaaatttttggaagaaaatttgggcaacaagagtgatttgcttctcaaatacaaccctgttcacaagaaggttccagtgtttgttcacaatgagcagcccatagcagagtctcttgtgattgttgaatacattga

SEQ ID NO: 108265 - DNA, 287 bp, Glycine max
cacaccttcactttccgacctagctccggcaaggaagcggagggcgggagcgtgagatcgtacggtgacgaatcgtcggaggaagcgactagagtgacgcgtagtatcatgatcgtgaaaccgccagggtaccagagtggatcgcctccggtttctcctgccggttctactcctccgatttctccgttttccggaggaaaagattcgcttcggtttcgaagaaggtcgggatctgatgcgtacgagaagagagggcagaacagatcaggcccttcttctcctttcga

SEQ ID NO: 108266 - DNA, 289 bp, Glycine max
cgcgctgcttcactattctccctatggagtttaatcttgtggttcgtcagaagtttttaaattttgtgaggttcattatgaagaaaagggacaagcttagttgtcaagttggaatcaacccatactccatggaatggactggtttggccaatagattactgagtaagggcaacgatattctgtgttgcgattatgctagttttgatggtttgattaccaagcaagttatgagcaagatggcagaaatgataaacagtctttgtggtggtgatgaaaaattgatgcgtga

SEQ ID NO: 108267 - DNA, 294 bp, Glycine max
tgagaatacaggtatagcattggcctgtgctatgaatagttcttttagggggcgtgccagttctgatatttacaccatctgctctcaagactgtgaattatggaatcctgcttgcacaaaagcaatgactatgtcatttaatccaaacccgtgttctgatgcatggagtttggaatttttgaagcgtaccggatttcactgtgatatcatttgtgtcactggatggactgccaccccaatgcaggatgttcaggttacaattgattggtttatttcctctcaggaatgtgttcc

SEQ ID NO: 108268 - DNA, 287 bp, Glycine max
gagtgggcaaatcaaacttcatggcatttgagtttccttattgacaatcccaaacagtctacagtttttgatattctcttgggaatttctcaagattttgagattgctggtaatactcttatgccagctttttctgttccacaggctactgccagatcttctgaaaatgcggaatcctctgcatgatctggaatttgtattttcttttgcttgttcgtttgtttaattcaataaaggaaattaggcatgaccctcttgttgagtatgctctgcctatttgaaaattt

SEQ ID NO: 108269 - DNA, 281 bp, Glycine max
ggctctgggaagaggcagtgcagtggttctactactttgcttcttgctgcttcactctcagatggctcgtgctgccacctacacagttggagattctgggggttggacctttaacactgttgcctggcccaaaggaaagctctttcgggctggtgacacacttgctttcaattatagccctgggactcacaatgtggtggccgtgaacaaggctggatatgatagctgcaagactccaagaggagccaaagtgtataagtcagggacggatcagatcagac

SEQ ID NO: 108270 - DNA, 292 bp, Glycine max
gtttgctgtgaaatagactgaggaatagtgagaacaccattggattgtgattctagcaagcagagcttttgtcaattttctattgaccttctcggtggaggaattttagtggacaaaactggagattggatcacacttatacaaaattctccaattagtaacttgttgagagttgctgcttggaagacaggctgtttaatggttagaattgtgatgtctgggaatgcagcagtcagcaggagtgattaggcctcattggtacaagtgtttctaacaaacagcaacagtacag

SEQ ID NO: 108271 - DNA, 283 bp, Glycine max
attattttcatctgtttaacaaaaacattgtattaagttttatttaatataggatctgctcaatgatttattaaatagctgcagtattttgactgtgcaaaggtagcataataattagtcttttaattgaggacttgtatgaaagatttgatgaaaaataaactttattatttatataattaaaattttatttttaagtaaaaaagcttaaattatttaaagggacgataagaccctataaaactttataaatattaattttgatttttttggatttataaat

SEQ ID NO: 108272 - DNA, 282 bp, Glycine max
atagattactgagtaagggcaacgatattctgtgttgcgattatgctagttttgatggtttgattaccaagcaagttatgagcaagatggcagaaatgataaacagtctttgtggtggtgatgaaaaattgatgcgtgaaaggacacacctgctgttggcttgttgttcaagaatggcaatttgtaagaaagatgtttggagagttgaatgtggaatcccttctggatttccgctcacagttatttgtaatagcatttttaatgagatgctcattagatata

SEQ ID NO: 108273 - DNA, 283 bp, Glycine max
gtgatgataacttaattagtgttcatgaatatgtcaagccttactttagtggttctaaattgaaaagctttctagctagtcataatatcaccattactgatggtattgacaaaactagtgcaactttgcaatttagaaagttagcagattgtgattttctcaagagaaactttaagcagatgtctaatgttttgtgggtggctcctgaggacaaggcgagtttatggtcacaacttcattatgtttcgtgtaatgctctggaaatgcaagaagcttatcttgt

SEQ ID NO: 108274 - DNA, 292 bp, Glycine max
caaaattctccaattagtaacttgttgagagttgctgcttggaagaaaggctgtttaatggttaagattgtgatgtctgggaatgcagcagtcaaaaggagtgattgggcctcattggtacaagtatttttaacaaacagcaacagtacagagcattttgatgcatgtaagtggacaaaatcggaaccacattcctgggaattgatcttcccaatagaggtatgtggtcccaataatggttttgaaatgtggagttctgagtgggcaaatcaaacttcatggcatttgagtt

SEQ ID NO: 108275 - DNA, 275 bp, Glycine max
ccaatatattccattctctctgtgtatttccctacctctcccttcaagatgcagatcttcgtcaagaccctcaccggcaagaccatcacccttgaggtggaaagctctgacaccatcgacaacgtcaaggccaagatccaggacaaggaaggaatccccccggaccagcaacgtctcattttcgccggaaagcaactttaggacgggcgttaccttgctgactacaacattcagaaggagaatactcttcacctcgtactccgactccgtggtgg

SEQ ID NO: 108276 - DNA, 281 bp, Glycine max
aatttttctgcagaattgctctcttgcaaattggatactgtcactggccaatattatcctgagtgggctccaattaattgtcgagttcatcgacaaccaattcacatcactgaaggaaattatgtcagaaagcaagatgtcagcattgaatatgatgcatgtacaattccaaatgattgtggttcattggttgttgccaaggttggaaatcacaaacaaattgttggtttccatgttgctggaagcaaaggaagactgggatatgcttcattgataccata

SEQ ID NO: 108277 - DNA, 280 bp, Glycine max
cttgaagaaataaaagtgaagttctaattggtgttattgagcagatagcatggagccacagtgtagaatcaagaaggatgccactgaattgatagggaataccccaatggtatatctgaacaacattgtggatgggtgtgtagcccgtattgctgctaaattggagtacatgcaagcgtgctgtagtgtcaaagataggattgctttgagcatgattgaagatgctgagaaaaaaggccttattacacctggaaagactgttctggttgagtaacaagtg

SEQ ID NO: 108278 - DNA, 281 bp, Glycine max
gctagttttgatggtctgattaccaagcaagttatgagcaagatggcagaaatgataaacagtctttgtggtggtgatgaaaaattgatgcgtgaaaggacacacctgctgttggcttgttgttcaagaatggcaatttgtaagaaagatgtttggagagttgaatgtggaatcccttctggatttccgctcacagttatttgtaatagcatttttaatgagatgctcattagatatagctatgacaaattactgcgccaggctaaagctccaagtatgtt

SEQ ID NO: 108279 - DNA, 244 bp, Glycine max
gacatttaaaatgtttgatgtcaacaataatggggagatagataaggaagaattcaagaaagtgatggcattggtgcgatctcgtcatcgacatggtgttcagcacagggatggagtaagaactggcctaaaggcgagtgcttctgtggaagatgcagggctggtggaatacttgtttgataaagatggaaatcgatgcctccaacatgataaatttgtaaattctttgagaggctgcatgatg

SEQ ID NO: 108280 - DNA, 274 bp, Glycine max
cacaaagcgggttactgtctgttcaagctaccatctctctctctctttcttagtgcctccttgccagaagttaaaatggcccaagaaactttcctattcacatctgaatcagtgaacgaggggcaccctgacaagctctgtgaccagatctccgatgctgtgctcgatgcatgcttggagcaggaccctgacagcaaggttgcctgtgaaacctgcaccaagaccaacatggtgatggttttcggagagatcacaaccaaggccacgtggacta

SEQ ID NO: 108281 - DNA, 273 bp, Glycine max
agaagaacaagtagttgagaactaagaaggagaagcaaatggcttcctcaatgatctcttccccagctgttaccactgtcaaccgtgccggtgccggcatggttgctccattcactggcctcaagtccatggctggcttccccaccaggaagaccaacaatgacattacctccattgctagcaacggtggaagagtgcaatgcatgcaggtgtggccaccagttggcaagaaaaagtttgagactctttcctacctgccagacttgatgatgc

SEQ ID NO: 108282 - DNA, 271 bp, Glycine max
gtcctcgacgcttgccttgaacaggacccagacagcaaggttgcctgcgaaacatgcaccaagaccaacttggtcatggtcttcggagagatcaccaccaaggccaacgttgactacgagaagatcgtgcgtgacacctgcaggaacatcggcttcgtctcaaacgatgtgggacttgatgctgacaactgcaaggtccttgtaaacattgagcagcagagccctgatattgcccagggtgtgcacggccaccttaccaaaaacccgagga

SEQ ID NO: 108283 - DNA, 271 bp, Glycine max
aagctcactgcattcttgggttacaaggctggtatgactcacattgttagagaggtcgagaagccaggatcaaagcttcacaagaaggaaacatgtgagcctgttacaattattgagacccctccaatggttattgttggtgttgtgggttatgtgaaaactccccgtggtctccgaacattgaacactgtatgggctcagcacttgagtgaggaactgaaacgtaggttttataagaactggtgcaagtccaagaagaggccttcaccat

SEQ ID NO: 108284 - DNA, 271 bp, Glycine max
gttgatgctctcactgccttcgctggccatagcatctccttgcagcttatcagtgctactcagactgatggtagtggaaaaggaaaagttggaaacgaagcctatttggaaaaacatcttccgaccttgccaacgttgggagcaaggcaggaagcattcgatattaactttgaatgggatgctagttttggaattccaggagcattttacatcaaaaactttatgactgatgagtttttcctcgtcagtgttaaactcgggacattccaaa

SEQ ID NO: 108285 - DNA, 274 bp, Glycine max
aacacaaggagactttatccgatgcttaatcaaagaagtggagggtgctgcatttacagacattgaagacgttgttctctttgttaaatggcttgatgacgagctttcttatttggtggatgaacgagcagtgttgaaacacttcgattggccagagcagaaggccgatgccctgcgtgaggctgcattcgggtattgtgatctgaagaagctagaatctgaggcttcttcgtttcgtgatgatcctcggcagccatgtggtccagcccttaag

SEQ ID NO: 108286 - DNA, 272 bp, Glycine max
ccagatctccgatgctgtgctcgatgcatgcttggagcaggaccctgacagcaaggttgcctgtgaaacctgcaccaagaccaacatggtgatggttttcggagagatcacaaccaaggccaacgtggactatgagaagattgtgcgtgacacatgcaggaacattggttttgtcactgatgatgttggtcttgatgctgacaactgcaaggtcctcgtcaacattgagcaacagagtcctgatattgctcaaggtgtgccggccacctcac

SEQ ID NO: 108287 - DNA, 262 bp, Glycine max
atgacgtgttgttttcaacactgagggcttgctttatcctgacagtgtgggtggaactgattcacatacaacaatgatatatgggcttggagttgctggatggggtgttggtggtattgaagcagaggcagcaatgcttggtcagcctatgagcatggtgttacctggtgttgttgggttcaagttatctggaaaactgcgcaatggtgttacagcaactgacttggttctaactgtgacacaaatgcttaggaaacatgtg

SEQ ID NO: 108288 - DNA, 270 bp, Glycine max
aactttttcacctctgaaacccgcttttcttgtttcagtggaaatggccgaaactcgagacgccgccgccgatggggtgcccggaactcccgccataagggaaatgagacccgagaccgcgacccatgcgggaatcgggtcgggtgggattcggagggtgaatttccgagcggagattgatacgtcaccgccgtttgggtcggtgaaagaggccgtgacccgttttggaggtagcgggccttggataccgttttttaacacattgaagat

SEQ ID NO: 108289 - DNA, 268 bp, Glycine max
cttctggcatcacacttacaccactcttcttcccttttcatttactctgcgaattcctattcccacacacatctcaaattggtattaagggtttaacaaagcttttagcggacaatgccccgaagtccatgaaggagaacaaattcgagagctactttggtcgcaagatcgctattgacgctagcatgagcatttaccagttccttattgtcgtgggaagaagtggaactgaaatgctcactaatgaggctggtgagttaccagtcat

SEQ ID NO: 108290 - DNA, 255 bp, Glycine max
ctcgagccggaagtgtctgtggtcctcacttatatgcatctctgtgtggaagactggcggtggtggtggaaggcattcttcgcatcaggttctgtggctctttacgtcttcttatactccattaactacttggtgttcgacctgcggagtttgagtggacctgtctcagctaccctttaccttggttattcactactcatggccattgcaatcatgttgtctaccggcaccatcggcttcctaatgtcattctac

SEQ ID NO: 108291 - DNA, 270 bp, Glycine max
gggtggagaaatttaactcgaccttgtatgatgaatgggttaacaagggcaatgcaccggcactgcccgagactcttaagaattacaacaagctggtgtctcttggcttcaagattatattcttgtcaggaagaacactggacaaacaggccgtaacagaagcaaacttaaagaaggctggctaccacacatgggaaaaattaattctcaaggatccacaagatccttccactccaaatgcagtttcatacaaaacagcgcgagagagaa

SEQ ID NO: 108292 - DNA, 267 bp, Glycine max
tacgttttgcccaagcaccttgatgagaaggtggctgcacttcacctgggcaaacttggtgctaagctgacccagcttagcaagtcccaggctgattacatcagtgtgcctgttgagggtccatacaagcctgctcactacaggtactaagtgattgagatgatcaactgaaaagtgagtgagggaaagacacaaatcggttttatcaatcggatttgattgtttaattttcctttttttgatttttggtgttagactttcagattt

SEQ ID NO: 108293 - DNA, 269 bp, Glycine max
ctatatgtcgattcatcctcttggtccaagggttccataatctgggcattaaacccatttcatatgatgggagttgctggtgtatgggtcgctgcactactatgcggtattcatggtgccagcgtagaaaatactgtatgtgaagatggtgatggcgcaaatacattccgtgcttttaacccaacccagagcgtaagaaacttattcaatggttactgctaatcgcttttgggtcccaaatctgtggggttgcttttgccatatacgtt

SEQ ID NO: 108294 - DNA, 265 bp, Glycine max
gagaaaccccgctcactccctctctatcacactcccgtgtttacaaataaatcaaagacacaccagagatcaactctgaacaaaagggatcaaccctacacactagagatcaactctacacacaagtccaacacttgatgttaggataacatcaaggtggctcacaaaacactcaagtcccaaaactcaaaaaaaaaaaaaaaaaaaaaaaaaaaaaaaaaaaaaaaaaaaaaaaaaaaaaaagggggggcccccccttttttgt

SEQ ID NO: 108295 - DNA, 269 bp, Glycine max
cgcacgttagcacaaactatcatggccacggcaacagcagctgccacctcgtcctttatggggacgcgtctcctggaggctcactccggggcggggcgagtgcacgcccgattcggcttcggcaagaaaaaggctcccgcccaaaagaaagcctccaggggatcgggccgagacaccgacagacccctttggtatccgggcgccaaagcgcccatatacctcgatgggagtcttgtcggagactacgggttcgatcctttgggctaggg

SEQ ID NO: 108296 - DNA, 268 bp, Glycine max
cgcgcatagtgtggtagcagcagcagagcttgtatacgtcgccgcttcagcgtagcaacatgatcattcccgagaagaaccgtaaagagatctgcaaatacctcttccaagagggagtttgctttgcgaagaaggacttcaatctggcgaacacccggagattgatgtgccgaatctgcaggtgataaagctgatgcagagcttcaaatccagagagtacgtgagggaaacatttgcgtggatgcactattactggtcctcaccaacg

SEQ ID NO: 108297 - DNA, 268 bp, Glycine max
aaaaaacgacattcattcatctatggctacccttattgctcccagcaaccactctccccaagaagacgctgaggctctcagaaaggcttttgaaggatgggggactgatgagaaaactgtcatagtaatattgggtcatagaactgtttatcagaggcagcaaatcagaagagtctatgaggaaattttccaggaggatcttgtgaaacgcctagagtctgagatcaaaggagactttgagaaagccgtgtaccgaggatactagaac

SEQ ID NO: 108298 - DNA, 264 bp, Glycine max
ctctgcttagatctcaccctcttgttcgctaatattctcattctgctgtctctgcttcttctccttgtaagttctctcgctcgctctctccgcctgtttcttctccttgtggactcgtaagagctgaactaagagatggggttgtctttcaccaagcttattagccggatctttgctaagacagagatgcgtattctcatggtacgtctagatgctgctcgtaagactaccatctggtagaatctcaagctgggagaattgtca

SEQ ID NO: 108299 - DNA, 262 bp, Glycine max
ggagtgtctggatttttgttggatttcatgatgggaggagtgtcggctgctgtgtccaagacggctgcggctccaatcgagcgagttaagttgctcatccaaaaccaggatgaaatgatcaagagtggtcggttgtctgaaccatacaagggaatcggcgattgtttcagtcgaaccatgaaggatgaaggggtgattgctctttggagaggaaacactgctaatgttatcagatacttccctactcaggtctcaactttgc

SEQ ID NO: 108300 - DNA, 260 bp, Glycine max
gtcgcagcaaaaccaagccacccactaacttgtttggtccaagacatggctctgatcctgcatgctaccaaaacaaacaagaatgccttcaagactctgattgcggcagagtacagtggcgtccaagtggaattggcccctaatttcgagatgggtgtctctaacaaaactcctgaatttctcaagatgaatcctattggaaaggttcctgttttggaaacgcccgatggtccagtctttgagagcaatgcatcgctcgt

SEQ ID NO: 108301 - DNA, 263 bp, Glycine max
cgaaaattacggtttgtagtgtagcaggaacaagcagcaatggcgccgaaggtaacacgcaaggttagcagaaaccccgaattgataaggggaattggaaagtactcgaggtcgcagatgtaccacaagaggggcatttgggctatcaaggccaaaaatggtggcgttttacctcgccacgaccctaaacccaaacctgaaacacccgctgaaaaaccacccagattttaccctgctgatgatatcaagaagcccttgtcaac

SEQ ID NO: 108302 - DNA, 262 bp, Glycine max
gtgcatcaagatctctgtctctctgcaatcgaaaatgagcaagggaccgggtctcttcaccgatatcggcaaaaaatccaaagatcttttgactaaggactacagctccgatcagaaactcaccgtttcctcctacagcgtctccggagtgaccctcacttcaacatctgtgacgaaaggaggactctcaacaggggatgtggcagcactgtacaagtataagaacactgttattgatgttaaacttgacacgcatcaacta

SEQ ID NO: 108303 - DNA, 266 bp, Glycine max
cttctggcatcacacttacaccactcttcttcccttttcattttctctgcgaattcctattcccacacacatctcaaatatagtattaagggtttaacaaagcttttagcggacaatgccccgaagtccatgaaggagaacaaattcgagagctactttggtcgcaagatcgctattgacgctagcatgagcatttaccagttccttattgtcgtgggaagaagtggaactgaaatgctcactaatgaggctggtaagttaccagt

SEQ ID NO: 108304 - DNA, 265 bp, Glycine max
ttgtttcttagtgcacttttttttggcatcaaagaggttaaatccatggattctgattatggtattcccagggaactctcagatcttcaaaagattcggtcgttgtaccagccagagcttcctccttgtctccagggaaccactgtgagggttgaatttggtgatgcaaccaccactgctgaccccactgatgcactcaccattagcagggcgtttcctaacacctatggacaccctttggctcactttctcaggcaactgccaa

SEQ ID NO: 108305 - DNA, 266 bp, Glycine max
  unsure (1)..(266): unsure at all n locations
ctctctgaagatggcttcacgcaggctcgtatcttctctgattcgatcctcccttcgtagatctcaatcgaagccctcaatttccgcatagcatacgacacagangtcatcgaancgtgnctcaccgcacggatacttgctgaaccgcgtcgccgagtacgccaccgccgcggctgctgctagcactccgtctcgtcctcctcctccggggaagaaggatgtcggcggcggcgggaagatcaccgatgaattcacgggaagggcgc

SEQ ID NO: 108306 - DNA, 263 bp, Glycine max
cttttggggaagaggtcgagtttcacagcagcaatggtgtacgtcaaggctcagaaatcaaaagcctacttcaagagatatcaagtcaagttcaagagaagaagagagggaaaaaccgattaccgtgccaggattcggttgattaatcaggacaagaacaaatataacactccgaaataccgatttgttgttcgctttagcaacaaggacattgttgcacaaataatatctgctagcattgctggcgatattgtcttgctgca

SEQ ID NO: 108307 - DNA, 264 bp, Glycine max
ctcgagccggaagtgtctgtggtcctcacttatatgcatctctgtgtggaagactggcggtggtggtggaaggcattcttcgcatcaggttctgtggctctttacgtcttcttatactccattaactacttggtgttcgacctgcggagtttgagtggacctgtctcagctaccctttaccttggttattcactactcatggccattgcaatcatgttgtctaccggcaccatcggcttccttatgtcattcactttgtgcatt

SEQ ID NO: 108308 - DNA, 262 bp, Glycine max
gctagtttatcgtgaggagaatatgaagttgtttgttttctttgttgctgcagtagttttggtagcatggccatgccatggcgcaggctaccaaaggttccctctccgaatgaaaactggctatggtgagcgttcttcggaggtaaaatgcgcaagttttaggcttgctgtggaagcacacaacatccgagcctttaaaaccattcctgaagagtgcgttgaaccaacaaaggactacattaatggcgaacatttagatcag

SEQ ID NO: 108309 - DNA, 262 bp, Glycine max
gaaaagaacgcagaaactgaaataaaaaatggcagaacccaaggttaaatacgatcgtcaactcagaatatggggtgaacaaggacaggcagcccttgagaagtctagtatttgcttacttaactgtggtcctactggttctgaaacacttaagaatcttgttcttggtggggttggaagcatcactgtagttgatggatctaaagttgaagcgggagacctcggaaacaattttttggtggatgaagcagtcttgggaagt

SEQ ID NO: 108310 - DNA, 261 bp, Glycine max
aatagctgctatcaacgaagctggtgggtggaaagacagaacaacagtggaagatatggaccttgctgttcgtgctagtcttaggggatggaaatttttgtaccttggtgacctccaggccaaaagtgagcttcccagtactttgagagccttcagattccagcagcacagatggtcatgtggtcctgctaatttgttccgcaaaatggtgatggagattgtgaggaacaagaaagttaggttttggaaaaagtgtatgtt

SEQ ID NO: 108311 - DNA, 259 bp, Glycine max
gagagagaagttttcagtttcagaaagaaagcaaaagcaatagcaatgggttggatcggtgagactgttgattccatcaaatctcttcagatccgccaggtcctcacccaggctgtgagcctaggcatgattgttacgtctgcactgataatatggaaggcattgatgtgcgttactggcagtgaatctcccgttgttgttgttctttctggaagcatggaacccggattcaagcggggagacatcttgtcttgcacat

SEQ ID NO: 108312 - DNA, 260 bp, Glycine max
cgaagagaatggctcccaagggtttaatctttttggctgtgttatgcttctcagcactgtcactgagtcgttgtcttgcggaggataatggacttgttatgaacttctacaaggaatcatgccctcaggctgaagacatcatcaaagaacaagtcaagcttctctacaagcgccacaagaacactgctttctcctggctcagaaacatcttccatgactgtgctgttcagagttgtgatgcttcactgttgctggactcc

SEQ ID NO: 108313 - DNA, 263 bp, Glycine max
gggcaagcaaagaagttgatgtggaggttcccgctgatgaagatgattccagtgatgaagaggattcatctgaaagcagctccaaggaggaaagcgaagatgaagatgctgataaaagtgaagatgaagaaaaaaagcctaagacaaagacagtgaaggaaacaacttatgagtgggaacttttaaatgatgtgaaagctatatggctgaggaatccaaaagaggttacagaagaagaatacaccaaattctacactctcttg

SEQ ID NO: 108314 - DNA, 260 bp, Glycine max
gcctctttctctctgttttctggtaattcatcaattgattcaaaatgcagagtctcaaactgcaactagtgctattcctctcaatctcaacttctcacgctgttttctccttcacagatgggttgttgccaaatgggaacttcgagcagggcccaaagccatcacaattgaaagggtccgtagtgactggccacgatgccattccgaattggacgatttcggggttcgttgaatacataaaatcaggacaaaacagggtg

SEQ ID NO: 108315 - DNA, 259 bp, Glycine max
ccagcattagcgatgtgctatgcacagctacagctgaggcacttgccatgggcaaatttgtagtttgtgctgatcatccatcaaatgagttcttcaggtcatttcccaactgtttgacttacaggacatccgaagactttgtgacaaaagtaaaagaagctttagaaaatgagccttatcctctaacacctgagcaaagatatcaactttcttgggaggctgctactcaaagatttatggaatattcggacttgacgga

SEQ ID NO: 108316 - DNA, 259 bp, Glycine max
aaacactcataacacaaagcacaaagcaaagctcatccttgagttaaaaaatggcagcagcttcttccatggctctctcatccccatccttggctggcaaggccgtgaagctgggcccatcagccccagaagtgggaagggtgagcatgaggaagaccgtcaccaagcaggtctcctcaggaagcccatggtacggcccagaccgagtcaagtacttgggcccattctctggcgagcccccgtcctacctaccggtgag

SEQ ID NO: 108317 - DNA, 258 bp, Glycine max
aaattttctcccccaaatcgtagatctacggttaaattggtgtagtgtggtaagatgggaggaggatttagagtgcttcacttagttaggccatttctctcgtttcttcctgaagttcaaactgctgacaggaaagtgccattagagagaaggtcatatacactgtgatctctcttttcattttcctggtttgtagtcagctccctctatatgggatacactcaacaacaggtgctgatccattctatggatgcgtgt

SEQ ID NO: 108318 - DNA, 259 bp, Glycine max
ctaggtagagagctcttcctccctttctcacagcaatggccgccgcagcacgccctctcgtcaccgtgcaggccctcgacggtgacatggcaaccgatgcctccgccaccgttcccatccctgacgtcatgaaggcctctatccgccccgacatcgtcaatttcgtacactcgaacatctccaagaacagccgccagccatacgccgtcagtcgtcgcgctggtcaccagacctccgccgaatcctgggtaccggccga

SEQ ID NO: 108319 - DNA, 269 bp, Glycine max
gtgtggttgaaagttaagaagtagcaaagatgtttccattcgggcacaagggtcaaaagataaaggggactatggtggttatgcagaagaatgtgttggatatcaacagcatcaccagtgttgacgggatcgtcggcaccggcttagacttcttaggcagtgcactcgatacagttacttttttagcctcctccatctccatccaacttattagttttaccaagtgcgatggtgggaaaggaaaagttggaaaggctacgaaattgaga

SEQ ID NO: 108320 - DNA, 267 bp, Glycine max
gaaacccataagtaatctgggtttctgaagatggaatgaccatgcagagttttggtagccaagaatgggatgctggctttgctgttcaagctttgcttgccactaacataattgaagaaattggtcctacgtttgcaaaaggacatgatttcatcaagaagtctcaggtgaaggataatccttttggagattttaaaagtatgcatcgtcatatttctaaagggtcttggacattctctgatcaagaccaggatggcagtttctgat

SEQ ID NO: 108321 - DNA, 262 bp, Glycine max
gacccttatctctctctctctcccgaattattgttcgttcgacccttttacttagtattccctgtttccggtattcgctccctttttttctgcattctggttttacttagatctctgtcccgcaccagatctggtgcagggtgagagggttgggttcattaattttgtatcaatcttccttctgagcggtaggcgtggggataccagagtcttttcgggaagcaagagagggttctctccgttttcaatagatctctcactg

SEQ ID NO: 108322 - DNA, 263 bp, Glycine max
cactcataacacaaagcacaaagcaaagctcatccttgagttaaaaaatggcagcagcttcttccatggctctctcatccccatccttggctggcaaggccgtgaagctgggcccatcagccccagaagtgggaagggtgagcatgaggaagaccgtcaccaagcaggtctcctcaggaagcccatggtacggcccagaccgagtcaagtacttgggcccattctctggcgagcccccgtcctacctaaccggtgagttccca

SEQ ID NO: 108323 - DNA, 263 bp, Glycine max
tcgagtttcacagccaagtcgtaaaagggtttcaagggatggaaaacatgcagagcttctggcaattgggtgatgaactccgtgggcactcaaaagcatcggaggatcacaagtggttaatggttgcctcgaaactggccgaacagacaagattgaagggggagcgtgtgaacaaccttgatctttcaaagggacccattgaaacaaggtcaagggataaatttgggttccaggaagagaacaaatttgattctcttaacttg

SEQ ID NO: 108324 - DNA, 264 bp, Glycine max
cgaagagaatggctcccaagggtttaatctttttggctgtgttatgcttctcagcactgtcactgagtcgttgtcttgcggaggataatggacttgttatgaacttctacaaggaatcatgccctcaggctgaagacatcatcaaagaacaagtcaagcttctctacaagcgccacaagaacactgctttctcctggctcagaaacatcttccatgactgtgctgttcagagttgtgatgcttcactgttgctggactccacaa

SEQ ID NO: 108325 - DNA, 269 bp, Glycine max
agtgaagaaaatgaaagtccttgttttctttgttgctatagttctagcagcatggcattgccatggctcagaccatgaccatgaccatggccacacctaccaaattttccctctgagaatgaaaactggccatggtggccactacattccggaggtatcatgccaaagttggaggcttggtgtggaagcacacaacgtcattgactggaaaaccgttcctcaagattgcgagggatatattgggaactacatgcttggcgaacaatata

SEQ ID NO: 108326 - DNA, 266 bp, Glycine max
gatcgagataactagaaacagtgtgatgaaaatgaaggtccttgttttcttcgttgctacaattttggtagcatggcaatgccatgcgtacgatatgttccctctccgaatgaacactggctatggtgcccgtactccggaggtgaaatgcgcaagttggaggcttgctgtggaagcacacaacatctttggctttgagaccattcccgaagagtgcgttgaagcaacaaaggaatacatccatggcgaacaatatagatcagact

SEQ ID NO: 108327 - DNA, 259 bp, Glycine max
gtttttacaatccttcaaaaattttgtttctttgtgtgtgtatggtgatgataacttaattagtgttcatgaatatgtcaagccttactttagtggttctaaattgaaaagctttctagctggtcataatatcaccattactgatggtattgacaaaactagtgcaactttgcaatttagaaagttagcagattgtgattttctcaagagaaactttaagcagatgtctaatgttttgtgggtggctcctgaggacaag

SEQ ID NO: 108328 - DNA, 244 bp, Glycine max
aaatgattgtggttcattggttgttgccaaggttggaaatcacaaacaaattgttggtttccatgttgctggaagcaaaggaagactgggatatgcttcattgataccatatgttgagccagttgtgcaagctcaaagtgctgaagtttatcttgacttcttccctgtggaggttgatagtcaagagggagttgctcacattggtgaattgaaatctggtgtctatgttccattgcctacaaaa

SEQ ID NO: 108329 - DNA, 258 bp, Glycine max
acactttccacttgtctccgaattagttatcttgagaaacattattcccattgctatatattatggctagcatgaaggttacatgggtggttgtgatcatgtgcatggccgtggtgggtgcaccgatgatggcgcaagccatgacatgcaatgatgtgacggtgaacatggcacagtgcctatcctacctgatgcagggaggaacaccttcaacactttgctgcagcggagtcaagaacattcttggctctgctgtca

SEQ ID NO: 108330 - DNA, 261 bp, Glycine max
caatattggggcagtgctgtgagatgccgatagggttcgtgcagatccccgtgggagtagcgggaccactgttgttggacgggaaggagtacaccgtgcccatggccaccactgaagggtgtctcgttgcgagcaccaacagagggtgcaaagctatccacgtctccggtggggcctcctcggtgttgctcagagatggcatgaccagagcacccgttgttcggttaccctccgctcagcgcgctcgcgcagttgaagttc

SEQ ID NO: 108331 - DNA, 260 bp, Glycine max
gaattgttgtaactttttgattcctaaattctctaaaattcgaaattctaatttcgttaggggaaagagattgtttgtgtgtgagtgagtatggctggaaaaggcgagggtcctgctatcggaatcgatttgggaacgacgtactcttgcgtcggcgtgtggcaacacgatcgtgttgaaatcatagccaacgatcagggtaacagaactaccccatcctacgtggctttcaccgacacagaacggttgatcggcgatgc

SEQ ID NO: 108332 - DNA, 263 bp, Glycine max
gaaaaatggctgcaacttttacctaaaatgatgtccatgttatggcaaagaccttgctggaaaaatttgaggaaaaatggctgcaacttttacctaaagttgctgaggaggaaaagagacaattagaggaagaagcacaggcacaactagacattcagcttgctctggagaccacttatgccaataaggccaaggatataagtactgagctttgtgagattgatatgcatttgaagagtctcaaagaaatggtgattcaacag

SEQ ID NO: 108333 - DNA, 200 bp, Glycine max
gttgcctcgaactcaaaggatgatcctgccaaggaggctgctaacttcactgcccaggttatcatcatgaaccatcctggtcagattggaaatggctatgcccctgttcttgactgccacacttcccacattgctgtcaagtttgctgaactcatgaccaagattgacaggcgatctggcaaagatcttgagaaggaccc

SEQ ID NO: 108334 - DNA, 261 bp, Glycine max
ccaatatattccattctctctgtgtatttccctacctctcccttcaagatgcagatcttcgtcaagaccctcaccggcaagaccatcacccttgaggtggaaagctctgacaccatcgacaacgtcaaggccaagatccaggacaaggaaggaatccccccggaccagcaacgtctcattttcgccggaaagcaacttgaggacggccgtacccttgctgactacaacatccagaaggagagaactcttcacctcgtcctc

SEQ ID NO: 108335 - DNA, 256 bp, Glycine max
tcaaaagcccgacactagtccacttttcaagcttctagcatcagggtttgcaaattatgatggcgacaagtgggctaaacacagaaagatcgtgagtccagcattcaatgtagagaaaatgaagctcttggtaccgatattttgccagagttgcgatgatttgatcagcaaatgggagagtttgttatcttcgtctaatgggtcttgtgagttagatgtgtggccttttgcccaaaacgtgtcaggcgacgttctt

SEQ ID NO: 108336 - DNA, 257 bp, Glycine max
gtctccaccgactttgttggtgataacagatcaagtatttttgatgcaaaggctggaattgcattgaataagaattttgtgaagcttgtctcttggtatgacaacgagtggggatacagttcacgtgtcattgacctgcttgtaatcgttgccaagaagtctttttaattaaggtggttctaacattatgtgctggtcaagctgcgatttagtgtcttgctcgtgcaaaaattgagaagtatgaataaatcggtttc

SEQ ID NO: 108337 - DNA, 259 bp, Glycine max
cctacttctccaaacaggcccaaaatttggactgagaactggcctggatggtttaaaacttttgggggaagagatcctcacaggccagcagaagatgttgcattttctgttgctcgtttcttccagaaaggtggaagtgtacataattactacatgtatcatggaggaacaaattttgggcgtacagcaggtggtccattcattactacaagttatgactatgatgccccagtagatgagtatgggttacctagacttc

SEQ ID NO: 108338 - DNA, 259 bp, Glycine max
ctcgagccgattcggctgagattttctctccgtgatacaacacaagaggaccctcgataggtgactgctgcaaaggcagatttaaattatattgggttagatggagaaattggctgcatggtgaatggagcagggttagcaatggccacaatggatataattaaattgcatgggggtactcctgccaattttctggatgtaggtggcaatgcctctgaaaaccaggttgttgaggcatttaaaatattgactgctgatg

SEQ ID NO: 108339 - DNA, 249 bp, Glycine max
caaacctaagacgcgctgcttaactattctccctatggagtttaatcttgtggttcgtcagaagtttttaaatattgtgaggttcattatgaagaaaagggacaagcttagttgtcaagttggagtcaacccatactccatggaatggactggtttggccaatagattactgagtaagggcaacgatattctgtgttgcgattatgctagttttgatggtttgattaccaagcaagttatgagcaagat

SEQ ID NO: 108340 - DNA, 260 bp, Glycine max
caacctgacagcctccaaatccaatggcttcagagaagaaactttcgaacccaatgagggagataaaagtgcagaagctcgtcctcaatatctttgttggcgagagtggagatcgtctcaccagagccgccaaggtgttggaacaacttagtggccaaaccccagtgttttccaaagcacggtacactgttcgttcctttgggattagaagcatgagaagattgcatgctatgtcactgtcagaggtgacaaggcaatgc

SEQ ID NO: 108341 - DNA, 256 bp, Glycine max
gtcggagctgtgtctggggaaatttgcgttgtttttcgcggtacagctcacacacactgaacggtaagtatggcggacaaggctgttacaatccgaacccgaaagttcatgaccaacaggcttctttccaggaagcagtttgtcgttgatgttcttcatccagggagggcaaatgtttccaaggctgaacttaaggagaagctagctaggatgtatgatgtgaaagaccctaatactgtatttgtcttcaaattcc

SEQ ID NO: 108342 - DNA, 256 bp, Glycine max
gttgaaactcctaaaggttccatgttggatcttaaaatttctcaatctaaaattgcacttcccaagaacacagttggaggaaccattctgcgtagtgatctattggcaaattttttgacagagggcaattttagagcaagtgttgatttgcagcgcactcatcgtattaaaggaatgattaaaatggtggctacagttggtattcctgagaatacaggtatagcattggcctgtgctatgaatagctcttttaggg

SEQ ID NO: 108343 - DNA, 256 bp, Glycine max
gtctccctttgcacaaaccctaacacctaaaagccagaagaagcgaaatcgtaatcgcaatctagcggatatgaaggtcgtcgctgcatacttgctcgcagtgttgggagggaatccatctccttctgccgatgatatcaaaaacatcctcggcgcagttggagctgaggctgagcatgagttgattgagttgctcttgaccgaagtcaagggcaaagacttcaatgagctacttgctagtggaagtgaaaagatt

SEQ ID NO: 108344 - DNA, 268 bp, Glycine max
  unsure (1)..(268): unsure at all n locations
acttaacgtatccgccattactaggggcatattccattccaccaccatttctctgtctnagagacccttttgcttcttttcagataacatgggcttagtctgcagcagaggtcgtcgttttcgtgaagctgatgctgaagaaaatgctcaggatgcagaaattgaaagaagaatcaagttagaaccaaaggctgaaaagcatattcagaaacttttattactaggtgctggagagtctgggaagtctacaatctttaagcagataaaa

SEQ ID NO: 108345 - DNA, 266 bp, Glycine max
caggcatggccgttctgcacacagaatgtcctccacctctttgcgcaagaaatctagccgaactcttgtctcaaaggttccatgtgccactctcagaaactttctttcaaatttgcaagaggttattcttggcaccaagctttccattctcatccctgctattccagctgccatcgttgctgagtgctttggctttggaagaccttggatttttatattaagcttacttggacttacaccacttgctgaacgtgtgagcttcatta

SEQ ID NO: 108346 - DNA, 251 bp, Glycine max
gattcttatgctaagaaggagaatgacatgatggttagagggggcattgaacgggctgacctgcttggcgtgctcaaagggaagggaacgaagatggataagcttaggtttgccatcatatatctcatttcgtcggaaaccattaatcagtcggaagtggaagctgtggaagcggcgctgagagagtctgaggttgatactgctgcttttcagtatgtgaagaagatcaagtcgttgaatgtttcgttggc

SEQ ID NO: 108347 - DNA, 260 bp, Glycine max
caactacaaaggttgctgtaggagataagatattgaagtagtgctaagtgcctaacacctgcagtgaacaatggcctctgcatcagcatcttttctcaagtcttcatatgttcttgacaagtctgagtgggtgaagggacaaacacttcgccaaccttctgctgcatcagttgtgagatgcaaccccaccaccccatcaggcctcaccatcagagctggttcctatgctgatgagctcgttaagaccgcgaaaacagtgg

SEQ ID NO: 108348 - DNA, 254 bp, Glycine max
gcggcgccttcgcattcctctcgccggattctttcgcatacgacgccgtctgccgacgtttctgccggcgaatccccgccgtcgtcgtctccgtcaactaccgcctcgcaccggagcaccggtacccttcccaatacgacgacggcgaggatatcctcagattcctcgacgagaaccgctggtatcgatggcgaggacggactggctgtggaaggcgtttctgccggaggggtcggatcgcgatcatggggcgg

SEQ ID NO: 108349 - DNA, 254 bp, Glycine max
  unsure (1)..(254): unsure at all n locations
aaaactttatgactgatgagtttttcctcgtcagtgttaaactcgaggacattccaaaccatgtaaccatttacttcgnntgtaactcatgggtttataacttcaaaagttacaaatagaatcgcattttctttgtcaatgatacatatcttccgagtgctacaccaggtccactagttaagtacttttcagaagaattggaggttttaagaggagatggaacagggaagcgtagaggttttgatagaatctat

SEQ ID NO: 108350 - DNA, 261 bp, Glycine max
tgactttcccccagggcacttcccgaagtgttaagagaatgcctctttctatagggggaggagctggtgcaaagaatgctattctcatgaacatgccaaatgctgttctttcaatgtggagatattttgttggagatctcgtctttgaagtttctaagatgacttctccctacattaaatgtacagtctctttcttcatagcatttggaaatttggctgatgacaccatcaattttgaggcctttccccacaagctggtgc

SEQ ID NO: 108351 - DNA, 260 bp, Glycine max
gaagaatcgaaagacgaaggcgggttgatgatcaagccgcagagcttcactcccccaatcgacacctcccaatggcccatcctcctcaaaaactatgagcctctcaatgtccgcaccggccactacacccccatcccctccggctactcccccttgaagcgccccctcgccgagtacctcaaatacggcgtcctcaacctcgacaagcccgccaacccttcctcccacgaggtcgtcgcctggatcaagcgcctcctccg

SEQ ID NO: 108352 - DNA, 257 bp, Glycine max
  unsure (1)..(257): unsure at all n locations
ggtttccaaatgaaacatggtaagtgaatttgcctgttgaggaagtgcctcctgaacttcctagttgcagcattgaggtataaagctttcgccaggtgcacggcatcgcaagaagaagtatatanggctatgcactgtgtatgcagttgcacagtagactacatgagctagcttgcttcgtcgcgtttctaattttgcgtgtcccgctgttgggatttcggtgaagagatgaacaggaataaggcttttctcagatg

SEQ ID NO: 108353 - DNA, 257 bp, Glycine max
ctcttgcagtcgcagaggaaaaccctagctagtagtctcagttcgtttgagagagaaaaaatggcagagggtctcgttctccgcggaaccatgcgcgcccacaccgacgtcgtgacggcgattgccactcccatcgacaactccgacatgatcgtgacggcgtcgcgcgacaaatccatcattctctggcacctcaccaaggaggacaagacctacggtgtcccccgccgccgcctcaccggacattctcacttcgt

SEQ ID NO: 108354 - DNA, 253 bp, Glycine max
ggaccaaacagcatccgctgcagcgacggtaaccctccaacaacaacacttccgctgcgaaaaatgtctctggtggcgaacgaggatttccagcacattctgcgtgtgctgaacaccaacgtggatgggaagcagaagataatgttcgcaatgacctccatcaagggtattggaaggagattcgccaacatcgcttgcaagaaggctgatgttgacatgaacaaaagggctggtgagttgactgctgctgagt

SEQ ID NO: 108355 - DNA, 254 bp, Glycine max
cctcatccaccatcactgctcatggctgatgcatggacaaaaccatactccagggaatatgcagccttcccagctccttggctccgtactgcaaagttctggcctaccacaggacgtgttgataatgtgtacggtgaccgcaacctcatttgcacccttctcccagcatcacaggctgttgaagaacaagcagctgccacagcataatgtgttcaaatgacaactattttcatttcccgttgtacataaactct

SEQ ID NO: 108356 - DNA, 230 bp, Glycine max
gcagcaattcacactggtctttgcttctcgttactcatttctcacctaactttctattcttctcagtctcagatcagaaccttagccatggcagcgttccagaagatcaaggtcgccaaccccatcgtcgagatggacggagatgaaatgactagggttatctggaagtcaatcaaggacaagctcattttgcccttcttggagttggacatcaagtattatgacttagg

SEQ ID NO: 108357 - DNA, 250 bp, Glycine max
ggctactggagaggattattccgtggaacctgctgagagcaggaggccattccgtgctctccttgatgttggtcttattaggactacaaccggtaaccgtgtgtttggtgcccttaagggagctctggatggggggttggatattcctcacagtgacaagaggtttgctgggtttgataaggagaagaaggagcttgatgcagaggttcatcggaaatatgtttttggtggacatgttgctgcctatatg

SEQ ID NO: 108358 - DNA, 252 bp, Glycine max
ctcgagccgcaacattttacactcttttcttcttctcgttgttgcttcggtgttgaatcaacgatcagaaagtcgatttcagtgctccgcattccatgggaaccactatcatcggcgttacttacaacggcggtgtcgttctcggagccgactctcgaaccagcactggagtgtatgttgccaaccgagcatcggacaaaatcacacagctcactgataatgtttacgtgtgtcgctctggatcggctgctg

SEQ ID NO: 108359 - DNA, 251 bp, Glycine max
tcgagataactagaaacagtgtgatgaaaatgaaggtccttgttttcttcgttgctacaattttggtagcatggcaatgccatgcgtacgatatgttccctctccgaatgaacactggctatggtgcccgtactccggaggtgaaatgcgcaagttggaggcttgctgtggaagcacacaacatctttggctttgagaccattcctgaagagtgcgttgaagcaacaaaggaatacatccatggcgaacaa

SEQ ID NO: 108360 - DNA, 254 bp, Glycine max
gtcggagctgtgtctggggaaatttgcgttgtttttcgcggtacagctcacacacactgaacggtaagtatggcggacaaggctgttacaatccgaacccgaaagttcatgaccaacaggcttctttccaggaagcagtttgtcgttgatgttcttcatccagggagggcaaatgtttccaaggctgaacttaaggagaagctagctaggatgtatgatgtgaaagaccctaatactgtatttgtcttcaaatc

SEQ ID NO: 108361 - DNA, 238 bp, Glycine max
cgagtgctaagcgtttgattggaaggcgtttttccgatgcatcagtacaaggtgacatgaaattgtggccgttcaaggtgattcctggccctgctgagaaacctatgattgtggtgaactacaagggggaggagaaacagttttccgcggaagagatatcctccatggttcttatgaagatgaaggagattgcggaggcgtatctaggttccaccataaagaatgcggttgtcactgt

SEQ ID NO: 108362 - DNA, 240 bp, Glycine max
gctcgaggaaagggagaaagggtgtgagaatggagagcaaagaggaagatgtaagggttggagcaactaagttctcagaaaggcaaccaattggtacagcagctcagggtgacaaggactacaaagaaccacccccagcacctttgtttgagcctggtgagctaaagtcatggtccttctacagagctggaattgctgagtttgtggccactttcttgttcctctacattaccatcttaa

SEQ ID NO: 108363 - DNA, 233 bp, Glycine max
ttccccttcaccccttccttttttgcgttcattctgttttcatagtgacgaacttctgaagaaatggcaaatcatcctttgacacactctcactctttccgcgagaggtttgatgaaactctcactggtcacaggaacgaaattttggcccttctgtcaaggcttgaagccaagggcaagggaatcctgcaacatcaccaagtggttgcagagtttgaagaaatccctgagga

SEQ ID NO: 108364 - DNA, 227 bp, Glycine max
ggattgttggagaggcacggtgcccataatatttctctcataaattctatggtcatggtttctaatgcgccactgtgggttcctcaaatttttagatagcttttgaatgtattttgctggacgtggtgatgatgattggagttgggttgtttttatttgtggtcgatccttttgttaaataacattgttcagcgattgcgatattattaccctttgtagtatgtgac

SEQ ID NO: 108365 - DNA, 225 bp, Glycine max
gtttatcgtgaggagaatatgaagttgtttgttttctttgttgctgcagtagttttggtagcatggccatgccatggcgcaggctaccaaaggttccctctccgaatgaaaactggctatggtgagcgttcttcggaggtaaaatgcgcaagttttaggcttgctgtggaagcacacaacatccgagacaattaaaaccattcctgaagagtgcgttgaaccaac

SEQ ID NO: 108366 - DNA, 226 bp, Glycine max
ctcaaatgtaggcttttcaacctcaattaacttcagaattcagggtcacaccctaaaattagttgaggttgaaggatcacacactgttcagaacctttacgattcacttgatgtccatgttggccaatcggttgctgtgttagtaaccttaaaccagcctccaaaggactactatattgttgcctcaacaagatttacagagacacctctcactacaactgctgta

SEQ ID NO: 108367 - DNA, 245 bp, Glycine max
ggaattcggctcgcgactagctcacgaagcttctcggcctgaggccctccgtgaagcgcctcatgatgtatcagcagggctgcttcgtcggcggcaccgtactccgcctcgcgaaggacctcgacgagaacaacaagggtgcgagggtgctcgttgtctgctccgagataaccgccgtgacgttccgcggcccctcggacacgcacctcgactcgctcgtgggacaggcatgttcggagatggcg

SEQ ID NO: 108368 - DNA, 234 bp, Glycine max
tgcggcgccagaagagctccaccgcttctcaacagaaacttcaacgaaagagccttcaccgtcggaatcggtggacccgtcggtactggcaaaacagctctcatgttggccctttgtgaactcttgcgcgaaaactacagtctcgcagctgtgacaaatgatatattcactaaagaggatggtgagttcttggtgaagcacaaagcacttcctgaggaaaggatacgcgctgta

SEQ ID NO: 108369 - DNA, 230 bp, Glycine max
gttcttgctacaaatggagatactcatcttggaggtgaggattttgatcaaagaataatggagtacttcattaaattgatcaagaaaaagcatggaaaggatattagcaaggacaacagagcacttggaaagctgaggagagaggctgagcgtgcaaagagggctctcagcagccagcaccaggtccgcgtggaaattgaatcactttttgatggtgttgatttttctga

SEQ ID NO: 108370 - DNA, 229 bp, Glycine max
gtactttgagagccttcagattccagcagcacagatggtcatgtggtcctgctaatttgttccgcaaaatggtgatggagattgtgaggaacaagaaagttaggttttggaagaaagtgtatgttatatacagctttttctttgttcgcaaaatcatcgcccacatggtcaccttcttcttctactgtgttgtgattccccttatcatcttggtcccagaggttcatgt

SEQ ID NO: 108371 - DNA, 227 bp, Glycine max
tgggacacataaacccggcggtgacatgtgggctgtttttggcgaggaagttgtcgttgcccagggcgattttctacattgtaatgcaatgcttgggtgctatttgtggcgctggcgtggtgaagggtttcgaggggaaaacaaaatacggtacgttgaatggtggtgccaactttgttgcccctggttacaccaagggtgatggtcttggtgctgagattgttggc

SEQ ID NO: 108372 - DNA, 209 bp, Glycine max
gtgttgaagtagcaagctagcaaagatgtttggcatcttaggaggcaataaggggcacaagatcaagggtactgtggtgttgatgagcaagaatgtgttggacttcaacgaaatagtgtccaatactcagggtggtttggttggtgctgccaccggcatcttcggtgctgccaccggtattgttggtggagttgtcgatggtgctactg

SEQ ID NO: 108373 - DNA, 235 bp, Glycine max
ggattgagagcattggttaaaacaggctatggtgcaagggtgactccttatgttgatgattccgttgttattgatgttaatccagccaataaagacatgtcccctgagtttcttcgatggttgggcgagagaaaactttctagcgatgaccgtataatgcaattaaaagaagggtacatcaaagaaggtagcacagttagtgtaatgggagttgttcaaagacatgacaatgtgc

SEQ ID NO: 108374 - DNA, 227 bp, Glycine max
catggagctccaggaagagaaatgttgagtgagagcaagctgagggatcttctgcatggttctgagtatgttctcacttatgaagataaagatggagattggatgcttgtaggggatgtgccatgggaaatgttcattgagacttgcaaaaggctgaaaattatgaagggctctgatgccattggtttagctcccagggccatggaaaagtctaaaagcaggattta

SEQ ID NO: 108375 - DNA, 218 bp, Glycine max
gctgagttcatctcaacccttctctttgtttttgccggtgttggttcagccatagcctatgctaagttgacatcagatgcagctcttgatccaactgggttggtagccgttgctatttgccatggttttgctctcttcgttgctgtttctgttggagccaacatttctggtggccatgtgaaccctgctgtgacctttgggttggctcttgggggcca

SEQ ID NO: 108376 - DNA, 217 bp, Glycine max
gacctgatggtgttttgtccattgagtcttcatcatcgtttgagaccacagttgaagtggaagaaggaatggagattgacagagggtatatctcgcctcaatttgttacaaaccctgagaagttgattgttgaatttgagaatgccgagagtgttgattacagatcagaggatttcagcaataaaagacattataccactgttggagaaaaccactc

SEQ ID NO: 108377 - DNA, 220 bp, Glycine max
  unsure (1)..(220): unsure at all n locations
cttcgatcttcgatcttcgtcgctgaaaatgagagagtgcatttcaatccacatcggataggatgttctncaggatggaaacgcctgctgggagctttactgcctcgaacacggcattcagcctgatgggcagatgccaagtgacaagaccgttggtggatgtgatgatgctttcaacaccttcttcagtgaaactggggcaggaaagcacgtgccccgc

SEQ ID NO: 108378 - DNA, 220 bp, Glycine max
  unsure (1)..(220): unsure at all n locations
ggagaagttgcccagaacattttgacagaggcaactctttcttctgggagattctttcccgttcttttgctattctagtctcacagggagatgtagagcaagtgatgntngattcatatgatgtacatttctatgcaccatcaagggtagagatatgagaagaggtgagtcaagcagggntcttgaagttggagatgctagagatgtttgaaatggacaa

SEQ ID NO: 108379 - DNA, 220 bp, Glycine max
ggttgaaatagcatgtgcatcaactcctaaccatttggtggctgtgaggcaggcttactgctctctctttgattgctcacttgaggaggacatcatagcctctgttgctccagccctcagaaagcttttagtgagcctagtaagctcattcaggtatgataaagtggctgtaaatttggaggtagccaaggaagaggcatcaaaactacatgaagctatc

SEQ ID NO: 108380 - DNA, 154 bp, Glycine max
cggctcgagtaagatttgaaattttgataaaccgcgatcacaggttgccgcaccttaaaaccggaaacaaaagcaatcgttacttggtttcaagaatttctcaatttcttcctatttctttgtgtacgatttcttaagggaaagaaaatcactc

SEQ ID NO: 108381 - DNA, 224 bp, Glycine max
caaagagctaacaagagattcaagaccggcatggctaatgaagaggaacagaaaaaccacctcttcggcatcaaagatctcggtcacaagactctccttcagagtgatgcactctatcagtatatacttgaaaccagtgtctatccaagagagcacgagtgcttgaaagagatacgcaagatgactgcaaaacacccactgaacatcatggcaacaccagcaga

SEQ ID NO: 108382 - DNA, 202 bp, Glycine max
cgctgcattccctctgcgttctccaacgaggaaactcatgtcgcacactcttgcacgttccactcttggtctcacacacccttctaatctcgaaacccccaagatctcttttggtgctaaggatgttgatgtgacggaatggaaaggggacattctggcagtgggtgttacggaaaaagatttggctagagatgcaaactcg

SEQ ID NO: 108383 - DNA, 221 bp, Glycine max
gcccaacagatatgaagtttcccaatacagatatcgcaatgtgccaataaagcgcagagcatgggttgaaggtcagatgtctttcgatcagtctgtagtagcaattatgtctaaatgcaaagccagcatgagaatgggaaacactgatgctcaaattttgatggttccagggcgcagattcatagctcatggacattttttcaaaaatctgactcagaaag

SEQ ID NO: 108384 - DNA, 223 bp, Glycine max
ctgtttcgtgaagctcagtgcatcaagatctctctctctgtaatcgaaaatgagcaagggaccgggtctctttaccgatatcggcaaaaaatccaaagatcttttgactatcgactacaactccgatcagaaactcaccatttcctcatacagcatctccggagtggccctcacttcaacatctgtcaagaaaggaggactctccactggggatgtggcagca

SEQ ID NO: 108385 - DNA, 220 bp, Glycine max
ctcgagccgtttgatgccaacggattctaaatgtgaaggcagaagacaagggcactggacaaatcagaaaagatcaccattacaaacgaaaagggacgtcttagccaggaagaaattgagagaatggttcgcgaacagaggagtttgcagaggaagacaagaaggtgaaggagaggatcgatgctcgcaacagtcttgaaacctatgtatacaacatgaa

SEQ ID NO: 108386 - DNA, 217 bp, Glycine max
agcaggcgcatgtgtcggtttgcgcggatttgaagctggccttgcaggggattaatatgattttggagaaaaaaagagtggggggtggtaagcttgatcttggaagctggagggaagagattaatgtgcagaaacacaagtttccattgggttacaaaacattccaggacgccatttccccgcagcatgctattgaggttcttgatgagttgacaaa

SEQ ID NO: 108387 - DNA, 215 bp, Glycine max
caccgttgtctttggaggcgccagaatacgtcagtggaaacactgggaagattctattgcaaaacagaactacgagactgaccgagttctcaaaccaaaggtcactcaggttcaccagcatgattttatcaggggtcgttttgctggttttggcaaagactctgctttagaaaggatagcaaccaaccgactatagcagagtctttggttgctat

SEQ ID NO: 108388 - DNA, 217 bp, Glycine max
gtctagcctctcgctcagctgcatactacgagcaaggtgcccgtttcgccaaatggcgtactgttgtgagcatccccaacggtccctctgctctggcagttaaggaagcagcctggggtctggctcgctatgctgcaattgctcaggacaatgggttggtcccaattgtggagccagagatcttgcttgatggggagcatggaattgatagaccttt

SEQ ID NO: 108389 - DNA, 224 bp, Glycine max
ggaaatggtgagtctactagctctggattgttatctaaccccactagacctgatcttttgcactcaaaaggagaggaagtgggtggaagcagtactttgaaagacaagcttccccactggttacgagaagctgtgagctccccagccaaacttcctgatcctgaacttccacccacagtatcagccattgctcaatcagttcgcctgttataccgcgaagataa

SEQ ID NO: 108390 - DNA, 228 bp, Glycine max
ctcgagcgctctctttcgtcagtttcgggggaagagatccagcagcaatggtgtacgtacaaggctcagaaatcaaaagcctacttcaagagatatcaagtcaagttcaagagaagaagagagggaaaaaccgattaccgtgccaggattcggttgattaatcaggacaagaacaaatataacactccgaaataccgatttgtggttcgctttagcaacaaggacatt

SEQ ID NO: 108391 - DNA, 188 bp, Glycine max
atttgggctcgagttggtgtgagtgaatagggatcagggatgtggaggctgaagatagcagatggaggatatgatccatacatattcagcacaaaccatttcgcagggaggcagacatgggagtttgatcctgaagcaggcagtccagaggaacgggcccaggttgaagcagctcgtcagcatttcta

SEQ ID NO: 108392 - DNA, 218 bp, Glycine max
agacagtgggtttatggtggtccgggatgggtgcaccatattccggtccccagtgcagcaacatgatttcaatttcacctatcagctggaatgtggtagtaatggtgatttacctagttctggtcaggtttttaccattcccgttgcacccggtgatgtcatagttgctggtacagatgggctgtttgataacttgtacaataatgagattacagcag

SEQ ID NO: 108393 - DNA, 221 bp, Glycine max
gagaatctgttgaggcagggatacagaattgttggaatcattggagaccaatggagcgatctgcttggagaccacagatgcgaaagcaggacctttaagcttcctaatcccatgtactacattgagtagtaccttcacctctctcaacaatctagctagagtttgctcctatctatatgtaataaggtatgctgatatgcactattcaaataggagcatta

SEQ ID NO: 108394 - DNA, 189 bp, Glycine max
atttgaaattttgataaaccgcgatcacaggttgccgcaccttaaaaccggaaacaaaagcaatcgttacttggtttcaagaatttctcaatttcttcctatttctttgtgtacgatttcttaagggaaagaaaatcactctctgtgctggccacagacttcgtgaatcattctcttttccacacaaca

SEQ ID NO: 108395 - DNA, 209 bp, Glycine max
agagaaataagggaaaaatggtgtcgctgaaactgcagaagcgcctctccgcaagcgtgctcaagtgcggcagaggaaaggtttggcttgaccccaatgaagtcaacgaaatctccatggccaattctcggcaaaacatcaggaagttggttaaggaggggtttatcatcaggaagccaaccaagattcactcccgctcacgtgctcgt

SEQ ID NO: 108396 - DNA, 218 bp, Glycine max
aagcaatagctgagaaaaagaagagagttaccgatgttgatctcaaagcattggtatcagatcaagcttctcatgctgagcctatttggaagcttggtggtttgcaggtgacttgtggaactatgggttcttcaacagcaactatcaaacttgttactagtgatggtagcacacatgttgcttgttctgttggtgtaggaccagtagattcagcttac

SEQ ID NO: 108397 - DNA, 227 bp, Glycine max
agctaggcgttggattggaaggcgtttttccgatgcatcagtaccaggtgacatgaaaatgtggccgttcaaggtgattcctggccctgctgagaaacctatgattgtggtgaactacaagggggaggagaaacagttttccgcggaagagatatcctccatggttcttatgaagatgaaggagattgcggaggcgtatctaggttccaccataaagaatgcggttg

SEQ ID NO: 108398 - DNA, 217 bp, Glycine max
agacaaaacctaatggagcagagcacaagttttgtgcaaaatccttggaaacattaatcggttttgcaatttcaaagctgggaaagaacattcaagtactttcaagttcctttgtgaataagcaagagctatacaaagtggaaggagtgcaaaatcttggagacaaagcagtgatgtgtcataggctcaatttcagaacggtggcattttattgcca

SEQ ID NO: 108399 - DNA, 214 bp, Glycine max
ctgccttacaacttgtgctcagaaaatctctggcttatggtggtactgtcgcgtggccttcatgaaggtgcaaaagtgattgagaagcatgctgcacaactctgtgttcttgcagaagactgtgaccagcctgactatgttaaactggttaaggccctttgtgcagagcacaatgttagcctgctgacagttccgagtgcaaagacccttggag

SEQ ID NO: 108400 - DNA, 215 bp, Glycine max
ggagcttttgacgaggatgcaattcgcaataattttgtactcatttatgagctcctagatgaaattatggactttggttacccacaaaatctttcaccagagatcttaaagctttatatcactcaagaaggagtgcgttccccattttcatcaaagcccacagatagacctgttccaaatgcaactttacaagttactggtgctgttggttggcg

SEQ ID NO: 108401 - DNA, 213 bp, Glycine max
actatatccaactgttaaagataaagtgaaaataacattgattcaatctggagatcatatcttgaacatgtttgatgaaagaataagttcatttgcggagcaaaagtttacaagagatggggtagaagttcaaacaggatgccgggttgtcgctgttaatgacaaggatattacagtgaaggtgaaatcaacgggagatgtttgctcggtgcc

SEQ ID NO: 108402 - DNA, 217 bp, Glycine max; identical to SEQ ID NO: 108398

SEQ ID NO: 108403 - DNA, 223 bp, Glycine max
ctcaaagcaacacaagaacactctcttgaacattcatggatccagtgagcgtgtggggtaacacgcccttggcgacggtggatcccgagatccatgacctcatcgagaaggagaagcaccgccaatgccgcggcatcgagctcatcgcctccgagaacttcacctccttcgcagtcatcgaggccctcggcagcggcctcaccaacaaatactccgagggcat

SEQ ID NO: 108404 - DNA, 237 bp, Glycine max
caaattcctgctgttgacaagttgtattctactaaggttaataagtttgcaaaaattatgaaccttagacaaagtgttgttggtgatcttaaacttcttactgatgggctgttgtatgagggtaagcatattcctgtactaatattagtgcaggggataatcatgtagttcaaatacccttaatggcacaggaggaaattctgtcttctagtgcaagtgatttcagaactgcaatgg

SEQ ID NO: 108405 - DNA, 242 bp, Glycine max
cgaaaccctaggttttagtgagtggcgaaaatggcggtgattttttcaagtgcaataccaggaggggcagcaccagcagcaatcgagcaagtgcagtgcttcgggcggaagaagacggcggtggcagtgacctactacaacgcggccgaggcctcattaagatcaacggctgcccgatcgagctggtggagccggagatcctccgcttcaaggccttcgagccaatcctcctcctcggtcgc

SEQ ID NO: 108406 - DNA, 242 bp, Glycine max
gttgggacctggaatactggggaatattttcgatggaattcagaggcctttgaaaactattgctaaacgatctggtgatgtctatattcctcgtggtgtctctgttccagcactcgacaaagctacactttgggaatttaacctaagaaaattggtgaaggcgaccttttaactggtggagatttatatgctactgtttttgagaacagtctaatgcaacaccatattgcacttcctcctga

SEQ ID NO: 108407 - DNA, 244 bp, Glycine max
agatcaaattcctgctgttgacaagttgtattctactaaggttaataagtttgcaaaaattatgaaccttagacaaagtgttgttggtgatcttaaacttcttactgatgggaagttgtatgagggtaagcatattcctgtatctaatattagtgcaggggaaaatcatgtagttcaaatacccttaatggcacaggaggaaattctgtcttctagtgcaagtgatttcagaactgcaatggtg

SEQ ID NO: 108408 - DNA, 248 bp, Glycine max
gtggttctttgggaagttcaatgagatgaaatcaatgaaggcaaagtactacctagccgagaagccaagatcatcgttcgcaaagttttgccgggtcaagtattcgagacttgtccatcccaagatggagtcatcgttttttggcaaccagagtcataggaaccttgtgaatgcaggagggtttccagacactgaattctttgcctcattcgccgagatggcgaagagggtgtggcttctacactgct

SEQ ID NO: 108409 - DNA, 247 bp, Glycine max
agcatttggaaatttggctgatgacaccatcaattttgaggcctttccccacaagctggtgcattttggagaaattcaggaaaaagttgtattgaaattttcacaagaggaatttcttacagcttggtcaactcaggtgcgtctgcaacaactctgttggctgatgggtgcccatatttgtatgctatggtgcatgatagttcagtgtctacaataccaggtgattttgtcattggtgtcaagttga

SEQ ID NO: 108410 - DNA, 232 bp, Glycine max
gaacggttgatgccaaaaaggccttctcaagagaggatcaacaaatttctgtcacttcaagaggtggaaattccaattctggcatgaattctggaaatggaggaaacatcaggactaaaaagatatttgttggagggttgctcccaccctgactgaagaaaaatttcgccagtactttgagtcttatgggaatgtaactgatgtagtagtcatgtatgaccagaatactgga

SEQ ID NO: 108411 - DNA, 242 bp, Glycine max
tcaagacccaactgaggaatggtactacaagactttctttgatgctggtgaatttgcattcggtaaatctatggtttctttggtgcctttggaagattgtccaccacacgcacagttcctagatgcatattttgctgcaactgatggtagcccacaacacttggagaatgcaatttgtgtgtttgaacaatacggtggtatcagttggcgtcacactgaaacaggccttgatgagatattta

SEQ ID NO: 108412 - DNA, 241 bp, Glycine max
gaattctcagtcgcttctcgaaccctacttcttccgcggtgattgcatttgaattcctgtaatggcgattgataatatttttaaacatgaagccagtgaagaaaaaggagagcgggccagaatggcttcttttgttggagccatggctattgctgacttggtgaagacaaccttggggccaaagggaatggataaaattttgcagtcaacaggtagaggacgtgaagttactgtcactaat

SEQ ID NO: 108413 - DNA, 243 bp, Glycine max
ctccagaagattattacattgagggacaaggatcattgctccaatgtgttctgacgccaggagatccatacatgcccttaccaaatgacgaaattattgcaagggtagcaaaacaggttttagcgctgttcccatcatctcaaggtttggaagtcacttggtcttctgttgttaaaattggtcaatctttgtaccgtgagggacctggtaaagatccatatagacctgatcaaaagacgccag

SEQ ID NO: 108414 - DNA, 240 bp, Glycine max
accaagtctacacccggttcgcccggtccactcggtccatcgtggtttccccgttcctccgccgtgccccagagcaccgcctccccgccgccatcgatgacggctttgacaccctcctctggctccaaaccgtggcccgtccggttcactcgagccgtggctcgagcaacacggtgacttcaaccgggttttcctcataggagacagttctggcgggaactcggtgcatgaggtggccgc

SEQ ID NO: 108415 - DNA, 244 bp, Glycine max
tctcgagccgaatcggctcgagaacataccaatctacaataaacgctgattctcattatctctctcattttttctcttcactctttctcccatgcttctgtcctagatttctgtgttgcagattatgcaggtcctattggacctgcaggatattcctgcaagaagccttcaaaggtcacagcagatgattttgcttacagtggccttggcattgctggtaacacctcaaacattatcaaagctg

SEQ ID NO: 108416 - DNA, 242 bp, Glycine max
cgaaaccctaggttttagtgagtggcgaaaatggcggtgattttttcaagtgcaataccaggaggggcagcaccagcagcaatcgagcaagtgcagtgcttcgggcggaagaagacggcggtggcagtgacctactgcagcgcggccgaggcctcattaagatcaacggctgcccgatcgagctggtggagccggagatcctccgcttcaaggccttcgagccaatcctcctcctcggtcgc

SEQ ID NO: 108417 - DNA, 250 bp, Glycine max
aaacactatagcaatagaaacatttgcttttgaaaaacccctcactcttcatcactacactagctatccacattcaatgtcgactaaatttaaggtgtttcgtgaattcacaagcgatgactcattcctaaaccaagttatcctgaaaacatcaccgaattccaagtgactctgtccctcgctagagactacgatggcaacaactcaaccaacggaaagttcattccttactgggacactgaaaaggtca

SEQ ID NO: 108418 - DNA, 240 bp, Glycine max
gtgaatgccctctggttgatggtgtacaattcaaaggagatggttatacaacttgtgaagcaagtggacttgggcgttgcaagataaataatggaggctgttggcatgatgctcaaaatggacatgcattttctgctgtttggataatggaggggtcaaatgccagtgtcccacagggtttagaggtgatggtgtaaaaaattgtcaagatatagatgaatgcaaagagaagaaggcttg

SEQ ID NO: 108419 - DNA, 253 bp, Glycine max
  unsure (1)..(253): unsure at all n locations
gctgatctgtcgcaagccaagcactatcaccgccgccacaaggtgtgcgagtttcactgccaaagccgccaccgtcatcgccgccggcttgactcagcgattctgccagcaatgcagcaggttccatcttctttctgagtttgataacggaaaacgtagctgcaggaagagattggcagatcataatcgccgcagaagaaaaactcaacaaccaactncaagaaattcagaaatcttcagcttctnnnnnnng

SEQ ID NO: 108420 - DNA, 234 bp, Glycine max
aaaaaaagacaacccagagagcgcgtcttaataaacgctcttctctgaaaacccccatttcttttcttctttcttcttctctttcgcttcttcgatcttcgatcttcgtcgctgaaaatgagagagtgcatttcatccacatcggccaggccgggattcaggttggaaacgcctgctgggagctttactgcctcgaacacggcattcagcctgatgggcagatgccaagtgaca

SEQ ID NO: 108421 - DNA, 239 bp, Glycine max
tgtaccgtgacattgcaaagtacaatgagcttgagacccaagaagaagcccaagaggagactggttggaagcttgtccatggtgatgtatttaggccccccaacaactcagatttgctgtgtgtttatgttggaccggtgttcagtttttcggcatgatactagtaaccatgatatttgctgtccttgggttcctttctccttcaaaccgaggtgggctgatgacagccatgctcttgc

SEQ ID NO: 108422 - DNA, 243 bp, Glycine max
caccggttccggtctcggatctctcttactcgagcgtctctccgtcgattacggcaaaatatccaaattagggttcaccatttacccttccccacaggtttcaaccgcagtcgttgaaccctacaacagcgtcctctccacccactccctcctggaacacaccgacgtggcggtcctcttggacaacgaagccatctacgacatctgcaggagatccctcgacatcgagagaccaacctacac

SEQ ID NO: 108423 - DNA, 241 bp, Glycine max
ccgaaaactgaagtctaagattacaaccaataattggacagaatatttatgtcattttctagagatgatcaatattcctgaactacggcaacataaaacaactataaaacggggacattatggccttgtagatgccagtgctaaattaaaaatcttaggcgaattggtcaatcgagcccttgaaactgcaatattcagggaaaagttagatgagattattgaacagcggcaggcacttggg

SEQ ID NO: 108424 - DNA, 242 bp, Glycine max
cgcatccgctagctcgcgcaggcaccagcaggtgaggttattgtgatttgaatggagggaagtggaggtggcggtgcttcaccgtctgcaccgttgaagcaatacttacaggaattctcgaagctgtttcagtacttctggataaatccactccccatcccccctacaggtggattgggactttcgtcattgcatccatctacgttttgcgtgttgtttatgtgcaggggttttacattgtc

SEQ ID NO: 108425 - DNA, 241 bp, Glycine max
ctcgagccgctcggataaccgtagtaattctagagctaatacgtgcaacaaaccccgacttctgcctcggatgcatttattagataaaaggtcaacacaggctctgcctgttgctttgatgattcatgataactcgtcgatcgcacggcctttgtgccggcgacgcatcattcaaatttctgccctatcaactttcgatggtaggatagtggcctaccatggtggtgacgggtgacggaga

SEQ ID NO: 108426 - DNA, 236 bp, Glycine max
tgcttatgtggctacctcaaaaacgctagcttgaagcagtatgttaactctcctaatgcccgaaaaaccgttgcttcttgtgggattccctttccaacttgttaattaattaagccttcttataattaaagtgtggatatatatatatatatagataaacagtttaatttatacacactttgatcctacaaagcatcttgacacaagcattcaataggatttcaccactttatcgc

SEQ ID NO: 108427 - DNA, 239 bp, Glycine max
cagaggagtttcatcttgtaatcaaaagagtttatcttatagtaagaaatcgatgtcttactccattttaaggaacaaaacaagagaacaatagcctgacaaagggtttagccataaaatcgaatccatcattgatttgagatattgataaggtgaatactcatttctcgtcaatgctaggcataatgcgggtatagggacctaaaaaagattatcttttcttcctatcttatgaactt

SEQ ID NO: 108428 - DNA, 234 bp, Glycine max
ctccacaggaaactgctgctgaagctcagacatatgctcgatacaaatacccaactctgagcaaaactcaaggcaattttagacttcgtgtagctgaaggagaatttactgattctcagattattgtgatgcgggtgagaatgggacaggaaagacgacatttattcgaatgctggctggtttattgaaacctgacaccatagaaggtggatctgaggtggagatgcctgaatt

SEQ ID NO: 108429 - DNA, 246 bp, Glycine max
  unsure (1)..(246): unsure at all n locations
tncatgtcggagatcgaacacatgaagaagctttacaacggcattatctacttcgttcagaaccatgtcaagcccgtggctccaagcaacaacaacactttcccttcttttctactctgcagtaataacattatagcaatagcaacaacaacacatcatcacaaccacaagcctctcctatgagcaatgtttcaacgttgcaaaggcaagtgaagcaatttctggggtgttactccnntnnnnnng

SEQ ID NO: 108430 - DNA, 234 bp, Glycine max
acaaaaactaatttggtggaaactcccaaggaatggcaactggatctaccttgtgacaaaattcctagtgtcttgactacaactgatgagagattggtaggcacagaacatgagggatatgatccttttcttggtggaattcaacgctatgccactcccatgatgcccctagatgaagaaattctttctaaggttgcacaagacatggttgaggaatggtttgattgtgttgat

SEQ ID NO: 108431 - DNA, 237 bp, Glycine max
attccgttttgcgtttctctgcctaaaaggattgaaagatgggtcaagcactaggttgctatcaagttgatcagtcaaatgtggctatcaaggagcattttggaaaatttgatgatgtcctagaacctggatgcattgcctgccttggtgtcttgggtaccagattgctggtagtttgtcactgcgtgtgcagcaacttgatgttcgatgtgagacgaaaaccaaggacaatgtctt

SEQ ID NO: 108432 - DNA, 238 bp, Glycine max
ctttccgagaaggtgcagattttgttcgtggttaccctttcagtctccgggaaggtgtaccaactgcagtttctcatggtctttggctcaacatcccagactacgatgctcctacccagcttgtgaagcctcttgagaggaacactaggtatgtggatgctgttttgaccataccaaagggcactttgtttcccatgtgtggaatgaacttggcctttgatcgtgatctcataggagc

SEQ ID NO: 108433 - DNA, 237 bp, Glycine max
aagaaaatcaaactacaatcttccaccaggaccctctcctctcaccatcattagaaactctaaacaactctataaatagccacagcagacaatggccaagcttgccaaaacctatggccccataatgcgtttcacataggccaatcaaccaccatagtaatctcctcaatagaagccacccaagaggttctccaaacccatgactcattattctcggacagaacaaaccccgacatc

SEQ ID NO: 108434 - DNA, 244 bp, Glycine max
atttttgcaagtgggagcccatttcctcctgttgagtatgaggggaaagtgtttgtgcctggccaggccaataatgcatacatatttcctggatttggtcttggtttaataatgtctgggaccattcgagtgcatgatgacctgcttctggctgcctctgaggctttggctgcacaagtgagccaagagaactttgataagggactcatatacccaccattcaccaacataagaaagatttcag

SEQ ID NO: 108435 - DNA, 230 bp, Glycine max
agaaaaacaagtagttgagaactaagaagaaggaaatggcttcctcaatgatctcctccccagctgttaccaccgtcaaccgtgccggtgccggcatggttgctccattcaccggcctcaaatccatggctggcttccccacgaggaagaccaacaatgacattacctccattgctagcaacggtggaagagtacaatgcatgcaggtgtggccagcaattggcaagaag

SEQ ID NO: 108436 - DNA, 235 bp, Glycine max
caagaacaagcagcattagcaaccaagcaagagaatggcgacgacagcagccttgtgcggcactatgatgagcagctccttcctgaggagaaaagcagtggtcacaagcctgaaggcattccccaatgctaacgcagtgtcttggtgtaaagggtggacgtggaggtggtgtgactgccatggctagcttcaaggtgaagctgataaccccagagggagagaaagaatttgaatg

SEQ ID NO: 108437 - DNA, 229 bp, Glycine max
ctcgagccggaagtgtctgtggtcctcacttatatgcatctctgtgtggaagactggcggatgtggtggaaggcattcttcgcatcaggttctgtggctctttacgtcttcttatactccattaactactggtgttcgacctgcggagtttgagtggacctgtctcagctaccctttaccttggttattcacctctcatggccattgcaatcatgttgtctaccggcac

SEQ ID NO: 108438 - DNA, 232 bp, Glycine max
ggggtaatgaacgagtgccagaagaggaccgaaggaaagtgattgaactccacagctactgcaccagcgtctacgaagagggtgatgctcgctctgctcttattgctatgttgcagtccctaaaccatgaaagaatggagtggacattgtctctgggacacgagtcatgtctcactttgcaaaacccaattggcgcagtgtctacaagcgcattgcgcttaatcatccagat

SEQ ID NO: 108439 - DNA, 238 bp, Glycine max
aaatttctcattctcccatttcctctcagaaccctcgatcactcccacgcgctcctatatcctctccttcaccgtcgctctctccaacgatcacaacaacatcgtcatcccatggcaaacgccgcatctggtatggcagtccatgatgactgcaagttaaggtttttggagctgaagacaaagaggacacaccgtttcatagtttttaagattgaggagcagcagaagcaggtcattg

SEQ ID NO: 108440 - DNA, 238 bp, Glycine max
attcatctcaaggacaaatgagaaacattctgaggctgctgcagcttacattgagacccagcaaacaaaagctagagagcaacaacttcaaatgcagcaattgcaacttatgcagcaacgcagtgcacagttacagagaagagatcctaatcatcctgtccttggtggttccataaatgccatgaattctgaaggaatgttgggacagccaccagcaagtgtgttggcaatgaaaatg

SEQ ID NO: 108441 - DNA, 235 bp, Glycine max
ctgagcatggcctggcatgtccaagctatccatggcctcacaagggcatccttagttcatatgatcatgcttcgattcgtcgtggtcatcaagtttatcaagaagtctgtgcttcttgtcattctatgtcttgatatcataccgtgatttggttggtgttgcttatacagaagaagaggtaaaggctatggcagctgagattgaggtggttgatggccctaatgatgagggcgag

SEQ ID NO: 108442 - DNA, 239 bp, Glycine max
ccaaagttcaaactctgtcttccctgggttctatttcgaaatcaacgacgatgagttccacagaggcagcagccacagagaagaaaggtggaagagggaaaccgaagacttcaaagtccgtttcccgttcctcaaagctggccttcagtttcccgtcggccgtgtcgctcgctacctcaaggccggtcgctacgcccagcgcgttggctccggttcccctgtttatctctccgcggttc

SEQ ID NO: 108443 - DNA, 232 bp, Glycine max
gtctgttgagaaatatccatcaaatccaatgcttggtcgccgggaaattgtggatgggaagccgggcaagtacaagtggctaacatacaaagaagtatatgaccaggtgatgaaagttgggaattctatccgcagctgtggttatggagaaggtgtaaaatgtggtatttacggtgctaattctgcagaatggattatgagcatgcaggcttgcaatgctcatggactttat

SEQ ID NO: 108444 - DNA, 229 bp, Glycine max
gtggtgccttatcgctgtggttatcatcttcttcttcctctttcttagatctcttctttctctacgccgcacgccgaaaccatggccggaaaaggagagggtcctgctatcggaatcgatctcggaacacctactcttgcgtcggtgtgtggcaacatgaccgcgttgaaatcatcgccaacgaccaagggaacagaaccacgccgtcttacgtcggattcactgacac

SEQ ID NO: 108445 - DNA, 231 bp, Glycine max
atttaagtcagaaagagtttggggtgtgcttgagcttgatgaaggagcttctctctcgcgattgttctgaccctttgctggtttcccagcttgggtacatgcagttgcagattggggacttggagggtcgaaagtttcgttcttgaaggtggaggagttggggaagagtaatgggtcgttgagcgaggttgagtttaggaaccttgtgaataggaacaaggcgttggtgta

SEQ ID NO: 108446 - DNA, 231 bp, Glycine max
ctgccttacaacttgtgctcagaaaatctctggcttatggtggtttgtcgcgtggccttcatgaaggtgcaaaagtgattgagaagcatgctgcacaactctgtgttcttgcagaagactgtgaccagctgactatgttaaactggttaaggccctttgtgcagagcacaatgttagcctgctgacagttccgagtgcaaagacccttggagaatgggctggtttgtgcaa

SEQ ID NO: 108447 - DNA, 240 bp, Glycine max
ctcgctgcttattttgatttgaactttgaagttttgttattttgtgcaatggcagccaagagcaaaatcctagtccttggaggaacaggatacattggaaaattcatagttaaggcaagcgcagaagcaggaaccccacttttgccttagttagagagagcaccctttctcatcctgaaaaatctaaacttattgagagcttcaagacctccggagttactcttctttatggtgatctaa

SEQ ID NO: 108448 - DNA, 262 bp, Glycine max
atcgaattctacgccctggtgggtattggattctatctgggccaccaatccggtggaagaaacattggaaaggatgggaaagaacaaaggaggatttgaataaagagcagaccaaaattgagaatgcagctaaaagcctgtgctggaacaagctagtggagaaggatgatatagccatttggcagaaagccaaaaaccatttggattgcaaatccaatcgtaagctcactcagaacagacctttctgcaaggcacaaaataa

SEQ ID NO: 108449 - DNA, 257 bp, Glycine max
caagtagttgagaactaagaagaaggaaatggcttcctcaatgatctcctccccagctgttaccaccgtcaaccgtgccggtgccggcatggttgctccattcaccggcctcaaatccatggctggcttccccacgaggaagaccaacaatgacattacctccattgctagcaacggtggaagagtacaatgcatgcacgtgtggccaccaattggcaagaagaagttcgagactctttcctacttgccagacctcg

SEQ ID NO: 108450 - DNA, 255 bp, Glycine max
gagaaagagctattggacaactagtaatgaagttgttaagactgaatctgatgcaaagacaaaactagggttcagtccagctgagatagtaattgtgaaccctaataagaagacttccactggaaatgaagtagggtaccgtttggtttcaaatgcagcggttcatcctcttctcacagatgatgattaccctcaaacacgtggtgctttcaccagttacaatgtttgggttacaccttacaacaagactgagaa

SEQ ID NO: 108451 - DNA, 225 bp, Glycine max
gcagagtgctatgatggtcaatgagttcctcgggcagagttggagtcatgttcttcccaattcaactgaatcactgggagttgaggttcttaagtcccgtgggttcttcacacatgcatccttctattggataggggctggcgcattgcttcgatttgttgttctatcgaccatcacattcactctagctctgcattatctaaacccacctgagatggtcacggg

SEQ ID NO: 108452 - DNA, 224 bp, Glycine max
ctcgagccgctctttttgtttcttcagtttggtataaccttagacgaggtcacgaggagcactagctagtttcacaatttccaaatggctaggggattgaagaagcatctcaagaggctcaatgctcctaagcattggatgcttgacaaactgggtggtgcatttgcgcgcaaaccctcatctggaccacacaaatctagggaatgccttcccctcatactcat

SEQ ID NO: 108453 - DNA, 176 bp, Glycine max
ctcacacaggatgatcaagattctgttcggctacttgctgttgagggttgtgcagctctgggaaaattgttggaacctcaagattgtgtggcacatattcttcctgtcatagtcaatttttctcaggataagtcatggcgtgttcgttacatggttgctaatcaactatatgagct

SEQ ID NO: 108454 - DNA, 182 bp, Glycine max
gaatatatggagaagggaactctcaagggtcatttatatggttcaggtctgccaagcttaagctggaaggagaggcttgaaatatgcattggatcagctagagggcttcattaccttcacactggccatgctaaagctgtcattcatcgcgatgtgaagtctgcaaatatcctacttgatga

SEQ ID NO: 108455 - DNA, 210 bp, Glycine max
agaattgctagcaatggcgaggatcaaggtttacgagctgaggcagaagacgaaggctgatctgttgaatcagctgaaggacctcaaggccgagcttgccttgcttcgtgttgctaaggtcaccggcggtgcacctaacaagctctctaagatcaaggtggtgaggttgaacattgcccaggttttgacggtgatttctcagaagcagaa

SEQ ID NO: 108456 - DNA, 257 bp, Glycine max
actcggaggctcaagctaaagatcctgccgacatcgtaagtaaatcttataaagatggagatgatagctaaagttaccgagtatgaggctattgcaaaggaaaaattgccaaagatggtttatgactactatgcatcaggggcagatgatcagtggactttgaacgagaaccgaaatgcgttctcaaggattctgttccggccgcgtattcttgttgatgtaagcaagatagacttgactacaactgtattggggct

SEQ ID NO: 108457 - DNA, 263 bp, Glycine max
ttcggatctaggatcgagtagggatcagggatgtggaggctgaagatagcagatggaggaaatgatccatacatattcagcacaaacaatttcgttgggaggcagacatgggagtttgatcctgaagcaggcagtccagaggaacgggcccaggttgaagcagctcgtcagcatttctaccacaaccgcttcaaggtcaagccctgcgctgacctcctttggcgttttcaggttctcagagaaaataacttcaaacaaacaat

SEQ ID NO: 108458 - DNA, 256 bp, Glycine max
caacatactctgacaaccagcctggtgtgcttatccaggtctttgagggtgaaagagcaaggaccagagataacaatttgttgggcaaatttgagctatctggcattcctcctgcacccaggggtgttcctcagattacagtgtgctttgacattgatgccaatggtatcttgaatgtctctgccgaagataaaaccactggccagaaaaataagatcactatcaccaatgacaagggtagattgtcaaaggaaga

SEQ ID NO: 108459 - DNA, 254 bp, Glycine max
gccaggagggtttcccacttttcttcttgttgatcgtggagattgctacttcactttgaaggcgtggaatgcacagaatggtggagcagcagctattcttgtagctgatgacaaggcagaaacgttgatcactatggacactcctgaagaagggaaagcaaatgatgattatgtggacaagattagtattccttctgctcttatcagcaaatccctgggggatagcatcaagcaggctctctctgacggggaga

SEQ ID NO: 108460 - DNA, 251 bp, Glycine max
ctcgagccgctgactttcccccagggcacttcccgaagtggtaagagaatgcctctttctatagggggaggagctggtgcaaagaatgctattctcatgaacatgccaaatgctgtcctttcaatgtggagatattttgttggagatctcgtctttgaagtttctaagatgacttctccctacattaaatgtacagtctctttcttcatagcatttggaaattgggctgatgacaccatgcattttggagg

SEQ ID NO: 108461 - DNA, 253 bp, Glycine max
gagagtggtttcagtgagtgatcggtgttcacttgatccttcataagtcgtcatcatcatcatcatcatcaccgttgattgaagatgatgccgatcagaaacatcgccatcggaaggcctgaagaggctactcaccccgacacgttgaaggcggggttggctgagttcatctccaccttgatcttcgtgttcgccggttcaggttccggcatcgcctacaacaagctcaccgacaacggcgccgccactcccg

SEQ ID NO: 108462 - DNA, 229 bp, Glycine max
gttctgagtgggcaaatcaaacttcatggcatttgagtttccttattgacaatcccagacaatctacagtttttgatattctcttgggaatctctcaagattttgaaattgctggtaatactcttatgccagctttttctgttccacaggctactgccagatcttctgaaaatgcggaatcctctgcataatctggaatttgtgttttctttcgcttgttcgtttgttt

SEQ ID NO: 108463 - DNA, 255 bp, Glycine max
tctcgagccgattcggctcgagggttgagttcgccaccaagagcacggacatcgatgctaacgtcatcaaggctcagattcgggacaccgctggccaggaaaggtaccgtgccattactagtgcttactaccgaggagctgttggtgccttacttgtctatgatgtcacacgccgtgctacatttgagaatgctgcaaggtggttgaaagagttgagagatcacacagaccccaacattgtggtcatgcttattg

SEQ ID NO: 108464 - DNA, 180 bp, Glycine max
caaattctctgtgttgtgttgtgtacttgtgttaattgtgttgttgttgtaggaaatttaagtgaagagagaatgatgatgaagtctgctatgtgtgcattggtgcttgtggcactggttgtggttgaagtggggcccatggctgaggctgcggtgacttgcaacccaacacagttgact

SEQ ID NO: 108465 - DNA, 256 bp, Glycine max
cttcctcaatctactaaaccggttcaggaaaagaatgatcaggttgctgcaacaaatggccatgcaagtgctcctgctgctaaggcacaagttgtgggatggccaccaattcgatctttccgaaagaacactatggcctctaatttgacaaagaacaatgatgacgatgagggaaaatcaggatttggttgtctctatgtaaaagtcagtatggatggtgccccttatcttagaaaggttgatctcaaaacatata

SEQ ID NO: 108466 - DNA, 256 bp, Glycine max
ttgtgttttaaatccacaaaatccttttgtgttaaataggtggatgggaaaactgactttcccccagggcacttcccgaagtgttaagagaatgcctctttctatagggggaggagctggtgcaaagaatgctattctcatgaacatgccaaatgctgttctttcaatgtggagatattttgttggagatctcgtctttgaagtttctaagatgacttctccctacattaaatgtacagtctctttcttcatagca

SEQ ID NO: 108467 - DNA, 254 bp, Glycine max
ttcaattcctacacctattactattgctttaccattgggtctttttgccattctgcttggtagaactttgaaaggttctgtttttggaggactcagggccatttcagacctttccattttagctgacaaaggccacaaaaaggaattccctcttcaagaactcttcacccatgaggtcacattagcagacataaacaaagcatttgagctactaaaacaacccaattgtgtcaaagttgtcatcaacatgccat

SEQ ID NO: 108468 - DNA, 233 bp, Glycine max
gcgaaacggcagcacgcgcaaaaatggtgaagtttctgaaaccaaacaaagccgtcatcgtccttcagggacgctacgccggcaaaaaaagccgtgatagtgcgaaccttcgatgaaggcacgcgcgaggcccctacgggcactgcttggtggcagggataaagaagtaccctgcgaaggtgatcaagaatgattcggccaagaagacggccaagaagtcgcgtgtgaaggcg

SEQ ID NO: 108469 - DNA, 253 bp, Glycine max
  unsure (1)..(253): unsure at all n locations
gaaaattagggtttgtagtgtagcaggaacaagcagcaatggcgccgaaggtaacacgcaaggttagcagaaaccccgaattgataaggggaattggaaagtactcgaggtcgcagatgtaccacaagaggggcatttgggctatcaaggccaaaaatggtggcgttttacctcgccacgaccctaaacccanacctgaaacacccgctgaaaaaccacccaaattttaccctgctgatgatatcaagaagcc

SEQ ID NO: 108470 - DNA, 251 bp, Glycine max
cactcactttcatccacttctccaaaaatggaagaacaagaagaagaagctccaactctgcgactcgagatcctgcaaggccctggcgagggcaaaaccctagaattcaaacccggcaccgccgtccgaatcggccgcgtcatcaaaggaaacaatctccccatcaaggactccggcatctcctccaaacacctcaccatctcaaccgaatccaacaaatggaccctccgcgatttggattcctcaaacgg

SEQ ID NO: 108471 - DNA, 228 bp, Glycine max
gcacaatttctctttctctctttttttgtgtgtccaaaatggctcctagttctgctcacaacaatgggttctatgtgcttatgctagttgggatagtggttagcactatggttgctacctgtgctggtagcttctaccaagactttgatctaacatggggtggtgaccgtgctaagatattcaatggtggccagcttctatcactttccctagacaaagtctctggct

SEQ ID NO: 108472 - DNA, 262 bp, Glycine max
  unsure (1)..(262): unsure at all n locations
gctgatctgtcgacaagccaagcactatcaccgccgccacaaggtgtgcgagtttcactccanagccgccaccgtcatggccgccggcttgactcaggcgantctgccagcaatgcagcaggttccatcttctttctgantttgataacgganaacgtagctccaggangagntnggccagantcatantccgcccgcnnnangaananntcaacanctngnggnggattttgggaaaatcncaggncttccttnngngant

SEQ ID NO: 108473 - DNA, 219 bp, Glycine max
gatgatctcgtagacggtgagatccccgtcgacggcgaagatagcggctccaccgccacaacgaagactccggctgtcctcgcccgaaacccccaccctctggagaattcctggaccttcttgttcgacaacccttcctccaagtccaaacaagccgcatggagcagctccatccgacccatctacattttcgccaccgttgaagagttttggagcatt

SEQ ID NO: 108474 - DNA, 253 bp, Glycine max
caagactgtgaattatggaatcctgcttgcacaaaagcaatggctatgtcatttaatccaaacccgtgttctgatgcatggagtttggaatttctgaagcgtaccggatttcattgtgatatcatttgtgtcactggatggactgccaccccaatgcaggatgttcaggttacaattgattggtttatttcctctcaggaatgtcttcccagaacctattgtgttttaaatccacaaaatccttttgtgttaa

SEQ ID NO: 108475 - DNA, 248 bp, Glycine max
gtggtttcagtgagtgatcggtgttcacttgatccttcataagtcgtcatcatcatcatcatcatcaccgttgattgaagaagatgccgatcagaaacatcgccatcggaaggcctgaagaggctactcaccccgacacgttgaaggcggggttggctgagttcatctccaccttgatcttcgtgttcgccggttcaggttccggcatcgcctacaacaagctcaccgacaacggcgccgccactccc

SEQ ID NO: 108476 - DNA, 247 bp, Glycine max
atggaaggcatagtacacaggacagttgaagtgaatggcataaaaatgcatgttgctgagaaaggtgaaggtcccgtggtcttgttcctccacggcttcccggagctctggtactcctggcgccaccagattctggctctcagcaacctcggctaccgcgccgtggctccagatctccgcggctacggagacaccgaggcaccagcttcaatcagcagctacaccatcctccacttagtttctgaca

SEQ ID NO: 108477 - DNA, 245 bp, Glycine max
caatgtattacaaggaacttctatgtcttgtcctcatgtcgttggtattgctggacttatcaaaacacttcatcctaattggagtcctgcagctattaaatcagcaatcatgaccacagcaaccacacgtgacaacacaaataggccaataaaggatgcgtttgataataaagtggcagatgcctttgcatatggttcaggacatgtgcaaccggaccttgccatagatccgggacttgtttatg

SEQ ID NO: 108478 - DNA, 230 bp, Glycine max
gtctctgtatgccagtggaagaactacaggtattgtgcttgattctggtgatggtgtgagccacacagttcccatatatgaagggtatgctcttcctcatgcaattcttcggttggaccttgctggccgtgatttaacagagtacttggtgaaaatccttactgagagaggatactccttcagcacctctgctgaaaaggaaattgtccgtgatgtgaaggagaaattgg

SEQ ID NO: 108479 - DNA, 197 bp, Glycine max
tcaaccttatggtgtatatacatggttaacggatattaaagacacctctaaagaaggatatagttttgaagagatatgcatcaagaaagaagcgtttgagtgagaagagaagttttgtgcaaaatccttgggaacagtaattggttttgccatttcaaagctggggaggaacattcaggtactttcaagttcctttg

SEQ ID NO: 108480 - DNA, 171 bp, Glycine max
atctgggaattgcgctcgatgataaaccgcgatcataggttgtcgcaccttaaaaccggaaacagtagcaatcgttacttggtttcaagaatttctcaatttcttcctatgtctttgtgtacgatttcttaaggtaaagaaaatcactctctgtgctggccacagacttcg

SEQ ID NO: 108481 - DNA, 247 bp, Glycine max
ctcgagccgctctctttcgtcagtttcgggggaagagatccagcagcaatggtgtacgtcaacgctcagaaatcaaaagcctacttcaagagatatcaagtcaagttcaagagaagaagagagggaaaaaccgattaccgtgccaggattcggttgattaatcaggacaagaacaaatataacactccgaaataccgatttgtggttcgctttagcaacaaggacattgttgcacaaataatatctg

SEQ ID NO: 108482 - DNA, 247 bp, Glycine max
attagctgtagatgcaacccttagagctgctgcaccttatcaaaaattgcgaagggcaaaagattctggaaacaatagaaaggtatttgtggagaaaacggacatgagggcaaagagaatggcacgtaaggcaggagcattggtgatatttgttgttgatgcaagtggaagcatggcattgaacaggatgcagaatgcaaaaggtgcagcacttaagcttctggctgaaagttatacaagcagggat

SEQ ID NO: 108483 - DNA, 246 bp, Glycine max
cattttgtcttctcacaaataaatttattattcctgagataagcaactttgccagtatgtggttcattcttctctttgtctccatttttaccacttcaattcttgagcttaggtggagtggggtcagtatagaagactggtggagaaatgaacagttctgggttatcggtgggacatctgcgcatctctttgctgtgttccaggggcttctaaaagtgcttgctgggatcgatacaaattttactg

SEQ ID NO: 108484 - DNA, 244 bp, Glycine max
gaaaatggcggtacccttgctctccaagaagatcgtgaagatgcgcgtcaagaagtttatacgcccccagagtgatagcaagatctccgtcaagccaagctggcgcagacccaagggtattgattctcgtgtcaggagaaagttcaaaggatgcactttgatgcccaacattggttatggctcagacaagaaaacccgccattatctaccaaatggtttcaagaaatttgtcgtgcacaatgtg

SEQ ID NO: 108485 - DNA, 238 bp, Glycine max
ttatagtgattgctaccacaaccatgaattgtatgaggttggtttatgtagttgtgtggttcaatctgtatgtggcatgcacattcattcaagtttcaggtctggacgcctctaacttcagcaagtgttggttcccagcaatttacaactttggtgactcaaattcagacacaggagctgtttttgcagcattcacaggggtgaagcctcccattggcataatcttctttggaaccct

SEQ ID NO: 108486 - DNA, 244 bp, Glycine max
ctgtgaactccactgttcctattgctgctgaagttttcaagaaggcaggaacgtatgatgagaagagattgtttggtgttaccacccttgatgttgttagggcaaaaactttctatgctgggaaagccaatgttccagttgctggtgttaatgtacctgttgtgggtggccatgcaggcattactattctgccattattttctcaagccacaccaaaagccaatcttgatgatgatgtcattaa

SEQ ID NO: 108487 - DNA, 272 bp, Glycine max
gcagaagcgcctctccgcaagcgtgctcaagtgcggcagaggaaaggtttggcttgaccccaatgaagtcaacgaaatctccatggccaattctcggcaaaacatcaggaagttggttaaggatgggtttatcatcaggaagccaaccaagattcactcccgctcacgtgctcgtaggatgaaggaggcaaagaggaagggccgccactccggttatggtaaacgttcgggtacaagggaggcaaggcttcccaccaagatactctggatga

SEQ ID NO: 108488 - DNA, 262 bp, Glycine max
cctcaagctactgcaatgcatgtgggagctatagaaattatcattgatagtttcgcaagtcctgactgtaacatagttggtgcaatgcttttggttgatacttatcataccaatcctgaaaatgcagttcgtagtatttttgttgcgcctttcagaggcggaaggcccattcgggtggttacatttccgaataccattgtgcagattgaaccagacatgaattcaaggtttcagcttttgagtaccactaccactggtgatt

SEQ ID NO: 108489 - DNA, 271 bp, Glycine max
caatccaactcttttcttattgcttgttgcgttctccctcgttttcgcggccgtgtcggcctcttcggacggcggcaacgaggaaccgctgatcatgcaggtggtcgatggcggtgacgtccggctgggagcagagcaccactttttggagttcaagcgcaggttcgggaaggcgtacgattccgaggacgagcacgattacaggtacaaggtgttcaaggctaacatgcgccgcgcccgccgccaccagagtctggacccttcggcggct

SEQ ID NO: 108490 - DNA, 274 bp, Glycine max
tttctttcgtcttaatttgttctcttcagccatggcgatggtgcaagatgaacgatgcgttcagaaaagctactggattgaacatacgacggacttgtccgtagagtcaatgatgctcgattccaacgcctctgatctcgacaaggaggagagacccgaagttttgtccctactaccaccatatcaaggaaaatcagttgtagaacttggagcaggtattgcaagattcacagttgaattggccaagaaagctggccagttacttgctgtggat

SEQ ID NO: 108491 - DNA, 271 bp, Glycine max
ctcgagccgctcagatctatataattcagttcttcttattctccactaatagcttcttctacggctacttgagaccttgctgcaaaggttctctcttagcttagtaacaatgggtttgaaagcactttttgtttggtgcattatatggttaggtttagcacatttgtcccttggaggaagagtgaggcactacaagtttgatgtggagtacatgatcagaaagccagattgcttggaacacgttgtgatgggaatcaacggccagtttcca

SEQ ID NO: 108492 - DNA, 236 bp, Glycine max
caaggtcacacgttggtggctaaggtcttgtcctccgacaccgtcgtacacaaaccgcgaccctcttccgcccacaacctcaaacccactgtcatcgccgagtgcctcatcggcgacgacaccggcaccatcgtcttcaccgctcgcaacgaacagcttgatatgatgaaggctggagctacagtaattattcgcaatgcaaagattgacatgttcaagggatcattgaggatggc

SEQ ID NO: 108493 - DNA, 246 bp, Glycine max
accttgtcttctttcatttcccaccccattctataatcaatcaatggcaattgcttcttcaatccctaatgcgccttctgcgttcaattctcagagctacgttggtctcagagcgccactgaggaccttcaactttgcttctcctcaagctgccaaaattcctcgctcccaacgccttttcgtcgtcagagcctccgattcggagttcgaagccgccgttgtcgccggtaagttccgccggcgctt

SEQ ID NO: 108494 - DNA, 266 bp, Glycine max
ttgaaaaattgttctctcaccgtgaaagagagagagaggttaggctatggctgatgagagcgttgttgagtccccagtgaagaggcagagagatgatggtgaagaaaatggtgtctctgtttccatggacgcggagggtggcaaagaccctcttagtaacggtttatcatctgtgattcctgggtggttctctgaaatcagtgcaatgtggcctggagaggctcactccttgaaggtggaaaagattttgtttcaaggaaagtcag

SEQ ID NO: 108495 - DNA, 255 bp, Glycine max
ccagttgttgttccagctcctaagcctgctgttaccaagcctcaaccaacccccagtcccaagacaactccttctccagcttcatggtcaggcccaatttccattgaacagaaaaggaccacctcatgggttgccaatggaaaaacttattacagatactcaacagtcgtgaccgacaaatctaacaagagtctcaattctctcaatctttcaatatccaagcttaatggtccaatcgggggtgtcacaaagtca

SEQ ID NO: 108496 - DNA, 175 bp, Glycine max
aagtgtcccaatctgaggtcaatctcaatcaagaattgctccggggttggtgatcagggagttgctggcctcttgtcttcagcttcttttgctctaacaaaggtgaagcttgagtcactgactgtttctgatctctctctagcagtgattgggcattatggtgttgcagttaccg

SEQ ID NO: 108497 - DNA, 224 bp, Glycine max
  unsure (1)..(224): unsure at all n locations
ctttgcgagtgaagccctagactacactacacactttgcaatggcggttgttgcgcanacccctgacatcgccggcgagcgacagtccggccaagacgttcgcacccaaaacgttgtggcatgccaagccgttgccaacatcgtcaaaagctctttaggccccgttggcctcgacacaatgctcgtcgacgacattggcgacgtcactatcaccaacgacggtg

SEQ ID NO: 108498 - DNA, 270 bp, Glycine max
attaattctcaaggatccacaagatccttccactccaaatgcagactcatacaaaacagcagcgagagagaaactgataaggcagggatacaacattgacgggatcattggagaccaatggagcgatctcctcggaggccacagaggcgaaagcaggacctttaagcttcctaatcccctgtactacattcagtagttccttcacctctcaacaatctagcttgctcctatctatctatatgtaataagatgcgttcaaataggggcact

SEQ ID NO: 108499 - DNA, 271 bp, Glycine max
cacccctctgcccggaaaatttgacgatggcgttcttcagttgaggcatgttattcgctgctcactcttccaactactactgttgttcttcttcgtcgtcttggccttcgcatcttcacaatcacatccaatagagacacgttgactttgctggaagaagaagaagaagagaatggaacaatcgcttttggatgacataatcaatcgcctcctcgaagttcctaccctaccggctaagcaggttcagctatccgagtccgagatccgtcaa

SEQ ID NO: 108500 - DNA, 177 bp, Glycine max
gtgagtttgttgatcgagataactagaaacagtgtgatgaaaatgaaggtccttgttttcttcgttgctacaattttggtagcatggcaatgccatgcgtacgatatgttccctctccgaatgaacactggctatggtgcccgtactccggaggtgaaatgcgcaagttggaggctt

SEQ ID NO: 108501 - DNA, 271 bp, Glycine max
tctttgaccaagcctggaaagagggaatgaccaaggatgaagccgaggatttagtaaaaaaggcagtttcactggctattgctcgtgatggtgcaagtggtggggtggtgcgaacagtcataataaactcagagggagtgaccaggaatttctaccctggcgaccaacttccattatggcatgaggaaatggaggcccacaactctctgctagacattcttggtgtcccagagccgatgagcatgtgaagtgaagaagtttctgtgttcat

SEQ ID NO: 108502 - DNA, 272 bp, Glycine max
gtctccttattcttaccgatccaagaacagatcaccagcctattaaggaagctgctcttgggaatattcccaccattgctttctgtgacaccgattcacctatgaggtacgtggacattggaattgctgccaacaacaagggcaaacacagcattggttgtctcttctggctccttgcaaggatggtgttgcagatgaggggtaccattcgccctggcctcaaatgggatgtcatggttgatctgttcttctatagagaaccagaggaggct

SEQ ID NO: 108503 - DNA, 220 bp, Glycine max
cgagataactagaaacagtgtgatgaaaatgaaggtccttgtttacttcggtgctacaattttggtagcatggcaatgccatgcgtacgatatgttccctctccgaatgaacactggctatggtgcccgtactccggaggtgaaatgcgcaagttggaggcttgctgtggaagcacacaacatctttggctttgagaccattccggaagagtgcgttgaa

SEQ ID NO: 108504 - DNA, 265 bp, Glycine max
tttgaatccacaaaatccttgtgtcgtaaataggtggatgggaaaactgactttcccccagggcacttcccgaagtgttaagagaatgcctctgcctatagggggaggagctggtgcaaagaatgctattctcatgaacatgccaaatgctgttctttcaatgtggagatattttgttggagatctcgtctttgaagtttctaagatgacttctccctacattaaatgtacagtctctttcttcatagcatttggcaatttggct

SEQ ID NO: 108505 - DNA, 271 bp, Glycine max
catcatcaaagaacaagtcaagcttctctacaagcgccacaagaacactgctttctcctggctcagaaacatcttccatgactgtgctgttcagagttgtgatgcttcactgttgctggactccacaagaaggagcttgtctgagaaggaaacagatagaagctttgggttgagaaatttcaggtacattgagaccatcaaagaagctttggaaagggaatgcccaggagttgtttcctgtgctgatatcctcgttctctctgccagagat

SEQ ID NO: 108506 - DNA, 270 bp, Glycine max
agagaatggctcccaagggattaacctttctggctgcgttaatatgcgtttcagcactgtcactgagtccttctgttgcgggggaagggcaatataatggccttgttatgaacttctacaaggaatcatgccctcaggctgaagacatcatcacagaacaagtcaagcttctctacaagcgccacaagaacactgcttactcctggctcaggaacatcttccatgactgtgctgttcagagtagtgatgcgtcactgttcctggactcca

SEQ ID NO: 108507 - DNA, 274 bp, Glycine max
cggagttctgagtgggcaaatcaaacttcatggcatttgagcttccttattgacaatcccaaacaatgtacagtttttgatattctcttgggaatctctcaagattttgatcttgctggtaatactcttatgccagctttttctgttccacaggctactgccagatcttctgaaaatgcggaatcctctgcatgatctggaatttgtgtgttctttcgcttgttcgtttgtttaattcaataacggaaattaggcatgaccctcttgttgagta

SEQ ID NO: 108508 - DNA, 267 bp, Glycine max
tggatatggggtggaggaatttaatgaaaccttattgatgaatgggttaacaagggcgacgcaccggcattgccagagactcttaaaaattacaacaagctgttgtctcttggcttcaagattgtattcttgtcaggaagatatcttgacaaaatggccgtaacagaagcaaacctaaagaaggctggcttccacacatgggagcagttaattctcaaggatccacatcttatcactccaaatgcactttcatacaaatcagcaatg

SEQ ID NO: 108509 - DNA, 264 bp, Glycine max
gggaaaaacatttacaaaggaagtaattgaggctgtgacttctataaatgaaaaacctcttgtcctggctctctccaatccaacttcacagtctgagtgtacagctgaagaggcttatcaatggagtgagggtcgtgcaatttttgctagtggaagtccatttgatcctgtagaatacaagggcaaagtgtactattctggccaggccaacaatgcttacattttcccgggctttggtctggggttggtaatctcaggagcaat

SEQ ID NO: 108510 - DNA, 270 bp, Glycine max
gggtacaggttggaaattttggggagatagcaacttaaagagtaaattttggggtcggtcaattcagcttgatcctgttggcattttgactttggaatttgatgatggtgaagtatgccagtggagtaaggttacaacatcaatatacaatctcatattgggaaagctgtattgtgatcatgatggtacaatgcgtatacagggaaatcaagactactcatgtaaactgaaattcaaggaacaatctataattgaccgacatcctcacca

SEQ ID NO: 108511 - DNA, 262 bp, Glycine max
ctcgagccgcgaatatacattgctcgttgatggatttggcatagatccgcagcaagagattaccttggtgaggcaagttgagtatcaagattctctcgtggaagcagcatggccactaggcagtgccatagaagccatatcatcattacctaaatttgagaaattaatgtatttcatttaagctttaaaacgaggagccatatgtatgtgtggaatgaactccatcactcttaaataaaaatcgttttgttcctttttttct

SEQ ID NO: 108512 - DNA, 267 bp, Glycine max
gatcgagataactagaaacagtgtgatgaaaatgaaggtccttgttttcttcgttgctacaattttggtagcatggcaatgccatgcgtacgatatgttccctctccgaatgaacactggctatggtgcccgtactccggaggtgaaatgcgcaagttggaggcttgctgtggaagcacacaacatctttggctttgagaccattcctgaagagtgcgttgaagcaacaaaggaatacatccatggcgaacaatatagatcagactc

SEQ ID NO: 108513 - DNA, 270 bp, Glycine max
ctatgctgtttcttctatatattaggcgcatggcagagaagtggtttcggcaagggagatagctcagcattggagattactaagactaaagcagaatgtaatatagttccaaatttaagttttgattcccaccatggtggagaagttagcgaaattgatgaagctgattcaaagcctaaggtatttgaaccatgtgctgctcgctataccgattacactccctgtcaagatcaaaagcgtgccatgacctttcctagagaaaacatggtc

SEQ ID NO: 108514 - DNA, 90 bp, Glycine max
gctaccagaagcatatttatcttgaacagtgatggaactttgacggcattcgccattgagctaagtaagccgcatcctcaaggtgcagaa

SEQ ID NO: 108515 - DNA, 279 bp, Glycine max
  unsure (1)..(279): unsure at all n locations
gttctctgtgatgccaangtttcactcatcatgntctctaaaaacnacaagatggcatgaatacnttagccctggctcacgacaaaaaaagatcttgatcagtatcagaagnctttgggggatattgatctgtggcattctcactatgagaaaatgcttgaaaacttgaagaagctgaaagatattaacaataagctcaggagacagatcagggcataggataggtgagggcttggacatggacgacatgagcttccagcaactgcgcatcttgaagaa

SEQ ID NO: 108516 - DNA, 255 bp, Glycine max
cttctccattggttcttcatctgcatgcacacacttgcatagttttggagaccaagaatttttgaagggtagcatcaacaagaagttctggaaatggagatcaccaatgtcagcgagtatgaagctattgcaaagcagaagttgccaaagatggtgtttgactactacgcatctcgtgcagaggaccagtggactctgcaggagaacataaatgccttttccagaattttgtttcggccacgtattcttattggt

SEQ ID NO: 108517 - DNA, 257 bp, Glycine max
gaaaaaggcaaaaggagatttgtttctggggatggtgaagagatgacattgattccgggaaccagtgttgaagaggcctacaacaagctaatagttgaacttgagagaagtgttcctacattggttggcattgaatgtcccaaggatgagaaacttcctcgtcgcaaaatttttgacaaacctaagacgcgctgcttcactattctccctatggagtttaatcttgtggttcgtcagaagtttttaaattttgtgag

SEQ ID NO: 108518 - DNA, 265 bp, Glycine max
cggctcgagctttgtcgcaaagagaagagatctgcctccttttttttatcaaatctatctcttcttcaagttgaaaatggggctgtctttcaccaagttgttcagccgactgtttgccaagaaagagatgcgtatactgatggtgggtctcgatgctgcgggtaagaccaccattctgtacaagctcaagcttggagagattgtcaccaccattcccaccattgggtttaatgtggaaactgtggattataagaacatcagcttc

SEQ ID NO: 108519 - DNA, 267 bp, Glycine max
gaaagatatcagtggcaaccccagagcacttaggaggttgaagactgcctgtgagagggcaaagagaactctatcttcaactgcccaaaccaccattgaaattgagtctctctatgagggaattgatttctactccaccattactcgtgctagatttgaggagctcaatatggatctcttccgcaagtgcatggaaccagttgagaagtgcttaagagctgctaagatggactagaggactgtccatgatgttgtacttgttggtgg

SEQ ID NO: 108520 - DNA, 263 bp, Glycine max
caacgagtgggccataggaaggaacccggccatatgggaagacgcacataggttctcgccagaaagattcttggactctgacatagacgtcaagggtcgccacttcaagctcacgccgttcgggagcggaagacgaatttgccctggctcccccctcgccgttaggatgctgcacaacatgctcggttccttgatcaacaactttgactggaagcttgagaacaacattgaccccatcgacatggacttggatcagtccctca

SEQ ID NO: 108521 - DNA, 264 bp, Glycine max
ctacatccctggctctgttccgtcgatgacgatggcgtttagggtgcgaaaccctgacctccgctttctcattcttctctctctcttgtccatcacttccgccaaggtcccttcgaggagcgtttcgatgacggatggggaaatcgttgggttaaatcagattggaaaaaagatgagaacctggctggggagtggaaccacacctctggccaatggaatggagacgctaacgacaaagctcagtaccctgaattcagcaacaag

SEQ ID NO: 108522 - DNA, 267 bp, Glycine max
ggaacatatggttatgctgctcctgagtatgtcatgactggacatttgacatcaaaaagtgatgtctatagttttggagtagtgctacttgaaatgctcactggccggcgatctatcgataagaatagaccaaacggggaacacaatcttgtggagtgggcaaggcctgtacttggggaccggaggatgttattacggataattgatcctcgccttgaaggtcacttctctgttaaagggtcacagaaggctgcgcacttgctgctc

SEQ ID NO: 108523 - DNA, 263 bp, Glycine max
gcttctttgcgagttttctcttgggatgggggatcacaataggtgccggcttggcctcttaccccattgatactgtgcgtagaagaatgatgatgacatctggagaagctgtaaaatacaagagctctttggaagcattcaagataattgtcgcaaaagagggtactaagtcactctttaaaggtgccggtgcaaacatattacgtgctgttgcaggtgctggagtgctcgctggttatgataagctacagctcgtcttgttc

SEQ ID NO: 108524 - DNA, 238 bp, Glycine max
ctgctagattcgacgattcccgaagtgccttcctcctcctcctccttcttcccctctaatcggatccaaatccaaatccaaatccagttcaaagaagatgcaatacaagaacctggggcgatctggcctgaaggtgagccagctctcctacggcgcgtgggtgagcttcgggaaccagctggacgtgaaggaggcgaaggccctcctacagtgctgccgcgaccacggcgtcaacttc

SEQ ID NO: 108525 - DNA, 264 bp, Glycine max
atttaagtcagaaagagtttggggtgtgcttgagcttgatgaaggagcttctctctcgcgattgttctgaccctttgctggtttcccagcttgggtacatgcagttgcagattggggacttagagggtgcgaaagtttcgttcttgaaggtggaggagttggggaagagtaatgggtcgttgagcgaggttgagtttaggaaccgtgtgaataggaacaaggcgttggtgtatttggttgggaaggattatgtgtcggcggtga

SEQ ID NO: 108526 - DNA, 268 bp, Glycine max
ccaaatactaaaaccggatgttattgggcctggagtgaacatattagcgggatggtcgggggcggttggcccatcaggcacagaagacagtcgcaaaactaactttaacattatgtctggtacttccatgtcctgtccccacataagtggtttggctgcgttgttgaaagcagcacatccagattggagtccaagtgcgatcaaatcagcactgatgacaacggcttataccaatgacaacacagagtcaccaattcgtgatgcaaag

SEQ ID NO: 108527 - DNA, 268 bp, Glycine max
  unsure (1)..(268): unsure at all n locations
aaaggatgaagagggaacgcgagcagcttggttccatcgcagggacctcaagctgccgttattcaagcggaaaatcgaatctttgggaggaagaaggaggcatggacgagcttcttgcggtggtgggttacaaggttaggtcatcggacatggcggaagtggcgcagaagcttgagcgtctcgaagaagccatgggaaatgtccaagatgacctcccggagatttcaaacgacgtcgtncattacaacccttccgacatctccaactg

SEQ ID NO: 108528 - DNA, 252 bp, Glycine max
ttgagggcgttgattcaactaatgcatgctatggaggaactgctgctttgttcaattgtgtcaattgggtggagagcagctcatgggatggacgctatggacttgttgtctgcactgacagtgctgtctatgctgaaggacctgctcggcctactggtggagccgctgctgtcgccatgctaattggcccggatgctcccatttcttttgaaagcaatgggggggaagtcatatggctctcctatgttttca

SEQ ID NO: 108529 - DNA, 265 bp, Glycine max
tggcagaaagcaagctcatcctagagttttaaaaatggcagcagcctcctccatggctctctcttccccatccttggctggcaaggccgtgaagctgggcccatcagcccccgaagtcgggagggtcagcatgaggaagaccgtcaccaagcaggcctcctccggaagcccatggtacggcccagaccgcgtcaagtacttgggcccattctctggcgagcccccgtcctacctcactggcgagttcccaggtgactacggctgg

SEQ ID NO: 108530 - DNA, 265 bp, Glycine max
gtcttaatggctgatgcagtccaaccattgactgatgctgcgaacagtatcttgctggtcgatacaaggatataaccaagttccaggaagaggttattgccttgcccctagctggagtagaggcaatactgtctagtgatgatctccaggtcgcatcagaagatgctgtatatgattttgtgttgaaatggtctcgacagcagtacactaaactggaagacaggcgagaagtcctgggtacccggcttgcacaattaattcgctt

SEQ ID NO: 108531 - DNA, 262 bp, Glycine max
tcaggcctcaccatcagagctggttcctatgctgatgagctcgttaagaccgcgaaaacagtggcttcaccagggaggggtattttggccatggatgagtccaatgctacctgtgggaagcgtttggcttcaattgggctagagaacactgaagctaaccgccaggcataccgtaccctcctcgtgacagttccaggccttggtcagtacatctctggtgccattctctttgaggaaacactctaccaatccacaactgatg

SEQ ID NO: 108532 - DNA, 270 bp, Glycine max
ctttctcacaaatggccaatcccttcccaacattcctcccctcttccctcatcttcttttccttcttctttttcttattctcccctctcaccgccgccaaaacacaccgtttcgcgcgcaccatctccccctcctccctgggcctggacggggagcctgagaaactaagccacctccacttcttcttccatgacgttgtcagtggccaaaaccagaccgcggtgcgagtcgcggcggccccggccaccgacaagtcgccgacgctcttcg

SEQ ID NO: 108533 - DNA, 271 bp, Glycine max
gtttgtagacagagaaggtgcagggaaacacattcaagcaggagctaagaaggtgctcattactgctcctggtaaaggagacatccccacatatgtggttggtgtcaatgagtatgattacagccctgatgaacccatcatcagcaatgcatcttgcaccactaactgccttgcaccctttgtcaaggtccttgatcagaaattcggtatcatcaagggcaccatgaccaccactcactcctacaccggcgaccaaaggcttctcgacgcg

SEQ ID NO: 108534 - DNA, 209 bp, Glycine max
aaacattcttgtggggtaggtactctttggaaatgtctgctgttatttacaaggactgggttttcactgatcaagcattgcctaatgatcttgtcaagagaggagttgcggttaaggatccatctgctccccatggagttcggcttttgattgaggactatccttatgcttctgatgggctatagatatgggatgccatcaagtcctgg

SEQ ID NO: 108535 - DNA, 175 bp, Glycine max
gctttaacgaaaaaggacacattttcccttacaatggcacgaaccaaacaaactgcgcgcaagtccaccggaggcaaggcacctcggaagcagctcgccacaaaagccgccagaaagtcagctccggcgaccggcggagtgaagaagccgcatcggttccgccctggcacggtgg

SEQ ID NO: 108536 - DNA, 261 bp, Glycine max
ctttcccccagggcacttcccgaagtgttaagagaatgcctctttctatagggggaggagctggtgcaaagaatgctattctcatgaacatgccaaatgctgttctttcaatgtggagatattttgttggagatctcgtctttgaagtttctaagatgacttctccctacattaaatgtacagtctctttcttcatagcatttggaaatttggctgatgacaccatcaattttgaggcctttccccacaagctggtgcagt

SEQ ID NO: 108537 - DNA, 246 bp, Glycine max
ggctcgaggtcgggagggctctcccaacggaagcagatcagcatcacaagatctaccgaatgaagcactgggccaccaacgaggttcgcgccaagtctaagttctggtattttttgaggaagctgaagaaggtaaagaagagcaatggtcaagttcttgctatcaacgagatttttgagaagaacccaaccaagattaagaactacgggatatggttgcggtatcagagtaggactggttaccaca

SEQ ID NO: 108538 - DNA, 261 bp, Glycine max
gtcccaaagagctaacaagagattcaagaccggcatggctaatgaagaggaacagaaaaaccacctcttcggcatcaaagatctcggtcacaagactctccttcagagtgatgcactctatcagtatatacttgaaaccagtgtctatccaagagagcacgagtgcttgaaagagatacgcaagatgactgcaaaacacccactgaacatcatggcaacaccagcagacgaaggacaacttctgagcatgcttgttaagct

SEQ ID NO: 108539 - DNA, 260 bp, Glycine max
tgcaaagaatgctattctcatgaacatgccaaatgctgttctttcaatgtggagatattttgttggagatctcgtctttgaagtttctaagatgacttctccctacattaaatgtacagtctctttcttcatagcatttggaaatttggctgatgacaccatcaattttgaggcctttccccacaagctggtgcagtttggagaaattcaggaaaaagttgtattgaaattttcacaagaggaatttcttacagcttggt

SEQ ID NO: 108540 - DNA, 267 bp, Glycine max
gtattgacaagcgtgtgattgagaggttcgagaaggaggctgctgagatgaacaagaggtcattcaagtatgcctgggtgcttgacaagctcaaggctgagcgcgaaagaggaattaccattgatattgctttgtggaagtttgaaaccaccaagtactactgcacagtcatcgatgcccccggacatcgtgactttatcaagaacatgattactggtacctcccaggctgattgtgctgtccttatcattgactccaccactggtg

SEQ ID NO: 108541 - DNA, 183 bp, Glycine max
gtaaaaattgtaaatacgggtaccgtacttcaagtaggcgacggtattgctcgtatttatggtcttgatgaagtaatggcgggtgaattagtggaatttgaagagggtactataggcattgctttgaatttggactccaaaaatgttggtgtcgtattaatgggtgatggtttgatgatacaa

SEQ ID NO: 108542 - DNA, 259 bp, Glycine max
gtggcaaatcattgcaagaatctaagttcttttcaggttggtctatttccagatatcatagagcgtaaagtggcacggcattttgaggaaggagatcttgtaagattctcatgcatttagttacttcctcaagcaatagtcattaatataaattgagacatgttggttatgtctatgtgggaaggtttcggcattagtaactggggaattttataccaagaaggagcattttccaggatttgctcgaccttttgtgttc

SEQ ID NO: 108543 - DNA, 260 bp, Glycine max
ctcaaagcaacacaagaacactctcttgaacattcatggatccagtgagcgtgtggggtaacacgcccttggcgacggtggatcccgagatccatgacctcatcgagaaggagaagcaccgccaatgccgcggcatcgagctcatcgcctccgagaacttcacctccttcgcagtcatcgaggccctcggcagcgtcctcaccaacaaatactccgagggcatgctcggtaaccgctactactgctgcaacgaattcatc

SEQ ID NO: 108544 - DNA, 258 bp, Glycine max
cggagagaggagtcgcttggcgcagagctttgagtataactatggtgattttattcccatcttgagacccttcttgaagggttacttgaagatttgcaaggaggtgaaggagacgaggttgaagcttttcaaggattacttcgttgacgagaggaagaagcttggaagcaccaagagcaccaacaacaataatgaacttaaatgcgctattgaccacattttggatgcccagagaaaaggcgagatcaacgaagacaa

SEQ ID NO: 108545 - DNA, 257 bp, Glycine max
cgagtgtgtgtgacattgctcctagagggctctccatggcgtccacattcattggaacttcgacctcgattcaggagatgttcaggatggtgagcgagcagttcacggccatgtttaggaggaaggctttcttgcattggtacactggtgaaggcatggacgagatggagttcacggaggcagagagcaacatgaatgaccttgtgtctgagtaccagcagtaccaggacgccactgctgaggacgaaggggagtac

SEQ ID NO: 108546 - DNA, 263 bp, Glycine max
cgcactccgccgtcatccgttacggcaaaaatgagtcgactaagttgaggtggatacgatcgtcacatcactattttctcccctgtatgacgtctcttccaagtcgagtatgcttgcaaggctgttaaggccgcaggaatcacctcaattggtgtccgaggacaggattcgatttgtgttgttactcagaagaatgttccggataagcttgtggataacacaagtgttacacacctctttcccatcaccacgtatcttggttt

SEQ ID NO: 108547 - DNA, 263 bp, Glycine max
ggagttctgagtgggcaaatcaaacttcatggcatttgagtttccttattgacaatcccaaacaatctacagtttttgatattctcttgggaatctctcaagattttgaaattgctggtaatactcttatgccagctttttctgttccacaggctactgccagatcttctgaaaatgcggaatcctctgcatgatctggaatttgtgttttctttcgcttgttcgtttgtttaattcaataaaggaaattaggcatgaccctc

SEQ ID NO: 108548 - DNA, 238 bp, Glycine max
tgctgatctgtcgcaagccaagcactatcaccgccgccacaaggtgtgcgagtttcactccaaagccgccaccgtcatcgccgccggcttgactcagcgattctgccagcaatgcagcaggttccatcttctttctgagtttgataacggaaaacgtagctgcaggaagagattggcagatcataatcgccgcagaagaaaaactcaacaaccaactcaggaaattcagaaatctcag

SEQ ID NO: 108549 - DNA, 255 bp, Glycine max
atgctagcaactttggacttcagggatgtgtcttcacaaaggatgtcaacaaagcaataatgatcagtgatgcaatggaaacgggaacagttcagataaattctgccccagctcgtgggccagatcattttccctttcagggtataaaggacagtggcattggatctcaagggattaccaacagcataaacatgatgaccaaggtcaaaacgactgtgatcaacttacccagcccttcctatactatgggctagt

SEQ ID NO: 108550 - DNA, 260 bp, Glycine max
ctggctaatgcttctccagagcagcagaggacgatgctgggtgagaatctctacccccttgtggaacatgttagagcctgccaatgctgccaaagtgacaagcatgcttcttgagatggaccagactgaagttctgcatttgctcgagtcgccagaagccctgaaagcaaaggtggcggaggcaatggacgtgctaagaagtgttgctcagcaacaggctggcggtactgcggatcagctggcttcattatctcttaatg

SEQ ID NO: 108551 - DNA, 254 bp, Glycine max
cgatgggacactcctgaagttggtgacgaagttcaagttcactatactgggacgttgcttgatggcactaagtttgattccagcagagataggggaactcctttcagtttcacgcttggacaagggcaagttattaaaggatgggatcaaggtattataacgatgaagaaaggtgaaaattcccttttcaccatcccggctgagctagcttatggtgaaactggttctcctccaacaattccccctaatgcaac

SEQ ID NO: 108552 - DNA, 253 bp, Glycine max
tgagaaagagaaggcaatggctatcaggttgatggatttggactctccaatcttcaacactctgcacagaatcatggatctgacggaggacgccgagaagaacttgaacgctccgactcggacatacgtgcgcgacgccaaggcgatggctgcgactcctgctgacgtgaaggagtaccctaactcgtacgttttcgtgatcgacatgcctggcctgaaatctggggacattaaagtgcaggtggaggacgac

SEQ ID NO: 108553 - DNA, 258 bp, Glycine max
atcattttccctcactttctcgctccccaaacgcccctctctctcctccaatggccgaccagctcaccgacgaccagatcgccgagttcaaggaggccttcagcctcttcgacaaggacggcgatggttgcattactaccaaggaacttgggactgttatgaggtcacttggtcaaaacccaactgaggcagaactgcaggatatgataaacgaggttgatgctgatggcaacggaaccatcgatttcccagagttcc

SEQ ID NO: 108554 - DNA, 262 bp, Glycine max
gtttgtcaccagatacctatttctcaatccatactgatgatgaggatggaaaaccacttggtggaagctccttgccacctacattcccaccctgtactctaagaaaagcacttgcacaatatgcggatgttttgagttcacccaaaaagtctgccttgcttgccttagctgctgatgcatctgatccatctgaagctgatcgactaagacatcttgcctcacctgctggaaaggatgaatattcagaatgggtgattacctc

SEQ ID NO: 108555 - DNA, 258 bp, Glycine max
cgagtgtgtgtgacattgctcctagagggctctccatggcgtccacattcattggaaactcgacctcgattcaggagatgttcaggagggtgagcgagcagttcacggccatgtttaggaggaaggctttcttgcattggtacactggtgaaggcatggacgagatggagttcacggaggcagagagcaacatgaatgaccttgtgtctgagtaccagcagtaccaggacgccatgctgaggacgaaggggagtacga

SEQ ID NO: 108556 - DNA, 220 bp, Glycine max
cccccacactgaaaccagccgtaggttgacatccttccaccctgaaatcgaagaactcctttacagctcagtggagaatgaagaacacatatgtgtgctgaaggaccgcagcaagccaattatcttcaccatggcaaggttggatcgagtgaagaacatcacaggacttgtggagtggtacggtaagaccgcgaactggagggacctggaaaaccttggg

SEQ ID NO: 108557 - DNA, 182 bp, Glycine max
ctcgagccgctctaaaccctaaacaactctttctcttcttccttcgctcgttgttctccctcgcgtagatcgacaatggcggagacagagacgtttgctttccaggctgagatcaaccagctcctcagtctcatcatcaacaccttcttccaacaaggagattttccttcgtgaactcatca

SEQ ID NO: 108558 - DNA, 216 bp, Glycine max
aaaccctagtctccatacatcaacttgggaggttaaagagacggcaacgttgtgctgtccgccttgaccgagccagagcttcgtcttggccctcgattttgccctgtaaaactaatcccagtcacaacagaaataatcaatggcaccgaaacagaccaaggctgagaagaagatcgcttacgatgcgaactgtgcgacctaatggaggagtacggc

SEQ ID NO: 108559 - DNA, 246 bp, Glycine max
ccaagaggcaattcaagcctttgaaaagttttgaaccaagctgaaggaaattgaggccagaattaattcgaggaacaaagattcaagccttagaaaccgtaatggaccggttcagatgccttatactatgcttcttcctaccagtgaggaaggccttactttcagaggaattcccaacagcatctctatctaaggccagagtgcgtctatgtgtggttctctttccaaacctacgttacctttctc

SEQ ID NO: 108560 - DNA, 255 bp, Glycine max
ctgaaggggttgatatcatgcttataagagaactcactggaggtatctattttggagaacccaggggctttggcaccaatgataatggtgaagagattggctttaatactgagatttatgctacacatgagatagatcgcatagctcattttgcatttaaggttgctcaaaagcgtcgtcggaaactttgctctgttgacaaagccaatgtactagaggcatcaatgttatggaggaagagatttttggcaatag

SEQ ID NO: 108561 - DNA, 254 bp, Glycine max
gcaatatcaaggtgcttacattcgctgatggggacactgttgagaccttaaaggagagagttgattttgatgatgaaaacaagaagataacctacaccatattggagggtgtcatgttgaagtactataagagctacaaggttatcgttcatgttttaccaaaaggtgatgagcacagccttgtgaagtggactttcttgtatgagaaggtggatcacactgcccctgagccaaccaagtacaaagatttggtg

SEQ ID NO: 108562 - DNA, 255 bp, Glycine max
tctcgagccgaatcggctcgagcatcgaaacgaggtcgttttgtgtaccgccgaagcaccggaggttgtagcaggctagcagctatggatttggcatccaatctcggtggcaagattgacaaagccgaagttctctctgccgttcagaagtatgagaagtatcatgtttgctatggaggtcaagaggaagagaggaaagctaattataccgatatggttaataaatactacgatcttgttaccagcttttatgag

SEQ ID NO: 108563 - DNA, 255 bp, Glycine max
agaactcagctatgactaccagagaaatccttcaaaagatgaaggtaaaagttggtttgggttcatcagaccctgactcagggaaaggaaagagcaagatgtcaaagaacataactcatggttatcatttggtgaaaggaaaatcatatcatgacatggaggattacgttgtggctcaatttaagcaaatagataacaatgaattgggtttgtttgcaatattcgacggccatgcgggtcagaacgtacctaatt

SEQ ID NO: 108564 - DNA, 253 bp, Glycine max
ggagggtacgccgtgagttcaaggctaacaagatctccgaggaagagtatgttaagtcaattaaggaggaaattcgcaaagttgttgaacttcaagaagagcttgatattgatgttcttgttcatggagaaccagagagaaatgatatggttgagtacttcggtgagcaattgtcaggctttgccttcactgttaatgggtgggtgcaatcctatggttcccgttgtgtgaagccaccaatcatctatggtga

SEQ ID NO: 108565 - DNA, 258 bp, Glycine max
agctggtgcagtttggacaaattcaggaagaagttgtattgctattttcacaagaggaatttcttacagcttggtcaactcaggtgcgtcctgcaacaactctgttggctgatgggtgcccatatttgtatgctatggtgcatgatagttcagtgtctacaataccacgtgattttgtcattggtgtcaagttgacaaccataaacaatatgtgtgcatatgggctcaatcctggtatgtcaggatctcgtcttttgg

SEQ ID NO: 108566 - DNA, 196 bp, Glycine max
ctttccaagataaaggtggtgaggttgaacattgcccaggttttgacggtgatttctcagaagcagaaggctgcgttgagggatgcctacaagaataagaagtacttgcctctcgatctccgccctaagaagaccagggctattcgcaggaggcttactaagcaccaggcatcattgaagacagagagggagaaga

SEQ ID NO: 108567 - DNA, 253 bp, Glycine max
ctcgagccgttatgctttcagcttgtgctttgttctcaaaaacatggattgaagtctctggatcatctgctagagatgttgccaagcagctgaaggaacaacaaatggtaatgcccggacaccgtgagtcaaacttgcagaaagagctgaatcgatacattcccactgccgcagcatttggaggcatctgtattggtgccctgacagtgttggcagatttcatgggggccatcggttcaggaacaggaatatt

SEQ ID NO: 108568 - DNA, 252 bp, Glycine max
gacagcttcaatgaaccaagcaagaagtgtcaggcaaaatacatctgctagtggtgctcgtcctaatcctcaagggtcctttcattatggctccatcaatataactgatacttatgtgtttaaggttacatccctggtgccaatcaatggtacaaatcgagctactattaatgggatctcatttctcaagcctgaggttccattccggcttgctgacaagcatcaattaagaggaacatataagcttgattt

SEQ ID NO: 108569 - DNA, 251 bp, Glycine max
cggctcgagtaacaatattattctcctcattccttcatttttaaacctagctccatctccctccactcaccataacatgccctcagaagcaaatgctgccaacaccaacttctgtgtaaatgttagcaacaatggctacattagtgctaatgaccccttgaactggggtgcggctgcggaggctatggctgggagccacctcgacgaggtcaagcgcatgctagaggagtaccggaggcccgtcgtcaagc

SEQ ID NO: 108570 - DNA, 234 bp, Glycine max
ggctcgagattttgttcaaggaaaagatctcgcgatggttaaagttaatgtagcatgtgctgctgttggcttgacatcaagttacactccaactccattgttggaatctggtttgcaaaaagacagagggttaattgtggagtattttggaaggatgtcttacgttgctcataacgttaatcagccccaagagaaagatttgttagagggaatttttcctttgatattaaatct

SEQ ID NO: 108571 - DNA, 256 bp, Glycine max
ctttcggtgtccaatctccatggacgtcatgcgctctcccgtaagcctctgcaccggcgtcacatacgatcgcgccagcattcagcgctggctcgactcaggccacgacacgtgtcccgccaccttgcaggttcttccctccaaagacttcatccccaatctcacgctccaccgcctcatccgcctctggctcctctcctcctccgccgccgaacgcttctccccctcctccgccgaccatctccgtcctctcctc

SEQ ID NO: 108572 - DNA, 251 bp, Glycine max
cttaaacttcttactgatgggaagttgtatgagggtaagcatattcctgtatctaatattagtgcaggggagaatcatggagtgctaatacccttagtggcacaggaggagattctgtcttctagtgcaagtgatgtcagaactgctatggtgattaaaaataggtagcctcaagctactgcaatgcatgtgggagctataggattacccctggtagtttcgcgagtcctgactgtaacatagctggtgca

SEQ ID NO: 108573 - DNA, 261 bp, Glycine max
atcttcttctaaatcagcttggtgggatcctgggattgagtagtcaagaaatagtggaagtgcacaggggtctagctgagcaagcttttaggcaacaggctgaggtaattttagctgatggacagttgacaaaggccagggtggagcagcttaataacctccagaagcaagtaggcttacctcaagaatatgctcagaaaataatcaagagtataaccactacaaaaatggcagctgccattgaaactgctgtaactcaag

SEQ ID NO: 108574 - DNA, 298 bp, Glycine max
agcgaagagaatggctcccaagggtttaatctttttggctgtgttatgcttctcagcactgtcactgagtcgttgtcttgcggaggataatggacttgttatgaacttctacaaggaatcatgccctcaggctgaagacatcatcaaagaacaagtcaagcttctctacaagcgccacaagaacactgctttctcctggctcagaaacatcttccatgactgtgctgttcagagttgtgatgcttcactgttgctggactccacaagaaggagcttgtctgagaaggaaacagataga

SEQ ID NO: 108575 - DNA, 296 bp, Glycine max
ggaagagatccagcagcaatggtgtacgtcaaggctcagaaatcaaaagcctacttcaagagatatcaagtcaagttcaagagaagaagagagggaaaaaccgattaccgtgccatgattcggttgattaatcaggacaagaacaaatataacactccgaaataccgatttgtggttcgctttagcaacaaggacattgttgcacaaataatatctgctagcattgccggcgatttagttcttgctacagcatattcaaatgagctgccacgatatggtcttgaagtaggacttac

SEQ ID NO: 108576 - DNA, 230 bp, Glycine max
atttgttagtggaaaaaccttcaaatatgatataattggtgctggttcacattcttcagaagattttcctgaaaaggaagatcaagaaaaacccaaaaagattgatgccagattgagacaaagaatagatcctcaatacaatgaggttcaggctcagatggaaacaaatttgtttaaattgtctcttgatgatgttgaaactccaaaaggtcccatgtgggttctaaaaa

SEQ ID NO: 108577 - DNA, 182 bp, Glycine max
atcccatgcaattgatcagtgctactcagactgatggcagtggaaatgggaaagttggaaaagaagtctatttggaaaaacatcttccgaccttgccaacgttgggagcaaggcaggatgcgttcagtattttctttgaatgggatgctagttttggaattccaggagcattttacatcaaa

SEQ ID NO: 108578 - DNA, 138 bp, Glycine max
  unsure (1)..(138): unsure at all n locations
ctanacacgagataaacttgctttgacagaagaagacaagatggaagtgattagaaatagaggcattcctgctgatgttcttgcaaagcgagctcatgaatttgaaaaacatgttgctcatgaaagcctcaaggatca

SEQ ID NO: 108579 - DNA, 179 bp, Glycine max
tccaaatgcactttcatacaaatcagcaatgagagagaatctgttgaggcagggatacagaattgttggaatcattggagaccaatggagcgatctgcttggagaccacagaggcgaaagcaggacctttaagcttcctaatcccatgtactacattgagtagtaccttcacctctctc

SEQ ID NO: 108580 - DNA, 248 bp, Glycine max
cgatcacacacaatatgggaaagaatgtggggattctcgccattgacatctacttcgctaccgcttgcgttcagcaggaagcattggagactcatgatggtgccagtaaacggaagtataccattggacttggccaagactgcatgtcattctgtaccgaagtagaagatgtcatctcaatgagtttgacagtggttacttctcttcttgagaagtatgggattgatcctaaacaaatcggtcgtctg

SEQ ID NO: 108581 - DNA, 261 bp, Glycine max
atttgctactggaaccatcaacataggagggctaaaattgtttcaaatttcaacattcaacaaagtttggaaaaccttagaaggtggaccaggtgatgcaggggcagctttctttgagccagcaggaatacctgagggattcttcacactaggccactacagccaacccaacaacaagcctctttttggatcaattctggtggcaaaagatgagacatcatcaggtgacaataatggagctttgaagaaaccaattgatta

SEQ ID NO: 108582 - DNA, 292 bp, Glycine max
aatatccattgcacctttctctttctccgatggctaatccctcactcttgttcttcagtctcctcctattatccgccaccgtagccgccgccgaacggatcgacgatgaagacgaccttctgatccgtcaagtggtgccggatgcggaggaccaccacctgctcaacgcggagcaccacttctccgccttcaagacaaagttcggcaagacctacgccacgcaggaggagcacgaccaccgcttccgtatcttcaagaacaacttgctccgcgccaagtcacaccagaaatt

SEQ ID NO: 108583 - DNA, 178 bp, Glycine max
gagaagagcaaggttacaggcacaattttcacagatgaggcctgttgcaataacgccttctgttgcgccccgtatgcctctctaccctcctggtgctcctggtcttggacaacaatttttgtatgggcaaggacccccagccatgatgcctccacaagctggatttggttaccagcag

SEQ ID NO: 108584 - DNA, 295 bp, Glycine max
ctcgagccgctgactttcccccagggcacttcccgaagtgttaagagaatgcctctttctatagggggaggagctggtgcaaagaatgctattctcatgaacatgccaaatgctgtcctttcaatgtggagatattttgttggagatctcgtctttgaagtttctaagatgacttctccctacattaaatgtacagtctctttcttcatagcatttggaaatttggctgatgacaccatcaattttgaggcctttccccacaagctggtgcagtttggagaaattcaggaaaaat

SEQ ID NO: 108585 - DNA, 287 bp, Glycine max
cgaagtcgtcgcttgccaagtgcatttcttctcacttcttgctgcttccgcgaatggccagaaatatagcaggattactggcgctgcttctcgctgtttcgatctgcggagccgtcacgattcctggtcccgtctccgatgctcaccgttccgccgcgctagagctcttcgatggatccttttcaagtttagaagaggcctatgaggccctaagagtttttgcgattcttgggattgggaataagcctgatgtgagcacaaccacttgcaagaaagtatcagaaacc

SEQ ID NO: 108586 - DNA, 227 bp, Glycine max
aagattttgagcacaatggcctcgacacaatgctttttgcaccaccacgccctcaccactccagctagagcttcaacacagcgcctagttgtgagcaccaaaccaaaccacattgtttgcaaggcagcacagaagcaggttactgtccaagagggtgaggacactactactggccttgtctctcgcaggttggccctcactgtgctcattggtgctgctgctgttgg

SEQ ID NO: 108587 - DNA, 228 bp, Glycine max
cgcgtcgctgctccgtaccagtttcactgcataaatttgagagaaaactctgcaaacatgttggtttatcaggacctccttacaggtgatgagcttctctcggactccttccgttacaatgaaattgagaatggaatgctgtgggaagttgaggggaagtgggttgttaagggagcagttgatgttgacattggtgaaaacccttctgctgagggtggagaagatgag

SEQ ID NO: 108588 - DNA, 184 bp, Glycine max
ggtgaaatcttggattagtgctcccactctcctatctggtataggacttcgtgggtagacttttctatttctctcctttctttcactctcttcttctcattgatccgcattgttgttcaaagtggtcttatttgaaaaacacttgggcgttggtgcaaatgtttgcttcgtaaattttctctgg

SEQ ID NO: 108589 - DNA, 204 bp, Glycine max
ctcaactgcgcggtgagtgagtgagagacggaaagtgcaaagccaccgtcttctcttctcagagcttggctttgcttatcgattctctctcctctcatctttctcattcaaggtttgtaaaagatggccgatgctgaggatattcaaccccttgtttgtgacaatggaactggaatggtaaaggctggattcgcgggtgatgat

SEQ ID NO: 108590 - DNA, 288 bp, Glycine max
  unsure (1)..(288): unsure at all n locations
tagaaacagtgtgatgaaaatgaaggtccttgttttcttcgttgctacaattttggtagcatggcaatgccatgcgtacgatatgttccctctccgaatgaacactggctatggtgcccgtactccggaggtgaaatgcgcaagttggaggcttgctgtggtaagcacacaacatctttggctttgagaccattcctgaagagtgcgttgaagcaacaaaggaatacatccatggcgaacaatatagatcagactccanaacagttaaccaacaagcttacttttatg

SEQ ID NO: 108591 - DNA, 233 bp, Glycine max
gaagaagatgccgatcagaaacatcgccatcggaaggcctgaagaggctactcaccccgacacgttgaaggcggggttggctgagttcatctccaccttgatcttcgtgttcgccggttcaggttccggcatcgcctacaacaagctcaccgacaacggcgccgccactcccgccggcctcatctctgcttccatcgcccatgctttcgccctcttcgtcgccgtctccgtcg

SEQ ID NO: 108592 - DNA, 288 bp, Glycine max
catggaacaacaatcgagattctttggaccatatttcctagtgtcatactaatgttcattgctataccatcgtttgctttgttatactcaatggatgatattgtagtggatccagccattactatcaaagctattggacatcaatggtattggacttatgagtattcagactataacaactctgatgaacaatcacttgcttttgatagttatatgattccagaagatgatctagaattagggcaattacgtttactagaagtggacaatagagtggtagtgccagct

SEQ ID NO: 108593 - DNA, 295 bp, Glycine max
cagaaattaagctagagctacatagtttttttcttttctcaccttccttctctcccttcagacaagggacgaaaaatcagagagagagagagagagagagagagaaattccaaaaccatgtcgtcccacagtcatctaagtttcgcctttggggttctaggtaacatcgcctccttcgtgtgctttctggcaccactaccgacattttatagagtttgtaagaagaaatcaaccgaagggttccaatcaattccatatgtggctgcactcttcagtgcaatgctttggatctttt

SEQ ID NO: 108594 - DNA, 238 bp, Glycine max
  unsure (1)..(238): unsure at all n locations
cgctgtctctcccatcctttcgcattctcaatacccttttgatttgtgaaaggaaagcaaacatggtcgatcaggtccaacatcctacaatcatcgacaaggttgctggtcagccccatctccgnactagtctttcatctggtattagaagttatgatggagcctaccgccacccagctatgtaccaaagaccctcttttgggaattactcgaatgctgtcttgcatcttcctgtgat

SEQ ID NO: 108595 - DNA, 222 bp, Glycine max
atgcatatgttgagccagttgtgcaagctcaaagtgctgaagtgtattgcgactacttccctgcggaggttgatagtcaagagggagttgctcacattggtgaattgaaatctggtgtctatgttccattgcctacaaaaactaatttggtggatactcccaaggaatggcaactggatctaccttgtgacaaaattcctagtgtctgtgactacactgatg

SEQ ID NO: 108596 - DNA, 214 bp, Glycine max
ttcaaattctccgagtcagccatcgacaagatcaagtcaacggtcaacgagaaccctccatccgatggctcaaaaccattctcaacatttcaggctctttcctcccacgtttggcgccatgtaagccatgcacgtaacttgaagccagaggactacacggtgttcaccgtcttcgccgattgtcggaagcgggtggacccacaaatgccggaga

SEQ ID NO: 108597 - DNA, 206 bp, Glycine max
tataggagatgggcatttcggtgtggccaggccaatgcgacacaaagacaccaaggagcttgtcactctgaaatacattgaacggggtcacaagattgatgagaatgttgcgagggaaatcataaaccatagaagtcttcggcaccccaatcttattcggttcaaggaggtggttctgactccaacccatctgggtatgcttatgg

SEQ ID NO: 108598 - DNA, 194 bp, Glycine max
cgtcccactttcttctccttttagggtttcctttttgtttctcctttccagatctgcatcttccattttttaggattaagcggtgagattcgtgaatctgagaaatgtcggattcttctcgggaggagaatgtttacatggcgaaattggcggagcaggccgagcgttacgaggagatggttgagttcatggag

SEQ ID NO: 108599 - DNA, 181 bp, Glycine max
ctcgagccgttctttccagaacaacaccacaacacaaacagagcaataaaagctccaccaatggcgggttacagagccgacgacgactacgactacctcttcaaggtggtcctgatcggcgattccggcgtgggcaagtccaacctcctctctcgcttcaccaagaacgagttcaacttgg

SEQ ID NO: 108600 - DNA, 217 bp, Glycine max
tgcactccgccgtcatccgttagggcaaaaatgagtcgaggaagtggaggtggatacgatcgtcacatcactattttctcccctgaaggacgtctcttccaagtcgagtatgctttcaaggctgttaaggccgcaggaatcacctcaattggtgtccgaggaaaggattcgatttgtgttgttactcagaagaaggtccgggataacttttgggaca

SEQ ID NO: 108601 - DNA, 290 bp, Glycine max
tctcgagccgaatcggctcgagaatcaaacctgctcccaccgaagaagagttcttgcaggatatggatggagtaatgtctagatgtgaacaggcaatggcaaatagagaaaccatttatggtcgtttcccacaaaaagtcatcgttcttgtttcagacagagttagggaaattattgatacttctgcggaactggaattattgcagagaacctgtaaaaatgcatttcgtttatattcaaaaacaaaacccttacccgcaaaggagtccattagaagagtaaaggatttg

SEQ ID NO: 108602 - DNA, 130 bp, Glycine max
ctggctaatgcttctccagagcagcagaggacgatgctgggtgagaatctctactcccttgtgccacagttagagcctgacaatgctgccaaagtgacaggcatgcttcttgagatggaccagactgaag

SEQ ID NO: 108603 - DNA, 239 bp, Glycine max
gtagcaaagaaagaaagaaagaaaaccctagcttaccttttcaactttcaagatgcaaatctttgttaagacactcactggtaagacaatcacccttgaggtggagagttcagataccatagataatgtaaagtccaagattcaagacaaggaagggatcccaccagaccagcaacgtctcatttttgctggaaagcagcttgaggatggacgtacacttgctgattacaacattcaaa

SEQ ID NO: 108604 - DNA, 184 bp, Glycine max
cgattgttgtaactttttgattcctaaattctctaaaattcgaaattctaatttcgttaggggaaagagattgtttgtgtgtgagtgagtatggctggaaaaggcgagggtcctgctatcggaatcgatttgggaacgacgtactcttgcgtcggcgtgtggcaacacgatcgtgttgaaatca

SEQ ID NO: 108605 - DNA, 215 bp, Glycine max
cgagataactagaaacagtgtgatgaaaatgaaggtccttgttttcttcgttgctacaattttggtagcatggcaatgccatgcgtacgatatgttccctctccgaatgaacactggctatggtgcccgtactccggaggtgaaatgcgcaatttggaggcttgctgtggaaccacacaacatcttgggttttgagaccattcctgaagagtgcg

SEQ ID NO: 108606 - DNA, 267 bp, Glycine max
gctgcttcatttaacatcattcctagcagcactggagctgccaaggctgttggaaaagtcctccctgctttgaatggaaaattgactggtatggcattccgtgttcccactgtggatgtctctgttgttgacctcacagtgaggctggagaaggaagcctcctacgatgaaattaaaaatgctatcaaggaggaatcagagggcaagttgaagggaattcttggttacactgaagatgatgtggtctccaccgattttgtgggcgat

SEQ ID NO: 108607 - DNA, 185 bp, Glycine max
caggtgtgaagcattttcaacatacccccggacatacgatttacttcatgcatggactgtcttctctgacatagaaaataaaggttgcagtaaagaggatctattaatcgagatggatcgcatgcttcggcctactggtttcgcgatcatccgggataaacagtcagtgattgattttataaaga

SEQ ID NO: 108608 - DNA, 228 bp, Glycine max
ttcaaattctccgagtcagccatcgacaagatcaagtcaacggtcaacgagaaccctccatccgatggctcaaaaccattctcaacatttcaggctctttcctcccacgtttggcgccatgtaagccatgcacgtaacttgaagccagaggactacacggtgttcaccgtcttcgccgattgtcggaagcgggtggacccaccaatgccggataattattgcggaaac

SEQ ID NO: 108609 - DNA, 204 bp, Glycine max
gagtagtgtgtggttgaaagttaagaagtagcaaagatgtttccattcgggcacaagggtcaaaagataaaggggactatggtggttatgcagaagaatgtgttggatatcaacagcatcaccagtgttgacgggatcgtcggcaccggcttagacttcttaggcagtgcactcgatacagttacttttctagcctcctccatc

SEQ ID NO: 108610 - DNA, 287 bp, Glycine max
agcggagatagcaatctcatctcattcatttcaatggcaactcaaggtcaagtcattacctgcaaagctgcggtggcctgggaacccaacaagcccttaactgtccaagacgttcaggtggctccgcctcaggccggcgaggtccgtgtccaaatcctcttcaccgctctctgccacaccgatgcttacacttggggcggcaaggatcccgaaggtctcttcccctgtattcttggccatgaagctgcacggattgtggagagtgttggagaaggtgttactaatgt

SEQ ID NO: 108611 - DNA, 283 bp, Glycine max
tcggattcttcaactacggaaagtccttcaacgagggaaccggcacgttcacctcgtacgccaaatcctcggacggcgaaacaaaagtaggtttcacttcctacggcgtaaacaacaccttcaaggattacgagaaaaagggtaccactgtttccttcgccagatacaccaacattagcacaactctctcagcttcagcttcagcttcatcactcagtggcagcttcgtaaataaatgggtggagccgggtaaattttttcgtgaaaagatgttgaaggaagg

SEQ ID NO: 108612 - DNA, 179 bp, Glycine max
cagaatgatggagactaaggaactttttgagtgggtcctaaggcaaccatgttttgagaaaacatccttcatgttatttttaaacaagtttgacatatttgaaaagaaggtcctgaatgttccgctcaatgtatgtgagtggttcaaagattaccagccagtttcaacggggaaacaag

SEQ ID NO: 108613 - DNA, 224 bp, Glycine max
ctcgagccgctcgagccgcgctcgcaagaatctgagtaagattgcctgcaataggctccagaaagagctcgtggagtggcaggtcaatcccccaactggtttcaagcacaaagtcaccgacaatctccagaggtgggtggttgaagtcactggagctcctgggacactttacgctaacgagacctaccagcttcaggtcgattttcctgagaattacccgatgg

SEQ ID NO: 108614 - DNA, 229 bp, Glycine max
gcacttcccgaagtgttaagagaatgcctctttctatagggggaggagctggtgcaaagaatgctattctcatgaacatgccaaatgctgttctttcaatgtggagatattttgttggagatctcgtctttgaagtttctaagatgacttctccctacattaaatgtacagtctctttcttcatagcatttggaaatttggctgatgacaccagcttgtggggaaaggc

SEQ ID NO: 108615 - DNA, 186 bp, Glycine max
actttctctctgcttagggttttgatcgcatcggatcttcactctcttctccgatctcaaaatgcccgccgtttatggagctcgcttgaccaccttcgaagactccgagaaggagagtgaatacggttacgttcgcaaggtatcaggaccagtcgtcgttgcagatggcatggctggggctgctat

SEQ ID NO: 108616 - DNA, 187 bp, Glycine max
ttgaaattttgataaaccgcgatcacaggttgccgcaccttaaaaccggaaacaaaagcaatcgttacttggtttcaagaatttctcaatttcttcctatttctttgtgtacgatttcttaagggaaagaaaatcactctctgtgctggccacagacttcgtgaatcattttcttttccactcttag

SEQ ID NO: 108617 - DNA, 273 bp, Glycine max
cgaaggcaacagcggcatccaactcgagaggatcaatgtctattacaatgaggcctctggcggaaggtacgttccgagagccgtgcttatggatctcgaacctggaaccatggacagcatcagatctggcccctacggcaagatcttccgccctgacaacttcgtcttcggccagtccggcgccggtaacaattgggccaaaggtcattacaccgaaggcgccgagctgatcgactccgttctcgatgtcgttcgcaaagaggctgaaaactg

SEQ ID NO: 108618 - DNA, 283 bp, Glycine max
ccacgtagcaagctagattctcaagcctacggtgatcatacctctataataacaaaacaacacttggagcctaacttgggtgggctcaccgttgagcaggctatccagagcaagaagttgttcatcttagatcaccatgactatctcattccatatttgaggaaaataaatgcaactaccacaaagacttacgctacaagaaccatatttttcttgaaaagtgatggaaccttgacgccattggccattgagttaagtaagccgcatcctcagggtgaaggat

SEQ ID NO: 108619 - DNA, 285 bp, Glycine max
gttttctgattaactctttcttctcataactctgccgccgcaacagccccaaatccaatgcgttcagagaagaaactttcgaacccaatgagggagataaaggtgcagaagctcgtcctcaatatctccgttggcgagagtggagatcgtctcaccagagccgctaaggttttggaacagcttagtggccaaacccctgtgttttccaaagcaaggtacacggttcgttcctttgggattagaagaaatgagaagattgcatgctatgtcactgtcagaggtgac

SEQ ID NO: 108620 - DNA, 221 bp, Glycine max
ggctcccaagggtttaacctttctggctgtgttaatatgcgtttcagcactgtcactgagtccttctgttgcgggggaagggcaaaataatggccttgttatgaacttctacaaggaatcatgccctcaggctgaagacatcatcacagaacaagtcaagttgctctacaagcgccacaagaacactgctttctcctggctcaggaacatctccaatgact

SEQ ID NO: 108621 - DNA, 207 bp, Glycine max
aaatgattgtggttcattggttgttgccaaggttggaaatcacaaacaaattgttggtttccatgttgctggaagcaaaggaagactgggatatgcttcattgataccatatgttgagccagttgtgcaagctcaaagtgctgaagtttattttgacttcttccctgtggaggttgatagtcaagagggagttgctcacattggtga

SEQ ID NO: 108622 - DNA, 198 bp, Glycine max
taattagtggccaaaccccagtgttttccaaagcacggtacactgttcgttcctttgggattagaagaaatgagaagattgcatgctatgtcactgtcagaggtgacaaggcaatgcaacttttggagagtggtttgaaggtgaaggaatatgaacttcttagaaggaacttcagtgatactggttgcttcggctttg

SEQ ID NO: 108623 - DNA, 277 bp, Glycine max
ctcttgcagtcgcagaggaaaaccctagctagtagtctcagttcgtttgagagagaaaaaatggcagagggtctcgttctccgcggaaccatgcgcgcccacaccgacgtcgtgacggcgattgccactcccatcgacaactccgacatgatcgtgacggcgtcgcgcgacaaatccatcattctctggcacctcaccaaggaggacaagacctacggtgtcccccgccgccgcctcaccggacattctcacttcgtccaggacgtcgtcctctcat

SEQ ID NO: 108624 - DNA, 179 bp, Glycine max
  unsure (1)..(179): unsure at all n locations
gccttcattcgggnatttcactagccgcagcagcctcaggaggagaataaggatgtctcacaggaagttcgagcacccaaggcacgggtcactgggatttctccccaggaagcgtgctgctcgtcacaggggaaaagtgaaggcattccccaaggatgacccatccaaggcacccaagc

SEQ ID NO: 108625 - DNA, 229 bp, Glycine max
ccgtttccttatttttttcttcaattctcttgtatacagttttggtctgtgatttgttgctttggtgagagagtggatatggacgaacggtacgagactttgaaggagcttggttcagggtacttcggagtggcaaggttggccaaagacaaggagacaggagaacttgttgccatcaaatacatagaaaggggaaaaaagattgatgcgaatgttcaaagggagatag

SEQ ID NO: 108626 - DNA, 257 bp, Glycine max
ctttttctgtgagcctttctttcaggttcttaacttgatcagtgtgcagtgtccaaatcataagggtagttgcaaattgcaatggctaagcatgatgttgagggtggttccttctctgcaaaggactaccatgatcctcctccagcaccgttgattgatgctgaggaactcacacagtggtccttctacagggctttgattgctgagttcattgccacaatgctcttcctttacatcacagtgctcactgtgattgg

SEQ ID NO: 108627 - DNA, 115 bp, Glycine max
atttgaagcctcccttcggtcccaagcttcattcttggtcctcccgtcaaccggatggaccaggctacactctcgatggacacagtatcagctgggccaattggaagttccacat

SEQ ID NO: 108628 - DNA, 252 bp, Glycine max
gctgaagcttgtaaagtagaatcatcaaccatgctcgtcccagcagactacgtattctttgtggggcccatttcattctctggcccatactgtaaacccagcatcgttttccagcttgatggcaccattgttgcaccaacaagccccaatgcttggggcaaaggactactacagtggttggaattttccaagttagtgggaattaccatccaaggaaatggcatcattgatggaagaggctcagtgtggtgg

SEQ ID NO: 108629 - DNA, 166 bp, Glycine max
gataactagaaacagtgtgatgaaaatgaaggtccttgttttcttcgttgctacaattttggtagcatggcaatgccatgcgtacgatatgttccctctccgaatgaacactggctatggtgcccgtactccggaggtgaaatgcgcaatttggaggcttgctgtg

SEQ ID NO: 108630 - DNA, 276 bp, Glycine max
gggtttacagagaagcgaagaggcgcagcgtcagcagtaactcgtggaattgctagcaatggcgaggatcaaggtttacgagctgaggcagaagacgaaggctgatctgttgaatcagctgaaggacctcaaggccgagcttgccttgcttcgtgttgctaaggtcaccggcggtgcacctaacaagctctctaagatcaaggtggtgaggttgaacattgcccaggttttgacggtgatttctcagaagcacaaggccgcgttgagggatgccta

SEQ ID NO: 108631 - DNA, 278 bp, Glycine max
gatagagaagtacagcgtatccttatggaacttttgaatcagatggatggttttgaccaaacagttaatgttaaagttattatggcaactaacagagcagacactttggaccctgctctgttgcgtcctggaaggcttgatcgtaagattgagttccctttgcctgatagacgtcaaaagaggctcgtatttcaggtttgcacagccaagatgaacttgagtgatgaggtagacctggaggattatgtttctcgtcccgacaaaatcagtgctgctga

SEQ ID NO: 108632 - DNA, 277 bp, Glycine max
tgaaattttgataaaccgcgatcacaggttgccgcacctcaaaaccggaaacaaaagcattcgttacttggtttcaagaatttctcaatttcttcctatttctttgtgtacgatttcttaagggaaagaaaatcactctctgtgctggccacagacttcgtgattcattttcttttccactcttagtttattatctgaacactctcctatttgatataggacttcgtgtcagatttaaacttcttctgtttctttctcagttctctgtttaatttca

SEQ ID NO: 108633 - DNA, 276 bp, Glycine max
cttcaagggcaatggacagtggaggacactacaacccccgcaccgtcgaagaggttttccgggacttcaagggccgccgggctggcatgatcaaagccctcaccactgatgttgaggaattttaccagcagtgtgatcctgaaaaggagaatttatgtctgtatggattccccactgaacaatgggaagtaaatttgcctgctgaagaagttcccccagaacttcccgagccagcactgggcataaattttgctagggatgggatgcaagaaaagg

SEQ ID NO: 108634 - DNA, 277 bp, Glycine max
gaaaacccaaagtgcttctctcctctgtctttttctctctcttgctatccttttggctagtggcactgctgcaagtgcaactccaagaagcgcagtgccaagccaccatgtttcaacattcaacagaagcctttttccttccacttctctctttggaattggttcttctgcttaccaggcagaaggagcagcaagtgtagatgggacaggaccaagcatatgggacacctacactagacagcatactgaaaagatttcggatcatagcaccggtgac

SEQ ID NO: 108635 - DNA, 276 bp, Glycine max
ctgccactgagccaagaagatggcctcacaggtttgcaaatctgcttccagagccgcgaggtcccttctatcctctcgttttcactctcacggacgtgcgcttggggctgctgcggctgtttcattgagcagcaaagtgcctcttttttacggaaagaacggttctggaaatggatccgcttcttcatcatcatcatcatcatggatttcaggagctcttgctcttcctgccgcagcttacatgttccaagatcaggaggtgcaggcagctgagct

SEQ ID NO: 108636 - DNA, 272 bp, Glycine max
gcagtcgcagaggaaaaccctagctagtagtctcagttcgtttgagagagaaaaaatggcagagggtctcgttctccgcggaaccatgcgcgcccacaccgacgtcgtgacggcgattgccactcccatcgacaactccgacatgatcgtgacggcgtcgcgcgacaaatccatcattctctggcacctcaccaaggaggacaagacctacggtgtcccccgccgccgcctcaccggacattctcacttcgtccaggacgtcgtcctctcat

SEQ ID NO: 108637 - DNA, 276 bp, Glycine max
caacgaaccactctgaagccgctcacgttatccacaacactctcaaccccccttaaaccctaaccaattcaaccatggcttcttcttccaccttcactgcaatctccgcctgcaagctctcctcctccgccgccatctcctccttcccctcccgccgccgctccaacgccgtcgttctgtcgaggcgcagcgcgccgccagggtctccgccatggccaaggagttgcacttcaacaaagacggcaccgcaattaagaagctccagagcggtgtgaa

SEQ ID NO: 108638 - DNA, 243 bp, Glycine max
gggatgggaataccagtgggaaaactttctttatatacagcacttggaggagtccgctcttcagcttgtttacccattacaattgatgtgggcactaacaatgagaagctgctgaatgatgaattatatatcgggctaaagcaaagacgagcaactgggcaggaatatgctgaacttatgcacgaatttatgacagcagtcaagcaaactcatggggaaaaggtcctagttcagtttgatgac

SEQ ID NO: 108639 - DNA, 240 bp, Glycine max
atcctgcttgcacaaaagcaatggctatgtcatttaatccaaacccgtgttctgatgcatggagtgtggaatttctgaagcgtaccggatttcattgtgatatcatttgtgtcgctggatggactgccaccccaatgcaggatgttcaggctacaattgattggtttatttcctctcaggaatgtgttcccagaacctattgtgttttaaatccacaaaatccctttgtgttaaataggt

SEQ ID NO: 108640 - DNA, 272 bp, Glycine max
gaagaacatatcatcaaaatatagtacaattaattggattttgtgttcatgggtcaaaacgtgctcttgtctatgaattcatgcccaatggatctcttgataaatttattttttccaaagatgaaagtatacatttaagctatgatagaatatataatatatcaattggagtggctcgtggaattgcttatctccactatgggtgtgagatgcagattttgcactttgatatcaagccccacaacattctactagatgaaaacttcacccca

SEQ ID NO: 108641 - DNA, 273 bp, Glycine max
gtgaaaacggagagatctacaagcgggtatgtgttgccgggaataatccttcacttgtggagtctccaactgagcccaagtggtcttctgatggagagctgtttttcatcacggatagggaaaatggtttctggaatctccataaatggattgagtctgagaataaggtcttgcctgtttattctttggaagctgagtttgcaaggccactgtggatttttggtatgaattcttatgaatttcttcaaagtcatacacggaaaaacttaattg

SEQ ID NO: 108642 - DNA, 273 bp, Glycine max
ccttcttcttcttcttcaaaaccaagttacgtattatagaatccttaattttcctaaagttagaattcaatcaatcaggtggagatggtttgggtgaatgagaaactgaaggggttcgtggggcacagatgggtggtgtttgtgtgcgcgatgtgggacatgtcgtttgcggggacatcttacatgttcgggagcatatcgccggtgataaagagcagcatgggtttcaaccagaagcaggtggcgttcttgagcgtggctaaggatctgggt

SEQ ID NO: 108643 - DNA, 272 bp, Glycine max
aaaagggtggtgcctttaaagggttgaggattaaggtgaagaacccttctcttaggaggttggttagcggtgcctttgctggggcggtttcacggaccactgtggcgcccttggagacgataaggactcatttgatggtggggggtagtggcaattccactggggaggtgttcaggaatatcatgaagactgatgggtggaagggcttgtttaggggtaatttcgttaatgtgattcgggttgctcctggcaaggccattgagctatttgct

SEQ ID NO: 108644 - DNA, 275 bp, Glycine max
aagatttgaaattttgataaaccgcgatcacaggttgccgcaccttaaaaccggaaacaaaagctatcgttacttggtttcaagaatttctcaatttcttcctatttctttgtgtacgatatcttaagggaaagaaaatcactctctgtgctggccacagacttcgtgaatcattttcttttccactcttagtttattccatgaacactctcctatttgatataggacttcgtgtcagatttaaacttcttctgtttctttctcagttctctgtt

SEQ ID NO: 108645 - DNA, 274 bp, Glycine max
ctagtcccaaagagctaacaagagattcaagaccggcatggctaatgaagaggaacagaaaaaccacctcttcggcatcaaagatctcggtcacaagactctccttcagagtgatgcactctatcagtatatacttgaaaccagtgtctatccaagagagcacgagtgcttgaaagagatacgcaagatgactgcaaaacacccactgaacatcatggcaacaccagcagacgaaggacaacttctgagcatgcttgttaagctcacgaattca

SEQ ID NO: 108646 - DNA, 271 bp, Glycine max
ccagaacctattgtgttttaaatccacaaaatccttttgctttaaataggtggatgggaaaactgactttcccccagggcacttcccgaagtgttaagagaatgcctctttctatagggggaggagctggtgcaaagaatgctattctcatgaacatgccaaatgctgttctttcaatgtggagatattttgttggagatctcgtctttgaagtatctaagatgacttctccctacattaaatgtacagtctctttcttcatagcatttgg

SEQ ID NO: 108647 - DNA, 272 bp, Glycine max
gtttgcagtcactgctctgtttcaccgagtttgggcgtgtagatcaggaccaaatcgtgttctcttccattggcaaacatggcaactcaaatgagcaagaagagagaagtttgttgcggacggagtgttctttgccgaactggacgaggttctgacgcgtgaattggcggaggacggttactccggcgtggaagttagggttacgccgatgcgcaccgagatcatcatcagagccgccagaacccaagccgttctaggtgagaagggaagga

SEQ ID NO: 108648 - DNA, 272 bp, Glycine max
gtggtgccttatcgctgtggttatcatcttcttcttcctctttcttagatctcttctttctctacgccgcacgccgaaaccatggccggaaaaggagagggtcctgctatcggaatcgatctcggaaccacctactcttgcgtcggtgtgtggcaacatgaccgcgttgaaatcatcgccaacgaccaagggaacagaaccacgccgtcttacgtcggattcactgacaccgagcgtctcatcggtgatgcggccaagaatcaagtcgccat

SEQ ID NO: 108649 - DNA, 270 bp, Glycine max
tagaaattatcattgatagtttcgcaagtcctgactgtaacatagttggtgcaatgcttttggttgatacttatcataccaatcctgaaaatgcagttcgtagtatttttgttgcgcctttcagaggcggaaggcccattcgggtggttacatttccgaataccattgtgcagattgaaccagacatgaattcaaggtttcagcttttgagtaccactaccaatggtgattttgttcaaggaaaagatctcgcgatggttaaagttaatg

SEQ ID NO: 108650 - DNA, 269 bp, Glycine max
aatttttcctttgatattaaatctcgctctagattggaaaaagtttcctctacaaaagcacaatttgttagtggaaaaaccttcaaatatgatataattggtgctggttcacattcttcagaagattttcctgaaaaggaagatcaagaaaaacccaaaaagattgatgccagattgagacaaagaatagatcctcaatacaatgaggttcaggctcagatggaaacaaatttgtttaaattgtctcttgatgatgttgaaactcctaa

SEQ ID NO: 108651 - DNA, 270 bp, Glycine max
gaaggttgcttaatagaagaaccatgggtgaagatctcttttgggctgttagaggtggtggtggaggtagctttggtgtggttcttgcctacaaaataaagctagttcgagttcgtgaaaaagtcactgttttccaagttgggagaaccttagagcaaaatgccacagacatagtttacaattggcaacatgttgcgcctagcattgacaatgatcttttcattaggctcatcttggaggtggtaaatggtacacaaactgcaacaaaga

SEQ ID NO: 108652 - DNA, 267 bp, Glycine max
agattaggatcggcatcaacgggtttggaaggattggccgtttggtggccagggttgcccttcaaaggaatgatgttgaacttgttgctgtcaacgatcctttcatcaccactgattacatgacatacatgttcaagtacgacaccgttcatggccagtggaagcattttgatgtgaaggtgaaggactctaagacccttctctttggtgagaaccccgacaccgtttttggaatcaggacccctgaggaatttccatggggtgagg

SEQ ID NO: 108653 - DNA, 271 bp, Glycine max
agaatgtttatgcccattgggttcctgaggacagaatcctttgcaccaatttgtggtctgctgaactctcaaagcttgcagccaatgctttcctggcccagaggatctcctcggtgaatgccatgtcggcactttgtgaggcaactggtgctgatgtctcccaggtgtcacattcaatcggcacagactcaagaattggaccaaagttcctgaatgccagtgttggttttggaggatcatgcttccagaaggacatattgaacttggtcta

SEQ ID NO: 108654 - DNA, 269 bp, Glycine max
gaacaactgaattctggacatctcatgagtgcttattgttgccttatgaacaatccctcaccaggttggattcaacttctggtctctactatgactgttcagcccatatgctctgggttggggaacgaaccaggcagcttgatggtgcccatgtcgagtttctaagaggagttgctaatcccttgggaattaaggtaagtgacaagatggatccaaatgagcttgttagactcattgagatcttgaatccccaaaacaaaccagggaga

SEQ ID NO: 108655 - DNA, 269 bp, Glycine max
aggtgattttgtcattggtgtcaagttgactaccataaacaatatgtgtgcttatgggctcaatcctggtatttcaggttctcgtcttttgggcaccattcctcagtccatttcacagcaaactgtttggaatcaaatggcaacagtgagaacactattgaattttgattctagcaagcagagcttttgtcaattttctattgaccttctcggtggaggaattttagtggacaaaactggagattggatcacacttatacaaaattctc

SEQ ID NO: 108656 - DNA, 269 bp, Glycine max
tgtaccgtgacattgcaaagtacaatgagcttgagacccaagaagaagcccaagaggagactggttggaagcttgtccatggtgatgtatttaggccccccaacaactcagatttgctgtgtgtttatgttggaaccggtgttcagtttttcggcatgatactagtaaccatgatatttgctgtccttgggttcctttctccttcaaaccgaggtgggctgatgacagccatgctcttgctttgggttttcatgggaatatttgctggg

SEQ ID NO: 108657 - DNA, 269 bp, Glycine max
cgaagagaatggctcccaagggtttaatctttttggctgtgttatgcttctcagcactgtcactgagtcgttgtcttgcggaggataatggacttgttatgaacttctagaaggaatcatgccctcaggctgaagacatcatcaaagaacaagtcaagcttctctacaagcgccacaagaacactgctttctcctggctcagaaacatcttccatgactgtgctgttcagagttgtgatgcttcactgttgctggactccacaagaagg

SEQ ID NO: 108658 - DNA, 270 bp, Glycine max
ctcgagccgtttggataatgtgggaatgtggaatgtgaggtctgagaattgggttcatcaggatttgggccagcaattttatcttagagtgtattcccctgcaaattcatggagagatgagtacccaattccaagcaatgctattcggtgtggcaaggctgtgggacactactaatgccaccaccaaaccaacattgggatttttatttgaacagtgtcattcatttccattcatggcttgactcaagcctcttctcttgttctcttgta

SEQ ID NO: 108659 - DNA, 173 bp, Glycine max
atggcaggaaggccacctgtgcttccatccaaccacctttcttacacagagaacttcctatatatgctagattcttttggtaatcggtcatataaacccaatcctcggctaactcgtgtgctagacattatcttcatcctgcatgcagaacatgaaatgaattgttctacatc

SEQ ID NO: 108660 - DNA, 258 bp, Glycine max
ggagtttggagtttctgaagcgtaccggatttcattgtgatatcatttgtgtcactggatgtgatgccaccccaatgcaggatgttcaggttacaattgattggtttatttcctctcaggaatgtgttcccagaacctattgtgttgtaaatccacaaaatccttttgcgtgaaataggtggatgggaaaactgagtttcccccagggcacttcccgaagtgttaggagattgcctctttctatagggggggagctgg

SEQ ID NO: 108661 - DNA, 270 bp, Glycine max
gtgctctcttgcaaattggatactgttactggccaatattatcctgagtgggctccaattaattgtcgagttcatcgacaaccaattcacatcactgaaggaaattatgtcagaaagcaagatgtcagcattgaatatgatgcgtgtacaattccaaatgattgtggttcattggttgttgccaaggttggaaatcacaaacaaattgttggtttccatgttgctggaagcaaaggaagactgggatatgcttcattgataccatatgtt

SEQ ID NO: 108662 - DNA, 269 bp, Glycine max
cacaaacttctcttccgagtgttccattccaacttgggtgtggctatggatcgcgctcagcttcttttggtgggtgtgcctctcttcctcttctgctcagacctcttctcccttttcactcatcatccaccaccgccaccccaccaccatcacccccaccaccatccacctcaccaccaccaccacccgcctcaccacccaccccaccaccaccatcacccgccccaccaccatcagcagccggtgataatagagttccctcccgagaa

SEQ ID NO: 108663 - DNA, 268 bp, Glycine max
ctcgagccgattcggctcgaggcaagatgatttatgcaagctccaaggacagattcaagagagagctggatggaattcaagtagagttgcaagcaactgatcctactgagatgggtcttgatgtgttcaaaagccgtgccaactaaaatgattatataaaatagtaggctttctggtgggagcagcacccctgaagccttagttactcatatggaaaatatcctagtttgtgggatggtcaacttgggtagttatggtcccaaactct

SEQ ID NO: 108664 - DNA, 262 bp, Glycine max
ctgaatcaggatccattttgataccaagttgctgttgaatatcgagtttgctctttagagatctgtttccctctagacaacggtctgtagaacctgttattttagttgaatcgaagccgcgaccaaatcttcctgatctttgcctgaggtgatggcatcggcgggtgtagcacctgcttctggagtaagagatgtgaatgcagattcggttgctgttgaaaggttgcctgatgagatgaatggcatgaaaattagggatgaa

SEQ ID NO: 108665 - DNA, 265 bp, Glycine max
ggaagtttgatgtttgtgtcacaagttttgaaatggctatcaaggagaagtctgctttgcgacgatttagttggcgctacataattattgatgaagctcatcgaatcaagaatgagaattccttgctgtccaaaacaatgaggctctacagtacaaactatcgtctccttattactggcacaccacttcagactaatcttcatgaactctggtctcttctcaactttcttctgcccgaaatttttagttctgctgaaacttttga

SEQ ID NO: 108666 - DNA, 238 bp, Glycine max
atttgcaacacaacagaaaaagacaacacagagagaagcgtcttaataaacgctcttctctgaaaaacctgatttcttctcttctgctcttctctttcgtttcgatcttcgatctctgagaatgatacagtgcatttgaatccacatcggtcaggcgggtattcaggtctgaaacgcctgctgggagctctactgcctcgaatacggcattagcctgattcgcagatgccaagttata

SEQ ID NO: 108667 - DNA, 141 bp, Glycine max
cggagaaagggagaaagggtgtcagaatggacagcaaagaggaagatgtaagggttggagcaactaagttctcacaaaggcaaccaattggtacagcagctcagggtgacaaggactacaaagaaccacccccagcacctt

SEQ ID NO: 108668 - DNA, 205 bp, Glycine max
gtgattctgctcgagacttttggttcgaaacaccccctaaacgtgggccagatactccctacaaatttgggaagattggtgatttggggcaaacgtttaattctctttcgacccttgagcattatttggagagtggaggagaggctgtgttatatgttggagatctttcttgattctgatgaacatgactacaaagatatgggtt

SEQ ID NO: 108669 - DNA, 264 bp, Glycine max
gttctagatcgcgagcggccgctcgcgatctagaactagtctccggcgcctcccgccgccgcctctccaccgacgtgccggcgacgccgcggcggaacgcgtcttcgcggaggcgtggaagacagtgagccccaacatcgacccgccgaagacgccgctggcgtacatgaagccccgaccacccactccttcgactctcccctccaaactcaccgtcaacttcgtcttgccctacgcttctcaattggccgcaaaagaggttga

SEQ ID NO: 108670 - DNA, 264 bp, Glycine max
caggaatgtggtcccaataatggttttgaaatgtggagttctgagtgggcaaatcaaacttcatggcatttgagtttccttattgacaatcccaaacaatctacagtttttgatattctcttgggaatctctcaagattttgaaattgctggtaatactcttatgccagctttttctgttccacaggctactgccagatcttctgaaaatgcggaatcctctgcatgatctggaatttgtgttttctttcgcttgttcgtttgt

SEQ ID NO: 108671 - DNA, 255 bp, Glycine max
gttgttgtggtgtttcatttgtgaaactaacaacaacacaaggccatcatcatggcagctgcttccccaatggcaagccaactcaagtccaccttcactaggactcttgtagctcccaagggcctctctgcctcttcaccacttcacctcgtgccttctagaaggcaatttagcttcactgttaaggccatccaatcagagaagccaacctatcaagtgattcagccaatcaacggtgacccattcattggaagc

SEQ ID NO: 108672 - DNA, 213 bp, Glycine max
tttcaatgtggagatattttgttggagatctcgtctttgaagtttctaagatgacttctccctacattaaatgtacagtctctttcttcatagcatttggaaatttggctgatgacaccatcaattttgaggcctttccccacaagctggtgcagtttggagaaattcaggaaaaagttgtattgaaattttcacaagaggaatttctagctt

SEQ ID NO: 108673 - DNA, 250 bp, Glycine max
gctgaacactctcctatttgatataggacttcgtgtcagatttaaacttcttctgtttctttctcagttctctgtttaatttcaagttcaagctggtgaaatcttggattagtgctcccactctcctatctggtataggacttcgtgggtagacttttctatatctctcctttctatcactctctacttctcactgatccgcattgccgttcaaagtggtcttatttgaaaaacacttgggcgttggtgc

SEQ ID NO: 108674 - DNA, 230 bp, Glycine max
gaaagaacaagaaagatatcagtggctaccccagagcacttaggaggttgaggactgcctgtgagagggcaaagagaactctatcttcaactgcccaaaccaccattgaaattgattctctctatgagggaattgatttctactccaccattactcgtgcatgatttgaggagctcaatatggatctctttcgcaagtgcatggaaccagttgagaagtgtttaagagat

SEQ ID NO: 108675 - DNA, 128 bp, Glycine max
caagaaaactgcttcagttttgtgcttgacaactgtcaagaatgaagacaagatggagttcagtagaatcctagaagctattaaggccaacttcaatgacaagtacgatgaatacagaaagaagtggg

SEQ ID NO: 108676 - DNA, 205 bp, Glycine max
aacactcataacacaaagcacaaagcaaagctcatccttgagttaaaaaatggcaccagcttcttccatggctctctcatccccatccttggctggcaaggccgtgaagctgggcccatcagccccagaagtgggaagggtgagcatgaggaagacgtcaccaagcatgtctactcaggagcccatggtacggccagaccgagtc

SEQ ID NO: 108677 - DNA, 251 bp, Glycine max
acaaaatgaagagcctcctcttctctctcttcctcttcctcttcttagcctcctccgccgtcgccaccgtccccgcccacaacatcacccgcatgctggccgcacaccccggcttctccaccttcgaccactacctctccgtcacccagctggccgaagagatcaaccgccgccagaccatcaccgtcctggccctcgacaatgccgccatgtcctccctcttcgacaagcactctccctccccacaatca

SEQ ID NO: 108678 - DNA, 251 bp, Glycine max
gatcgagataactagaaacagtgtgatgaaaatgaaggtccttgttttcttcgttgctaccattttggtagcatggcaatgccatgcgtacgatatgttccctctccgaatgaacactggctatggtgcccgtactccggaggtgaaatgcgcaagttggaggcttgctgtggaagcacacaacatctttggcacagagaccattcctgaagagtgcgttgaagcaacaaaggaatacatccatggcgaac

SEQ ID NO: 108679 - DNA, 248 bp, Glycine max
caagaatagatcatcaggacatcacaatttggtggaatggtcgaaaccatacttagccaacatacacaaactattgcgtgcgttggataatcgccttgaaggccaatatgcattagctgaggcatgtaaggtggctaccgctctctctgcgatgccttgcaacagaatccaagttgagaccaaccatggacgaggttgtcacggatttggagcagctgcaggttccccatgtgaatcaaaatcgttct

SEQ ID NO: 108680 - DNA, 255 bp, Glycine max
caagaatagaccatcaggacaacacaatttggtggaatgggccaaaccatacttagccaacacacacaaacttttgcgtgtgttggataatcgccttgataggccaatatgcattagatgagccatgtaaggtggctaccctctctctgcgatgccttgcaacagaatccaagttgagaccaaccatggacgaggttgtcacggatttggagcagctgcaggttccccatgtgaatcaaaatcgttctgtgaatg

SEQ ID NO: 108681 - DNA, 104 bp, Glycine max
ctagaaacagtgtgatgaaaatgaaggtccttgttttcttcgtagctacaattttggtagcatggcaatgccatgcgtacgatatgttccctctccgaatgaac

SEQ ID NO: 108682 - DNA, 189 bp, Glycine max
cattgttcaccttctttagtatctgtgcataccgaaggaagcacatgggattctgagacttattcagtagcagcagaatgtttaatagatttatttgccaccttctttgatgtggtgaggtctcagctacctggcgtggtatcagtactgacagggttcattagaagtcctgtccagggtccactagta

SEQ ID NO: 108683 - DNA, 209 bp, Glycine max
agaaggggcaagttgtatgcatcattgaggcaatgaaattgatgaatgaaatagaagctgatcagtcaggaactatagttgaaattgttgcggaagatgccaaatctgtaagcgttgacactcccctatttgtgattcaaccatagagctcaaagtattcgaatggatggatgaagatctaagtcggtagttgaagtgtaaggctcatc

SEQ ID NO: 108684 - DNA, 221 bp, Glycine max
attctgcggtgattgttcttggagctactaataggtcagatgtcttagatcctgcactttgccggccaggaagatttgatcgtgtagttatggtagaagcacctgatagaattggaagagaagccatcctaaaagttcatgtttccaagaaggaacttcctttagccaagaatgttgacctcagtgacattgcttgtatgaccactggttttactggagca

SEQ ID NO: 108685 - DNA, 177 bp, Glycine max
ctcgagccgtgactctgggaagtccactaccactggccacttgatctacaagcttggaggcattgacaagcgtgttattgagagatttgagaaggaagctgctgagatgaacaagaggtctttcaagtatgcctgggtgcttgataagcttaaggctgagcgtgacataggaatcac

SEQ ID NO: 108686 - DNA, 252 bp, Glycine max
gcttcaccttgcgccgaagggccacagatggttgaaaccgatatggatgccgaaactgttgcaaatgtggttccaccaaaggagactccaaacagtgttcccatctcttatcattcctcacactcacaccctcctcttaatgagaggattatttcatccatgaccagaagatctgttgctgcacacccgtggcacgatcttgagatagggcctggtgcccaaagatctacattagtgtgattgagattggga

SEQ ID NO: 108687 - DNA, 253 bp, Glycine max
aaaacaagtagttgagaactaagaagaaggaaatggcttcctcaatgatctcctccccagctgttaccaccgtcaaccgtgccggtgccggcatggttgctccattcaccggcctcaaatccatggctggcttccccacgaggaagaccaacaatgacattacctccattgctagcaacggtggaagagtacaatgcttgcaggtgtggccaccaattggcaagacgaagttcgagactctttcctacttgcc

SEQ ID NO: 108688 - DNA, 256 bp, Glycine max
tgcaagtccaagaagaaggccttcaccaagtactcaaagcagtatgaaactgaggagggaaagaaaaacattgaggcacagctggagaaactgaagaagtatgctactgtggttcgtgttttggctcacacccagatcaggaaaatgaaagggttgaagcagaagaaagcccatatcatggaaattcaggttaatggtggtactattgcacagaaggtggactttgcatacagtttctttgagaaacaggttccta

SEQ ID NO: 108689 - DNA, 255 bp, Glycine max
aacatggggtttgaggaaactgagctaaggcttggactgcctggaaacgtaggaggcactggcactgaagaagtgctcatcaggaagagaggtttctctgagactgaaactgaaactgaggaggatgagtctgctaccactgtggatttgatgcttaatctttcttctaaggaagctgctgctgctgcagatccaactgataagcacaagactttgcctaaggagaagactcttctgcctgcagatcctgctaag

SEQ ID NO: 108690 - DNA, 250 bp, Glycine max
ctagtcgcacatcggtgcattcttcgaaatggtacccggtttcacggggtgtttcttctggggtgtcgtagaagtcatcaagatggttgtttgcggtttaagatggagcttcggaagcatttccttgggacaatagcatgctgtcgtggcagagaactgcttttcatttccaaccagagaaaaactagatgaaggatcctaacggtcctatgtactacaagggatggtatcacttcttctaccaatacaa

SEQ ID NO: 108691 - DNA, 206 bp, Glycine max
atcatgagagtgatgttcttctagtgggagatgatccttgggaggagtttgtgaactgtgtccgctgtattaaaatactttctcctcaagaagtgcagcagatgagcttggacggagattttggcaatggtggccttcaaaatcaagcctgtagcagctctgacggtggcaatacttaaatgaagttcagtaatacgctaactatt

SEQ ID NO: 108692 - DNA, 249 bp, Glycine max
gatcgagataactagaaacagtgtgatgaaaatgaaggtccttgttttcttcgttgctacaattttggtagcatggcaatgccatgcgtacgatatgttccctctccgaatgaacactggctatggtgcccgtactccggaggtgaaatgcgcaagttggaggcttgctgtggaagcacacaacatctttggctttgagaccattcctgaagagtgcgttgaagcaacaaaggaatacatccatggcga

SEQ ID NO: 108693 - DNA, 251 bp, Glycine max
gttttcatcttaaagacctctttcctttggttctaatttattaccctttgataatgatatgagttcgtataggcattttggatgatgctattgaaatagcctgtcttgctatattttctggtaccccacccatttcataaagtattttcccaggtttaacgacagctacccaatattcgggagaaccttttcctgaacccatacgtgtttcagtaggtcttactgtaaccggtttgtctggaaatatgcgt

SEQ ID NO: 108694 - DNA, 142 bp, Glycine max
tgggacgccacctcacagctaatggttacagtgctccagaatttgagtatggaagttatacattgcaaagtgatgtctttagctttggagttgtaatgctagaactcctcactggacgaaaatcctttgacagctcacggct

SEQ ID NO: 108695 - DNA, 249 bp, Glycine max
gccagctggaattcctggaagtctcaaaaacaattaccatcgcgctgatgggcaaaactgtggcaactttctcactgatcggccatctaccaaggttcatgctgccccgggtggtggatcttccttgcattacctctttggtggtcctccagggaactgattcatacctaccatgtgatgtatcatgcgtaaaatggatagtgttgcatcgtgtatagaccagtggacttggttacttgttcaattgaa

SEQ ID NO: 108696 - DNA, 210 bp, Glycine max
ccccaatgcaggatgttcaggttacaattgattggtttatttcctctcaggaatgtgttcccagaacctattgtgttttaaatccacaaaatccttttgtgttaaataggtggatgggaaaactgactttcccccagggcacttcccgaagtgttaagagaatgcctcgtcctatagggggaggagctggtgcaaagaatgtatctcatg

SEQ ID NO: 108697 - DNA, 227 bp, Glycine max
atgaagaaaagggacaagcttagttgtcaagttggaatcaacccatactccatggaatggactggtttggccaatagattactgagtaagggcaacgatattctgtgttgcgattatccaattttgaatggtttgattaccaagcaagttatgagcaagatggcagatatgataaacagtctttgtggtggtgatgaaaaattgatgcgtgaaaggacacacctgct

SEQ ID NO: 108698 - DNA, 213 bp, Glycine max
aagacaacagagagcgaagaaggagaagagatcagaaaaatggcgtccaaagctccaaagatagccaatctcctcgatcaccactccatcaagcacatcctcgacgagtcagtctccgaggtggtaacgagtcgtgggtgttgtggaagacgtgagattgagcaatgtgaggcttctcattggggcaatcatcatcgtcattgctctcttcgc

SEQ ID NO: 108699 - DNA, 240 bp, Glycine max
cacagacaaagcaatggcaaagaccgagttagaggtgactgttgagagcaagaacaaagacctcaagcacctggggtttgtgaggattgctgctattcaaacatttgtgattgtgtcacatctgtatgagtacgcaaagcagaattctgggcctttgagatccgtcgtaggaacggttgagaatactgtaaccacaattctcggccctgtctgcaacaaatccagggacgtcctgatgat

SEQ ID NO: 108700 - DNA, 252 bp, Glycine max
cctcgagccgattcggctcgagcctgacagaggctactcaccccgacacgttgaaggcggggtcggctgagttcatctccaccactgatcttcgtgttcgccggttcaggttccggcatcgcctacaacaagctcaccgacaacggcgccgccactcccgccggcctcatctccgcttccatcgcccatgctttcgcctcttcggcgccgtctccgtcggcgccaacatctccggcggccacgtcaaccccg

SEQ ID NO: 108701 - DNA, 251 bp, Glycine max
tctcgagccgctcgagccgattcggctcgatgaaattttgataaaccgcgatcacaggttgcacgcaccttaactccggaaacaaaagcaatcgttactacgtttcaagaatttctcaatttcttcctatttctttgtgtacgatttcttaagggaaagacaatcactctctgtgctggccacagacttcgtgaatcattttcgtttccactcttagtttatttgctgaacactctcctatctgatatagg

SEQ ID NO: 108702 - DNA, 252 bp, Glycine max
tctcgagccgaatcggctcgaggtttgttgatcgagataactagaagcagtgtcatgaaaaaggaggtccttgttatcttcagtgctacaatcttggtagcatggccatgccatgcgtacgatatgttccctctccgaatgaacactggccatggtgcccgtactccggaggtgacatgcgcaagttggaggcttgctgtggaagcacacaacatctttggctttgagaccattcctgaagattgcgttgaa

SEQ ID NO: 108703 - DNA, 234 bp, Glycine max
ggaggatgcagcaaacaactttgcccgtggccactataccattggaaaggagattgttgagctttgcttggaccgaatcaggaagcttgctgagaactgcacaagtctccaaggtattctggttttcgatgagtctggtgacggaactggctttggactaggttgccttttgctggaacgcctctcagtggactatggcaagaagtccaagattggtttcactgtcaatccttc

SEQ ID NO: 108704 - DNA, 234 bp, Glycine max
tggttgttgccaaggttggaaatcacaaacaaattgttggtttccatgttgctggaagcaaaggaagactgggatatgcttcattgataccatatgttgagccagttgtgcaagctcaaagtgctgaagtttattttgacttcttccctgtggaggttgatagtcaagagggagttgctcacattggtgaattgaaatctggtgtctatgttccattgcctacaaaaactaatt

SEQ ID NO: 108705 - DNA, 184 bp, Glycine max
gaaattttgataaaccgcgatcacaggttgccgcaccttaaaaccggaaacaaaagtaatcgttacttggtttcaagaatttctcaatttcttcctattcctttgtgtacgatttcttaagggaaagaaaatcactctctgtgctggccacagacttcgtgaatcattttcttttccacactac

SEQ ID NO: 108706 - DNA, 236 bp, Glycine max
cctactcctcttaagtcttttattctgagggcagatcaagctagcacgtatgggaattccaattccgctctcatttatgtcactctatctttctttcttgtggaacggggaaccccattgatgattgttggagatgtgaccccaattgggaaaagaaccggaagcgtctagcagattgttccattgggttcggtaagcatgccgttgggggaagggatggtaaaatatatgtggtg

SEQ ID NO: 108707 - DNA, 205 bp, Glycine max
aacagtgtgatgaaaatgaaggtccttgttttcttcgttgctacaattttggtagcaaggcaatgccatgcgtacgatgtgttccctctccgaatgaacactggctatggtgcccgtactccggaggtgaaatgcgcaagttggaggcttgctgtggaggcacacaacatctttggctttgagaccattcctgaagagtgcgttg

SEQ ID NO: 108708 - DNA, 281 bp, Glycine max
tattcctccaataagcgaattctcagatttgtatgcatggagaaaacaacaacgcacattgtagtaattcccagtgcaggattcagccacttcgttcccattatccacttctcaaaacaactcgttgagcttcacccagaaattcacgtagcatgcatcattcccatactagggtctctcccaagtgccgcaaaacccattctccaaacccttccacaaaacattaacacgagtttccttccaccggtgaaccctaatgagctacacaagggattcccgta

SEQ ID NO: 108709 - DNA, 275 bp, Glycine max
acttctagtatttttcaagtaacttaaggtttcaaacctaggaagttggaagtcatggcagcaacattgatggcagcaacaagttctggcactcttaaagcaactcctttcctaggccaaggcaagggtgccaatgccaatgctcttagggatgttgtttccatgggaactgggaagtacaccatgggcaatgatttgtggtatggaccagacagagtgaaatactggggaccttttcaggctcagacccttcatactggaaaggagaattccca

SEQ ID NO: 108710 - DNA, 278 bp, Glycine max
aggaagaatcactcccttatccatttccacaccacaccatggcatcaaccaacgctctctcttcagcctccattctacgctctcacaaccgccagtctctgacccgaagagcgaaccataatggaagagtaaattaccggaaaccgaataaccgtttctccgtgaaagcctccgccaaagagattgcctttgaccagcattcccgctctgctatgcaggccggcattgacaagctcgccgacgctgttgggctcactcttgggcgcagagggaggaat

SEQ ID NO: 108711 - DNA, 276 bp, Glycine max
cagaagaggtcgagtttcacagcagcaatggtgtacgtcaaggctcagaaatcaaaagcctacttcaagagatatcaagtcaagttcaagagaagaagagagggaaaaaccgattaccgtgccaggattcggttgattaatcaggacaagaacaaatataacactccgaaataccgatttgttgttcgctttagcaacaaggacattgttgcacaaataatatctgctagcattgctggcgatattgttcttgctgcagcatatgcacatgagctg

SEQ ID NO: 108712 - DNA, 276 bp, Glycine max
cactaattgatgaaaagattttgtgcatgcatgggggtctttctcctgacatacttaatctggatcagattagaaatctacagcggcccactgatgtgcctgatacaggtttgctttgtgatctcctctggtcagacccaagcaaagaggtccaaggttggggaatgaatgacaggggagtttcatatacatttggtgctgataaggtctcagagtttcttcagaaacatgatttggatcttatgtgtcgtgctcatcaggtggtggaggatgggt

SEQ ID NO: 108713 - DNA, 253 bp, Glycine max
gcaaaagatgcaaactcgtgaagagttggttgaagcttccgctaccctcatatggattgcttcagctcttcatgctgctgttaactttggacagtatccatatggaggtttaatcctgaataggccaactattagcaggagattcatgcctgagaaagggtctcctgaatatgatgcgttggctaagaaccccgagaaggatttttgaagactattactggcaagaaagagacctccatgacttaccattata

SEQ ID NO: 108714 - DNA, 163 bp, Glycine max
agttgtgaggcctgactacacaagctcggcgcagattggagaaattcaggtcggagatggatcgccacttccacaagaggaattgcacacagcttggtcaactcaagtgcgtcatgcaacaactctgttcgctgatgggtgaccatattcgtatgctatggtg

SEQ ID NO: 108715 - DNA, 271 bp, Glycine max
atgttttgttgtcaaagccactacttgaggctttattgcattttgaggctattcaacctttgccaaagcgtgttggtgtcgactttttggagtcatgggttgtcaaattcataatgcctaactcagagagtgctggtgtagctagtccaacagagcgtgaggaactttctagtatgtttctggagtttttaaatctctttggtgatgttcaatctatcaagagagcttgagataggcatgcagattgtttttgcctcacagaagcatgtca

SEQ ID NO: 108716 - DNA, 264 bp, Glycine max
atcgaccgcagctacaatgcaaggttaggtgattttggtttggccttaagaggccatgttgatgattacagactcaggtctactcctcctgctggcaccatgggctatcttgatccttgttatgtcactcctgataatttaagcaccaaaactgatgtttttagttttgggattttgttgttggagattataagtggaaggaaggctattgatatcacttattcacctccttccattgtggattgggctattcctcttattaag

SEQ ID NO: 108717 - DNA, 271 bp, Glycine max
gcatgtgctgctgttggcttgacatcaagttacactccaactccattgttggaatctggtttgcaaaaagacagagggttaattgtggagtattttggaaggatgtcttacgttgctcataacgttaatcagccacaagagaaagatttgttagagggaaatttttcctttgatattaaatctcgctctagattggaaaaagtttcctctacaaaagcacaatttggtaatgggaaaaacttcaaatatgatataatggtgctggttcaca

SEQ ID NO: 108718 - DNA, 272 bp, Glycine max
aggtgattttgtcattggtgtcaagttgacaaccataaacaatatgtgtgcatatgggctcaatcctggtatttcaggttctcgtcttttgggcaccattcctcagtccatttcacagcaaactgtttggaatcaaatggcaacagtgagaacaccattgaattttgattctagcaagcagagcttttgtcaattttctattgaccttctcggtggaggaattttagtggacaaaactggagattggatcacacttatacaaaattctccaa

SEQ ID NO: 108719 - DNA, 273 bp, Glycine max
caagaaaaaggataaaaagaaaagtctctgtcgtccttcgtcgttcgcgttgatctcagattcagtcttcgccatggcggagggtgcttcttacggattgcgtcgttcattagatattcagcaattacaatttgaagcccagcatcgatggttgcgacctgcagaaatttgtgaaattcttcgtaattatcggatgtttcatatcacatcagagcctcataacaggccaccaagtggttcactttttctttttgatcgaaaagttttgagata

SEQ ID NO: 108720 - DNA, 206 bp, Glycine max
aaaatttaacaattagggttgcttctcctttgccgacccatggctcccaaagctgatagttcaaagaaggctgatccaaaggcacaggccttgaaaactgccaaggcagttaagtccggtgctaactttaagaagaagaccaggaagatccgaacatctggtaccttccatcggccaaggactttgaaaaaaggataggaacccca

SEQ ID NO: 108721 - DNA, 277 bp, Glycine max
tcgaaaatgggttgctgaaatccgagagccaaacagaggaagtaggctctggttgggtacttgtcccactgccattagcgctgctctcgcttatgatgaagcagcaagggcaatgtatggttcctgtgcgcgcctcaactttcccaacgttcaagtttcaactttgtctgaggaatcgtcgagaaattctccagctgctgctaaccggtccggaaattctccagctgctagtcaatccggtcatgcgttgatgatattagagagttctgagtgcatg

SEQ ID NO: 108722 - DNA, 263 bp, Glycine max
tatgtatcaagtaactgaacgtttcaaacctaggaagttggaagtcatggcagcaatattgatggcagcaacaacaagttctggtactcttaaagcaactctttccttggccaaggcaagggtgccaatgctaatgctcttagggatgttgtacccatgggaacttggaagtacaccatgggcaatgatttgtggtattgaccagacaaagttaaataacttggggcccttcttaggtgagaccccttcatactttgaaggag

SEQ ID NO: 108723 - DNA, 272 bp, Glycine max
aaaatttaacaattagggttgcttctcctttgccgacccatggctcccaaagctgatagttcaaagaaggctgatccaaaggcacaggccttgaaaactgccaaggcagttaagtccggtgctaactttaagaagaagaccaagaagatccgaacatctgttaccttccatcgaccaaggactttgaaaaaggataggaaccccaaatatccacgcattagtgctccagccaggaacaagcttgatcactatcagatattgaaatttcctct

SEQ ID NO: 108724 - DNA, 222 bp, Glycine max
ctatcttctctcggagccgctattatccccagacgccaccgccgcagcaccagaagaagaagaagagtgatggctgagtacgacctaactccgcggatggcgccgaatctcgacaggcaccttgtgttccctctcctggagttcctgcaggagcggcagctctacgacgacgaccacatcctgaaggcgaagatcgaccttctaacaacaccaacatggttg

SEQ ID NO: 108725 - DNA, 269 bp, Glycine max
cgaaaatgggttgctgaaatccgagagccaaacagaggaagtaggctctggttgggtacttttcccactgccattagcgctgctctcgcttatgatgaagcagcaagggcaatgtatggttcctgtgcgcgcctcaactttcccaacgttcaagtttcaactttgtctgatgaatcgtcgagaaattctccagctgctgctaaccggtcgagaaattctccagctgcgagtcaatccggtcatgcgttggatgatattagagagttctg

SEQ ID NO: 108726 - DNA, 271 bp, Glycine max
tatttatcaagtaacttaaggtttcaaacctaggaagtgggaagtcatggcagcaacattgatggcagcaacaacaagttctggtactcttaaagcaactcctttccttggccaaggcaagggtgccaatgccaatgctcttagggatgttgtatccatgggaactgggaagtacaccatgggcaatgatctgtggtatggaccagacagagtgacatacttgggacacttctcagctcagaccccggcatacttgcgaggagaattccct

SEQ ID NO: 108727 - DNA, 260 bp, Glycine max
cggctcgagcgctctgtttctgtctctgtgtttgcggctgaggattccgaacgagcgaacttcttcgtttctcgcaaagtttaagtcatcatgggtaaggaaaagactcacatcaacattgtcgtcattggacatgtcgactctgggaagtcaactagcactggtcatttgatctacaagcttggaggtattgacaagcgtgtgattgagaggtcgagaaggaggctctgagatgaacaagaggtcattcagtatcctgg

SEQ ID NO: 108728 - DNA, 263 bp, Glycine max
gtttgttgtgagctataagctagtttatcgtgaggagaatatgaagttgtttgttttctttgttgctgcagtagttttggtagcatggccatgccatggcgcaggctaccaaaggttccctctccgaattgaaactgggtatggtgagcgttcctcggaagtaaaatgcgcaagttttaagcttgctgtggaaacacacaacatccgagcctttaaaaccattcctggagagtgccgtgaaccaacaaagggctacattaatg

SEQ ID NO: 108729 - DNA, 271 bp, Glycine max
caactaattagtcttatggtatatcttagtatagaagaagagaataaagatttgtatctgtttataaattctccgggggggtgggtaatacccggaatagctatttatgatactatgcaatttgtacaaccagatgtacagacagtatgtaagggaatagccgcttccatggggtcctttcctttggcaggaggagaaattaccaaacggttagcattccgctacgcttggcgccaatgattcctttatttgagaatatgtataaagacta

SEQ ID NO: 108730 - DNA, 272 bp, Glycine max
gttgatcgagataactagaaacagtgtgatgaaaatgaaggtccttgttttcttcgttgctacaattttggtagcatggcaatgccatgcgtacgatatgttccctctccgaatgaacactggctatggtgcccgtactccggaggtgaaatgcgcaagtttgaggcttgctgtggaagcacacaacatctttggctttgagaccattcctggagagtgcgttgaagcaacaaaggaatacatccatggcgaacaatatagatcagactcca

SEQ ID NO: 108731 - DNA, 247 bp, Glycine max
ttctattcattcaagattcagcgagtgcgttttggaagcagagaccgaaatacttcgagatggcccgtacaaagcaaactgctcgtaagtcaactggaggaaaagctcccaggaagcagcttgcaaccaaggctgcacgtaagtctgcaccaacaactggtggtgtgaagaagcctcatcgttatcgccctggaactgttgctcttcgtgagattaggaaattacagaagagcactgagctcctaat

SEQ ID NO: 108732 - DNA, 253 bp, Glycine max
taaagacaatggcttcaaggtgagtgggtcaaatctttggaaaaatgactcaaaatgtatccaatggctagaccaatgggaaccttcctcagtcatatatgtgaattatggaagtattactgtgatgtccgaggatcatttgaaagaatttgctctgggactagcaaatagcaatttacccattttgtggataaaaaggccagatttggtaatgggtgagtccacacaattgccacaagacttcttagatgag

SEQ ID NO: 108733 - DNA, 266 bp, Glycine max
acgcaagggcgctggtgctggaaggaagcaatcgaagaaagctgctaaggatcctaacaagccagagagacctccaagcgctttcttcgttttcatgtccgagttcagagagcagtttaagaaggagcatcctaacaacaaatccgtcgctgttgtcggtaaagctggtggtgacaaatggaaatcgctgtctgatgctgaaaaggcccccttcgttgccacggccgaaaagaagaaacaagagtatgagaaaactattttggctt

SEQ ID NO: 108734 - DNA, 133 bp, Glycine max
aggcaaaaggccattcatcctaagtagatcaacttttgtgagttctggtaagtatgctgcccactggacaggagacaatgctgctacatggaatgatttggcatactcaatccctgcgatattaaatttctgg

SEQ ID NO: 108735 - DNA, 139 bp, Glycine max
attgtgataaaccgcgatcacaggttgccgcaccttaaaaccggaaacaaaagcaatcgttacttggtttcaagaatttctcaatttcttcctatttctttgtgtacgatttcttaagggaaagaaaatcactctctgg

SEQ ID NO: 108736 - DNA, 249 bp, Glycine max
ctcgagcgcggtcttgcagaataggtactgaacatgagaagtttggttttgagtttgcaaccttgcgtcctatgaagtatgaccaaatagcagaattgctgaatggcattgctgagagatttgactgggataaagtaatggaaggtgacaaaattattggactcaaacaggggaagcagagcatatccatgggagcttgtggtcaatgtgaacttaggggaactcctcctgaaaccttgcatcagactt

SEQ ID NO: 108737 - DNA, 268 bp, Glycine max
ctttgataagttttttgtgcagctccaatggcaacctctcaaatcacttcatcattgaggaacttgcctgcatttgaaaggtttcaaccttcaacgcttcgatttccttctgctgggcacgtcagaattgggacactgacacaaacctcgtttccctctttcgttgtcaaagccgccactgttgtcggccccaagcacaccactgttaagcctctgggtgatagagtactggtgaaaattaaggatgcagaggagaagactgcaggtg

SEQ ID NO: 108738 - DNA, 265 bp, Glycine max
gtttgttgatcgagataactagaaacagtgtgatgaaaatgaaggtccttgttttcttcgttgctacaattttggtagcatggcaatgccatgcgtacgatatgttccctctccgaatgaacactggctatggtgcccgtactccggaggtgaaatgcgcaagtttgaagcttgctgtggaagcacacaacatctttgggctttgagaccaatcctggagagtgcgttgaagcaacaaaggaatacatccatggcggacaatata

SEQ ID NO: 108739 - DNA, 263 bp, Glycine max
ctcatactcacagctactttatcatttttctccctttctgttcttcttctgttcagcttagacactcatttttattagttttgttgctgagtgtgtgtgaaactgtgaaagagagttatggcaggaggtggtggagctccagcacctaagattgatgagccacaacctcatcccccgaaggatcagttaccgaatgtttcttactgcattacgagtcctcctccatggcctgagggcatacttcttggttgtcaacattatct

SEQ ID NO: 108740 - DNA, 259 bp, Glycine max
atcatttgtgtcactggatggactgccaccccaatgcaggatgttcaggttacaattgattggtttatttcctctcaggaatgtgttcccagaacctattgtgttttaaatccacaaaatccttttgtgttaaataggtggatgggaaaactgactttcccccagggcacttcccgaagtgttaagagaatgcctctttctatagggggaggagctggtgcaaagaatgctattctcatgaacatgccaaatgctgttc

SEQ ID NO: 108741 - DNA, 169 bp, Glycine max
cccatgcagcccccgaagtcgggagggtcagcatgaggaagaccgtcaccaagcaggcctcctccggaagcccatggtacggcccagaccgcgtcaagtacttgggcccattctctggcgagcccccgtcctacctcactggcgagttcccaggtgactacggctggga

SEQ ID NO: 108742 - DNA, 168 bp, Glycine max
ggcctaccatgaacagctttcagtggctgaaattaccaacagtgctttcgagccatcgtccatgatgggcaagtgtgacccttgcccaggggaattacatggcatgtttgcttgatgaacgtgggtgacgttgtgcccaaagatgtgaatgctgctgttgccaccatc

SEQ ID NO: 108743 - DNA, 194 bp, Glycine max
gtgagtttgttgatcgagataactagaaacagtgtgatgaaaatgaaggtccttgttttcttcgttgctacaattttggtagcatggcaatgccatgcgtacgatatgttccctctccgaatgaacactggctatggtgcccgtactccggaagtgaaatgcgcaagtttgaagcttgctgtggaagcacacaa

SEQ ID NO: 108744 - DNA, 256 bp, Glycine max
ctcgagccgctcgcggcctcttctctcccctcgcgccgcctacacaaaaaggttattgatctattattgtttgacgatggctgatgctcatgggactgataagaacattgaggtgtggaaaatcaagaaattgatcaaagctcttgaggctgccagaggaaatgggacaagtatgatttcccttatcatgcctccacgtgatcaaatatctcgtgtcaccaagatgcttggtgatgaagttggactgcatcaaaca

SEQ ID NO: 108745 - DNA, 260 bp, Glycine max
ggaacacaggaaaagcctccaaaaccaacccaccgttggcgcgatggctttcccctccaaaggcgatgacgagcaggttctggtgcagcgtaaatcaaatgcgagagttttgacactaaacaggactaaacagttgaatgccctctctttttatatggtttctcggctacttgaaattttttctgaagatgagaaagattctgatattaaattggttgtcgtgaagggaaatggaagggctttttgtgctggtggtgatg

SEQ ID NO: 108746 - DNA, 230 bp, Glycine max
tgagcatttgggagaaggctgatttgatcaaggtcagtgatgcggacttgagttcctcacaggaagtgacaagattgatgatgaatctgctttgtcattgtggcaccccaatttgaagttgctccttgtcactcttggggaacatggttccagatactacaccaagagtttcaaaggatcggtagatgcttgccatgcaatacagttgatacaactggtgcccggtgatc

SEQ ID NO: 108747 - DNA, 280 bp, Glycine max
tttcattattgagagagagttcttctctccagacttctcaatcctatggctctgcattttcttctcctcctgctttttgcagtgtcttttgttgctgctgatgaagaaccatttataggagtgaatattggaacagatctctctgatatgccacaccctactcaagtagtagctctacttaaagcccaacaaattcgtcatgttcgtttgtatgatgcagaccaagctatgctccttgcacttgcaaagacaggcattcaggttgttgtgactgtcccaa

SEQ ID NO: 108748 - DNA, 275 bp, Glycine max
aacttgctctacctctgccactttctgagtacaatacaacactgccatggctgcctcagtctccactattggagctgtcaacagagctccactgagcttgaacagctctgaagctggagattcggttcccagttcagccttctttggcacaagcttgaagaaggttactgcctcaagggtccctaacgtcaagatttcttctggaagtttcaaaatcgttgcggcggagaaagagattgatgagcaacaacagacaaacaaggacagatggaaag

SEQ ID NO: 108749 - DNA, 271 bp, Glycine max
agctttgtgggggagcccctttatctggagattcacagcactttatcaatgtctgcatgggggctattattgggcaagcatatggcttgactgaaacatttgcaggggctgccttctctgaatggtatgaccgcaaggcggggcgtgttggtccacctcttccttgttcctacattaagcttgtttcttgggaagaaggagggtatctgacatcagacaaaccaatgccacgcggagagattgtagttgggggatttagtgtgactgccgg

SEQ ID NO: 108750 - DNA, 270 bp, Glycine max
actcgagcgcaaattttctcccccaaatcgtagatctacggttaaattggtgtagtgtggtaagatgggaggaggatttagagtgcttcacttagttaggccatttctctcgtttcttcctgaagttcaaactgctgacaggaaagtgccatttagagagaaggtcatatacactgtgatctctcttttcattttcctggtttgtagtcagctccctctatatgggatacactcaacaacaggtgctgatccattctattggatgcgtgt

SEQ ID NO: 108751 - DNA, 189 bp, Glycine max
ctattccatttgtcgcactagacgtaagaagtgatagagtggcagttgggcgtgctctggatctccctgtgtactttggagatgctggtagtagagaggtcctacataaggttggggctgaaagggcatgtgctgcagcaataactcttgatacacctggtgcaaattatagaacagtttgggctttga

SEQ ID NO: 108752 - DNA, 271 bp, Glycine max
agtcaatcgaaatcggcggagatggttgccatgaggtttcaccagtaccaggtggtgggaagggctcttcctaccgaatccgatgagcatcctaagatctaccgcatgaaactctgggccaccaacgaggtccgtgccaaatccaagttctggtattttttgagaaaattgaagaagtttaagaaaagcaatggacaagtgctagccatcaatgagatttttgagaagaatcctaccaagattaagaattatggaatttggctgcgctatc

SEQ ID NO: 108753 - DNA, 274 bp, Glycine max
tacaaaagcacaatttgttagtggaaaaaccttcaaatatgatataattggtgctggttcacattcttcagaagattttcctgaaaaggaagatcaagaaaaacccaaaaagattgatgccagattgagacaaagaatagatcctcaatacaatgaggttcaggctcagatggaaacaaatttgtttaaattgtctcttgatgatgttgaaactcctaaaggttccatgttggatcttaaaatttctcaatctaaaattgcacttcccaagaac

SEQ ID NO: 108754 - DNA, 276 bp, Glycine max
tgtcctccgacctgaaggcgttctccgccgcgctggccctctcctccatcctcctctccgcccctctccccgccggcgccgacatctcggggctcaccccatgcaaggagtcgaagcagttcgcgaagctgagaagcagtcgataaagaagctggagtcgtcgctgaagctctacgaggcgggcagcgccccgcactggccattaaggcgagcgtggagaagacgaagaggaggttcgacaactacgcgaagcaggggttgctgtgcggcggcgat

SEQ ID NO: 108755 - DNA, 136 bp, Glycine max
tgtaggtggtggatttgctactggagccatcaacataggagggctaaaattgttgcaaatttcaacattcaacaaagtttggaaaaccttagaaggtggaccaggtgatgcaggggcagctttctttgagccagca

SEQ ID NO: 108756 - DNA, 271 bp, Glycine max
cagactatcaccttggatgaaattaaagaatcaacagccaacatgtagcacagattattgtgtattgagttacttgttggctgaccataaagatacgttgggtgcaccactgtgcccttgccggcattacgatgataaagctgctgaggttgcacaaggattttggaattgcccttgtgttcccatgagagagaggaaggagtgccactgcatgctatttctcacacctgataacgaatttgctggcaatggacagactatcaccttggat

SEQ ID NO: 108757 - DNA, 271 bp, Glycine max
atgttcaaggaaaagatctcgcgatggttaaagttaatgtagcatgtgctgctgttggcttgacatcaagttacactccaactccattgttggaatctggtttgcaaaaagacagagggttaattgtggagtattttggaaggatgtcttacgttgctcataacgttaatcagccccaagagaaagatttgttagagggaaatttttcctttgatattaaatctcgctctagattggaaaaagtttcctctacaaaagcacaatttgttag

SEQ ID NO: 108758 - DNA, 272 bp, Glycine max
gatcgagataactagaaacagtgtgatgaaaatgaaggtccttgttttcttcgttgctacaattttggtagcatggcaatgccatgcgtacgatatgttccctctccgaatgaacactggctatggtgcccgtactccggaggtgaaatgcgcaagttggaggcttgctgtggaagcacacaacatctttggctttgagaccattcctgaagagtgcgttgaagcaacaaaggaatacatccatggcgaacaatatagatcagactccaaaa

SEQ ID NO: 108759 - DNA, 272 bp, Glycine max
tgaaaatctgaagcccgaataaatttaaggaggagggatcagagaggtgttgacacttccattttacgaaaactcaattaatgtgaaatcaggtcaacacctgatttcagttcttttgtattcaacagagggaacgaccgagcaaagcaaatggggtgctcattctccggtctgaatgccttatacgactccgttaacggcggaggcgatgtttggatcaacgagaaccgtttccgcatcgttcgccagctcggagaaggtggcttcgccta

SEQ ID NO: 108760 - DNA, 134 bp, Glycine max
aagcaatcgttacttggtttcaagaatttctcaatttcttcctatttctttgtgtacgatttcttaagggaaagaaaatcactctctgtgctggccacagacttcgtgaatcattttcttttccacacaacata

SEQ ID NO: 108761 - DNA, 267 bp, Glycine max
cacacaatagcaaagaagggaagactaaaactaaaaccccactctctttttccgagtcttccagtgaaagaaaggcagcgatggaagaagacttcgacatccccggcggcgaggaaatggatctcggcgaagacgaggtcggcgaggagagggagatcggctctggcggcctcaagaagaagctcctcaaggaaggtcaaggctgggaaacccccgaagtcggtgacgaagtccaagttcattacacggggactttgctcgacggga

SEQ ID NO: 108762 - DNA, 181 bp, Glycine max
gataaaccgcgatcacaggttgccgcaccttaaaaccggaaacaaaagcaatcgttacttggtttcaagaatttctcaatttcttcctatttctttgtgtactatttcttaagggaaagaaaatcactctctgtgctggccacagacttcgtgaatcattttcttttccactcttagttta

SEQ ID NO: 108763 - DNA, 266 bp, Glycine max
cttgccagatcttgtggacaaggctgtagcaagtgaaggtggaactgatgatgccaaaagaaggggtgatgcttttgctcgtgcattttcagctcacttggcaaggctgatggaggagccttcagcatatgggaagttaggcctcgccaatctcttggaaatgagggaagagtgcttgagggaatttcagtttgctgatgcctatagaagtataaagcagagggaaaatgaggcatcgcttgctgttttacctgacttgctggtgg

SEQ ID NO: 108764 - DNA, 269 bp, Glycine max
cttcgctttagcaaattccaattcccaatccaaaaccctaatttcgttcaaagaaccaattgtgatggcaccaaaggcagagaagaagccagcggagaagaagcccgcggaggagaagaagtcgacggtgggagacaaggctccggcggagaagaagccgaaggccggaaagaagcttcctaaggagggaggagccggcggagaaggggggaagaagaagaagaggaacaagaagagcgtggagacatacaagatatacatattcaagg

SEQ ID NO: 108765 - DNA, 269 bp, Glycine max
gcaagatgaacgatgcgttcagaaaagctactggattgaacatacgacggacttgtccgtagagtcaatgatgctcgattccaacgcctctgatctcgacaaggaggagagacccgaagttttgtccctactaccaccatatgaaggaaaatcagttgtagaacttggagcaggtattggaagattcacagttgaattggccaagaaagctggccagttacttgctgtggatttcattgagagtgctataaagaagaatgaaagcatta

SEQ ID NO: 108766 - DNA, 270 bp, Glycine max
gttttcatcttaaagacctctttcctttggttctaatttattaccctgaaataatgaattgagttcgtataggcattttggatgatgctattgaaatagcctttcttgctatattttctggtaccccacccatttcataaagtattttcccaggtttaacgacagctacccaatattcgggagaaccttttcctgaacccatacgtgtttcagtaggtcttactgtaaccggtttgtctggaaatatgcgtacccatatttgtccacctc

SEQ ID NO: 108767 - DNA, 272 bp, Glycine max
caactaatggccaccaaaatggttcgttttgcttgtccagtactaagggaagtgatccgttaaactggggagcggcggcggaggcgatgaaggggagccacctggacgaggtgaagcgcatggtgtccgagtaccggaagccggtggtccggctcggcggcgagacgctcaccatcgcccaggtggccgccgtggctggacacgaccacggcgtgacggtggagctctcggagtctgcccgagaaggagtgaaggcgagcagtgagtgggtg

SEQ ID NO: 108768 - DNA, 266 bp, Glycine max
attttaatagaacttactggtcacactgcaaacaataagctgggaatgctggcatgccgacctgctccagttcaggtgacttggattggttatcccaatacaacaggattgcctacaattgattatagaataactgattctcgggcagaccctcccgaaacaaaggcagaagcatgttgaagggttagttcgattaccagatagcttcctttgttacattccttcccatgaggttggtcctgttggtcaaactccgactctttcca

SEQ ID NO: 108769 - DNA, 219 bp, Glycine max
ctacatccctggctctgttccgtcgatgacgatggcgtttagggtgcgaaaccctgacctccgctttctcattcttctctctctcttgtccatcacttccgccaaggtcttcttcgaggagcgtttcgatgacggatggggaaatcgttgggttaaatcagattggaaaaaagatgagaacctggctcgggagtggaacccacctctggccaatggaat

SEQ ID NO: 108770 - DNA, 166 bp, Glycine max
caggttaccgcaccttaaaaccggaaacaaaagcaatcgttacttggtttcaagaatttctcaatttcttcctatttctttgtgtacgatttcttaagggaaagaaaatcactctctgtgctggccacagacttcgtgaatcattttcttttccacacaacatacg

SEQ ID NO: 108771 - DNA, 263 bp, Glycine max
gtcattggatgatcctgatacaaagattatgagacctcaacaggtttatgttggggagtggttgaggcattatgcaccaatcaatcaaaggactacatcaagtaacactgacaaacttggtcaattggctgtatcaaacgcctcaaagaggcgacttgctggatctggggcttaacatagtgaaaatgccaagtggtcaataaagtccacttcagagaaaaaattaatttttttttctggtatataaaataagtttgtttgtt

SEQ ID NO: 108772 - DNA, 261 bp, Glycine max
cgaagagaatggctcccaagggtttaatctttttggctgtgttatgcttctcagcactgtcactgagtcgttgtcttgcggaggataatggacttgttatgaacttctacaaggaatcatgccctcaggctgaagacatcatcaaagaacaagtcaagcttctctacaagcgccacaagaacactgctttctcctggctcagaaacatcttccatgactgtgctgttcagagttgtgatgcttcactgttgctggactcca

SEQ ID NO: 108773 - DNA, 261 bp, Glycine max
tcgtgatcgaaaatggcgacgttgaaggttcctgctcaacttccttctccagtggaagacagtgagcaattgcgaaaagcttttcaagggtggggaacgaatgaaggattgataatatcaatcctgggtcatagaaatgcagctcagcgtaagttgattcgtgaagcttatagtgcaactcatggagaagatctttttaaagatttagacaaagaactttcaagtgactttgagcgggctgtgttggtttggacattggat

SEQ ID NO: 108774 - DNA, 261 bp, Glycine max
agctgcttgaggtgctgggggtcaaatctccttttttcctagttgttcagggatttcttgtaggctcatatggactaacttgggccctgaagaacttaagcaagatatcaaagctggctatactaaacagtccactaacagattcatctcccattcctggactttttcagaagctaattcctctatatggtgaatttacaagccagaatgctattattgctgagcggtttattgaaggaggtagcccttacgttctgaaaa

SEQ ID NO: 108775 - DNA, 260 bp, Glycine max
ggcgcggggttcgtggggtcgcacctggtggatcggttgattgcgagaggggacagcgtgatcgtggtggacaatttcttcacgggaagaaaagagaacgtgatgcaccattttgggaaccctagattcgagctcatccgacacgacgtcgttgagcctctcctgctcgaggttgatcagatctaccatctggcttgccctgcttcccctgtccactacaagttcaaccccgtcaagactatcaagacgaatgtggtggg

SEQ ID NO: 108776 - DNA, 269 bp, Glycine max
gagaaatttaactcgaccttgtatgatgaatgggttaacaagggcaatgcaccggcactgcccgagactcttaagagattacaacaagctggtgtctcttggcttcaagattatattcttgtcaggaagaacactggacaaacaggccgtaacagaagcaaacttaaagaaggctggctaccacacatgggaaaaattaattctcaaggatccacaagatccttccactccaaatgcagtttcatacaaaacagcagcgagagagaaac

SEQ ID NO: 108777 - DNA, 267 bp, Glycine max
tgtcactaatcaaagcatgggaagaaagtgaaaaatcaaaagctgaaaacaaggctcacaaaaagctttcatccgtttctgcatgggaaaacagcaagaaagctgctgtggaggctgacctgaaaaagattgaagaagaactggagaagaaaaaggcagaagctgcagaaaagataaaaaacaaaattgctgcaatccacaaggaagctgaagaaagaagagcaataattgaggcaaagaaaggggaagatcttcttaaggcagagg

SEQ ID NO: 108778 - DNA, 262 bp, Glycine max
aaaccctactcattctccatacctcaacgaagaggttaaagagacggcaacactttgctgtccgccttgaccgagcagagcttcgtcttggccctcgattttgccctaaagtactctcagtcacaacagacaccgtcgtcgtcgtcgtcgtcatcaatggcaccgaagcagaccaaggctgagaagaagatcgcttacgatgcgaactgtgcgacctaatggaggagtacggccagatcctcgttgtgaactccgataacgt

SEQ ID NO: 108779 - DNA, 258 bp, Glycine max
gcagaagaacaagtagttgagaactaagaaggagaagcaaatggcttcctcaatgatctcttccccagctgttaccactgtcaaccgtgccggtgccggcatggttgctccattcactggcctcaagtccatggctggcttccccaccagaaagaccaacaatgacattacctccattgctagcaacggtggaagagtgcaatgcatgcaggtgtggccaccagttggcaagtagaagtttgagactctttcctacct

SEQ ID NO: 108780 - DNA, 257 bp, Glycine max
agacattcacctcgtacggcaaaaacggcaacggcccgaccaacgtgttcacctcgtatggaacagagtccaacgttgtcgggtcagggttctccaactacgtcgagacctccaacgccgccaacgacaccttcaagggatacggcgtcgacatgaacaaccccaccaacacgttctcctactacgccggcggggcaacggcgccgtcgagagattctccagctaccgcgataaggccaacgtcggagccgactcct

SEQ ID NO: 108781 - DNA, 258 bp, Glycine max
gccatttctttcgtcttaatttgttctcttcagccatggcgatggtgcaagatgaacgatgcgttcagaaaagctactggattgaacatacgacggacttgtccgtagagtcaatgatgctcgattccaacgcctctgatctcgacaaggaggagagacccgaagttttgtccctactaccaccatatgaaggaaaatcagttgtagaacttggagcaggtattggaagattcacagttgaattggccaagaaagctg

SEQ ID NO: 108782 - DNA, 260 bp, Glycine max
cggctcgagcggctcgagactagagttgcaagagaggtgttcaacgagatgcatcagccagatttggtatcatggacttctctaattgttgggtatgctcagaatggtcaaccagaggaagtacttcatttcttcaaattactactccaatcaggtaccaagcctgatcaaataaagggttagaatatttccattcaataagggagtgacatggattgatgcatactgcagatcattatgcatgtgttattgatttattg

SEQ ID NO: 108783 - DNA, 257 bp, Glycine max
gtggtggtgggttcaggggtggtggtaggggtgacagaggcagaggaaggggcggtggaggaagaggaggagacagaggtacacccttcaaagctagaggcggtggtagaggtggtggaggccgtggaggaggcaggggtggtggccgtggcggtggcagaggtggaatgaagggtggtagcaaggttgttgttcagccccatagacatgacggtattttcattgccaagggtaaagaagatgctctcgttaccaaa

SEQ ID NO: 108784 - DNA, 162 bp, Glycine max
aagaagagttcgaaccaatgcttgatttctgtcctagttgatcccgattcgacattaaaagtatattgatttttccccaataaccgagtacttttgtctgtaaatactgcatattttattccattcataaggctattttgttcccaaggagtgctagtctca

SEQ ID NO: 108785 - DNA, 258 bp, Glycine max
caacaacttctgctacttcctactccaaccgcacttctgctccgcaattatcatgggcaaggtcaagatcggaatcaacggatttggaagaattggccgtttggtagccagagtggctctgcagagagacgatgttgaactcgttgccgttaacgaccctttcatcaccaccgattacatgacatacatgtttaaatacgacagtgttcatggacactggaagcatcacgatgtcaccgttaaggacgagaagaccct

SEQ ID NO: 108786 - DNA, 255 bp, Glycine max
cgagataactagaaacagtgtgatgaaaatgaaggtccttgttttcttcgttgctacaattttggtagcatggcaatgccatgcgtacgatatgttccctctccgaatgaacactggctatggtgcccgtactccggaggtgaaatgcgcaagttggaggcttgctgtggaagctcacaacatctttggctttgagaccattcctgaagagtgcgttgaagcaacaaaggaatacatccatggcgaacaatatag

SEQ ID NO: 108787 - DNA, 250 bp, Glycine max
taagcagaacacattcactgtgaagaggctcaaggcagtgctgcataacttgatcccaggtcttaaggctagcctttcttctagcaaccaagacttcaatgaattctcagatgttgatggcctttacagtgaagggttgctcataaagttggggtgggggttgcaagatgacgtgttgaagaaaattccatttgtcagcaaaatccaagagtccagccagggtcttcttaagtatgacactcctaagatc

SEQ ID NO: 108788 - DNA, 251 bp, Glycine max
ctggactgacaactgaagtcaagtctgtggagatgcaccatgaatctcttacagaggcacatcctggtgacaatgtgggattcaatgttaagaatgttgctgttaaggatttgaagcgtggttatgttgcctcaaactcaaaggatgaccctgcaaaggaggctgctaacttcacagcccaagtcatcatcatgaaccaccctggtcagattggaaatggctatgcccctgtcctcgactgccacacttct

SEQ ID NO: 108789 - DNA, 148 bp, Glycine max
cttgaggcatctatgaatcagggattggagcagcaaatgccttccttcaatctgccgtctgaaattttatgtaaagcggtcaatgttcatcttcgagctgaacctgaaacagatgaagtatatgcacaaataactttgcttcctgaag

SEQ ID NO: 108790 - DNA, 195 bp, Glycine max
tcatttaatccaaacccgtgttctgatgcatggagtttggaatttctgaagcgaaccggatttcattgtgatatcatttgtgtcactggatggactgccaccccaatgcaggatgttcaggttacaattgattggtttatttcctctcaggaatgtgttttcagaacctattgtgttttaaatccacaaaatcct

SEQ ID NO: 108791 - DNA, 254 bp, Glycine max
ctctctctccaattaattcgatttagcttttccccaaatcccaaaccctttctttcgcttagatcccaatccaattgggttatggacatggcttccagtccccgcaccgttgaagagatcttcaaggattacggcgccagaagaactgccgttattcgcgctctcactcacgacgttgatgaattttacggcctctgtgatccagataaggataacctgtgcctctatggacatccaaatgaggcctgggaagt

SEQ ID NO: 108792 - DNA, 250 bp, Glycine max
agatgcttgctggtgttaatcctggcatgattcaacgccttcaagagttccctccaaagagcaagctagatcccacagagtttggagatcaaactagtacaataaccaaagaacacttggagatcaaccttggtggactcaccgtagaacaggcactgaaaggtaacaaattgttcatattagatcaccatgatgcattcataccgtttatgaatttgatcaatggcctgcccactgcaaagtcttatgc

SEQ ID NO: 108793 - DNA, 252 bp, Glycine max
gaaagaattcctcttgccacatctgagggttttcctcatgtgctttcacgcaaaaatggtgataaaggcaaaaggagatttgtttctggggatggtgaagagatgacattgattccgggaaccagtgttgaagaggcctacaacaagctaatagttgaacttgagagaagtgttcctacattggttggcattgaatgtcccaaggatgagaaacttcctcgtcgcaaaatttttgacaaacctaagacgcgc

SEQ ID NO: 108794 - DNA, 250 bp, Glycine max
aaacctagcaagttggaagtcatggcagcaacattgatggcagcaacaacaagttctggtactcttaaagcaactcctttccttggccaaggcaagggtgccaatgccaatgctcttagggatgttgtctccatgggaactgggaagtacaccatgggcaatgatttgtggtatggaccagtcagagtgaaatacttgggacccttctcagctcagaccccttcatacttgaaaggagaattccctgggg

SEQ ID NO: 108795 - DNA, 246 bp, Glycine max
ggcacttggaatccaaaaatgagagacatcatcagcattcacataggtcaggccgggatccaagttggcaactcctgctgggaactctactgcctggaacatggcatcgagcccgatggcatgatgccaagtgactcctccttcggtgtagcccacgacgccttcaacaccttcttcagcgaaaccggatccggcaagcacgtacctcgcgccgtcttcgtcgatctcgagcacaccgtcatcgac

SEQ ID NO: 108796 - DNA, 246 bp, Glycine max
ttggaaagctggtggtacttgacctatttgctgaagtaaaacccatttgggtaacctcagaacagttttatggagttccctacatctggtgtatgctgcacaattttgcaggaaacattgagatgtatgggatattagacgcaatagcatctggcccaattgatgcacgcacaagtaataactcaacaatggttggagttggaatgtctatggaaggtatagaacagaatcccattgtctatgatt

SEQ ID NO: 108797 - DNA, 188 bp, Glycine max
atcagccactgctaccttgtactgcgcgccccgacgcggccttcctctgcggcgcctgtgactctaaggttcatgccgccaacaagctcgcatcgcgccacccgcgcgtcgtgctctgcgaggtgtgcgagcaggcgcccgcgcaatgtgacctgtaaagccgacgccgccgcgctctgccttgcctg

SEQ ID NO: 108798 - DNA, 247 bp, Glycine max
caatgtctttgatgccaaccatgatactctagtgtgggcactgcagaagaatggtttcggaaacatgcctataattgtgggagaagttgggtggcctacagatggagacagaaacgcaaaccttcaatacgcgcaacgcttcaaccaaggcttcatgtcgcgctacattgccggaaaagggacaccaatgaggcctggtcctatggatgcttacttgtttagtctcatagatgaagatttcaaaagc

SEQ ID NO: 108799 - DNA, 252 bp, Glycine max
cagggacagcgtccggtggaaggcgtccaggtgcagttcagcagtcccagcagccagttcctatgatgccacagcagatgcttcctaggggacgtgtctatcgttatcctcctggtaggggtattcctgatgttcctatacctggggttgctggaggtatgttttctgttccatatgatgtgggtaggatgccgctgcgtgatgcatcaatctcccagcaaatacctgttggggctctggcaaaggctctgg

SEQ ID NO: 108800 - DNA, 157 bp, Glycine max
tttttattgagtctgtgcctttattcatgtcctacttcggcccagttaagtagacaccactatgcaaaaacatgccccaatgttgaaaacattgtcagagaagcagtcaaaaagaagtttcatcaaacatttgttacggttcctgctaccattcgtc

SEQ ID NO: 108801 - DNA, 225 bp, Glycine max
agggtggctacaaacgacaaagctgaagcagagaaaataatgcagataaagcgagcagaaggggatgcagaatcaaagtacctagcaggccttggagtttctcgtcagcgccaagccatagttgatgggctaagagacagtgttctagcattttctggtaatgtgcctggaacatcatcaaaggatatcatggacatggttctcatgactcaatattttgacaca

SEQ ID NO: 108802 - DNA, 238 bp, Glycine max
atggcaggaaggccacctgtgcttccatccaaccacctttcttacacagagaacttcctatatatgctagattcttttggtaatcggtcatataaacccaatcctcggctaactcgtgtgctagacattatcttcatcctgcatgcagaacatgaaatgaattgttctacatctgctgtccgacaccttgcatcaagtggcgttgatgtatacactgctattgccggggctgttggag

SEQ ID NO: 108803 - DNA, 238 bp, Glycine max
gggttgtgaaagcagagaagtgagatacactaagttatcctcataaatacactctaattaggtggcaagataagtgtctaaccttagtaacattgccacatattgtgttcattttggaattgtgccactaaaattctattcaattcatctatggctgcctcttcttatgctatgcaatcaatcctggcaaaccctttgatccgcatttccagcgggtctagggtgaaccaatttggcg

SEQ ID NO: 108804 - DNA, 237 bp, Glycine max
  unsure (1)..(237): unsure at all n locations
taacactagggtttacagagaagcgaagaggcgcacgntagcagtaactcgtggaattgctagcaatggcgaggatcaaggtttacgagctgaggcagaagacgaaggctgatctgttgaatcagctgaaggacctcaaggccgagcttgccttgcttcgtgttgctaaggtcaccggcggtgcacctaacaagctctctaagatcaaggtggtgaggttgaacattgcccaggttt

SEQ ID NO: 108805 - DNA, 238 bp, Glycine max
gtcaccaatgacgaaattgctgctgacctcaaagagcatgtgatcaagcctgtgatcccagagaagtaccttgatgagaagaccattttccacttgaacccttcaggccgttttgtcattggtggccctcatggcgatgctggtctcaccggccgcaagatcattatcgatacttatggaggatggggtgctcatggtggtggtgctttctccgggaaggaccctaccaaggttgata

SEQ ID NO: 108806 - DNA, 242 bp, Glycine max
tgtcctctcaccacttctccaattgaaaaggcttcttcatcaaaagaaaaatggctcaaatttgtttgctcttggtggggcttctctcaatgttctcctctgcctatggctacggatatggtggtggctgggttaatgcacatgccaccttctatggaggaagtgatgcctcaggaacaatgggtggggcatgtggatatggaaacctctacagccaaggttatggaacaaatactgctgct

SEQ ID NO: 108807 - DNA, 149 bp, Glycine max
  unsure (1)..(149): unsure at all n locations
ctttctcgtcactagctctgtgcattcttctctcgctctctgccttccataacacttggcatttgtcntcccaagatagtagaagatggcagacactgaggatattcaaactcttgtttgtgacaatggaacaggaatggttaagggtg

SEQ ID NO: 108808 - DNA, 228 bp, Glycine max
cttctctctatctgcagatggcaagtgggtttggggaatcaacagggagatcacccccaagcccttcctacttcaacaacaataataacaatgatgctgccaattttgaatgcaacatttgctttgaattagcgcaagacccgataattactttgtgtggtcatcttttctgctggccctgtctttacaaatggcttcactttcactcacaatcacgagaatgcccgg

SEQ ID NO: 108809 - DNA, 229 bp, Glycine max
cccaagtggggtgctgtgtacatcccttccatcatcacactcctaaatgctgttggaactccaaggtcactccacttgctggtcttctggattctctttgagaataccatgtctctgcatcgaacaaaggcaacgattattggtctactagagggtagtcgagcgaatgaatggattgtcactcaaaagggtaaaccacccaagagtcggtttaggataaggattcatc

SEQ ID NO: 108810 - DNA, 237 bp, Glycine max
ctcgagccgcaacattttacactcttttcttcttctcgttgttgcttcggtgttgaatcatggatcagaaagtcgatttcagtgctccgcattccatgggaaccactatcatcggcgttacttacaacggcggtgtcgttctcggagccgactctcgaaccagcactggagtgtatgttgccaaccgagcatcggacaaaatcacacagctcactgataatgtttacgtgtgtcgct

SEQ ID NO: 108811 - DNA, 238 bp, Glycine max
aaaacgataatgtcgactcctatgttctatctgagtccagcctctttgtttatgcctacaagatcatcatcaaaacctgtggtactactaagctattgcttgcaatcccacccatattgaagttcgctgaaatgctttcccttaatgttaagtctgtgaattacaccaggggaagtttcattttccccagtgctcagccatatccccatcgcaacttttctgaggaagttgctattct

SEQ ID NO: 108812 - DNA, 239 bp, Glycine max
gaaagatggaggggaaggagcaggatgtgtcgttgggagcgaacaagttccccgagagacagccgattgggacggcggcgcagagccaagacgacggcaaggactaccaggagccggcgccggcgccgctggttgacccgacggagtttacgtcatggtcgttttacagagcagggatagcagagtttgtggccacttttctgtttctctacatcaccgtcttaaccgttatgggagtc

SEQ ID NO: 108813 - DNA, 245 bp, Glycine max
ttactcgagccgaatcggctcgagcaaatcagtaccatacgaagccagtcactacgtgaattacgcatgtcgggcagaaaggacaacggttttggaccttgcaaagtctgtagacaaaggcgttcaagttaagcttactggtggcagacaagtgacagggactctgaaagggtatgatcagttgcttaaccttgtcctagatgaagctgtagagtttttaagaggtaactaaacaatgcagatat

SEQ ID NO: 108814 - DNA, 236 bp, Glycine max
gctcgagcggctcgagcggttcaagttctttacctgcaaaaaaaagcagatggctcagcttaacctcatacttatctgggtatttttattgagtctgtgcctttattcatgtcctacttcggcccagttaagtagacaccactatgcaaaaacatgccccaatgttgaaaacattgtcagagaagcagtcaaaaagaagtttcatcaaacatttgttacggttcctgctaccattc

SEQ ID NO: 108815 - DNA, 237 bp, Glycine max
gtttcttctgtggtttccttgttagagaagattgctgtagtaatgaagaaattagtctacagcaacagtctggggaagaggaggctttgttctgcactttgtgcaatgctgaggtgcagaagtttagtaagcattgtcgaagttgtgacaaatgtgttgatggatttgatcaccattgtcggtggttgaacaattgtgttggaaagaagaattacatcacgtttgtgtgtcttatgg

SEQ ID NO: 108816 - DNA, 238 bp, Glycine max
cttgtgacaaaattcctagtgtcttgactacaactgatgagagattggtaggcacagaacatgagggatatgatccttttcttggtggaattcaaaaatatgccactcccatgatgcccctagatgaagaaattctttctaaggttgcacaagacatggttgaggaatggtttgattgtgttgatgaggaggattcctttgaggaagtctctttaagtgcagcactcaatggtgttga

SEQ ID NO: 108817 - DNA, 236 bp, Glycine max
ctcgagccggatcgagataactagaaacagtgtgatgaaaatgaaggtccttgttttcatcgttgctacaattttggtagcatggcaatgccatgcgtacgatatgttccctctccgaatgaacactggctatggtgcccgtactccggaggtgaaatgcgcaagttggaggcttgctgtggaagcacacaacaactttggctttgagaccattcctgaagagtgcgttgaagcaa

SEQ ID NO: 108818 - DNA, 238 bp, Glycine max
ggaaaacaaagtatagagtgaaagaatgggtgagaaaagcaagattttgatcataggaggcaccggctacatcggcaaacatatagtggaagcaagcgcaaaggctggaaatcccacttttgctttggtgagggaatccacactctctgacccctccaaggcacaactcatccacaattttgaggctttgggcgttaatttggtccgcggggatctgtacgatcatgagaagttggtg

SEQ ID NO: 108819 - DNA, 237 bp, Glycine max
gaaggtttggagatgggtggtgagtttgatgttagtggggttactgcccgtgtcaacaatgggtcgattcgtggtggagaagaacagcctgagagtgacatcgccggagaaaataagagggacacacgacagtgccattggcaacttcggaatacctcaatacggtggtagcatggccgggaacgtaatttaccctaaggataacaaaaagggttgcaaagagttcgatgagttcgg

SEQ ID NO: 108820 - DNA, 236 bp, Glycine max
tcaatttataagaatggcactttctcctattcgttcttcttctttctcttcatcagctattgttgcattggctgtgttactgcttcttacagggacctcttcagctaacctctcaaagaacttctattccaagacatgtcccaacgttttcaacactgtaaaatctgtagttaaatctgctgttgtcagagaacctcgcattggggcatctattgttcgtctcttcttccatgact

SEQ ID NO: 108821 - DNA, 228 bp, Glycine max
aacagcaccaacaatggtgaagcattacagacccccggggaagaaaaaggagggaaatgctgccaaatttgttattaggtcacaggcactcaagcagcttcaaatcagtttacccctttttaggaaactatgtattttgaaaggtgtaactccccgggagcccaagaaaaagttcaagggaactcatcagacttattaccatgtcaaggattttccttccttcatcac

SEQ ID NO: 108822 - DNA, 235 bp, Glycine max
agagtggcacatggaacctttctttcaaatttgcaagaggttattcttggcaccaagctttccattctcatccctgctattccagctgccatcgttgctgagtgctttggctttggaagaccttggatttttatattaagcttacttggacttacaccacttgctgaacgtgtgagcttcattacagaacaagttgccttttacactggtcccacagttggaggacttctgaatg

SEQ ID NO: 108823 - DNA, 237 bp, Glycine max
gggagaagtaatcgagcttcagcaatggtgtacgtcaaggctcagaaatcaaaagcctacttcaagagatatcaagtcaagttcaagagaagaagagagggaaaaaccgattaccgtgccaggattcggttgattaatcaggacaagaacaaatataacactccgaaataccgatttgtggttcgctttagcaacaaggacattgttgcacaaataatatctgctagcattgccggc

SEQ ID NO: 108824 - DNA, 236 bp, Glycine max
  unsure (1)..(236): unsure at all n locations
ctgtttctcaatcgttagatctcatcttatactcaccggcgagtccatctcgcgctcgctncgacgccgctccggcaaccgctccggccaccgcctttggttccctcactttctcgtccttcttcttctcagaaatatgccttctcagaaagttgaaacgggtcatcaagacacggtccatgatgttgcaatggattactatggtaagaggctggccacggcttcatcagatcaca

SEQ ID NO: 108825 - DNA, 233 bp, Glycine max
gttctttggactgatgcttccacaagaggctttgttcagaaatacttagccacaggtcccttcaaggtccaattcggaaagtctatgatcaagatgagcaacattggtgtcaagaccggttctcagggtgaaattcgcaagatatgttctgctattaattaattaaggcaaatattaatcagtatccttataatattgattaaggaattaaaaaaatatttaaaattatatta

SEQ ID NO: 108826 - DNA, 167 bp, Glycine max
tgctcgcaacgtcctggaggatcctgtcttccattgagcagaaggaagaaacaaaagggaacgagttgaatgcgaacggattaaggagtacagacagaaggttgaattggagctatcgaacatctgtaatgatgtaatgagagtgattgatgagcacctaatccctt

SEQ ID NO: 108827 - DNA, 232 bp, Glycine max
ggaggctggagttatcgaccctgccactgtaactaggtgtgctttgcagaatgctgcttcagttgctggaatggtgttgaccacgtaggccattgtggtggagaaacctaagcccaaggcacctgtagctggtgccccacaaggccttaccgtttgatttataggctgtagggctactgcgaagaatagttttctgcagaaaattgaaagtgcgtatgtgtccgaattctgt

SEQ ID NO: 108828 - DNA, 234 bp, Glycine max
ggcctaccatgaacagctttcagtggctgaaattaccaacagtgctttcgagccatcgtccatgatggccaagtgtgaccctcgccacggaaagtacatggcatgttgcctgatgtaccgtggtgacgttgtgcccaaagatgtgaatgctgctgttgccaccatcaagaccaagaggacaattcagtttgtggattggtgccctactggtttcaagtgtggtattaactacca

SEQ ID NO: 108829 - DNA, 233 bp, Glycine max
cagaggtgttacattgagtgaggctctactaaggcatgacaaatggcttgagaagaagggaataaagaattccaactttgctgtggttacatggtccaactgggattgtcgggtgatgcttgaatctgagtgccgattcaagaagatacggaaggctccttacttcaaccgctggatcaacttaaggattcctttccgtgaggtatttggtgctgtgaagtgcaatctaaagg

SEQ ID NO: 108830 - DNA, 232 bp, Glycine max
ctacaggcctggatctgttggatttgtttctaaatctggtgggatgtccaattagatatacaacactattgcccgcgtaactgatgggatttatgaaggcattgctattggaggagatgttttccctggttccacactttctgaccatattttacggtttaacaacatgccacaggttaaaatgatggtagtacttggggaacttggtgggcgtgatgagtattccttagtg

SEQ ID NO: 108831 - DNA, 232 bp, Glycine max
tccaaacccgtgttctgatgcatggagtttggaatttctgaagcgtaccggatttcattgtgatatcatttgtgtcactggatggactgccaccccaatgcaggatgttcaggttacaattgattggtttatttcctctcaggaatgtgttcccagaacctattgtgttttaaatccacaaaatccttttgtgttaaataggtggatgggaaaactgactttcccccagggc

SEQ ID NO: 108832 - DNA, 213 bp, Glycine max
ctcgaggatgtctgagactgggtagtcatctgtcgtctacggtttcaactccttgggatgaatagttcgaggtgaagaagctagaagagactgtccgcagtattgagatgcctggtctatcgtcgggagcatccaaactggtacctgcgggatatgggagcaataagttgcagatcgtgatgctcattgttattgaccttgaatccgtggaaa

SEQ ID NO: 108833 - DNA, 230 bp, Glycine max
attctctgcacttttcagttacaaagcatttcattgttttacaatatacaacactacaatggctgcttcaacaatggctctctcttcatcatcattggctggccaagctatcaagcttgccccctccacccctcagcttggtgttggaagggttagcatgagaaaaacagcctccaagactgttacctcaggaagcccatggtacggcccagatcgtgtcaagtacttgg

SEQ ID NO: 108834 - DNA, 228 bp, Glycine max
cggctcgagggtcacccccggatccaattctgctaaggtttcccctcaggtggttgcggagacactgttagagcccttcagagaaccgtgcctgctgcagttcctgctatcgttttcttgtctggtgggcagagtgaggaggaggcatccgttaacctcaatgccattaaccaggtcaatggaaagaagccatggtcactctctttctcctttggaagggcacttcaa

SEQ ID NO: 108835 - DNA, 230 bp, Glycine max
gtggatgggaaaactgactttcccccagggcacttcccgaagtgttaagagaatgcctctttctatagggggaggagctggtgcaaagaatgctattctcatgaacatgccaaatgctgttctttcaatgtggagatattttgttggagatctcgtctttgaagtttctaagatgacttctccctacattaaatgtacagtctctttcttcatagcatttggaaatttgg

SEQ ID NO: 108836 - DNA, 226 bp, Glycine max
caactgtggggtcatcagaggcaataatgttggcaggtctagcttttaaaaggaaatggcagacagagagaaaagcagaaggcaaaccatatgataagcccaacatagtaactggggctaatgtgcaggtttgttgggaaaaatttgcaaggtactttgaggtagagctcaaggaagtgaaactcaaagaaggatactatgtgatggaccctgcgaaagcagttga

SEQ ID NO: 108837 - DNA, 228 bp, Glycine max
caaatcaaagccatggccacctccaacttctctattgttctctccgtctccctagccttctttttggtgctacttaccaaggcacactcgaccgataccgtttctttcaccttcaacaagttcaacccagtccaaccaaacattatgctccaaaaagatgctagtatttcatcctctggggtgttacaactcaccaaagttggcagcaacggcgtgcccacctcggga

SEQ ID NO: 108838 - DNA, 231 bp, Glycine max
gcaagatgaaggagcgtctcgttggggtttctgaggaaaccaccactggagttaagaggctctatcagatgcaggcgaatgggactcttctcttccctgctattaatgtcaatgactctgtcaccaagagcaagtttgacaacttgtatgggtgccgtcactctctccctgatggtctcatgagggctaccgatgttatgattgctggaaaggtggctgttgtggctggat

SEQ ID NO: 108839 - DNA, 230 bp, Glycine max
aaaaaaaaaccgaacccactctattgagttgagtcttttgataatgtcgtcggcgtcgacgggaagcagcagcagcagcaaaatccggcgcattgtgcgcgtgcggcaaatgcttctccggtggcggaggaaggtggcggtggacgttccggcgggacacgtggcagtgtgcgtggggcccagcaggaggaggttcatcgtgcgcgcgacgcacctgaaccacccgattt

SEQ ID NO: 108840 - DNA, 283 bp, Glycine max
ctctctaataacatttctaatctcattctccttctgttcaaaaactctctctcatggcatcagataagaagattaggatcggcatcaacgggtttggaaggttggccgtttggtggccagggttgcccttcaaaggaatgatgttgaacttgttgctgtcaacgatcctttcatcaccactgattacatgacatacatgttcaagtacgacaccgttcatggccagtggaagcattttgatgtgaaggtgaaggactctaagacccttctctttggtgagaag

SEQ ID NO: 108841 - DNA, 281 bp, Glycine max
aaagaaggagtttccattagccctttgcaattgatcacacacccacttgaccccttaacaaagcaagaaatcaccctcgtccaagccacagtcctaaagaataccccacaccacccaaccatgtcttcttccactacgtcggcctcgacgatcccgacaagacccacgtcctaaagtgggcctcctccggcaccaaaaccccaccccaacgcagcgccttcgttgtagccatcgtcaaaactcccaaatccacgaactcatcatcaacatcaaatcctcca

SEQ ID NO: 108842 - DNA, 271 bp, Glycine max
gttgtgcaagctcaaagtgctgaagtttattttgacttcttccctgtggaggttgatagtcaagagggagttgctcacattggtgaattgaaatctggtgtctatgttccattgcctacaaaaactaatttggtggaaactcccaaggaatggcaactggatctaccttgtgacaaaattcctagtgtcttgactacaactgatgagagattggtaggcacagaacatgagggatatgatcttttcttggtggaattcaaatatgccatcc

SEQ ID NO: 108843 - DNA, 273 bp, Glycine max
gagacttgcagagcttttgtgcctcagtatacaggatgctgagaagcatctctcagatatggttgtgtctaaggcgctggtggcaaagattgataggccaatggggatagtctgtttccaaacagcaaaggatagcaatgaaattcttaattcatgggcagcaaacttggagaaattgcttgatcttgtggagaagagttgtcatcaaatacacaaggaaaccatggtccataaagctgctttgaaggtttaagaaggttcacatactgtcac

SEQ ID NO: 108844 - DNA, 274 bp, Glycine max
gaagagttcggttgggacaaggatcttgccaagaaaatctggtgctttggccctgagacccttggacccaacatggtggttgatatgtgcaagggagtccagtatttgaatgaaatcaaggattctgtggttgctggattccagtgggcatcaaaagaaggtgctttggctgaagaaaacatgagagccatctgctttgaagtatgtgatgttgtgctgcacgctgatgctatccacagaggaggtggtcaaatcattcctactgccaggagag

SEQ ID NO: 108845 - DNA, 276 bp, Glycine max
cggaatcagaggctccccctaacttctggggccacaccccggaagaagaatactacacctcccaaggcgttcgcaacaccaagtcccacttcgaaaccccaacggcaaaatcttcacccagtccttcctccctctcaacctccaaccccaccaagtcaaagccaccgtctttatgacccacggctacggctccgacaccggctggctcttccagaaaatctgcatcaacttcgccactggggctacgccgtcttcgccgccgacctcctcggccac

SEQ ID NO: 108846 - DNA, 278 bp, Glycine max
ctgaacttcaatatttggcgaatccggtgacaagccacgtgcaaagcgcggagcaacacaaccaagatgtgaactctctggggctgatttcatcaaggaagactcatgaggctattgagatcctcaagctcatgtcctccactttcctggtcgccctttgccaagccattgacttgaggcatttggaggagaatttgaagaacacggtcaagaacgttgtgagtcaagttgctaagaggactctcaccacaggtgtcaatggagagcttcacccttca

SEQ ID NO: 108847 - DNA, 251 bp, Glycine max
gctggagcacaagagagtactatggcttggctattcgagaaacccgaatcaaggctgcgcctgtgcatgcatcagcccattggtatctggagaatgtttgcctgttctacagagttatggtattgctgcaatctctccattttctcacagactgagttttgacaacttgcctatggatattcaacacctacgctgtaaagtcaacttccaagctttaacctttgttcctcatatcagagcacttggagatg

SEQ ID NO: 108848 - DNA, 275 bp, Glycine max
gctaaccattctctgcacttttcagttacaaagcatttcattgttttacaatatacaacactacaatggctgcttcaacaatggctctctcttcacatcattggctggccaagctatcaagcttgccccctccacccctcagcttggtgttggaagggttagcatgagaaaaacagcctccaagactgttacctcaggaagcccatggtacggcccagatcgtgtcaagtacttgggcccattctctggtgagcccccatcctacctcactggtg

SEQ ID NO: 108849 - DNA, 266 bp, Glycine max
gacaaattgggatcactaatccaacacactactttttgccaaaatctcaaagtgctgcagcttacaaggcagcaagtagagctctggacttcttctttggttggtattctgatccggttttctatggtgactatccggagagtatgaaatcttcagtaggttctaggctcccaaaattcacaaaagctgaatctgaaggtctaaaaattccatagattttcttggtgtgaattactacaccacttattatgcggaacatgctgaac

SEQ ID NO: 108850 - DNA, 243 bp, Glycine max
cgtcgtcgctgtttttgtgtgtcgcttcttcgtaggtgcagctgcaatggtgaagggacgccaaggagaacgtgtcagactctacgtgaggggtacaatccttggatacaaaaggtccaagtcaaaccagtatccaaatacatccctgatccaaattgagggtgtgaatgccaaagaagaagtagcatggtatgctggcaagaaaatggcctatatctacaaggctaaggtgaagaagaatgg

SEQ ID NO: 108851 - DNA, 220 bp, Glycine max
agatcatggcgatcaatatagatcagactccacgacagctaaccaacaagcttacttttatgccagagacctcgaagtccatcccaaggacacacttgtgttcagtatagatggcaccgtactctctaatattccatactacaaaaaacatggatatggggtggagaaatttaactcgaccttgtatgatgaatgggttaccaagggcaatgcaccggca

SEQ ID NO: 108852 - DNA, 272 bp, Glycine max
ctttggatgctaggcaagacatggtggtggtagaggtacgaaatctagggaaagaggctgcagtaaaggccataaacgagtggggccagccaaagtcaaagattacccacatgatcttctgcaccactagcggtctggacatgactggtgctgattaccaactcaccaaacaattaggccttcgcccttatgtgaagaggtacatggatgtaccaacaaggttgctttgcaggtggcacggttcttcgtttggccaaggatttggctgagaa

SEQ ID NO: 108853 - DNA, 273 bp, Glycine max
gtgtaggcggtgggggggaggcgggtgatcacggtgccggagtcgatgattgcaccgccctccgctccgccttcaggcaaggcatgtccaaatacccctccgccggggaactctccatactcgacacgtgttatgatctcagcggctacgaggtcttttctattcccaagatagatttttccttcgccggcggcgtcacggtgcagcttccgccgcatgggatagtctacgtggccagtgccaagcaagtttgcttggcttttgctgcaaatg

SEQ ID NO: 108854 - DNA, 190 bp, Glycine max
ttgaagtattgaaaaactggcctgagaaaagtattcaagttattgttgtaacagatggtgaacgaattttgggacttggggatctcggatgtcagcggatgggaattcctgttggtaaattggccttgtacacagcactaggaggagttagaccatcagcatgtttgcctattacgattgatgtggggac

SEQ ID NO: 108855 - DNA, 246 bp, Glycine max
ctcgaccgcaacattttacactcttgacgtcttctcgctgttacttcggtgttgaatcatggatcagaaagtcgatttcagtgctccgcattctcagggacccactatcatcggcgttacttacaacggcggtgtcgttctcggagccgactctcgaaccagcactggagtgtatgttgccaaccgagcatcggacaaaatcacacagctcactgataatgtttacgtgtgtcgctctaaatcggc

SEQ ID NO: 108856 - DNA, 192 bp, Glycine max
ctgtaacaaagaagaaagaaggacgataattattaaagagatgttgcccccggacgtgcgtgtcgccagagatgcacaggatttattgatcgagtgtgtgtcgagtttataaaccttgtctcgtcagagtccaatgaagtctgtaacaaagaagaaagaaggacgattgcaccggagcacgtgttaaaggct

SEQ ID NO: 108857 - DNA, 276 bp, Glycine max
ctcgagccgcgctcgctcgcactgtccagatcttaatcaagatgagtgagttttgtttttccagccatgacgccgcctatcctgcatgctgggaaaccaacaaaaattcttacaagacactcatcacagccgagtatgctggcgtccaagttgattttgcccctaattttgagatgggtgtctccaataaaactcctgaatttctcaagattcatcctattggcaaggttcctgtgctggaaacccccgatggtccaatattcgagagcaatgcca

SEQ ID NO: 108858 - DNA, 223 bp, Glycine max
cagagattgatccagctctgaaccctgaccacgtccctcacattctgaagaagtgccctgatgccattccagaccctaaggccgtgcagtactgagaaacgaccgtggcacccccatgattctagacaacaattactacagaaatatattggacaacaagggcttgttgatagtggatcaccaactagccaatgacaagaggaccaagccttatgtgaagaaa

SEQ ID NO: 108859 - DNA, 270 bp, Glycine max
gatggacaagggggtgttggatgatgtgataagaaggcttctggaagggaaaggagtgaaacaggtgcagctctctgagtccgagatccgtcaactctgcgtcaacgccagacaaatcttcctctctcagccaattcttctcgaccttcgtgctcccatccgcgtctgcggtgatatacatggtcagtaccaggacttgctgaggctttttgaatatggtggctaccctcctgcggcaaactacttgtttctgggggattatgtggatag

SEQ ID NO: 108860 - DNA, 269 bp, Glycine max
gatcgagataactagaaacagtgtgatgaaaatgaaggtccttgttttcttcgttgctacaattttggtagcatggcaatgccatgcgtacgatatgttccctctccgaatgaacactggctatggtgcccgtactccggaggtgaaatgcgcaagttggaggcttgctgtggaagcacacaacatctttggctttgagaccattcctgaagagtgcgttgaatcaacaaaggaatacatccatggcgaacaatatagatcagactcca

SEQ ID NO: 108861 - DNA, 255 bp, Glycine max
aaaatatgccactcccatgatgcccctagatgaagaaattctttctaaggttgcacaagacatggttgaggaatggtttgattgtgttgatgaggagattcctttgaggaagtctctttaagtgcagcactcaatggtgttgagggtttggactatatggaaagaattcctcttgccacatctgagggttttcctcatgtgctttcacgcaaaaatggtgaaaaaggcaaaaggagtttgtttctggggatggtg

SEQ ID NO: 108862 - DNA, 209 bp, Glycine max
actctatataacccacctctctttattgcgttcattctgttttactgttgaagtctttcactagccaatagccaccgatcatttgacctggttcacagtctacgtgagaggcttgatgaaaccctcactgccaacaggaatgaaatttaggcccatcagtcaaggatcgatgtcaagggcaaaggcatcatacaaaaacaccaggtcat

SEQ ID NO: 108863 - DNA, 258 bp, Glycine max
gatgaggttgccattcagaacctacagacctacaaagaaaagaaatttgttgatatcagcaaggaggatttggaattaggtgatgaggagaggtcaaagagagggaaaacaagcaagaatacaacctactctgtgattggataaaacacaaacttggtgacaaggtggccaaagttcaaatctcaaatcgcttgagttcatctccttgtgtgcttgtatcagggaatttggttggtctgcaacatggagagactaatg

SEQ ID NO: 108864 - DNA, 266 bp, Glycine max
ctcgggtagtgagggccaaaagccaagctgttcaaagtggatctacaaaaggaactagctctgcaaaaagttctgccaagggtgtagttgacaactcccagcctttccaaaagaatggtgctattgtgttactccttggtgctttctatttgctcagtagatatgccattcactgcacatgggtcacatcagaggcttactcatctccctcaattgtcttggctgcgaggggtgcccatggcaacagggtcatctttgatgattat

SEQ ID NO: 108865 - DNA, 263 bp, Glycine max
agagtttgttgtgagctataagctagtttatcgtgaggagaatatgaatgttgtttgttttctttgttgctgcagtagttttggtagatggccatgccatggcgcaggctaccaaaggttccctctccgaatgaaaactggctatggtgagcgttcttcggaggtaaaatgcgcaagttttaggcttgctgtggaagcacacaacatccgagcttctaaaaccatcctgaagagtgcgttgaaccaacaaaggactacattaa

SEQ ID NO: 108866 - DNA, 219 bp, Glycine max
tcgctctgtttctgtctctgtgtttgctgctgaggattccgaacgagcgaccttcttcgtttctcgcaaagtttaagtcatcatgggtaaggaaaaggctcacatcaacattgtcgtcattggacatgtcgactctgggaagtcaactaccactggtcatttgatctacaagcttggaggtattgacaagcgtgtgattgaaaggttcgagaaggaggc

SEQ ID NO: 108867 - DNA, 236 bp, Glycine max
ttctaatctcattctccttctgttcaaacactctctctcatggcatcagataagaagattaggatcggcatcaacgggtttggaaggattggccgtttcgcctccacggttgcccttcaaaggaatgatgttgaacttgttgctgtcaacgatcctttcatcaccactgattacatgacatacatgttcaagtacgacaccgttcatggccagtggaagcattttgatgtgaaggt

SEQ ID NO: 108868 - DNA, 172 bp, Glycine max
ggcaaaggaagtagaataccttcttaggaagggatggattccttgcttggaattcgagttggagcacggtttcgtgtaccgtgagcacaacaggtcaccaggatactacgatggacgctactggaccatgtggaagctgcctatgtttggttgcactgatgcttctcaggtg

SEQ ID NO: 108869 - DNA, 268 bp, Glycine max
ctcttcttctcttgcggctagggttttagcgcagatcttctagatttaaggaagatgggtaaggaaaaggttcacatcagtattgtggtcattggccatgtcgactctgggaaatccactaccactggtcacctgatttacaagcttggaggcattgactagcgtgttattgagatgtttgagaaggaagctgctgagatgaacaagaggtctttcaagtatgcctgggtgctggacgaacttaaggctgagcgtgaaagaggaatca

SEQ ID NO: 108870 - DNA, 264 bp, Glycine max
caactctgcttcccctggcaaccttcttcttagttctctccgcttcttatctccagattgctggggtaaaagcacaaccgttgactagtctcaagcttaactctccgatccttcaggagtctattgctaaagagatcaatgaaaatcctgaggcaggatgggaggctgctataaatcctcatttctccaattatacagttgaacaatttaagcgccttcttggagtcaaaccaacgcctaagaaggaactgagaagtacacctg

SEQ ID NO: 108871 - DNA, 241 bp, Glycine max
  unsure (1)..(241): unsure at all n locations
gggnatttgtttgagcntagnacgcacctcanncanggacantctttctccctgcactcacttaaannntcaacactttcccaatggnttgcacggcgtccaagctagnaaacgagtcacacngtgcgccgctgcaaagagcgccgccgcctgatgnnggaggcggtgtangtgcgtgangacctggccgcngcncattccgactactggnggtgnctccgcgtccannggctccggtctt

SEQ ID NO: 108872 - DNA, 265 bp, Glycine max
caggaattgtggaaagccatcacagacactataccatgtaccgcgatcgtggttaaaaccaagtggcaacattcttgtattgtttgcggaaaagggaggtgatccaacacaaatatcttttgtcacaaaacagacagaaagtttgtgtgcacatgtatccgattctcacccaccacccgtagacttgtggaactcagatacagcatcaggaagaaaagtaggtctgtgctatcactcacttgccctcatgataaccaagtcatct

SEQ ID NO: 108873 - DNA, 265 bp, Glycine max
ctagacacccgagtaaattgggtttcataggaagagttgggagatatttgggctatggccactgggaagacggttatgtgttcgctgagccagttgcgtccgctaacatgcgcatcgacgtcagcgtcacgattagtgccccagccacccgacctcatcaagtgggtaaccagagaaggtggcttcgtgcaccgcgccgtcaagataacacaactcgactcctcaacggactgggcctggtggccaaggaagaaattccacgtgg

SEQ ID NO: 108874 - DNA, 263 bp, Glycine max
caacagtcccagtagtctcttcaacaaccactagtaattctgaaagcattcatccacttccaaacttgactaggcctctcaagtttcttccaggctgcgaaaattctcgttcaatgatcttaaattagcaacgagaaattttcggcctgaaagtcttcttggtgaaggtggctttggttgtgtgttcaagggatggattgcagcaaatggaactgctccagtgaacctggcacggggcttactgttgctgtataaaccctcaa

SEQ ID NO: 108875 - DNA, 252 bp, Glycine max
ctcgagcgactttcactcttcttcctctcaaacctcttcgttccttcgatacattccatctctctccaaaatggccaaacactcagttcgcgttctcgtcactggagccgcagggcaaattggatatgctcttgtccctatgattgctaggggagtgatgctgggtcctgaccagcccgtgatcctccacatgcttgacattcttgaccagcagagtcgttgaatggggtaaaatggagttggtggatactg

SEQ ID NO: 108876 - DNA, 197 bp, Glycine max
gttgttttcaacgccactgcgggtgcatcttcatgtttctttttgttcaagttgattggaagacctttggtttcttggttgtggcctgaaaactaaggttcttccaagctgagattgcaaagcgtagggataggttgctgaattacatgctttttctgaggataaccccgacattgcgcgaatctgtccatcaattt

SEQ ID NO: 108877 - DNA, 246 bp, Glycine max
gtaatgatactcattgtcaccaccaacacgctttcattttcctgaacaaccacttcatcttcactgcttccttcaattttccaacaagaaagtttgttcaactgtcccattattggcgttactatgctacccactggagcaaaagagacccaattacgtgagagcaacagtcagaaggtccatcctcaaccaatagaagaggccatgaatccagatccagaagcaatggaacccctaatatctaaa

SEQ ID NO: 108878 - DNA, 289 bp, Glycine max
ccattcctaagctcactctttctaagtttcttctatcatctcaccaccatggttctctccaaaaccgcctccgaatccgacgtctctgtccactcaaccttcgcttctcgctatgtcagaacttcgcttcccaggttcaagatggcggaggagtcgataccgaaggaggcagcataccagatcataaacgacgagttgatgttggatgggaacccaaggttgaatttggcatcatttgtgacgacttggatggagccagagtgtgataaactcatcatggctgccatta

SEQ ID NO: 108879 - DNA, 282 bp, Glycine max
gcaagaacagcagttgtattcttctgctttgccatcgtgaaaacagttgatgatcactgtggattgtggttgcctggcaacatcttccatatctttttccagaataacacagcttaccatgacattcatcatcaactgcaagggctgaagtacaattattctcagccattcttttccatatgggacaaacttctcgggacatacatgcctttcaatcttgtaaagcggcctgaaggggggttcgatgcaaggctagcaaaggaatagtcacactgtaggcat

SEQ ID NO: 108880 - DNA, 281 bp, Glycine max
gcgagaatgatgttggacggaaccgaagacgaagagaagtttctcgccgccggaatcgccggccttcagcagaattccttctacatgcaccgtgcattggactcgaacaatctcagggacgctttgaagtattcggctcagatgctctccgagctcaggacttccaagctttcgcctcacaagtactacgaactatacatgcgcgcctttgatcagttaaggaagctggagatgttcttcgaggaagagactcgtcgcggttgctccattattgatcttta

SEQ ID NO: 108881 - DNA, 276 bp, Glycine max
accatactgaggaaagcataatcaaatcaaccatggctaccctcattgctcccatcaccttttcgcctggtttagatgcagaagctcttagaaaagctttccaaggatgggggactgatgagaagaccgttatagcaatattgggtcacagaaatgttcatcagaggcaacaaatcagaaagatttatgaggaaatttaccaagaggacctcatcaaacgcctagagtctgagctctctggtgactttgagagagctgtgtaccgttggatgctgg

SEQ ID NO: 108882 - DNA, 278 bp, Glycine max
caatttcgtacactcgaacatctccaagaacagccgccagccatacgccgtcagtcgtcgcgctggtcaccagacctccgccgaatcctggggtaccggccgagccgtctcccgtatcccccgtgttcccggcggcggaacccaccgcgccggccaaggagcctttggaaacatgtgccgcggcggacgcatgttcgccccgaccaagatctggcgccgctggcataggaagatcaacgtgaaccagaagcgctacgccgtcgtctccgccattgctg

SEQ ID NO: 108883 - DNA, 276 bp, Glycine max
gggatactacaaaaaccacatcaaggctgtacttacaagacgtaatagcatcactggagttgcttacaaagacgacccaactataatggcttgggaacttatgaatgagattaggtgcccttctgatcaatcaggaaggacagttcaggcttggatcactgagatggcatcttacctgaaatccatagatggaaaccacttgctggaagctggtctggagggtttctacggccagtcaaagcctcagtctaacccaaacttcaatgtaggaaccga

SEQ ID NO: 108884 - DNA, 307 bp, Glycine max
cgcatgcacgcgtcagaattctgctcgagctcgagccgcgcagatcgcagcaaaccagactaaactccgacgatgcctcccgtcgctcctcgatccggtgatgccatattcgccaacgtcgaacgcgtcaatgcggagctgtttactttgacgtatggcgcaattgtgcgtcaattgctcacggatctggaagaggctgaggaggttaacaagcagcttgatcaaatgggttacaatattggaatccgtttgattgatgagtttttagccaagtctaatgtctccagatgcaacgatttcagagaga

SEQ ID NO: 108885 - DNA, 271 bp, Glycine max
ccctcgagccgattcggctcgagcaagccttgctttcttcttcacaccaaacttgccaatcacgaagatggcaatagaattggcatctcccaattgggttccaaccgcagccgcatgtttggcagccttggccgccctcctcctcttcctcctccgcggtctccgccgccgtaaatacaatctccccccaggccccaagccctggcccatcataggcaacctaaacttaatcggctccctcccacaccagtcgattcacccgctgagtaaa

SEQ ID NO: 108886 - DNA, 279 bp, Glycine max
caaagccatggccacctccaacttctctattgttctctccgtctccctagccttctttttggtgctacttaccaaggcacactcgaccgataccgtttctttcaccttcaacaagttcaacccagtccatccaaacattatgctccaaaaagatgctagtatttcatcctctggggtgttacaactcaccaaagttggcagcaacggcgtgcccacctcgggatctctcggtcgtgccctttacgctgccccaatccagatttgggacagcgaaaccgg

SEQ ID NO: 108887 - DNA, 281 bp, Glycine max
gcaacaagctgatatccattgtgcttactgtgatggtggctataaacaattagggttcccaactgagctagacttcaaagttcacttttcttggctgttcttccctttccaccgttggtacctctatttctatgagagaatcttggggagcttgattgatgacccaaccttcgctcttccatattggaactgggaccaccctgatggcggcatggtaatccctctcatttacagagatgaagactcccctctttatgaccctcgcaggaatccagacatca

SEQ ID NO: 108888 - DNA, 241 bp, Glycine max
ctcgttcttcttcgtcgttatcttcttcttttgttgtttgtgtgtttgtgttttctctcacctgaaaatgtcttgctgcggtggtaactgtggttgcggtagcgcctgcaagtgcggcaacggctgcggaggctgcaacctgtacccagacttgagctacaccgagtcaaccaccaccgagtacttggtcatgggagtggcaccagttaaggctcaattcgagagtgctgaaatgggtgtt

SEQ ID NO: 108889 - DNA, 278 bp, Glycine max
gtgctttcacgcaaaaatggtgataaaggcaaaaggagatttgtttctggggatggtgaagagatgacattgattccgggaaccagtgttgaagaggcctacaacaagctaatagttgaacttgagagaagtgttcctacattggttggcattgaatgtcccaaggatgagaaacttcctcgtcgcaaaatttctgacgaaccacaagattaaactccatagggagaatagtgaagcagcgcgtcttaggtttgtggttcgtcagaagtttttaaatt

SEQ ID NO: 108890 - DNA, 184 bp, Glycine max
atgatgtacaacaacatgtaccgcataatgttcgaccggaggttcgagagcgaggaggatcccatcttccagaggctaagagccttgaacggagagaggagtcgcttggcgcagagctttgagtataactatggtgattttattcccatcttgagacgcttcttgaagggtacttgaagattgc

SEQ ID NO: 108891 - DNA, 277 bp, Glycine max
gtcaagtgtgaaaaagaagataaagaataaggatgatatacagcaaatgcatgcactagacgatattgaagagggaattgaaggaattgacaatgagaagtcatcactaatgtctcaatcgaagtttgagaagaagtttgggcaatcatctgttttcatagcttcgacactcttggaagatgggggtgttccaaaagcagcaagttctgctacactcttgaaagaggccatccatgtaattagttgtggttatgaagataagacagaatgggggaaa

SEQ ID NO: 108892 - DNA, 274 bp, Glycine max
agataactagaaacagtgtgatgaaaatgaaggtccttgttttcttcgttgctacaattttggtagcatggcaatgccatgcgtacgatatgttccctctccgaatgaacactggctatggtgcccgtactccggaggtgaaatgcgcaagttggaggcttgctgtggaagcacacaacatctttggctttgagaccattcctgaagagtgcgttgaagcaacaaaggaatacatccatggcgaacaatatagatcagactccaaaacagttaa

SEQ ID NO: 108893 - DNA, 276 bp, Glycine max
caactccatttctcactcgccgtcgtctcttccgtctagggttactcctcttcacaaaaatggttgccgcaaaaaaaactaagaagacccatgagagcatcaacaacaggctcgctctcgtcatgaagagtggcaaattcaccctcggttacaagaccgttctcaaatctcttaggagctccaaagggaaattgattatcattgctaacaactgcccccctttgagggaagtcagagattgaatactatgctatgttggcaaaggttggggttcat

SEQ ID NO: 108894 - DNA, 273 bp, Glycine max
accattgtgggttcttacaatgtcactcctaatcaaccaactccaaaggatccttcatggctatccgatagtgaccaaatcggtgtcctaggtcatgtagccattgtctacatatacgaagcaaatcccaacagcaacaccattgagagattgaggaactctcttagcaagcttttggtgtactactatccattcgctggcagattcagcttgacaaaaagtggtcgcatagaagtggattgtaacgcaaagggagtgacattgattgaagct

SEQ ID NO: 108895 - DNA, 275 bp, Glycine max
ctcgagccgctagaagcaataagatgaaaatgaaagtgcttgttttgtttgttgctacagatttggtagcatatgaatgccatggctcagactaccagaagttccctctccaaatgaaaactgggtttggtgggcaatacagcaatgaggtggcatgtgccagttggaggcttggcgtggaagcaaacaacgtagtcaagtggcaaactgttcctgcagcttgcggagagtacatagctgactacgttctaggagaccaatatagatcagattcc

SEQ ID NO: 108896 - DNA, 272 bp, Glycine max
gttgtgcttgaagaagggctcaacttggctgtgagaagattaggggagggaggttctcaaaggtttaaagagttccaaacggaagttgaagcaataggaaagttaaggcatccgaatattgttactctgagagcctattactggtctgttgatgagaagcttctcatctatgattatgttcccaatggaagccttgctacagcaatacatgggaaagctggacttgccacatttacaccactatcttggtctgttagagtgaaaatcatgaa

SEQ ID NO: 108897 - DNA, 121 bp, Glycine max
ctcttcttctcttgcggctagggctttagcgcacttcttctagatttaaggaagatgggtaaggaaaaggttcacatcagtattgtggttattggccatgttgactctgggaagtccacac

SEQ ID NO: 108898 - DNA, 275 bp, Glycine max
gataactagaaacagtgtgatgaaaatgaaggtccttgttttcttcgttgctacaattttggtagcatggcaatgccatgcgtacgatatgttccctctccgaatgaacactggctatggtgcccgtactccggaggtgaaatgcgcaagttggaggcttgctgtggaagcacacaacatctttggctttgagaccattcctgaagagtgcgttgaagcaacaaaggaatacatccatggcgaacaatatagatcagactccaaaacagttaacc

SEQ ID NO: 108899 - DNA, 131 bp, Glycine max
gaaattttgataaaccgcgatcacagggtgccgcaccttaaaaccgggaacaaaagcaatcgttacttggcatcaagaatttctcaatggcttcctatagctttgagtaggagttcttaagggaaagagaa

SEQ ID NO: 108900 - DNA, 273 bp, Glycine max
agtgctgccccgtgcttcaaggcctggttgagcttgaagctgcggtgtgtctttgcaccactcttaagctgaagcttctcaacctcaacatttatgtcccacttgcccttcagcttcttgtggcttgtggcaagtctcctcctcctggttacacctgctccctctaaaccagtgaaaggattgaggaaaatatggtcaaaatcgacatgagaggatgtcgagccacactatctctcttctgtcctgattggaactgctgttgtttgttttgct

SEQ ID NO: 108901 - DNA, 274 bp, Glycine max
atgatttgggcaatccagatggtggtgatcctcgcccaatccttggtgggtctagcatctatccctaccctcgcagggttagaacaggaagagaaaggaccaggacagatcccaacagtgagaaaccgggcgaggtttatgttccaagagatgaaaattttggtcacttgaagtcatcggatttccttacatacggaatcaaatccttatctcacgatgtgatacctttgttcaaatctgcaatttttcaattaagggtcacatcgagtgagtt

SEQ ID NO: 108902 - DNA, 271 bp, Glycine max
atatgttccctctccgaatgaacactggctatggtgcccgtactccggaggtgaaatgcgcaagttggaggcttgctgtggaagcacacaacatctttggctttgagaccattcctgaagagtgcgttgaagcaacaaaggaatacatccatggcgaacaatatagatcagactccaaaacagttaaccaacaagcttacttttatgccagagacctcgaagtccatcccaaggacacatttgtgttcagtatagatggcaccgtactctc

SEQ ID NO: 108903 - DNA, 267 bp, Glycine max
ggtaaagatggcgaggatggttcagaagaacaagctgtgattggattatggagtggcattgcttggttggttggaatgactgtattcattgctgtgttgtctgaatatgtggtggatacaattgaggatgcatcagattcatggggtttgtctgtgagcttcctaagcataatcttgctgccgatagttggcaatgcagctgaacatgcaggagcaattatatttgccttcaagaacaagctggacatctcattgggtgttgcatta

SEQ ID NO: 108904 - DNA, 270 bp, Glycine max
atttcaatttacaatgcaagactgccaatgaaacaaaggtaccattataatgtgtctgatgcaagattagaacagcatgttgagagaggggttgcagatggccttcttattagttgtgtgtcttcttgttgcaatctttgggctcttattatggatgctggaactggttttacagctcaagtttacaagttgtcaacctttttcttgcacaaggaatggataatggagcagtgggataaaaacttttacattacttctattgcagggagc

SEQ ID NO: 108905 - DNA, 247 bp, Glycine max
  unsure (1)..(247): unsure at all n locations
ctattatcatccgcagctgctttgattcgcaccgcaaactgngagccatttccgtcggaaataacaagcgcatctccaaggggaagaagggtggcaagaagaaggcagctgatccctttgccgaaaaggattggtatgacattaaggctccttctgtttttcaagtgaaaaatgttggcaaaaccctcgtctctcgtactcagggtaccaagattgcttctgaaggactcaggcatagagtgtttga

SEQ ID NO: 108906 - DNA, 269 bp, Glycine max
gtgttcccagaacctattgtgttttaaatccacaaaatccttttgtgttaaataggtggatgggaaaactgactttcccccagggcacttcccgaagtgttaagagaatgcctctttctatagggggaggagctggtgcaaagaatgctattctcatgaacatgccaaatgctgttctttcaatgtggagatattttgttggagatctcgtctttgaagtttctaagatgacttctccctacattaaatgtacagtctctttcttcata

SEQ ID NO: 108907 - DNA, 270 bp, Glycine max
ccaaaccattttattttatttttgaatcaagggtgagggccttccatggcttccgcttgtgcttcctctgcaattacagctgttgccatctctacgccgagttccgggcagaagaatggatcaggaggttgttttcttagtggaaggaaattgagggtgaaaaaggagagagcagcaattggaggacgatcgatgggcactacagtgtgcgcagttgctgagcctgacagacctctatggttcccaggcagcacccctcctccatggctt

SEQ ID NO: 108908 - DNA, 266 bp, Glycine max
taagtttgcaaaaattatgaaccttagacaaagtgttgttggtgatcttaaacttcttactgatgggaagttgtatgagggtaagcatattcctgtatctaatattagtgcaggggaaaatcatgtagttcaaatacccttaatggcacaggtggaaattctgtcttctagtgcaagtgatttcagaactgcaatggtgagtaaaaatagcaagcctcaagctactgcaatgcatgtgggagctatagaaattatcattgatagtt

SEQ ID NO: 108909 - DNA, 267 bp, Glycine max
atgggatgctatcaagtcttgggtggaagaatatgtctcattctactacaagtcagatgaggaacttcaaaaagaccccgagctccaagcttggtggaaagaacttgtagaggtgggtcatggggatttgaaggataagccatggtggcaaaagatgcaaactcgtgaagagttggttgaagcttccgctaccctcatatggattgcttcagctcttcatgctgctgttaactttggacagtatccatatggaggtttaatcctgaa

SEQ ID NO: 108910 - DNA, 269 bp, Glycine max
ctcgagccgccaaggtacctggggttacagattgtggtttggttccaagacacgtcaagaaggttgccatcattggcggaggactaatgggctctggaatagcaacagctttaattcttagcagctatcctatcatattgaaagaagtaaatgagaagttcttagaagctggtatcaataggattaaagcaaacttacagagccgtgttaagaaaggtaaattgacccaggaaaattttgaaaacacagtctctcttctcaaaggtacc

SEQ ID NO: 108911 - DNA, 271 bp, Glycine max
ccgagaagagggactggcggcatcatccccattcagactatgtatggtagcaatggctgggagtctttcacttgtggcttccgagcagatttcccagaagctgaaattgtcatccataaccctggcaaagtagaggatccagcttgtggtcccctcattgattccgttgccctcaaggtcttgtacccacccaaaagaacaagagctaatttgttgaaaaatggaaacttggaagaagggccatatatatttcccaactcgtcttgggggg

SEQ ID NO: 108912 - DNA, 268 bp, Glycine max
taaaaaggccagatttggtaatgggtgagtccacacaattgccacaagacttcttagatgaggttaaagatagaggatacataacaagttggtgcccccaagagcaagtgctgtctcatccatcagttggggttttcctaactcattgtggctggaattctacactagaaggtataagtgggggtgtccctatgataggttggcctttctttgctgaacaacaaacaaattgcaggtacatatgcacaacttgggggataggaatgga

SEQ ID NO: 108913 - DNA, 269 bp, Glycine max
agggtcttcatgtggtgatcaacatgttgtagctttatcactcatagaggaaggagaagttgtgcttggagttcttggctgtcctaactaccctatgagaaaggactggtttagttatcatcacagctatcttaggatgatatctaagttggctcctccaacctctcaaacttggaataaaggttgtgtaatttatgctaaaaggggaatggcaaggcttggaccaaacactgctcaatgtcaatgataagtttgggtggccaaaccat

SEQ ID NO: 108914 - DNA, 271 bp, Glycine max
cataacacaaggcagaaagcaagctcatcctagagttttaaaaatggcagcagcctcctccatggctctctcttccccatccttggctggcaaggccgtgaagctgggcccatcagcccccgaagtcgggagggtcagcatgaggaagaccgtcaccaagcaggcctcctccggaagcccatggtactgcccagaccgcgtcaagtacttgggcccattctctggcgagcccccgtcctacctcactggcgagttcccaggtgactacggt

SEQ ID NO: 108915 - DNA, 261 bp, Glycine max
actcgaacttcaacgacatcatccactccatcatcgacatggacgccgatgttatcaccattgagaactctcgctccgacgagaagcttctgtcagtcttccgcgaaggtgtgaagtatggtgctggaattggccctggtgtctatgacatccactccccaagaataccaccaactgaagaaattgctgacagaatcaacaagatgctggcagtgctcgagaagacatcttgtgggtgaacctgactgtgggctcaagacc

SEQ ID NO: 108916 - DNA, 268 bp, Glycine max
atctctgaccactgtatgaaaaacctccctttataatgtttgcagcaaccaaatccaggtcagagatgcactgctgttaaggttgtcctggtaatggagtccgctgctgatgctttggttgagaaagtgaaggctaaggtggcaaaactaactgttggaccaccagaggatgactgtgatatcaccccggttgtgtcagaatcatccgccaatttcattgaaggcctggtcttggatgctaaggagaatgttgctcctttctccttag

SEQ ID NO: 108917 - DNA, 264 bp, Glycine max
ctgttgagagatcttttggtgaatcttttcctcgtctaccatctagtaaaacaaccggagttttgccagaggtgctgaaaaatctggttgatcggaggaaaatggttaagtcgtggataaagaatgaaaaaaataagaatgaaaagagtgatcctattagagttcagcaactggatattcagcagcaagcactcaagcttactgcaaacagtatgtatgggtgcctgggattttcgaattcaagattttatgctaagccattag

SEQ ID NO: 108918 - DNA, 261 bp, Glycine max
caaatacaaagatgacagtcacactgactcagtacttggtcttgcttggaacaaggagtacaggaatatactagcaagtgccggtgctgacaagcgagtgaagatttgggatgtggttgccgggaagtgtgatattacaatggagcatcactcggacaaggttcaagcagttgcttggaatcatcatgcaccacaggttcttcttagtggttcatttgatcatactgttgtcttgaaggatggaaggatgccatcacattc

SEQ ID NO: 108919 - DNA, 268 bp, Glycine max
agtgctgtcccgtgcttcaaggcctggttgagcttgaagctgcggtgtgtctttgcaccactcttaagctgaagcttctcaacctcaacatttatgtcccacttgcccttcagcttcttgtggcttgtggcaagtctcctcctcctggctacacctgctccctctaaaccagtgaaaggattgaggaaaatatggtcaaaatcgacatgagaggatgtcgagccacactatctctcttcggtccgaattggcattgctgttgtttgtt

SEQ ID NO: 108920 - DNA, 267 bp, Glycine max
gttgagagccaccttagcaacctctctacaaagttctatggagaggttactcaacagatgttgaagcatgctgattttcccggcagcaacaatggaacaggtctcttccaaaccatagttggtttgaagataagagatctatatgagcagctaatagccagcaaggctgagactccagtagctgcaaaagcttaggaattgaacctgccataatatatatacatatatcgatcgagcaacgcagccaaattgagttctctcatcatc

SEQ ID NO: 108921 - DNA, 128 bp, Glycine max
atgtcatttaatccaaacccgtgttctgatgcatggagtttgaaatttctgaagcgtaccggatttcattgtgatatcatttgtgtcactggatggactgccaccccaatgcaggatgtccaggttac

SEQ ID NO: 108922 - DNA, 270 bp, Glycine max
ggcaaattgactgagaagtctgatgtatattcttttggagtcgtgcttttggagctaattaccggaaggaagccagtagatgcatcccaacctttgggagatgagagcttagttgaatgggctcgacctttactgagtcatgcactcgacactgaggaatttgatagtttggcagatccaaggctagaaaagaattatgttgagagtgaattgtattgcatgattgaagttgctgctgcttgtgtgcggcattcagctgcaaagagacct

SEQ ID NO: 108923 - DNA, 270 bp, Glycine max
aaaaaaaggtggagggcatccagcaaaaccctactccagatctgtataaaaacaaaaacgctggctttgaaaccctaataagcttcatcaatctccgaactccgaagcccttcagcaaccatgtcgaggagaaaggttagggagccaaaggaggaaaatgtcactcttggtccagccgttagagacggtgaacatgttttcggcgtggctcgcatctttgcctccttcaacgacaccttcatccatgtcactgatttgtctgggagggaa

SEQ ID NO: 108924 - DNA, 268 bp, Glycine max
ctgcagtctttgtggctcggaataggtttgctgtgcttgacaaaggcaacaaccaagtctgtgtaaaaaatctgaagaatgagcttgtcaaaaagagtgccctccctatttctgcagatgctatattctatgctggaacagcaacttgctatgcaggtcagaggatagggtttttatatttgatctacagcagaggattgttctcggtgatcttcagaccccttttataaagtatgtagtatggtctaatgacatggaaagtgttgct

SEQ ID NO: 108925 - DNA, 267 bp, Glycine max
cgaagtccatcccaaggacacatttgtgttcagtatagatggcaccgtactctctaatattccatactacaaaaaacatggatatggggtggagaaatttaactcgaccttgtatgatgaatgggttaacaagggcaatgcaccggcactgcccgagactcttaagaattacaacaagctggtgtctcttggcttcaagattatattcttgtcaggaagaacactggacaaacaggccgtaacagaagcaaacttaaagaaggctgg

SEQ ID NO: 108926 - DNA, 263 bp, Glycine max
gaagaaatggtgattccatgggtggtactggttggagcatgactgaatttggttgggatgtcaagtatgctggtgttcagacattagttgctcaagttcctgatgcaaggcagatctgggcatcatgctccagttttcgaagataccagcagaaggctgaaactttcatgtgttcatgccttgggaagagtagtcgcaatgttcagaagactcctggtggcctcatcttccggcagagatggaacaacatgctgtttgtcaca

SEQ ID NO: 108927 - DNA, 266 bp, Glycine max
ggcctcaaaagacccactccgattcaaatacttgtccaccttagtataccaaaagaccgtgtccacggccccaatcgcttcgggccagaccttcaacatcggcaactacgtcgtcagggtcaaattgggaacccctggtcaacttttgttcatggtcctcgacaccagcaccgacgaggccttcgttccatgctcgggctgcacgggctgctccgacaccactttctcgcccaaagcctccaccagctatggcccattggactgct

SEQ ID NO: 108928 - DNA, 266 bp, Glycine max
gttaatggccagatccttggggctgcagagtttgacaacacctttgggtgggataacaagcatgctggagcaagaatacttctttccaaggaattcctggttcaaagggtacaatccctccatgactacaaggggcatgggacaatttcgtctgttccctaatttctgggacctctttgtcttccacccaatataccccatgtggccttcttttcaagatgagtgatagcaacatgcagtatgtcacatccacctccttcctactg

SEQ ID NO: 108929 - DNA, 266 bp, Glycine max
caaggctgggaaagcagtgtatgtgaaatttcactggaagaccactagtggtataaagtgtctattggaggaagaggccattaaggtgggaggagccaaccacagccatgccactcaagacctccatgattcaattgctctggtaactatcctgagtggaaactgtttgttcagacaatagatcctgagcacgaagacaaatttgactttgaccctcttgatgttactaagacttggcctgaggacattatacccttgcagcctgt

SEQ ID NO: 108930 - DNA, 251 bp, Glycine max
cttttcttggtggaattcaaaaatatgccactcccatgatgcacctagatgaagaaattctttctaaggttgcacaagacatggttgaggaatggtttgattgtgttgatgaggaggattccgttgaggaagtctctttagtgcagcactcaatggtgttgagggtttggactatatggaaagaattcctcttgccacatctgagggttttccacatgtgctatcacgcaatggtggtgaaagcggcagga

SEQ ID NO: 108931 - DNA, 269 bp, Glycine max
  unsure (1)..(269): unsure at all n locations
agcgattaattatagtttaggcagcaaattatggattcccatgatgaggagcatgctgccaaactacttagagctcaaacccacatatggaatcacatatttagcttcataaactccatgtcccttaaatgtgtggttgacttaggcataccagatatcatacacaactatggnccaacccatgcaactctcaaacctcattgcttcactaccaatccacccatccaaaacttgctttgtccatcgcttgatgcgaatcatgatccatt

SEQ ID NO: 108932 - DNA, 263 bp, Glycine max
aattgttgtaactttttgattcctaaattctctaaaattcgaaattctaatttcgttaggggaaagagattgtttgtgtgtgagtgagtatggctggaaaaggcgagggtcctgctatcggaatcgatttgggaacgagtactcttgcgtcggcgtgtggcaacacgatcgtgttgaaatcatagccaacgatcagggtaacagaactaccccatcctacgtggctttcaccgacacagaacggttgatcggcgatgcggcga

SEQ ID NO: 108933 - DNA, 265 bp, Glycine max
gagaagacataaaaaatggtgaagatttgctgcattggagctggctatgttggtggcccaaccatggctgtaattgccttgaagtgtcctgagatcgaggtggtcgtggtggacattgctgcaccgcgaatcaacgcgggaacagcgaccacctcccgatatatgagcctggccttgatgatgtggtgaagcagtgcagggggaagaatctcttcttcagcactgatgtagagaagcatgttgccgaggctgacattgtctttgt

SEQ ID NO: 108934 - DNA, 264 bp, Glycine max
gatggctaatccctcactcttgttcttcagtctcctcctattatccgccaccgtagccgccgccgaacggatcgacgatgaagacgaccttctgatccgtcaagtggtgccggatgcggaggaccaccacctgctcaagcggagcaccacttctccgccttcaagacaaagttcggcaagacctacgccacgcaggaggagcacgaccaccgcttccgtatcttcaagaacaacttgctccgcgccaagtcacaccagaaattg

SEQ ID NO: 108935 - DNA, 266 bp, Glycine max
cagcacaaagcgggttactgtctgttcaagctaccatctctctctctctttcttagtgcctccttgccagaagttaaaatggcccaagaaactttcctattcacatctgaatcagtgaacgaggggcaccctgacaagcctgtgaccagatctccgatgctgtgctcgatgcatgcttggagcaggaccctgacagcaaggttgcctgtgaaacctgcaccaagaccaacatggtgatggttttcggagagatcacaaccaaggcc

SEQ ID NO: 108936 - DNA, 263 bp, Glycine max
cacagggtgactttgtcatctccttggcaactgaagttagagcagcctcgttctctaagattgaagatctggtggcttttgtgaactggctagatgaggaactttccttcttggtcgatgaacaagctgttctcaagcactttgattggcctgaagggaaaacagatgcaatgagggaggcggcttttgaatatctggatctgatgaaattagagaagcaagtctccaccttcactgatgatcccaaactcccatgtcaaact

SEQ ID NO: 108937 - DNA, 260 bp, Glycine max
ctcgagccggtagcattcagtgaaacactagctagggtattgggagctctcgttgtttcggagttagggaccttacgcagccatggccactgctacgaatgccgccgccgccccaccacgccagctctcccagaaggagctgacatccagatgatgttggccgccgacgtccacctcggcaccaagaactgcgacttccaaatggaacgttacatcttcaagcgccgcaacgacgggatttacattattaaccttgggaa

SEQ ID NO: 108938 - DNA, 263 bp, Glycine max
gttttctcttcctcgttcgtttcatttcgtttcgttgaagagcaacttttctctctctgtctctgtacaattctcccttttcttccctcgtagatcgaaagggaatattcttccatggcctccaagcggattctgaagagctcaaggacctacagaaagaccctccaacctcttgcagtgccggtcccgtagcagaagatatgtttcattggcaagcaactataatgggtccccctgatagcccttatgctgggggtgttttt

SEQ ID NO: 108939 - DNA, 265 bp, Glycine max
atagagacacaatacagagtgagttgttgctccttcgccacaactctctgccaacatgggtatctccagagattctatgcacaagaggcgtgccactggtggcaagaagaaggcctggaggaataagagaaagtatgagttggtcgccagcctgctaacactaagctgtcaagcaacaagacagtcaggaggatccgtgttagaggtggaaatgtgaaatggagggcattgagattggatactggaatttactcctggggaagtg

SEQ ID NO: 108940 - DNA, 256 bp, Glycine max
ctcagatggaaacaaatttgtttaaattgtctcttgatgatgttgaaactcctaaaggttccatgttggatcttaaaatttctcaatctaaaattgcacttcccaagaacacagttggaggaaccattctgcggtaggatctatgggcaaattttttgacagagggcaattttagagcaagtgttgatttgcagcgcactcatcgtattaaaggaatgattaaaatggtggctacagttggtattcctgagattac

SEQ ID NO: 108941 - DNA, 263 bp, Glycine max
ctcgagccgaatcggctcgaggcaaatttgaactttctggcatgcctcctgcccccaggagtgttcctcagattactgtgcgctttgacattgatgccaatggtattttgaacgtctctgccgaagataagaccacggccagaaaaataagatcactatcaccaatgacaagggtagactgtcaaaggaagatatcgagaagatggttcaagaggctgagaagtacaaatctgaggatgaagagcacaaaaagaaggttgagg

SEQ ID NO: 108942 - DNA, 263 bp, Glycine max
gatcgagataactagaaacagtgtgatgaaaatgaaggtccttgttttcttcgttgctacaattttggtagcatggcaatgccatgcgtacgatatgttccctctccgaatgaacactggctatggtgcccgtactccggaggtgaaatgcgcaagttggaggcttgctgtggaagcacacaacatctttggctttgagaccattcctgaagagtgcgttgaagcaacaaaggaatacatccatggcgaacaatatagatcag

SEQ ID NO: 108943 - DNA, 264 bp, Glycine max
ctcgagccgattttctgcagggagtcccagataaaggatgaagtgaggaatggcttgaaattcatcaattatgtctataagatatttggtttcacgtatgagctgaagctttcaacgaggccagagaaatacctaggagatattgcaacttgggacaaagctgaaagtgctcttaaagaagctttagatgattttggcaagccttggcagttgaatgaaggggatggtgcattctacggaccaaagatagacatcagtgtatct

SEQ ID NO: 108944 - DNA, 264 bp, Glycine max
aacaaacctttcttcgaacaccttctctgcatcgagcgcgccttttactttgaactcgggagtggagggagcagagaacaccaacaccatgtttggctccgctcaaccttcttcttatcccttcggcaccccttcttctacccatgcttttggcaccccttcttcgacccctgcttttggcaccccttcttcgaccccagcattcggtaccccttccttcgctaccccttcttctacccctgcattcggtaccccttcttctac

SEQ ID NO: 108945 - DNA, 264 bp, Glycine max
aaactccatttctcactcgccgtcgtctcttccgtctagggtttctcctcttcacaaaaatggttgccgcaaaaaaaactaagaagacccatgagagcatcaacaacaggctcgctctcgtcatgaagagtggcaaatcaccctcggttacaagaccgttctcaaatctcttaggagctccaaagggaaattgattatcattgctaacaactgcccccctttgaggaagtcagagattgaatactatgctatgttggcaaaggt

SEQ ID NO: 108946 - DNA, 260 bp, Glycine max
cagagctgaaaaagattcgtgaagagcgtggctacacctacatggatgtttgtgaggtctgcccagaaaagttgccaaattatgagcagaaaatcaaaagcttctttgaagaacatcttcacactgatgaggagaccgcttttgtgctgctggaagtgggtattttgatgttagggattgcaatgatgcttggattcgagtgtgggtcaagaaaggaggaatgatcatcttacctgctggaatttatcatcgctttacac

SEQ ID NO: 108947 - DNA, 257 bp, Glycine max
ggcaaaggaagtagaataccttcttaggaagggatggattccttgcttggaattcgagttggagcacggtttcgtgtaccgtgagcacaacaggtcaccaggatactacgatggacgctactggaccatgtggagctgcctatgtttggttgcactgatgcttctcaggtgttgaaggagcttcaagaggctaagactgcataccccaacggcttcatccgtatcatcggattcgacaacgttcgccaagtgcagtg

SEQ ID NO: 108948 - DNA, 263 bp, Glycine max
ttcaaaagggagaagaaaaggaaagaaaactctcaaaaaactattatagcaatggcagaacaaaaccaaaaccaaacaactgaagctggaaggcaccaagaggttggtcacaagagccttctccagagtgatgctctttaccagtatattctggagacaagtgtctacccaagagaacctgaatccatgaaagaactgagagattggacagcaaaacacccatggaacatcatgacaacctctgcagacgaagggcagttctt

SEQ ID NO: 108949 - DNA, 259 bp, Glycine max
atcaacagactgatgctaattttctggattctgaaaaggacaccttcagggatgatggatctacagcttcgacagcagttttggttgataaccatctttatgtagcaaatgttggagattctaggactataattcaaaagctggtaaagcaaatgctctctctgaggatcataaaccaaatagaagtgatgagcggaagagaatcgagaatgctggtggtgttgtcatgtgggcaggtacttggagggttggaggggtg

SEQ ID NO: 108950 - DNA, 259 bp, Glycine max
caaaaacaaagaaaaaaaaaaccctagccaacacaaccatcatatgaacctctgctattcagcaatcagcattcactggtcaaactgctctgaagcagctcaatgagttcgtccgcaagaccggtggcgccggcaaggtcgcactaacatgcgccgcaccgtcaatagtgctcctcagagcatttggtatggccctgaccgtcccaagtacttgggtccattctcggagcagattccatcatacctgaccggagaattc

SEQ ID NO: 108951 - DNA, 253 bp, Glycine max
ctcgagccgaatcggctcgaggcttccttcttcagtgaagctcattcgcgaaacactcccctttgccgctgttgttgttgctgcaccaccgaacaacttcccctgtaaatcgcgtttcgtttgtgcaaggtttaaaagatggctgatgctgaggacattcaacctcttgttgttgataatggaactgtaatggtcaaggctggttttgcaggtgatgatgctcctagggccgtgttccccagcattattggga

SEQ ID NO: 108952 - DNA, 259 bp, Glycine max
ggaggctggagttatcgaccctgccaaggtaactaggtgtgctttgcagaatgctgcttcagttgctggaatggtgtcgaccacgcaggccattgtggtggagaaacctaagcccaaggcacctgtagctggtgccccacaaggccttaccgtttgatttttaggctgtagggctacggcgaagaacagtttacagcagaaaattgaaagtgcgtatgtgttcgaattctgttcaatcggaaaaaaaaatgtatttgta

SEQ ID NO: 108953 - DNA, 257 bp, Glycine max
ggtaaagatggcgaggatggttcagtagatcaagctgtgattggattatggagtggcattgcttggtcggttggaatgactgtattcattgcagtgttgtctgaatatgtggtggatacaattgaggatgcacagattcatggggtctgtctgtgaacttcctaagcataatcatgctgcagatagttggcaatgcatctgaacttacaggagtaatgatagatgccttcaagcacaagctggacatctcattgggc

SEQ ID NO: 108954 - DNA, 257 bp, Glycine max
cattttgatgcttcgtcctgccgacggtaacgaaacagccggagcatacaaagtggccgtgctcaacaggaagagaccctccattcttgccctatccaggcaaaaactgccccagcttcccggaacttccattgaaggagttgaaaagggtggttacaccatttcggacaactccactggcaacaagcctaatgacatttggaccggaactggttcggaattggaaatcgctgccaaagctgctgatgacctaagga

SEQ ID NO: 108955 - DNA, 260 bp, Glycine max
ttcagttttaagttacatagtttttcattgttttacttaatctacaatggctgcttcaacaatggctctctcttcatcatcattggctggccaagctatcaagcttgccccctccacccctgagcttggtgtggaagggttagcatgaggaaaacagcctccaaaactgtttcctcaggaagcccatggtacggcccagaccgtgtcaagtacttgggcccattctcaggtgagcccccatcctatctcactggtgaatt

SEQ ID NO: 108956 - DNA, 258 bp, Glycine max
caggcgcagagtagagcagcacagaagagggaaaacggcaccgccgccgtagaagaaaacaaccatggtgcacgtctccttttacaggaactatgggaagacattcaagaagccgcgtcgtccgtacgagaagagcgtctcgacgcggagttgaagctggttggtgagtacgggcttcggtgcaagagagagctgtggagggtgcagtacgcgctcagccgcatccgcaacaacgcgcggaacctcctcaccctcgac

SEQ ID NO: 108957 - DNA, 259 bp, Glycine max
tttgaggccaggcaagccccactcaaccaccacacctctcctcgttcacgctacccctttctgctcttcttctacctttcaagttttaaaagtataaagatggcagagacattcctatttacctcagagtcgtgaacgagggacaccctgacaagctctgcgaccaaatctccgatgctgtcctcgacgcttgcctcgagcaggacccagacagcaaagttgcctgcgaaacatgcaccaaaacctacttggtcatggt

SEQ ID NO: 108958 - DNA, 257 bp, Glycine max
gcacctacaagggacgatcgtgttggcgtccagtagaacttctccatacgcccatcacggatgagaggagcatacagtgttgagaaatcgttaccggtgaaatgcgtatggagaagttctactgggcacctcaagggacgatcgtgttggcgtctgcaatggaattttccgcactgacaatgttcctaaggatgacattgtcaagcttgttgacaccttccccggccaatctattgatttctttggtgcactcaggg

SEQ ID NO: 108959 - DNA, 257 bp, Glycine max
aattgatgactgcagagcgccgaaaagcaatttgggcaatttatggtatgtgattagattatattacacactcactgctacttcagcttctccagtgagagttattttggaattgacaattattcgttgtgattgcagtgtggtgcagaagaactgatgagctagtggatggcccaaatgcttcacacatcacccctggggccttggacaggtgggagcaacgattgagtgatgtttttgaaggtcgaccctatgat

SEQ ID NO: 108960 - DNA, 210 bp, Glycine max
gaggacactctggtggaggcgcgtagcgatactgacgtgcaaatctgtcgtctgacttgagtataggggcgaaagactaatcgaaccgtctagtagctggttccctccgaagtttcccttaggatagatgaccccgctggcgagttctatctggtaaagccaatgattaggggcaccgtgggcgctacgctctcgacctattcacaaact

SEQ ID NO: 108961 - DNA, 252 bp, Glycine max
tgctatcaagtcttgggtggaagaatatgtctcaagctactacaagtcagatgaggaacttcaaaaagaccccgagctccaagcttggtggaaagaacttgtagaggtgggtcatggggatttgaaggaaagccatggtggcaaaagatgcaaactcgtgaagagttggttgaagcttccgctaccctcatatggattgcttcagctcttcatgctgctgttaactttggacagtatccatatggaggttta

SEQ ID NO: 108962 - DNA, 258 bp, Glycine max
tgaatatcgagggtgggattcaaaagccgccaacccgaagcatcgtcgttttacatggggactcagagcagctgagaggcatgtggtggacttctacatttctgatttccaatctggattgagagcattggttaaaacaggctatggtgcaagggtgactccttatgttgatgatccaatggtaattgatgttaaccctgacaataaagacatgtctccagagtttcttcgatggttgcgagagagaaatctttcaag

SEQ ID NO: 108963 - DNA, 219 bp, Glycine max
ggttgtgaaagcagagaagtgtagattactaagttatcctcgtaaatacactcttattagatggcaagataagtgtctgaccttagtaacattgccacatattgtattcattttggaattgtgccactaaattctattcaattcatctatggctgcctcttcttatgctatgcaatcaatcctggcaaaccctttgatccgcatttccagcgggtctag

SEQ ID NO: 108964 - DNA, 257 bp, Glycine max
aagagattaatatcctccgtcatgggatggcaatctaggtcggtgtaagaaagtatttccgatgatataaacttgtttgaattctccttggcagcagcaagaagcagagtataaatggcaggaaatgattggctgaacagctaccttgaagctatacttgacgtgggtcctggcctggacgatgccaagtcctctcttcttctccgagagagaggcaggttctgccctactcgctacttcgtccaagaggttattgg

SEQ ID NO: 108965 - DNA, 257 bp, Glycine max
atcgagccgattcggctcgagggaaaaggctaaagagaagaaaaagcaaagcaagggaccaaccaaaacacacacagagaaacatgtcttccccaagcaagcgccgagagatggacttgatgaaactgatgatgagtgattacaaggtggagatgattaatgatggaatgcaagaattttatgtgcaatttcatggacccaatgacagtccttatcatggtggtgtgtggaaagtaagagttgagttaccggatgct

SEQ ID NO: 108966 - DNA, 256 bp, Glycine max
ctttcgaaagattttatccaattgaaattttaaaaatgactgggataaacttaagaattcaattattgaaattgaataagtaaacaatttaattggattggtcgaatggtatcaaaaaaatggagtactactcccatttcttatttattattgaattaaccgatcaacttgctttgttatcgaacatttctttttgatttcaaaaattttccggaaaaaatttgaatctatttttatatgcgaatcaatcctacta

SEQ ID NO: 108967 - DNA, 255 bp, Glycine max
gttttaaatccacaaaatccttttgtgttaaataggtggatgggaaaactgactttcccccagggcacttcccgaagtgttaagagaatgcctctttctatagggggaggagctggtgcaaagaatgctttctcatgaacatgccaaatgctgttctttcaatgtggagatattttgttggagatctcgtctttgaagtttctaagatgacttctccctacattaaatgtacagtctctttcttcatagcatttg

SEQ ID NO: 108968 - DNA, 179 bp, Glycine max
gataaaccgcgatcacaggttgccgcaccttaaaaccggaaacaaaagcaatcgttacttggtttcaagaatttctcaatttcttcctatttctttgtgtacgatttcttaagggaaagaaaatcacctctgtgctggccacagacttcgtgaatcattttcttttccacacaacatat

SEQ ID NO: 108969 - DNA, 252 bp, Glycine max
agagaaaccccaaccggttcgggttctatactgcggggtgtgcagcttgccccccgaatactgcgaattcggatccgatttcgagaaatgcaaaccctggttgatccaaaacgtccctgacctatacctgatcttctcaaagaggcaaatgagaaggaagctgataaagttgctgacaaactacaaagtaccggtatatcaggagctggcgatggagctgcttcctcagcaccgaagcaagaagaggtgaag

SEQ ID NO: 108970 - DNA, 181 bp, Glycine max
aattttgataaaccgcgatcacaggttgccgcaccttaaaaccggaaacaaaagcaatcgttacttggtttcaagaatttctcaatttcttcctatttctttgtgtacgatttcttaagggaaagaaatcactctctgtgctggccacagtcttcgtgaatcattttcttttccacacaac

SEQ ID NO: 108971 - DNA, 255 bp, Glycine max
atcaacagactgatgctaattttctggattctgaaaaggacaccttcagggatgatggatctacagcttcgacagcagttttggttgataaccatctttatgtagcaaatgttggagattctaggactataatatcaaaagctggtaaagcaatgctccccccggaggatcataaaccaattagaagtgatgagcggaagagaatcgagaatgctggtggtgttgtcatgtgggcaggtacttggagggttggag

SEQ ID NO: 108972 - DNA, 279 bp, Glycine max
ctcaaatctcttcgttccttcgattcgttccatttcttccaaaatggccaaagacccagttcgcgttctcgtcactggagctgcagggcaaattgggtatgctcttgtccctatgattgctaggggagtgatgttgggtcctgaccagcccgtgatcctccacatgcttgacattcctccggcagcagagtcattgaatggggttaaaatggaattggtggatgctgcattccctcttcttaaaggtgttgttgccacaactgatgtggttgaggcatg

SEQ ID NO: 108973 - DNA, 172 bp, Glycine max
cttaaggaaaccatcaacagtgagattgagatcggagctgtcgcagccacgcgatcagctgctgaagatacttatcatattatccgaaacgggaatatctcaagtcatgatttcgagaaaacgttgaagaagatgtgtaaagaaggtgtatattggggaactttagctggtg

SEQ ID NO: 108974 - DNA, 183 bp, Glycine max
gttggccagttagacgctgcgcaagattcgctcaagtggatcactgattatctcatcaatgctcacccttctgagaatgttctctatattcaggtgggtgatcctgttgcagatcacaagtgttgggaaaaaccagaagccattactgaggaacgaccactcatacaagtgattgcatcttgt

SEQ ID NO: 108975 - DNA, 163 bp, Glycine max
aatttttcctttgatattaaatctcgctctagattggaaaaagtttcctctacaaaagcacaatttgttagtggaaaaaccttcaaatatgatataattggtgctggttcacattcttcagaagattttcctgaaaaggaagatcaagaaacccccaaaaaga

SEQ ID NO: 108976 - DNA, 202 bp, Glycine max
ccagcacaggtcaagctcctggtgaagacagtgaagtgattttatacccacaagccattttcagggatccattcagaaggggtaacaatatcttggttatctgtgatgcctacactcctgctggagaacctattcccactaacaagaggcacgctgctgccaaggttttcagccatcctgatgttgttgctgaagtgccatg

SEQ ID NO: 108977 - DNA, 183 bp, Glycine max
gagtgatttcagtgagtgatcggtgttcacttgatctcatcataatcgtcagcgtcaattgaagaagatgccgatcagaaacatcgccgtcggaaggcctgaagaggcgactcaccccgacacgttgaaggcggctttggctgagttcatctcaaccttcatcttcgtgttcgccggctcagg

SEQ ID NO: 108978 - DNA, 277 bp, Glycine max
cagcagagaagcactcatcattcttcgtttgtctaagatccgccttctctgaattgtaaaaatgtcgctcggagaaactgcttgttcatacgcagctctcatccttcatgaagatggaatcagtgtaactgccgacaagatcagcaccttgttggaaactgcaaaggttcaagtagatacctattggccaaccttatttgctaaacttgctgagaagaaaaatcttggcgatttgatagccaatgcagcaggcggtggtgcaccagttgctgttgca

SEQ ID NO: 108979 - DNA, 190 bp, Glycine max
atggggccagtgaagaaggctatggaagatgcaggattacagaagagtcagattgatgagattgttcttgttggtggaagcacaaggattccaaaggtacaacagcttttgaaggactactttgatggaaaggagccaaacaagggtgtcaaccctgatgaagcagttgcctatggtgctgcagtgcaag

SEQ ID NO: 108980 - DNA, 162 bp, Glycine max
gaattccactcctaatcgccatttacggcgactactccggctcgctcatggttcaggtcgtggtccttcagtgcatcatatggtacaccttgttgctcttcttattcgaataccgcgccgcgaaaatcctaatcatggaacagttccctgaaaccgctgcct

SEQ ID NO: 108981 - DNA, 279 bp, Glycine max
gcagacttaacaacagcacaaagcgggttactgtctgttcaagctaccatctctctctctctttcttagtgcctccttgccagaagttaaaatggcccaagaaactttcctattcacatctgaatcagtgaacgaggggcaccctgacaagctctgtgaccagatctccgatgctgtgctcgatgcatgcttggagcaggaccctgacagcaaggttgcctgtgaaacctgcaccaagaccaacatggtgatggttttcggagagatcacaaccaaggc

SEQ ID NO: 108982 - DNA, 139 bp, Glycine max
ggcttttggcttggaacccgctgcagctaaactcatttgctcccttaagcccgatctcaaagattttgctcaaaaatgtgtcgacgccaccaaaattgcaggattcgcccttgccacctcagctctcgtggtttctgga

SEQ ID NO: 108983 - DNA, 185 bp, Glycine max
gcatattcctgtatctaatattagtgcaggggaaaatcatgtagttcaaatacccttaatggcacaggaggaaattctgtcttctagtgcaagtgatttcagaactgcaatggtgagtaaaaatagcaagcctcaagctactgcaatgcatgtgggagctatagaatttatcattgatagtttcg

SEQ ID NO: 108984 - DNA, 273 bp, Glycine max
ggccgttttgtcattggtggccctcatggcgatgctggtctcaccggccgcaagatcattatcgatacttatggaggatggggtgctcatggtggtggtgctttctccgggaaggaccctaccaaggttgataggagtggtgcttacattgtgagacaggctgctaagagcattgtggcaagtggacttgccagaaggtgcattgtgcaagtgtcttatgccattggtgtgcctgagcctttgtctgtgtttgttgacacctatggcactggg

SEQ ID NO: 108985 - DNA, 179 bp, Glycine max
tgagaggaagagggagtgagagtgttcttcgtttgctaccttctctcagaaatggttacgttcaggtttcaccagtaccaggtggtcgggagggctctcccaacggaagcagatcagcatccgaagatctaccgaatgaagctctgggccaccaacgaggttcgcgccaagtctaagtt

SEQ ID NO: 108986 - DNA, 204 bp, Glycine max
ttcaaatcctgaacacagtgcaagttttgctcctctgttgatctttggtggccacataccttttagattgtccagacatggtggctttgaagctctatttagatggggctccaggaatcggtctgacacagggtaacacaggcgattattttatcggtcctggactagaagaactgtttgaacagctttcagctaacaacaggc

SEQ ID NO: 108987 - DNA, 248 bp, Glycine max
gcaatggccaaagactatggagaagttgagttgtttggtgtaggtggaagcccttttgccagaagggtgcagattgccctagaactgaagggagttcaatacacttactttgaagaagatcttaggaacaagagtgctcttcttctcaaatacaaccctgttcacaagaaggtcgctgtgcttgtccacaatggaagacccttggctgagtcccttgtgatccttgaatacattgatgagacatggga

SEQ ID NO: 108988 - DNA, 167 bp, Glycine max
gaaaatgagagaaatcttgcacatccagggagggcaatgcggtaaccagatcggagcgaagttctgggaggtgatatgcgacgagcacggcatcgaccacaccggaaagtacaacggcgactccgagctccaattggagcgcatcaatgtttattacaatgaagcca

SEQ ID NO: 108989 - DNA, 202 bp, Glycine max
tccaagttggaccttcagttggaatctcagctggtgatgagatttgggcagctcgttacatcttggagaggatcactgagattgctggtgtggtggtttcctttgaccccaagccaattaagggtgattggaatggtgctggtgcctcacacaaactacagcaccaagtccatgagagaagatggtggctatgaagtgatca

SEQ ID NO: 108990 - DNA, 204 bp, Glycine max
caccatcaaccactggagtgtggggcaaaggcagcttctttgcttgggaaggatcatgctaaaacgcagcaaaatactgttcattgatgaggcaacagcatccgttgattcacaaactgatgctgtaatacaaaagatcatccgtgaggacttcgcagatcgtacaattataagcattgctcacagaataccaacagttatgga

SEQ ID NO: 108991 - DNA, 172 bp, Glycine max
aaccatcatggccacctctgctattcagcaatcagcattcactggtcaaactgctctgaagcagctcaatgagttcgtccgcaagaccggtggcgccggcaaaggtcgcactaacatgcgccgcaccgtcaagagtgctcctcagagcatttggtatggccctgaccgtccc

SEQ ID NO: 108992 - DNA, 234 bp, Glycine max
actcgagccgaatcggctcgagatctgattgagtcaccagatgctatcaaggcaaaagttgacgaagccatgagtgtgttcagaaatgttgctcaacagcaaactaacccagctgatcaactagcttcactctctctcaatgacaatcttgtgtcttagattcctttagtcttttgactggaatctgctttccagttattcctattccgtatgcttccccccagtttatttgca

SEQ ID NO: 108993 - DNA, 172 bp, Glycine max
ccctccaggagtactggtggtgcaccgagcgcgcgctcgactggggccgcggtggtggacccgacctcatcgtcgacgacggtggtgacgctacccttctcatccacgaaggcgtcaaggccgaggagctctatgagaacaccggcgaactcgccgaccccagctccacaaa

SEQ ID NO: 108994 - DNA, 129 bp, Glycine max
taggcacccagagacgaggaagggagtagtaagcgacgaaatgcttcggggagttgaaaataagcgtagatccggggattcccgatataggtcaacctttcgaactgctgctgaatccacgggcaagca

SEQ ID NO: 108995 - DNA, 287 bp, Glycine max
ctcaggaaaaagaaaaaggggttcctaattactgtgcagagcttgtagccatggcattcatagagaaagctgtgtttttcttgataatgatgatgacagctttccaagtttcacatgcagctgtgcacaaggttggggactctgctggttggaccatcattggtaatatagattacaagaagtgggctgctactaagaacttccaagttggtgacactatcatttttgaatataatgcgaagttccacaacgtgatgcgagtgacgcatgctatgtacaagtcatgc

SEQ ID NO: 108996 - DNA, 99 bp, Glycine max
ggaggaggtcctgagggtcctgatccacgggaggttgagttgtatttggaagagattctcaaccttatgcagcttggtgaggattacactgagttcatg

SEQ ID NO: 108997 - DNA, 269 bp, Glycine max
tcttcgtttcttttcgtgaaacaaaagaaaacaaaagattaggttttgtgatgtcgggcatggagaggcttcagaggatgctcgcgggtgcaggtggagcgctgggccatcccccaccggattcccccaccctcgattcctccgagcaggtctacatctcctccctcacccttctcaaaatgctcaaacacggaagagctggggtaccatggaagtgatgggtctgatgttgggggagttcgtggatgagtacaccgttcgcgttgtgg

SEQ ID NO: 108998 - DNA, 265 bp, Glycine max
ttttctgtgagcctttctttcaggttcttaacttgatcagtgtgcagtgtccaaatcataagggtagttgcaaattgcaatggctaagcatgatgttgagggtggttccttctctgcaaaggactaccatgatcctcctccagcaccgttgattgatgctgaggaactcacacagtggtccttctacagggctttgattgctgagttcattgccacaatgctcttcctttacatcacagtgcctcactgtgattggttacaagag

SEQ ID NO: 108999 - DNA, 158 bp, Glycine max
ctccagcgttgttgcattgtagaaggcgatggccgcgcgagctctgttgaccagaaaaaccctagccaccgtgctccgcaacgacgcgaacccataatcggagttggcataacagcagcggctactcattcacgcgggttgcacgtgtacacgctacc

SEQ ID NO: 109000 - DNA, 201 bp, Glycine max
gaaccctattaaaattggagaagttctgactcgtggattaggtacgggcgggaatccactgttgggggaacatgctgcagaggaatcaagagatgctattgctgatgctcttaaaggatcagatttggtgtttataacggctgggatgggtgggggaaccgggtctggtgctgccccagttgtagcccaaatatcaaaaga

SEQ ID NO: 109001 - DNA, 163 bp, Glycine max
ggagcatgccgctaatgctgttaggaacctcactggaaggttttatgcaggtcggtcaattattgttgatttttcgccggtgacggatttccgagaagctacttgcaggcagtatgaggagaatacttgcaaccgtggtggttattgcaacttcatgcacttg

SEQ ID NO: 109002 - DNA, 175 bp, Glycine max
ccaacttctcagtcgtttctaaactatgtgttcttggcaattgtctatgggattattgttctatacagaagggaagcactcaaggcaaaatggtattattacatacttcttggattggttgatgttgaagcaaattttcttgttgtgaaggcatatcaatatacatcactaacaa

SEQ ID NO: 109003 - DNA, 234 bp, Glycine max
tgaaattttgataaaccgcgatcacaggttgccgcaccttaaaaccggaaacaaaagcaatcgttacttgttctcaagaatcttcaaactttcttctgttttctctgcactcggtttttcaggaaaagaaaatcactctctgtattgattacagacttcgtgaatcattttcttttcaactttcagttcacttgctgaacactctcctataaatatataggacttcgtgtcaga

SEQ ID NO: 109004 - DNA, 247 bp, Glycine max
ctcgagccgctcgagccgcggcgaggtactgcagaagaaaaaaccgcaaaatccgatccaagttatcgtaagcgattagttaacatgttggttaaccgtattctgaaacacggaaaaaaatcatagctcgatagataatttgataagccaatgacagaaacaaatccactatctgttttacgtcaagcaatacgtggagtaactcccgatatagcagtaaaagcaagacgcgtaggcggatcaactc

SEQ ID NO: 109005 - DNA, 144 bp, Glycine max
gtttgttgatcgagataactagaaacagtgtgatgaaaatgaaggtccttgttttcttcgttgctacaattttggtagcatggcaatgccatgcgtacgatatgttccctctccgaatgaacactggctatggtgcccgtactc

SEQ ID NO: 109006 - DNA, 149 bp, Glycine max
ggacaagattcaacaagccaattactttgggtcgctgacacaggcatcagctatcagagtggggtctttccaaggggaagaaatatatgctccattcaagagcctgcttccaatggtgaaccctgatgatgttgtgtttgggggatggg

SEQ ID NO: 109007 - DNA, 168 bp, Glycine max
gaacaaagctagaggcaaaagtggaccgctttttcatttcgatgtgcatgaggatgtacgaacaattgctgatgccactatagagaaggatgagtctcatgctgggaaggttgtagaaaggcattggtatgaaaagaacaagcatatatttcctgcttcaagatggga

SEQ ID NO: 109008 - DNA, 243 bp, Glycine max
ataactagaaacagtgtgatgaaaatgaaggtcctagttttcttcgttgctacaattttggtagcatggcaatgccatgcgtacgatatgttccctctccgaatgaacactggctatggtgcccgtactccggaggtgaaatgcgcaagttggaggcttgctgtggaagcacacgacatctttggctttgagaccattcctgaagagtgcgttgaagcaacaaaggaatacatccatggcgaa

SEQ ID NO: 109009 - DNA, 247 bp, Glycine max
cgaaaatgtggaagagaacgggttttgaagaagaagcagttcaattgatcaactcagatttcagggacctaagtctagctgctaatagactcgcccatcatgccatcaaacttgatggcattggctttggagcctcttttttcggattgtttgctgccattgctgctatttatctgttgattttggatcgtacaaactggaaaacaaatattctcacagcactactcattccatacattttcttcag

SEQ ID NO: 109010 - DNA, 243 bp, Glycine max
caagattggtaccccagctcagaccctcctcttggccatggacactagcaatgatgcttcctgggtcccttgcactgcttgtgttggctgctcaacaaccactccctttgctccagctaagtccaccactttcaagaaagttggatgtggtgcttctcagtgcaaacaggtacggaaccccacttgcgacggaagcgcgtgtgcattcaacttcacttatggcacttcctcagtggcagctag

SEQ ID NO: 109011 - DNA, 243 bp, Glycine max
gaactaatgcacaatccagaagccatgagaaaagcgaagaaggagatagcagaaacaataggagtaggaaaaccggtggaggaatccgacgtggcaaggctgccatacctgcaatcagtgataaaagaatctctgcgaatgcacccaccagcaccactgctactgccacgaagggccaaaacggacgtgcaagtctgcggctacacggtcccacaggggacacagatcctcatcaacgagtgg

SEQ ID NO: 109012 - DNA, 241 bp, Glycine max
aagcaggactgaatgaactaatggagtctaaaggtgggaaaaagaagtctagtagtagtagtagtaaatcattgttctacgaagctcccctcggatacagcattgaagacgttagaccaaacggtggaatcaagaaattcagatctgctgcttactccaactgcgctcgcaaaccttcctgatatccatccagattgatagttcattgcatgcaaccatagttttattaggttttttcttc

SEQ ID NO: 109013 - DNA, 244 bp, Glycine max
ggcattagaaaaaaagaaataaaaaaatcaatgcttatttgggcatcatgctacaaaaaatagatttatggaagaagcagctagcctttaaccacctccttttgttgtaggtttgaatagaacaggtaagagttgcagattacggtgggttaattacctacatcctggcctcaaacgtggaaagatgaccccccaggaagaacgccttgtcttggagcttcactcaaaatggggaaataggtgg

SEQ ID NO: 109014 - DNA, 246 bp, Glycine max
gagagtggtttcagtgagtgatcggtgttcacttgatccttcataagtcgtcatcatcatcatcatcatcaccgttgattgaagaagatgccgatcagaaacatcgccatcggaaggcctgaagaggctactcaccccgacacgttgaaggcggggttggctgagttcatctccaccttgatcttcgtgttcgccggttcaggttccggcatcgcctacaacaagctcaccgacaacggcgccgcc

SEQ ID NO: 109015 - DNA, 246 bp, Glycine max
ccagaatataaggaaagagatttctatattgctggggaaagctatgctgggcattatgtgcctcaatttgcacataccattctctatcataacaaaaaggcaaataagaaaatcatcaatctaaaaggaatcttgattgggaatgcagtgatcaacgaggaaactgactcggacggactgtatgattatcatgccagccatgcaatcatctcagacaaagcagcttatctcaacaaagcttgtgat

SEQ ID NO: 109016 - DNA, 243 bp, Glycine max
cttctacctctcaagtttttgaagtatagagatggcagagacattcctatttacctcagagtcagtgaacgagggacaccctgacaagctctgtgaccaaatctctgatgctgtcctcgacgcttgcctcgaacaggacccagacagcaaggttgcctgcgaaacatgcaccaaaaccaacttggtcatggtcttcggagaaatcacgaccaaggccaatgttgactacgagaagatagtgcg

SEQ ID NO: 109017 - DNA, 158 bp, Glycine max
ccgcgatcacaggttgccgcaccttaaaaccggaaacaaaagcaatcgttacttggtttcaagaatttctcaatttcttcctatttctttgtgtacgatttcttaagggaaagaaaatcactctctgtgctggccacagacttcgtgaatcattttct

SEQ ID NO: 109018 - DNA, 241 bp, Glycine max
  unsure (1)..(241): unsure at all n locations
gaaattttgataaaccgcgatcacaggttgccgcaccttaaaaccggaaacaaaagcaatcgttacttggtttcaagaatttctcaatttcttcctatttctttgtgtacgatttcttaagggaaagaaaatcactctctgtgctggccacagacttcgtgaatcattttcttttccactcaacgtagaatcaannatcactatcctatttgatataggacttcgtgtcagatttaaactt

SEQ ID NO: 109019 - DNA, 240 bp, Glycine max
gacagagggttaattgtggagtattttggaaggatgtcttacgttgctcataacgttaatcagccccaagagaaagatttgttagagggaaatttttcctttgatattaaatctcgctctagattggaaaaagtttcctctacaaaagcacaatttgttagtggaaaaaccttcaaatatgatataattggtgctggttcacattcttcagaagattttcctgaaaaggaagatcaagaa

SEQ ID NO: 109020 - DNA, 242 bp, Glycine max
aagcaaacaacaatggcgaaccctgaaggcagtagcagaggctctagatggtcccttaagggaaccactgctctcgttactggaggaacgcgtggaattgggcacgctgtggtggaggaactagcggagtttggtgccacagtgtacacttgttcgaggaatgaagaagagctgaatgcatgcttgaaggagtggaaagagaagggattttcggtttctgggttggtttgtgatgcgtcttc

SEQ ID NO: 109021 - DNA, 244 bp, Glycine max
gatcgagataactagaaacagtgtgatgaaaatgaaggtccttgttttcttcgttgctacaattttggtagcatggcaatgccatgcgtacgatatgttccctctccgtatgaacactggctatggtgcccgtactccggaggtgaaatgcgcaagttggaggcttgctgtggaagcacacaacatctttggctttgagactattcctgaagagtgcgttgaagcaacaaaggaatacatccat

SEQ ID NO: 109022 - DNA, 243 bp, Glycine max
  unsure (1)..(243): unsure at all n locations
agagtagtggcctttaggtggtgaagaacaagagctcaaatcaaatcgaatcgaaaaaagaaagaaagatcatattcatggcgatggcaagcctggctcgacggaagggttacgccgtcgttttgtcgtcgaggtcgtcgttttgtctgacaagctggaggggattcgcgtccggatctgacgaaaacgacgtcgacancatcggcggcggtcccggcggctacgtggccgccatcaaagccg

SEQ ID NO: 109023 - DNA, 244 bp, Glycine max
tgaatctcagaattctctaaaagagatctttgtctgctctttgaagaaagaagggtctatgcttgattttggagatgtctctgctctcagatctcatcaaccttaacctctccgataccaccgagaaggtgatcgcagagtacatatggatcggtggatcaggaatggtcctgaggagcaaagcaaggactctcgcaggaccagttagcgacccttcagagcttcccaagtggaactatgatgg

SEQ ID NO: 109024 - DNA, 242 bp, Glycine max
gagaactcaagaaatggagagaaacacagagaatggatcagatagtagtgtgagtttgaggagaaatacatctaacaatgggcgtcgagggttgccaatgagccaaacggattccgaagtgtgccacgacgacagcacccctctcagcaacaccaatccatcaggtttacgtgaatgatcaatttctgaattgggatccagaacacagaatcaaagtccgaatagtatctgcaagagcttat

SEQ ID NO: 109025 - DNA, 239 bp, Glycine max
gcagaagggtatccacatctggggcaaaggtggcaaggacaagaacactgccattctttggcatggtaccgtccacgctcgcgaatgggtcaccaccatgaccgtcgaatacctagcctaccaactcatcgccggctagggcaaagactccaacgtcacttccttcgtcgacaactacgacttctagctcatccccgtcgtcaaccccgacggcttcgtctattcccaaacccaagacc

SEQ ID NO: 109026 - DNA, 238 bp, Glycine max
tgcagaactttgtttcccaacctccattgcctccgcttctacctcgctaccatgatcattcctgagaagaaccgcaaggagatctgcaaatacctcttccaagagggagtttgctttgcgaagaaggacttcaatttggcgaacaccctgagattgacgtgccgaatctgcaggtgattaagctgatgcagagtttcaagtctcgcgagtatgtgagggagacttttgcttggatgca

SEQ ID NO: 109027 - DNA, 232 bp, Glycine max
cctagtttcatccgcaggttctcaggagaagaagatagtcgttcgagattgcccgtacgaagcaaactgctcgtaagtccacaggaggaaaggctcctaggaagcagcttgcaaccaaggctgcacgtaagtctgcaccaactactggaggtgtgaacatgccacatcgttaccgtcctggtaccgttgctcttcgtgagattaggaaataccaggagagtaccgagctttt

SEQ ID NO: 109028 - DNA, 241 bp, Glycine max
ccagcatttgcgatgtgctatgcacagctacagctgaggcacttgccatgggcaaatttgtagtttgtgctgatcatccatcaaatgagttcttcacgtcatttcccaactgtttgacttacaggacatccgaagacttagtgacaatagtataagaagctttagaaaatgagccttatcatctaacacctgagcaaagatatcaactttcttgggaggctgctactcaaagatttatgga

SEQ ID NO: 109029 - DNA, 245 bp, Glycine max
caccatcaaccactggagtgtggggcaaaggcagcttctttgcttgggaaggatcatgctaaaacgcagcaaaatactgttcatggatgaggcaacagcatccgttcattcacaaactgatgctgtaatacaaaagatcatccgtgaggacttcgcagatcgtacaattataagcattgctcacagaataccaacagttatggactgtgacagagttttagtcattgatgcaggctatgcaaagg

SEQ ID NO: 109030 - DNA, 247 bp, Glycine max
atagcccaagccctatacaaccaaaccctaacacacacccatttgattcagtttccatggctagcctcaaggttgcatttttggctgcagtgctctgcatggttgtggtgagtgcacccatggcacatgcagctatcacgtgcgggcaggtgacgaatagcctgatcaattgcatcggttacctccagaacggaggaacgccgccgtcgggatgctgcaacggagtgaagagcctcaatgccgccgc

SEQ ID NO: 109031 - DNA, 240 bp, Glycine max
atagcaactaacaggcatcttagtgtgctccaccctattcataagcttcgcttgcctcactaccgtgacactatgaatatcaatgcacttgctcgacaatcgctcatcaacgcagatggcgttatcgaactttcatttttgcccggcaaatactctctggagatgtcttcggcagtttacaagagttgggttttcactgatcaagcccttcctgcagatcttatcaagagaggaatggca

SEQ ID NO: 109032 - DNA, 237 bp, Glycine max
ctggcatgtgaatcgcttgtgcttggcagctaatgttcctttggttgaaagtggaactactgggttcctcggacaggtcactgtgcatgtcaatggagaaacagagtgctatgagtgttcacctaaaccagtccccaagacatatcacgtatgtacaatcacaagtaccccatcaaagtttgttcactgtattgtgtgatccaaagacctactttttgctaatacattggggacaag

SEQ ID NO: 109033 - DNA, 245 bp, Glycine max
ggttgatagtcaagagggagttgctcacattggtgaattgaaatctggtgtctatgttccattgcctacaaaaactcaatttggtggaaactcccaaggaatggcaactggatctaccttgtgacaaaattcctagtgtcttgactacaactgatgagagattggtaggcacagaacatgagggatatgatccttttcttggtggaattcaaaaatatgccactcccatgatgcccctagatgaa

SEQ ID NO: 109034 - DNA, 264 bp, Glycine max
ctcgtaattcggctcgtacgagtgtgtgtgacattgctcctagagggctctccatggcgtccagcttcattggaaactcgacctcgattcaggagatgttcaggagggtgagcgagcagttcacggcgatgtttaggaggaaggctttcttgcattggtacactggtgaaggcatggacgagatggagttcacggaggcagagagcaacatgaatgaccttgtgtctgagtaccagcagtaccaggacgccactgctgaggacg

SEQ ID NO: 109035 - DNA, 241 bp, Glycine max
ggccaggcaagccccactcaaccaccacactactcctcgtttacgctacccctttcttctcttcttctacctttcaagttttaaaagtataaagatggcagagacattcctatttacctcagagtcggtgaacgagggacaccctgacaagctctgcgaccaaatctccgatgctgtcctcgacgcttgcctcgagcaggacccagacagcaaagttgcctgcgaaacatgcaccacaacc

SEQ ID NO: 109036 - DNA, 239 bp, Glycine max
cgtgaaactacgtgtatagagaccggcggcgaaggtaaggtggtgcaaacaagcaaaaccgaattctcgaaaatcagatcggcgatcggaggaagaacctgaagctgagcgaagatggttctcgcggagttaggtggtagcatttcgcgtgctcttcagcagatgagcaatgcgacgatcatcgacgagaaagtcctcaacgattgcctcaacgacatcactcgcgcgcttctccaatc

SEQ ID NO: 109037 - DNA, 240 bp, Glycine max
ctggtatttctaaggatggacagactcgtgagcatgctcttcttgctttcacccttggtgttaagcagatgatctgctgctgtaacaagatggatgccactaccccgaagtactctaaggctaggtatgatgaaattgtgaaggaagtctcttcctacttgaagaaggttggttacaacccagacaagattccatttgtgcccatctctggtttcgagggtgacaacatgattgagaggt

SEQ ID NO: 109038 - DNA, 239 bp, Glycine max
gtcggttcttccttctcaaatattcttgagatccccattttctccgaagcaaagccatggctaagggtcctggtctctactctgacatcggcaagaaagctagggatctgctgttcaaggactaccacagtgaccagaagttcaccatcaccacctactcaccgactggagtggctattacagcatcaggaaccaggaaaagtgaactgtttctggctgatgtcaacacccagttgaag

SEQ ID NO: 109039 - DNA, 239 bp, Glycine max
cctagattcagccacagtttcggaggagaagaaaatagtcgttcgagatggcccgtacgaagcaaactgctcgtaagtccacaggaggaaaggctcctaggaagcagcttgcaaccaaggctgcacgtaagtctgcaccaactactggtggtgtgaagaagccacatcgttaccgtcctggtaccgttgctcttcgtgagattaggaaataccagaagagtaccgagcttttgatcagg

SEQ ID NO: 109040 - DNA, 155 bp, Glycine max
tgaaattttgataaaccgcgatcacaggttgccgcaccttaaaaccggaaacaaaagcaatcgttacttggtttcaagaatttctcaatttcttcctatttctttgtgtacgatttcttaagggaaagaaaatcactctctgtgctggccacaga

SEQ ID NO: 109041 - DNA, 243 bp, Glycine max
ccaagagtgatgtgtatagttttggcgtagttcttctggaaatgatatcaggaagacgagctattgacaagaaccagccaactggagagcataaccttgttgaatgggccaagccttatctatctaataaacgaagagtcttccgtgtaatggatccccgtctcgaaggtcaatattcacagaatcacgctcaagcagcagctgcgcttgctatgcaatgtttttccgtagagcctaagtgca

SEQ ID NO: 109042 - DNA, 239 bp, Glycine max
ctctttgacaccaggaagaagcctaacaacatcaaactttatgtccgccgtgtcttcatcatggacaactgtgaggagttgatgcctgaatatcttagctttgttaagggtattgtggattctgaggatcttcctctcaacatttctagtgaaatgctgcagcagaacaagatcctgaaagtcatcaggaagaacttggtcaagaagtgcattgagatgttctttgaaattgctgaaaa

SEQ ID NO: 109043 - DNA, 242 bp, Glycine max
tcagccccttgtgagtgagtgttctgaaagatgagaccaattttgatgaaaggtcatgagaggccattgacgttcctgaaatacaacagggacggcgatctgcttctctcctgcgccaaggaccacaacccaaccgtctctgtttgccgacaatggcgaacgcttgggcacttatcgcggccacaacggcgccgtttggacctgcgacgtctcaagagattcggttcgtctgatcacgggta

SEQ ID NO: 109044 - DNA, 237 bp, Glycine max
accttgctttgacagaagaagaaaagatggaagtgattagaaatagaggcattcctgctgatgttcttgcaaagcgagctcatgaatttgaaaaacatgttgctcatgaaagcctcaaggatcaaattcctgctgttgacaagttgtattctactaaggttaataagtttgcaaaaattatgaaccttagacaaagtgttgttggtgatcttaaacttcttactgatgggaagttgt

SEQ ID NO: 109045 - DNA, 237 bp, Glycine max
tgaagatctcccactcaacatttcaagagaaatgttgcaacagaacaagatcttgaaggtcatccgtaagaacttggtcaagaagtgccttgagctcttctttgaaattgcagagaacaaggaggattacaacaagttctatgaggctttctctaagaacttaaagcttggtatccatgaggattcccagaacaagggacagattgctgaattgctcaggtaccactccaccaagag

SEQ ID NO: 109046 - DNA, 240 bp, Glycine max
gttgatcgagataactagaaacagtgtgatgaaaatgaaggtccttgttttcttcgttgctacacttttggtagcatggcaatgccatgcgtacgatatgttccctctccgaatgaacactggctatggtgcccgtactccggaggtgaaatgcgcaagttggaggcttgctgtggaagcacacaacatctttggcttagagaccattcctgaagagtgcgttgaagcaacaaaggaata

SEQ ID NO: 109047 - DNA, 244 bp, Glycine max
gaggggggataaatggctacactttcagatactggggttgcagctggcttgaacattttgagtgcatttattttgcttgtacgctttgctattttgagacttcaaccttttaatgatcgggtatacttcccaaaatggtacctgaagggtttaagaacagatcctgtgcacggaggagcgtttgtgcgcaagtttgtcaatttagattggagatcataccttaggtttttgaattggatgccag

SEQ ID NO: 109048 - DNA, 277 bp, Glycine max
ccatgatgcccctagatgaagaaattctttctaaggttgcacaagacatggttgaggaatggtttgattgtgttgatgaggaggattcctttgaggaagtctctttaagtgcagcactcaatggtgttgagggtttggactatatggacagaattcctcttgccacatctggagggttttcctcatgtgctttcacgcagaaatggtgaaaaaggcagaaggagatttgttctggggatggtgagaaatgacattgattcgggaccagtgttgaaga

SEQ ID NO: 109049 - DNA, 287 bp, Glycine max
gccagccaaagatgctgttatggaggttgtaagatctggggatctggtttcttacactgctgaagaaggtgtaaggattctgggagagggaaagttcttggtgtcggatagctttcctggaaatgaaaggacaaaatattgcctcacatccaagattccactaggagtgattttagacattccaccttttaactatcccgtcaatcttgctgtttccaaaattgctcctgccctgattgctggaaactcaattgtgctcaagcctccaactcagggagctgtttctg

SEQ ID NO: 109050 - DNA, 286 bp, Glycine max
ctttgttcactcttcttctcttgcggctagggttttagcgcaattcttctagatttaaggaagatgggtaaggaaaaggttcacatcagtattgtggtcattggccatgtcgactctgggaaatccactaccactggtcacctgatttacaagcttggaggcattgacaagcgtgttattgagaggtttgagaaggaagctgctgagatgaacaagaggtctttcaagtatgcctgggtgctggacaaacttaaggctgagcgtgaaagaggaatcaccattgata

SEQ ID NO: 109051 - DNA, 282 bp, Glycine max
cggaaaccctaaacgagaatggtccctcaacgacttcgagatcggaaagcctctcggaaaaggcaaattcggcagagtctacgtcgccagagaagtcaagagtaaattcgtggttgcattgaaggttatttttaaggaacagcttgagaagtacagaattcaccaccagctgaggagggagatggagattcagttcagcctgcagcaccagaacgtgcttcgtctctacggttggtttcatgactcggagcgcgtctatttgattctcgaatatgctcacaa

SEQ ID NO: 109052 - DNA, 190 bp, Glycine max
ccgccattgaattcttcttccatttctcttttttctgcatacccatttcgtttttcttcccaaatggccctttcttgctccaaagttttaagcttttatctctcgcccgttgtgggtggtggtgatgttccgaaaaagctcacttttcctccttttttgggtctttctaagggtgttggtggaaccagga

SEQ ID NO: 109053 - DNA, 178 bp, Glycine max
ctcgttagtcgtttgtaacgcctttgtttgcgttttttgcacagaagaattaacacgtatatagcaagcatggcagtcacactctacgaccttagctctgcctctgggttgaagaagcttgatgagtaccttctcccacgcagctacatcaccgggtaccaagctacaaaggatgatc

SEQ ID NO: 109054 - DNA, 278 bp, Glycine max
ggcgaactaaacgctgtcgttgcgccaatcgcggcgttgttgttggtggtgctactcgcggcgagtgtggtggtggaggctcaggagaactcggacgtgaagacgctggtgaagcacatgcacgggaagaagtactgcgacaaaggatgggaatgtaagggctggtcaatttactgttgtaacctcactattactgattatttccagacctaccagttcgagaatctcttctccacagcggaactcgccggtggcgcacgccgtcggattttgggact

SEQ ID NO: 109055 - DNA, 193 bp, Glycine max
ctcgagccggaaattttgataaaccgcgatcacaggttgccgcaccttaaaaccggaaacaaaagcaatcgttacttggtttcaagaatttctcaatttcttcctatttctttgtgtacgatttcttaagggaaagaaaatcactctctgtgctggccacagacttcgtgaatcattttcttttccacacaac

SEQ ID NO: 109056 - DNA, 280 bp, Glycine max
gttggccagttagacgctgcgcaagattcgctcaagtggatcactgattatctcatcaatgctcacccttctgagaatgttctctatattcaggtgggtgatcctgttgcagatcacaagtgttgggaaaaaccagaagccattactgaggaacgaccactcatacaagtgaatgcatcttgtcctggatcagacgttgcagctgaaactgcagcagccatggcctcagcatctttggtctttaaaaagactgatcctacatattcaagcactctactca

SEQ ID NO: 109057 - DNA, 274 bp, Glycine max
cttcgtttctcgttcggttcatcagcgtgtgtctcagccatggcgtttccctacatggaagccgttgtcggatttatgatattaatgtacatttttgaaacttacttggatgtgcgacaacatagggccctcaaacttcctactcttccaaagactttagaaggtgttatcagccaagagaaatttgagaaatctagagcctatagtcttgataaaagccacttccattttgttcacgagtttgtgacaatagtgacagactctacaattttgt

SEQ ID NO: 109058 - DNA, 277 bp, Glycine max
ccattctctctgtgtatttccctacctctcccttcaagatgcagatcttcgtcaagaccctcaccggcaagaccatcacccttgaggtggaaagctctgacaccatcgacaacgtcaaggccaagatccaggacaaggaaggaatccccccggaccagcaacgtctcattttcgccggaaagcaacttgaggacggccgtacccttgctgactacaacattcagaaggagagtactcttcacctcgtcctccgtctccgtggtggcatgcagatctt

SEQ ID NO: 109059 - DNA, 282 bp, Glycine max
  unsure (1)..(282): unsure at all n locations
aaagagagaagcggtgatgtcttcaattagattcctatggatcctgatagtgactttgacggcatcatgcgcgttaaaccaaccgtagaagctatcggcgtacgatgttctgatggagtacggggtcccggtgggtgcttcttcccaagggagccatagggtattcgctcaacagagacagcggcgagttcgcagtgtatttccacggagcgtgcagcgtcgacatagagtcctacacgctcaagtacaaatccaccatcacgggtgttatnctccaaggca

SEQ ID NO: 109060 - DNA, 279 bp, Glycine max
ctagaaacagtgtgatgaaaatgaaggtccttgttttcttcgtagctacaattttggtagcatggcaatgccatgcgtacgatatgttccctctccgaatgaacactggctatggtgcccgtactccggaggtgaaatgcgcaagttggaggcttgctgtggaagcacacaacatctttggctttgagaccattcctgaagagtgcgttgaagcaacaaaggaatacatccatggcgaacaatatagatcagactccaaaacagttaaccaacaagctt

SEQ ID NO: 109061 - DNA, 280 bp, Glycine max
ggcggcgtcgcggaggctccgggacctgcagtccgaggccgggaacaagatctgcgttgactgctcccagaagaacccgcagtgggcctccgtctcctacggcgtcttcatgtgcctcgaatgctccggcaagcaccgtggcctcggcgtccacatctccttcgtccgatcggtcaccatggactcctggtccgacatccagatcaagaaaatggaagccggcggcaacgacaagctcaacgcattcctcgcacagtactccatccccaaagaaaccgac

SEQ ID NO: 109062 - DNA, 278 bp, Glycine max
ccgaaaactgaagtctaagattacaaccaataattggacagaatatttatgtcattttctagagatgatcaatattcctgaactacggcaacataaaacaactataaaacggggacattatggccttgtagatgccagtgctaaattaaaaatcttaggcgaattggtcaatcgagcccttgaaactgcaatattcagggaaaagttagatgagattattgaacagcggcaggcacttggggccactagaagggaagaagcattggaaaatggtagga

SEQ ID NO: 109063 - DNA, 270 bp, Glycine max
ccagcattagcgatgtgctatgcacagctacagctgaggcacttgccatgggcaaatttgtagtttgtgctgatcatccatcaaatgagttcttcaggtcatttcccaactgtttgacttacaggacatccgaagactttgtgacaaaagtaaaagaagctttagaaaatgagccttatcctctaacacctgagcaaagatatcaactttcttgggaggctgctactcaaagatttatggcatattcggagcttgacggaatcctgaaca

SEQ ID NO: 109064 - DNA, 277 bp, Glycine max
caccatcaaccactggagtgtggggcaaaggcagcttctttgcttgggaaggatcatgctaaaacgcagcaaaatactgttcatggatgaggcaacagcatccgttgattcacaaactgatgctgtaatacaaaagatcatccgtgaggacttcgcagatcgtacaattataagcattgctcacagaataccaacagttatggactgtgacagagttttagtcattgatgcaggctatgcaaaggaatatgacaaaccatcacggttgctagaaagg

SEQ ID NO: 109065 - DNA, 277 bp, Glycine max
ataaccgaggtcgacgcttcgcgagtgcgcatcctaagacccacgtcttttttgttgtcgtggcctcaacgcaacatcattattactgtcactataaaaaccctacttggctcttttcttcacttgttcactttcttccaacctctaacctacctctttttcttctctctcaacaacttcaccttcttcctcctcgatcatgtctcacttcaagggcaagtaccatgatgagcttatcgccaatgctgcgtacattggcactcctggacagggtatt

SEQ ID NO: 109066 - DNA, 180 bp, Glycine max
atgagcagtttcagaacatacttaaaatgggcaccatcagccaggtcttttctatgctacctggatttagtgctgaattaatgccaaaaggtcgtgaaaaggaaagccaggcaaaaattaaacgttacatgacaatgatggattcgatgacaaacgaagagttggatagttaaaacccaa

SEQ ID NO: 109067 - DNA, 279 bp, Glycine max
ataaggaagacattcttggatggggtgtacccaacaagattgacatgattgctctttcatttgttcgtaaaggctcggatcttgttaatgtccgcaaggttctggggccacatgcaaagaatattcagttgatgtcaaaggttgagaatcaggagggagtcctgaattttgacgaaatcctgcgggagactgatgcattcatggtggcacgtggtgatcttggaatggagatcccagtagaaaagattttcctggcacagaagatgatgatatacaagt

SEQ ID NO: 109068 - DNA, 276 bp, Glycine max
gtaaggaaaaggttcacatcagtattgtggttattggccatgttgactctgggaagtccactaccactggccacctgatctacaagcttggaggcattgacaagcgtgttattgagagatttgagaaggaagctgctgagatgaacaagaggtctttcaagtatgcctgggtgcttgataagcttaaggctgagcgtgaaagaggaatcacaattgatattgccttgtggaagtttgaaaccaccaagtactattgcacagtcattgatgcccctg

SEQ ID NO: 109069 - DNA, 279 bp, Glycine max
caaatcttagccgccattgatttttcctcttccatttctcttactttctcagcctttttcgattacccatttggttatttcgccctaatggctcttgctccatccaaagtttccaccttttctggtttttctcccaaacccagtgttgggggtgctcagaaaaacccaacttgctctgtttctctgagctttttgaatgagaaacttggaagcagaaaccttagggtttgtgcctcaacggtgcctctcactggggtgatttttgaaccgtttgaggag

SEQ ID NO: 109070 - DNA, 275 bp, Glycine max
gtttgatagagctaatggaattgctaattggactttttgatttattctttgctttgcagattattacaggtgcagtcttggctgtgaactttgggcacggcaaagaaattgggaaaggagtgagtgcctttctggttgttgtgatcttcttgttcgttttggcatatgggagatcttggggtccccttgggtggttggttcccagtgagctcttcccattagagataagatcatctgcacagagtattgtggtctgtgtcaacatgatcttcact

SEQ ID NO: 109071 - DNA, 271 bp, Glycine max
ttagctttgattctacgttctctggtttgttctgtttcgcgtacaggaacttgaacaatgaagactgcaaagggcaagggagcatcgaggccctcagaagaatcactgaagcctgttgatgaccgaaaggttggaaagcggaaggcttctggtaagcctgagaaaagcagagcaccaaagaaggagaagaaggccaagaaagacaccagcaagcctaaaagaccaccgagtgatttcttcgtgttccttgaggagttcaggaagactttaa

SEQ ID NO: 109072 - DNA, 273 bp, Glycine max
aatttctcaagtgggtatgggtggtgttcttgaggccaccaaagaatctcaaagagtatggttcatgggccataatcactggctccactgatggaattggcaaggccatggcttttgaattggcatctaagggacttaaccttctcttggttggtagaaaccctctaaaacttgaggcaacatccaaggaaataagagatagacttgatgttgaggttaagtttgtggtcatagacatgcaaaaagttgagggagttgaaatagtaaaagaag

SEQ ID NO: 109073 - DNA, 264 bp, Glycine max
aaccccttctctctctcactgtccggttctccgatcgccgtctttgccctgcccattcctgatcaatatgtctctaagatatgatagccgtactacaatcttctcccctgaaggacgtctttaccaagtggaatatgctatggaggccattgggaatgctggtactgcaatagggatcttgtcaaaagatggggtagttctggttggtgagaagaaagtcacatccaagctgctgcaaacctcaacttccaccgagaaaatgta

SEQ ID NO: 109074 - DNA, 274 bp, Glycine max
gtctcttgggacctggtctcaacagacgaggaatctgcttgatgactgcttcagaggctaaaaaggcagattagtcgtctcttgggacgtggtctcaacaaggcagggaagttccctacacttgtgactcaccaagaatctctcgagtcaaaggttaatgagaccaaggccatggtcaagttccagcttaagaaggttctctgcatgggagtagctgtggggaatgttagcatggaggaaaagcaaatcttccaaaatgtacaactgagtgtta

SEQ ID NO: 109075 - DNA, 273 bp, Glycine max
gatagctagaagcaataagatgaaaatgaaagtgcttgttttgtttgttgctacagttttggtagcatatgaatgccatggctcagactaccagaagttccctctccaaatgaaaactgggtttggtgggcaatacagcaatgaggtggcatgtgccagttggaggcttggcgtggaagcaaacaacgtagtcaagtggcaaactgttcctgcagcttgcggagagtacatagctgactacgttctaggagaccaatatagatcagattccaa

SEQ ID NO: 109076 - DNA, 269 bp, Glycine max
ctcgagccgatcgagataactagaaacagtgtgatgaaaatgaaggtccttgttttcttcgttgctacaattttggtagcatggcaatgccatgcgtacgatatgttccctctccgaatgaacactggctatggtgcccgtactccggaggtgaaatgcgcaagttggaggcttgctgtggaagcacacaacatctttggctttgagaccattcctgaagagtgcgttgaagcaacaaaggaatacatccatggcgaacaatatagatc

SEQ ID NO: 109077 - DNA, 268 bp, Glycine max
ctctgctcgtgcctctagggttatcatatctccatttccatttcctctctctcagtttccaagaatcttaagctatgggaaagtcttacccaaccgtgagcgctgattaccagaaggccgttgagaaggcgaagaagaagctcagaggcttcatcgctgagaagagatgcgctcctctaatgctccgtttggcatggcactctgctggaacttacgacgtgagctcgaagaccggtggtcccttcggaaccataaagcacccctccga

SEQ ID NO: 109078 - DNA, 267 bp, Glycine max
gtgattgaggacactcacattatcaatggcaagcaggtggagattaagcggacgataccgaggggggctgctggctcgaactcaaaggacttccgaacgaagatgattttggtgggtggaattccttcgactgttactgaagatgaatttagggacttctttacacgctatggagaagtcaaagatcaccaaataatgcgggaccactctactaatcgttcacgtggatttggctttatcacttatgactctgaagaagctgttgat

SEQ ID NO: 109079 - DNA, 186 bp, Glycine max
ctcgtgcctctagggttatcatatctccatttccatttcctctctctcagtttccaagaatcttaagctatgggaaagtcttacccaaccgtgagcgctgattaccagaaggccgttgagagggcgaagaagaagctcagaggcttcatcgctgagaagaaatgcgctcctcaattgctccgtttg

SEQ ID NO: 109080 - DNA, 269 bp, Glycine max
gagagattggtaggcacagaacatgagggatatgatccttttcttggtggaattcaaaaatatggccactcccatgatgcccctagatgaagaaattctttctaaggttgcacaagacatggttgaagaatggtttgattgtgttgatgaggaggattcctttgaggaagtctctttaagtgcagcactcaatggtgttgagggtttggactatatggaaagaattcctcttgccacatctgagggttttcctcatgtgctttcacgca

SEQ ID NO: 109081 - DNA, 270 bp, Glycine max
gatcgaggaagaagaagaagatgtcgtacctgttgcctcacttgcactctgggtgggcggttgatgaagcaatcctggcagaagaggagcgtctggtcgtgatccgtttcgggcacgactgggacgaaacctgcatgcagatggacgaggtgttggcgtcggtggcggagacgataaagaactttgcggtgatatacctggttgacataacggaggtgccggatttcaacaccatgtacgagctatacgacccttccacggtgatgatct

SEQ ID NO: 109082 - DNA, 267 bp, Glycine max
ttgggcatcaaatatgaacaaattacatatacatcagattacttccctgagttgatggaaatggctgaaaaattaattcgcgagggtaaaacatatgttgatgacactccacgtgaacaaatgcaacaagagagaatggatggcatagaatctaaatgcagaaataatatagtagaggagaatctaaaactgtggaaggaaatgattgcaggaacagagaggggattgcagtgttgtgtccgtggcaagttggatatgcaggaccca

SEQ ID NO: 109083 - DNA, 267 bp, Glycine max
gtcctgcttattacaagcgtggggattatgttcctggattgaaggtagatggcatggatgctcttgctgtgaaacaagcttgtaaatttgcaaaggagtttgctttgaagaatggtcccattattcttgaaatggacacatacagataccatggccactccatgtctgatcctggcagcacataccgtacacgtgatgagatttctggtgtgagacaggagcgtgatccaattgagagagtaagaaagctactattgactcacgaga

SEQ ID NO: 109084 - DNA, 265 bp, Glycine max
gtggatattgttaaaggtgtagcaaatgctttatgctatatgcaccatgattgctcacctccaatcgttcatcgtgatatttcaagcaagaacgttcttttggattccgatgatgtagctcatgtcgcagacttcggaacagctaagtttcttaatccagattcatccaattggacctcatttgcaggaacctatggatacgctgctcctgaacttgcatacacaatggaagcaaatgagaaatgtgatgtgtatagtttggggt

SEQ ID NO: 109085 - DNA, 276 bp, Glycine max
caaggttgaacatcatcacattcgtacaacaaccaaccaaacccctccacaattctcagccaaccatgtcttccttcacaagcaagtaccaagatgaactcattgccaatgctgcttacattggcaccccagggaagggtctccttgctgctgatgaatcactggtacaattggcaagcgcttggccagcattaatgtcgagaatgttgaagcacataggcgtgctcttcgtgaactcctattcaccacacctggtgcttttgagtgcctcagtgg

SEQ ID NO: 109086 - DNA, 208 bp, Glycine max
cgtggctcaatccgaaggacatggagaatcaccatagatcatccagttaaactctggttggacgatcctaacggtcctatatactaacagagaaggtatcacttcttctactcataacacccgaacggtgcagtttggggtgacatagtttggggacacgcatgtctaagggacatgatccactagcttcaccttccactagcaatgg

SEQ ID NO: 109087 - DNA, 269 bp, Glycine max
ggctcgaatacaaaacactcataacacaaagcacaagcaaaatcaacttgagttaaaaaatggcagcagcttacttccatggctctctcatccccatcacttggctggcaaagccgtgaagctgggcacatcagccccagaagtgggaagggtgagcatgaggaagcacgtcaccaagcaggtctcctacaggaagcccatggtacggcccagaccgagtcaagtacttgggcccattctctggcgagcccccgtcctacctaaccggt

SEQ ID NO: 109088 - DNA, 261 bp, Glycine max
gttctctcacacactcattcggtgctccgaattcagattctagggttagggttcccaatttctccaccgatcagaaaatgagttcaactggtggttctaccaagggcggaaggggcaagcccaaagcctccaaatccgtttcaagatcgcagaaagctggtctccaattccccgttggaagaatcgctcgattccttaaggctgggcaatacgccgagcgtgttggtgctggtgctcctgtgtacctctctgcagtgctcg

SEQ ID NO: 109089 - DNA, 263 bp, Glycine max
cagggtgttggaaggatcagcacgacactgagatcagcaatggcaagcgcaagtgttggtaaagaactgacgctgtattcgtattggaggagctcttgttcccaccgagtccgaatcgctctcaacctcaaaggagcttaaatacgaatacaagcccgtcaatctgctcaagggagaacaatctcgccctgagtttctcaagctcaatcctgttggttgtgtccccgttctagtggatgaccacgttgttctctatgactctt

SEQ ID NO: 109090 - DNA, 263 bp, Glycine max
gagaattcgactcgagagagaatggctcacaagggtttaaccttttggctgtgtaatatgcgtttcagcactgtcactgagtccttctgttgcgagggaagggcaaaataatggccttgttatgaacttctaacaggcatcatgccctcaggctgaagacatcatcacagaacaagtcaagcttctctacaagcgccacaagaacactgctttctcctggctcaggaacatcttccatgactgtgctgttcagagttgtgatg

SEQ ID NO: 109091 - DNA, 230 bp, Glycine max
cgagtcaaccctaatttcggaaagatcgcgatgctgtctcaagggtcgcgagagcttcgtctacatcgcctaactcgctgagcaggccgcgcgttacgacgaaatggtggaatcaatgaagaacgttgcgaatctcgacgttgaactgacggtggaggagcggactttgctttctgttgggtacaagcatgtgattggtgctcgcagagcgtcctggaggatcctgtctt

SEQ ID NO: 109092 - DNA, 118 bp, Glycine max
ctgccaatagtcatatgatgttcaaagttagcctgcatgtgtaagtatgaactaattcagactgtgaaactgcgaatggctcaattaatcagttatagtttgtatgatggtatctact

SEQ ID NO: 109093 - DNA, 95 bp, Glycine max
agataactagaaacagtgtgatgagatgacggccttgttttcttcgttgctacaattttggtagactggcaatgccatagcgtaacgatatgttc

SEQ ID NO: 109094 - DNA, 253 bp, Glycine max
acaaggtcattacaccgaaggacaagctcgtcactccggtctcgatgatcgatccaaagaggctgaaaaatgcgattgcctgcaaggttttcaagtttgccactctcttggaggaggcacgggttctggcatgggaacactgttgatcatcgagaattcgggaggaatacccagacagaatgatgctcactttctctgttttcccatctccaaaagtttctgacacagttgtggagccatacaatgccacttt

SEQ ID NO: 109095 - DNA, 191 bp, Glycine max
gtcgttgacgaaggcgattcggtgcgaacctgaactacgatctctcttatcttctctcactcttgtccatagcttacgacaatgtcttcttctaagagcgtttcgatgacgggtgagaaaatacgatgggttaaatcagattggaaaaaagatagagaagtggcaaaggagtgagaccacaactctggtca

SEQ ID NO: 109096 - DNA, 113 bp, Glycine max
caacaattggtattgctgttgatcatcgccgcaagaaccgttatttggaaagtctgcaagctaatgtgcagaggctgaaaacatacaaggccaaattggttgtgttcccaaga

SEQ ID NO: 109097 - DNA, 232 bp, Glycine max
ctctctctatctctcacacacactttctctctctctctctctcacccagatcttgtagcaatggcgagcgctcccactccacgcgaagagttcgtgtacatggcgaactggcggacaggccgagcgctacgaggagatggtggagttcatggagaaggtctccgcctccgccgagagcgaggagctcaccgtggaggagcgtaacctcctctccgtcgcatacaagaacgtg

SEQ ID NO: 109098 - DNA, 143 bp, Glycine max
ccctcgctctatttctcagtctctgtgtttgcggctgaggattccgaacgagtgaccttcttcgtttctcgcaaagtttaagtactcatgggtaaggaaaaggttcacatcaacattgtcgtcattggacatgtcgactctgg

SEQ ID NO: 109099 - DNA, 233 bp, Glycine max
gtggatattgttaaaggtgtagcaaatgctttatgctatatgcaccatgattgctcacctccaatcgttcatcgtgatatttcaagcaagaacgttcttttggattccgatgatgtagctcatgtcgcagacttcggaacagctaagtttcttaatccagattcatccaattggacctcatttgcaggaacctatggatacgctgctcctgaacttgcatacacaatggaagc

SEQ ID NO: 109100 - DNA, 233 bp, Glycine max; identical to SEQ ID NO: 109099

SEQ ID NO: 109101 - DNA, 229 bp, Glycine max
gatggccttgccttcttcattgcaccatttgacactaaaatccctccaaactctggtgggagcaaccttggactcttcccatcagacaatgttgttgctgtcgagtttgacacctaccctaatcgtgataagggggatccagattatagacacattggtatcgatgtcaactctattgtctccaaggaatgtgctaggtgggagtggcaaaatggcaaaatagccactg

SEQ ID NO: 109102 - DNA, 230 bp, Glycine max
aagaaagtagcaaagatgacaggtgggatgtttggaaggaaggggcaaaagataaaggggacagtggtgttgatgccaaagaatgtgttggacttcaacgccataacctccgtcggaaaaggcagtgctaaggacaccgccaccgatttcttgggcaaaggcttggacgcattaggtcatgcagttgatgctctcactgccttcgctggccatagcatctccttgcagct

SEQ ID NO: 109103 - DNA, 195 bp, Glycine max
gttgaaactcctaaaggttccatgttggatcttaaaatttctcaatctaaaattgcacttcccaagaacacagttggaggaaccattctgcgtagtgatctattggcaaattttttgacagagggcaattttagagcaagtgttgatttgcagcgcactcatcgtattagaggaatgataaaggtggctacaaca

SEQ ID NO: 109104 - DNA, 133 bp, Glycine max
caacgatcgtgagactggaagatccaggggttttggatttgtgaccttcgcctcggagcagtccatgaaagacgccatcgaagggatgaacggccaaaaccttgacggccgtaacatcactgttaacgaagct

SEQ ID NO: 109105 - DNA, 78 bp, Glycine max
aaacaaacccactaagatggcttcctttgtatccttcctagtgctgcttcttgcagcccttatcctcatgcctcaagg

SEQ ID NO: 109106 - DNA, 164 bp, Glycine max
gactaaacacgagaaaaaccttgctttgacagaagaagaaaagatggaagtgattagaaatagaggcattcctgctgatgttcttgcaaagcgagctcattaatttgaaaaacatgttgctcatgaaagcctcaaggatcaaattcctgctgttgacaagttgt

SEQ ID NO: 109107 - DNA, 222 bp, Glycine max
gggaattatttgccatagatcctgcggattacatgcttgctatttgtggaagtgacacacttagggagatgtcttccccgggcaaaagtggaagcatcttttatctcactcaagacgaccgcttcataattaagactgtcaagaagtctgaagtcaaggtgctcataaggatgcttccaagttactaccaacatgtttgtcaatacaagacctccttggtga

SEQ ID NO: 109108 - DNA, 206 bp, Glycine max
ctctcaccaaagccttcctagaacgaaaaaaaaaagaagagcaattttccctcaccaaagaagaagaagcaaacaatggccgatcaacttaccgatgcacagatctccgagttcaaggaagccttcagcttgttcgacaaggacggcgatggttgcatcacaaccaaggagcttggaactgttatgcgtccattggggcaaaaccc

SEQ ID NO: 109109 - DNA, 228 bp, Glycine max
gcccgcaaatccttggtcaatgcagacggtattatagagaaaacattcttgtggggtaggtactctttggaaatgtctgctgttatttacaaggactgggttttcactgatcaagcattgcctaatgatcttgtcaagagaggagttgcggttaaggatccatctgctccccatggagttcggcttttgattgaggactatccttatgcttctgatgggctagagata

SEQ ID NO: 109110 - DNA, 230 bp, Glycine max
ctcgagccgtgctgacaagcagtgaggaaggcactggagaagggacaggtgcacgtacaacacatgtgcagcaacgcattggccatgacgaagaacatgaccgacagtgacatagctaactacgaatacaatatgagagttgaaaataatggacaaaatggtaatagcaataggaagttgttggtggagaatgatgttgagtggccggagtggatttcggcggcggatag

SEQ ID NO: 109111 - DNA, 231 bp, Glycine max
gtgaatgattcgtgctaccatcaactcgtcagccactggctaaacactcatgcggttgttgagccattcgtcatagcaacaaacaggcatctgagcgtggttcaccctatttacaaacttttgtttcctcactatcgtgacaccatgaacattaattcacttgcccgcaaatccttggtcaatgacgcggtattaatggagaaaacattcttgtggggtaggtactctttg

SEQ ID NO: 109112 - DNA, 204 bp, Glycine max
ctcgagcgctcgagccgattcggctcgagggttctttggctgagtacactgctgcagaagagaggacattggctcacaagccacagaatctgcgctttgctgaggctgctagccttcctttaacacttgagactgttaatgaaggccttgaacgaaccgggttttctgctgggaaatctatccttgtgcttggaggtgctggtg

SEQ ID NO: 109113 - DNA, 217 bp, Glycine max
gtcggcttcactgataccgagcgtctcatcggtgatgcggctaagaaccaagtcgccatgaaccccatcaacaccgtcttcgatgccaagaggttgattggtcgtagattcagtgactcctctgttcagagtgatatcaaattgtggccttttaaggtcattgctggtgctgctgacaagccaatgatcgtggttaactacaagggtgaagagaagc

SEQ ID NO: 109114 - DNA, 232 bp, Glycine max
cgagataactagaaacagtgtgatgaaaatgaaggtccttgttttcttcgttgctacaattttggtagcatggcaatgccatgcgtacgatatgttccctctccgaatgaacactggctatggtgcccgtactccggaggtgaaatgcgcaagttggaggcttgctgtgacagcacacaacatctttggctttgagaccattcctgaagagtgcgttgaagcaacaaaggaa

SEQ ID NO: 109115 - DNA, 230 bp, Glycine max
cttcgctttagcaaattccaattcccaatccaaaaccctaatgtcgttcaaagaaccaattgtgatggcaccaaaggcagagaagaagccagcggagaagaagcccgcggaggagaagaagtcgacggtgggagacaaggctccggcggagaagaagccgaagcgcggaaagaagcttcctaaggagggaggagccggcggagaaggggggaagaagaagaagaggaaca

SEQ ID NO: 109116 - DNA, 227 bp, Glycine max
tcaaattagttcattctctttgcgcagttccctaccgctcctttcaagatgcagatcttcgtcaagaccctcaccggaaagaccatcacccttgaggtggaaagctctgacaccatcgacaacgtcaaggccaagatccaggacaaggaaggaattcccccggatcagcaacgtctcatcttcgccggaaagcagctcgaggacggccgtaccctcgccgactacaa

SEQ ID NO: 109117 - DNA, 228 bp, Glycine max
cattctcatggctgctctagctctagcactgcttcttctggctttcactggcacttcaagtgctacatggtgcttttgcaaggatggaagcgacgcgatcctgcagaaaaccttggactatgcttgtggagctggtgctgactgtaatcctctccaccaaaacgggccttatttccagcccaacaccgttagggcccactgtaactacgccgtgaacagctacttcca

SEQ ID NO: 109118 - DNA, 224 bp, Glycine max
  unsure (1)..(224): unsure at all n locations
cttagccgcaatgagctatctggagacatccctaatgagataactggcatgaggatattgaattacttgaatctttctaagaatcatttagtgggtagcattccctcttcgatatcatctatgcaaagcttgacttctgttgatttttcatacaacatcctattcggnnnggtgcctggtaccggtcaattcagntacttcaactanagctcnttcttgggaaa

SEQ ID NO: 109119 - DNA, 184 bp, Glycine max
gcgaagtctacgtgccttcgagcgagggagttgaagcttacatttggttactggcaaaggcttatgttgttgtgaatgattcgtgctaccatcaactcgtcagccactggctaaacactcatgcggttgttgagccattcgtcatagcaacaaacaggcatttgagcgtggttcacctatttac

SEQ ID NO: 109120 - DNA, 83 bp, Glycine max
atcgagataactagaaacagtgtgatgaaaatgaaggtccttgttttcttcgttgctacaattttggtagcatggcaatgcca

SEQ ID NO: 109121 - DNA, 226 bp, Glycine max
cactcagattcagcaattttctattttcttctctcatgcctagctttgataattcaacaatatttttcaaccatgcaacaggttatgcagaatcctaattttatgaccatggctgagcgcctgggtaatgcattgatgcaggatccatctatgtctgccatgcttgaaagtttttctaatccatcaaataaagaccagcttgaagaaagaatgacacgcatcaagg

SEQ ID NO: 109122 - DNA, 226 bp, Glycine max
cgggaacggcttaggtttcactggttcggatttgcacggtaagaacttcccaagagtgagtttcgctgctaccactagtgctaaagttcccaactttagaagcatagtagtacccaagtgtagtgtctcggcttccaggccaagctcgcagccaaggttcattcagcacaaaaaagaggccttttggttctataggtttctctcaattgtgtatgaccatgtcatt

SEQ ID NO: 109123 - DNA, 228 bp, Glycine max
gaggcctacaacaagctaatagttgaacttgagagaagtgttcctacattggttggcattgaatgtcccaaggatgagaaacttcctcgtcgcaaaatttttgacaaacctaagacgcgctgcttcactattctccctatggagtttaatcttgtggttcgtcagaagtttttaaattttgtgaggttcattatgaagaaaagggacaagcttagttgtcaagttgga

SEQ ID NO: 109124 - DNA, 224 bp, Glycine max
gaagagtaccgagcttttgatcaggaagctccccttccagaggctggttcgtgaaattgctcaggacttcaagactgatctgcgtttccagagccatgctgtgcttgaattgaaaaaagctgctgaggcataccttgttggactctttgaggatactaatctgtgtgccattcacgctaagcgtgtaactattatgcccaaagatatccagctggcaagaaggt

SEQ ID NO: 109125 - DNA, 225 bp, Glycine max
gtcaaaactatgatttacccagagccagggttcgaactacatcgcaggcaaggagacacccaaactgctcaaatgtacacagatgttggagtttactatgcaccaggtcctgtttttaggggtgaggtatttgatggggcagaagcagtgcgtaaaatggagaactggttgattgaaaatcatggttttcagccacagtatgctgtgtctgagctgtctgagaaa

SEQ ID NO: 109126 - DNA, 211 bp, Glycine max
ctactattcaaaccccggcggcaaagcacttgttgcctgagctagaaatctaactgttacatccttgtcctactttttctgatcgaccagaaaagatacgacacggccaaagcttgttcctcagcaagcattgttcggctgaagagcctgaatagaagaactgtcaatgttattgcatccagactgtacttttattactcatatagctatg

SEQ ID NO: 109127 - DNA, 222 bp, Glycine max
ctctgcacccaccattactcagcactgccactcttcaatcacactaatggctgtcaccttctcagatcctcacaccgaagagggcatcaaatccctcgatcaattcctttctgggaaaacctatatctctggggatcaattgacaaaggatgatatcaaagtgtatgcagctgttgtggaaaagccaggagactcttttcctaatgctgctaagtggtacga

SEQ ID NO: 109128 - DNA, 215 bp, Glycine max
  unsure (1)..(215): unsure at all n locations
tctgtttccaagtttttgagttatggcatcgaaacgcatcgtgaaggagctcaaggatttgcagaaggacnctcctacatcctgcagcgcaggtcccgtggcggaggatatgtttcactggcaggcaacaatcatgggacctcctgatagcccatatacaggtggcgtattcctagtttcaattcattttcctcctgattatccattaaacccac

SEQ ID NO: 109129 - DNA, 221 bp, Glycine max
cgcaaaggcaatgttgttcatcaacttcactgccgaaggtgctgaagctatcaaatcaaaataccgtgaagctgctgagcaatataaacaacagggtgtcagctttttggtgggagatgttgagtctagtcaaggtgctttccagtattttggactgaaagaagagcaagtacctctaattatcattcaacataatgatgggaaaaagttttttaaaccca

SEQ ID NO: 109130 - DNA, 220 bp, Glycine max
ggaacatgggctgaacacatggaacacttggagggttgagagtgtcctaaagctacaagccaaggaccaagccaggatgcagtacctttctagcttggtggctaggaggtccattgtcccaattgcctcagggaggcaaatcacacaaagccctacttacatagtgaaggccaagattggtaccccagctcagaccctcctcttggccatggacactagc

SEQ ID NO: 109131 - DNA, 223 bp, Glycine max
attgaatcacttggcatcgcttctcctctctcccaagaaagaatcatcaatggcgattgaacacgaagacgatctcaaagacgagaagaaccctcgacctctcgacgaggatgacatcgccctcctcaagacctacggtttgggaccttactccacaagcataaaaaaggcggagaaggaaatcaaagatatggccaagaaagtgaatgacttatgtggtata

SEQ ID NO: 109132 - DNA, 214 bp, Glycine max
caagattatattcttgtcaggaagaacactggacaaacaggccgtaacagaagcaaacttaaagaaggctggctaccacacatgggaaaaattaattctcaaggatccacaagatccttccactccaaatgcagtttcatacaaaacagcagcgagagacatactgatggcgcagggatacaccattgttgggatcattggagaccaatggagc

SEQ ID NO: 109133 - DNA, 220 bp, Glycine max
agagaagtgagatacactaagttatcctcataaatacactctaattaggtggcaagataagtgtctaaccttagtaacattgccacatattgtgttcattttggaattgtgccactaaaattctattcaattcatctatggctgcctcttcttatgctatgcaatcaatcctggcaaaccctttgatccgcatttccagcgggtctagggtgaaccaatt

SEQ ID NO: 109134 - DNA, 209 bp, Glycine max
acttcaagtgtgcttgaggcccaaagtagaaagcccaacagatatgaagtttcccaatacagatatcgcaatgtgccaataaagcgcagagcatgggttgaaggtcagatgtctttcgatcagtctgtagtagcaattatgtctaaatgcaaagccagcatgagaatgggaaacactgatgctcaaattttgatggttccagggcgcag

SEQ ID NO: 109135 - DNA, 159 bp, Glycine max
gccgcaccttaaaaccggaaacaaaagcaatcgttacttggtttcaagaatttctcaatttcttcctatttctttgtgtacgatttcttaagggaaagaaatctactctctgtgctggccacagacttcgtgaatcattttcttttccacacaacatac

SEQ ID NO: 109136 - DNA, 179 bp, Glycine max
tgtttaatttcaagttcaagctggtgaaatcttggatgagtgctcccactctcctatctggtagtggacttcgtgggtagacttttctatttctctcctttctttcactctcttcttctcattgatccgcattgccgttcaaagtggtcttatttgaaaaacacttgggcgttggtgca

SEQ ID NO: 109137 - DNA, 273 bp, Glycine max
atcaaggttgttgacctgcttgcaccatatcaaagaggaggaaagattgggttgtttggtggtgctggtgtaggaaaaactgtgcttattatggaacttattaacaatgttgcaaaagctcatggtggtttctctgtgtttgctggtgttggagagcgaacccgagagggtaatgacttgtacagagaaatgattgagagtggtgtcattaagcttggtgataagcagagtgaaagcaaatgtgctcttgtgtatggtcaaatgaatgagccc

SEQ ID NO: 109138 - DNA, 202 bp, Glycine max
caaagggataatccaaattggactacggattcaaaggcattggaagctttcaaaaagtttggaaacaaactggcagaaattgagggaaaaatcacacagaggaacaatgatccaagtctgaaaagccgacatgggccagttcagcttccatacacattgctccatcgttcaagtgaggaagggatgagtttcaaaggaattc

SEQ ID NO: 109139 - DNA, 170 bp, Glycine max
ctctctccctctctgttcgcactctgtctttcccctgtttccgcgtcactgagtcatcgcgattcgcaactcgctcaccggccaattcctccgccgcagctccgtcgccggagcaaggctcatgtcttcttcgtcctcatggttccggagcatcgagcccgctcccaagg

SEQ ID NO: 109140 - DNA, 270 bp, Glycine max
gtgagttctgtttatttgaaattaacaagtagcaaagatgtttggaatcatcggaggaaaccagggtcacaagataaaggggtacttggtgattatgcgaaagaatgtgttggatatcaacagcattaccagtgttaacggtgtcatcggaaccggcattaacatcattggaggagtcgtcgacaccgttactgctttggcgtcccacatctccatccagctcattagtgccaccaaggctgatggccatgggaaaggaaaagttggaaa

SEQ ID NO: 109141 - DNA, 270 bp, Glycine max
ggggtcagtggaggctgctgagaggaacaagctggtgtttatggagggtggagtgtacggatttgggttggaggatttgttgagggcttcggcggaggtattgggaaaagggagcatggggacttcttacaaggcgattctggaggacgggaccacggtggttgtgaagaggttgaaggacgtggcggctgcgaagagagagttcgaggcgcgaatggaggttgttgggaacgttaagcacgagaatgtggttcctctcagagcgtttta

SEQ ID NO: 109142 - DNA, 272 bp, Glycine max
agaaaatgaaaatgacttagaagtgacagaagaagctgagcctgttctccggaagcctcctgaaccaccagtggttacaaaagaagctgaaaggcaactttctaagaaggaattaaagaaaaaggggcttgaagaacttgaagctgttttggctgagctaggatacacaccgaaggaacccactggccaagaagatgattccaatggtgctgagaagaaagaagaggatcctaatggtgctgtggaaaagaaggagaatgctaccggggaaa

SEQ ID NO: 109143 - DNA, 274 bp, Glycine max
ctgggaatgcagcagtcaaaaggagtgattgggcctcattggtacaagtgtttttaacaaacagcaacagtacagagcattttgatgcatgtaagtggacaaaatcagaaccacattcctgggaattgatcttcccaatagaggtatgtggtcccaataatggttttgaaatgtggagttctgagtgggcaaatcaaacttcatggcatttgagtttccttattgacaatcccaaacaatctacagtttttgatattctcttgggaatctctca

SEQ ID NO: 109144 - DNA, 276 bp, Glycine max
ccaaaactcataatctgcggtggcagcgcgtaccctcgcgattgggactacaaacgtttcagggaagtcgctgataagtgcggacattgcttctctgcgacatggcgcacactagcggccttgtggccgcgcaggaagtgaacagccccttcgagtattgcgacattgtgaccaccacgactcacaagagcttgcggggcccacgtgcggggatgatcttttaccggaagggccccaagccgccgaagaaggggcagccggagaacgcggtttatg

SEQ ID NO: 109145 - DNA, 112 bp, Glycine max
cacgtgtgaagcattttcaacatacccccggacatacgatttacgtcatgcatggactgtcttctctgacatagaagataaaggttgcagtaaagaggatctattaatcgag

SEQ ID NO: 109146 - DNA, 178 bp, Glycine max
ctcgagccggtgatcctgaaggtcctctgatgctctatgtctccaagatgattccagcatctgataaggggagattttttgcctttggccgtgtattctctggcagggtttcaactggtttgaaggtgaggattatgggacctaattatgtccctggggagacaaaggatttgtatgt

SEQ ID NO: 109147 - DNA, 271 bp, Glycine max
atcaaacttcatggcatttgagtttccttattgacaatcccaaacaatctacagtttttgatattctcttgggaatctctcaagattttgaaattgctggtaatactcttatgccagctttttctgttccacaggctactgccagatcttctgaaaatgcggaatcctctgcatgatctggaatttgtgttttctttcgcttgttcgtttgtttaattcaataaaggaaattaggcatgaccctcttgttgagtatgctctgcctatttga

SEQ ID NO: 109148 - DNA, 269 bp, Glycine max
ctttccccacaagctggtgcagtttggagaaattcaggaaaaagttgtattgaaattttcacaagaggaatttcttacagcttggtcaactcaggtgcgtcctgcaacaactctgttggctgatgggtgcccatatttgtatgctatggtgcatgatagttcagtgtctacaataccaggtgattttgtcattggtgtcaagttgacaaccataaacaatatgtgtgcatatgggctcaatcctggtatttcaggttctcgtcttttgg

SEQ ID NO: 109149 - DNA, 273 bp, Glycine max
attctctctgtgtatttccctacctctcccttcaagatgcagatcttcgtcaagaccctcaccggcaagaccatcacccttgaggtggaaagctctgacaccatcgacaacgtcaaggccaagatccaggacaaggaaggaatccccccggaccagcaacgtctcattttcgccggaaagcaacttgaggacggccgtacccttgctgactacaacattcagaaggagagtactcttcacctcgtcctccgtctccgtggtggcatgcagatc

SEQ ID NO: 109150 - DNA, 120 bp, Glycine max
ggcttgtggcaagtctcctcctcctggttacacctgctccctctaaaccagtgaaaggattgaggaaaatatggtcaaaatcgacatgagaggatgtcgagccacactatctctcttctg

SEQ ID NO: 109151 - DNA, 270 bp, Glycine max
agggtttctctcgctaaccaagaaggaactagggttttacagaatacaagctctctctctctctcgtcggttttcgtcaatcaaatccaatccaatatcaaatatgagtcgtcatcccgaggttaagtgggctcagaggcttgacaaggtctatatcacggtgcaattggctgattcaaaaaatgcaaaagtggatcttacgccagatggtatttttaccttctccggtagtgctggtgctgaagaccatcagtatgagctaaaactgga

SEQ ID NO: 109152 - DNA, 216 bp, Glycine max
cggatcttcggattcttaatttttcttacaacaaattttctgggaatatccgcaactcgatttcttccctggcgccgaaactgacgtacttggagcttgggcacaactcaatttccgggaaaatccctgattttctgggaaaattcaaggcgcttgacacgcttgacctgtcattgaacaagttttccggaaggtccctgcgagtttcaagaacct

SEQ ID NO: 109153 - DNA, 265 bp, Glycine max
tcagctttcgccatccccggtcatcgttaccgaaagcttctcgtcggtagcatcggcttggcggtctcaatagcactgtatgcgtcccctttggttgcaatgaagaaagtgatacaaaccaagagtgtggaattcatgccattgcctttatctttgagctccttgttggccagtttgctgtggatgacttatggactcctcattggcgatattttcgttgcggggccaaatgtggttggaactccattgggaatactccagatcg

SEQ ID NO: 109154 - DNA, 265 bp, Glycine max
caaagggataatccaaattggactacggattcaaaggcattggaagctttcaaaaagtttggaaacaaactggcagaaattgagggaaaaatcacacagaggaacaatgatccaagtctgaaaagccgacatgggccagttcagcttccatacacattgctccatcgttcaagtgaggaagggatgagtttcaaaggaattcccaacagtatctccatctaaaatgtgtgtgtggtttgcttatctattgtgcttttgaataaaa

SEQ ID NO: 109155 - DNA, 267 bp, Glycine max
  unsure (1)..(267): unsure at all n locations
gtgagttgcaggcagtgtcatctctcctttgacgacaagatgagcatcccaattccccatcggcagttattcatagacggagactggaaagtccccgtcctcaagaatcggattcccatcatcaacccttccacgcaacacatgatacaagatatcccagcagctactaaggaagacgttgatctcgctgtcgctgccgccaaagctgcactctcccgcaacaagggcgccgttgggcnccagcttccggctccgttcgggctcgct

SEQ ID NO: 109156 - DNA, 272 bp, Glycine max
atcgagataactagaaacagtgtgatgaaaatgaaggtccttgttttcttcgttgctacaattttggtagcatggcaatgccatgcgtacgatatgttccctctccgaatgaacactggctatggtgcccgtactccggaggtgaaatgcgcaagttggaggcttgctgtggaagcacacaacatctttggctttgagaccattcctgaagagtgcgttgaagcaacaaaggaatacatccatggcgaacaatatagatcagactcccaaac

SEQ ID NO: 109157 - DNA, 153 bp, Glycine max
cttatctcccaagtaaggtctcagagatagtggcaatttggagaaaagacctcaataaggtcaatccaaaagctgctgaatcattggctaatcctgaagaatatccaaatttgtttgaagattggcaagttgcactagctgtcgaatctaaag

SEQ ID NO: 109158 - DNA, 270 bp, Glycine max
cagagataaagccggaagacagccaaaaactaccaattgtcctccatttccacggcggcgggttttgcataagtgaaccggactggttcatgtactaccaagtctacacccggttcgcccggtccactcggtccatcgtggtttccccgttcctccgccgtgccccagagcaccgcctccccgccgccatcgatgacggctttgacaccctcctctggctccaaaccgtggcccggtccggttcactcgagccgtggctcgagcaacacg

SEQ ID NO: 109159 - DNA, 266 bp, Glycine max
acctacctctttttcttctctctcaacaacttcaccttcttcctcctcgatcatgtctcacttcaagggcaagtaccatgatgagcttatcgccaatgctgcgtacattggcactcctggaaagggtattcttgctgctgatgagtcaacagggacaattggcaagcgtttggccagcatcagtgtagagaacattgaatccaacaggcgagctcttagggagctgcttttcactgctcctggtgttcttcaatatctcagtggtg

SEQ ID NO: 109160 - DNA, 196 bp, Glycine max
ctcgagccgtgaaattttgataaaccgcgatcacaggttgccgcaccttaaaaccggaaacaaaagcaatcgttacttggtttcaagaatttctcaatttcttcctatttctttgtgtacgatttcttaagggaaagaaaatcactctctgtgctggccacagacttcgtgaatcattttcttttccacacaacat

SEQ ID NO: 109161 - DNA, 263 bp, Glycine max
caggcagctgcgcggatacaatctgcttttcgttcacattcttttagaaaacgaagagcaagagaagtagctgctagtgcaggtggcattggtaccatttcagagatttctgctatgtcaaaacttgcctttcggaactcacgtgaatataattcagctgcttcagctgctttatcgattcagaagagatatcgaggttggaaaggtcgcaaagatttcttagcgttgcgcaaaaaagtagtgaagatcacaggctcatgtga

SEQ ID NO: 109162 - DNA, 195 bp, Glycine max
taagatttgaaattttgataaaccgcgatcacaggttgccgcaccttaaaaccggatacaaaagcaatcgttacttggtttcaagaatttctcaatttcttcctatttctttgtgtacgatttcttaagggaaagaaaatcactctctgtgctggccacagacttcgtgaattagtttcttttccacacagcata

SEQ ID NO: 109163 - DNA, 265 bp, Glycine max
caaaggttgctgtaggagataagattgcagtagtgctaagtgctaacacctgcagtgaacaatggcctctgcatcagcatctctgctcaagtcttcagttgttcttgacaagtctgagtgggtgaagggacaaacccttcgccaaccttctgcatcagttgtgagatgcaaccccaccaccccatcaggcctcaccatcagagctggttcctatgctgatgagctcgttaagaccgcgaaaacagtggcttcaccatggaggggt

SEQ ID NO: 109164 - DNA, 266 bp, Glycine max
gaattttcaggtcacgctcatctcgcgtaacccgaacgaccgcatcggtgtttactatgatcgcctcgaaaccttcgtgacctaccggagccagcaggtcacgtaccgaaccgccatccctccgacatatcaaggccataaagagatcaatgtttggtctccgtttgtttatggcaccaacatccccgtcgcgccgttcaatttcctcggcctcagccaggaccagagtaacggtaacgtcctcgtcaccatccgagccgagggta

SEQ ID NO: 109165 - DNA, 264 bp, Glycine max
ggcgtctccggtgagggaaaagtagtagaagagaagatgtcgaccgtaccaggacagctcatctgggagatcgtgaagaagaacaactcctttttggtgaaagagttcggaaggggcactcagagcgtgcagttcagcagagagcccaacaatctctacaacctcaacactttcaagtactccggtttggcgaaccagaaaactgtcactgttcaacctgctggtaaagaccagtccgtgttgctcgcaacaaccaagacaaag

SEQ ID NO: 109166 - DNA, 261 bp, Glycine max
tgccgttggtggaggaactggttctggacttggttcccttctcttggagcgtctctccgttgattatggcaagatatcaaagcttggtttcacagtctacccctctcctcaggtgtccacctctgttgttgagccatacaacagtgtcttctccacccattctctcttggagcacaccgatgttgctgtcctcttggacaatgaagccatttatgacatctgcagacgctctctcgacattgagcgtcccacctacaccaa

SEQ ID NO: 109167 - DNA, 266 bp, Glycine max
acaatgatggctggtgttagtggcagtagcactactcccttattgtgctctttgttctttatttcttccttactttttgcttcctgcacccatgcctcctcccaggcacctcctccaattgtggatggactttcatgggatttctataggacgagctgtcccatgcttgaagggatagtgagcaagcatctccagaaggtgttcaagaaggacaatggtcaagctcctgccttactcaggatcttcttccatgactgctttgttca

SEQ ID NO: 109168 - DNA, 266 bp, Glycine max
gttgagcaagggtttctctgtctgcttcttcactttctctcgtttcaatcgaaaccaaaacaaaaacatgggcagaaaattcttcgtcggtggcaactggaaatgcaatgggaccactgaggaggtaaagaagattgttactactttgaatgaggctaaagtccctggagaagatgtcgtagaagttgttgtgagccctccttttgtgttccttcctgttgtagaaagtttgctgcgccctgatttccatgtttcggcacaaaact

SEQ ID NO: 109169 - DNA, 271 bp, Glycine max
agatgatcaagatattcgggaggtaacctttgagagtttgcggaagtccattggtgttgttccacaagatactgtacttttcaatgatacaatatttcataacattcactatggtcggctttctgcaacggaagaggaggtctatgaagctgctcagcaagcagcaattcataacactatcatgaagtttcccgataaatattcaactgttgtgggagagcgagggctaaagttaagtggtggtgagaagcaacgtgttgccctggctcgt

SEQ ID NO: 109170 - DNA, 185 bp, Glycine max
gtgagctataagctagtttatcgtgaggagaatatgaagttgtttgttttctttgttgctgcagtagttttggtagcatggccatgccatggcgcaggctaccaaaggttccctctccgaatgaaaactggctatggtgagcgttcttcggaggtaaaatgcgcaagttttaggcttgctgtgga

SEQ ID NO: 109171 - DNA, 264 bp, Glycine max
ataaaataaaaccgccacaaatttctccatagttatgggcacttccattctcgacgccctgaacgttcgcgtggaaggttccggcgacaagtaccttgtcctggcccacggcttcggcacggaccaatccgcgtggcagcgcgtgctcccttacttcacccgcaactacagcgtcattctctacgacctcgtctgcgccggcagcgtcaaccccgaccacttcgactaccgccgttataccaccctcgacgcctacgtcgacga

SEQ ID NO: 109172 - DNA, 263 bp, Glycine max
cgcaaaaatggcacctgcaacactgtctctgtctctcctcctcctgttctcactcagcatcgccgtaaccgttagatcgagcgactacgactacgattgtgtgtacactgcatacgttagaaccggttcggtgttgaagggcggaacggactctaagatcgggctgaagctgtacgacaagtacggctactacatctacattaaaaacctcgaagcatggggcggcttgatgggcaagggctacgactacttcgagcgcggca

SEQ ID NO: 109173 - DNA, 264 bp, Glycine max
ctctctaataacatttctaatctcattctccttctgttcaaacactctctctcatggcatcagataagaagattaggatcggcatcaacgggtttggaaggattggccgtttggtggccagggttgcccttcaaaggaatgatgttgaacttgttgctgtcaacgatcctttcatcaccactgattacatgacatacatgttcaagtacgacaccgttcatggccagtggaagcattttgatgtgaaggtgaaggactctaaga

SEQ ID NO: 109174 - DNA, 261 bp, Glycine max
agggaatatgcagccttcccagctccttggctccgtactgcaaagttctggcctaccacaggacgtgttgataatgtgtacggtgaccgcaacctcatttgcacccttctcccagcatcacaggctgttgaagaacaagcagctgccacagcataatgtgttcaaatgacaactattttcatttcccgttgtacataaactcttattcctattcatacagttcttgcacttgttgaatattgcttcatcatatgtgacaat

SEQ ID NO: 109175 - DNA, 261 bp, Glycine max
cattttagcatcaaggttgaatctcagagaaaaacaaacatcgacaagcatgtctggaagaggaaagggaggcaagggtctcggaaagggaggagccaaacgacaccgtaaggttctgagggataacattcagggaatcaccaagcccgcgattcgccgtctggccagacgtggtggcgtcaagcgtatcagtggtcttatctatgaagaaactcgcggtgttctcaagatctttctagagaacgtcattcgcgacgctgt

SEQ ID NO: 109176 - DNA, 259 bp, Glycine max
agcagatccacctgttatctacagggacttgaaatctgcgaacatcttgttagataatgaattcaacccaaaactgtcagattttgggcttgctaaacttggacctgttggagacaatacccatgtttcaaccagagtgatgggaacatatggttactgtgcaccagagtatgccatgagcggcaaattaactcttaaatctgatatatatagctttggtgtgcttttgttggagttgatcactggacgtagggcaata

SEQ ID NO: 109177 - DNA, 264 bp, Glycine max
aattcttccccctccacccacccagcatatctctctattcctatttattagcacccctcacattaccttgtgtcaccaactactttgactcctttaccataccattacaataattatcaaacctaaccagtaaaaatggtgaccgtggaggaaatccgcaacgctcagcgttcccatggacccgccaccatcttggccttcggcaccgccacgccgtccaactgcgtctcccaagccgattaccctgactactacttccgcatt

SEQ ID NO: 109178 - DNA, 264 bp, Glycine max
acaaagcaaaaaaaaatctcaaaataaaacaaccaaaccacacacctcacaccctcttcaacatcctcagcaagaacaagaagaagaagaagaaacaatgtcttgctccaatctgacaatgttggtgtcctcataaccttccctttccgacccctcgaacctctccttccgctctgtcctgaacccttttcagctccctacacaaaacccagcttcgagcaccccttcacgctcctcaagcacccaaattcagtgtggtctgag

SEQ ID NO: 109179 - DNA, 263 bp, Glycine max
gcatatgcacatgagctgccacgatatggtcttgaagtagggcttacaaattatgctgcagcttattgcactggtctcctgttggcccgaagagtcctcaaaacacttgaaatggatgaggagtacgaaggaaatgttgaggctactggagaggactattcagtggaacctgctgagagcaggaggccattccgtgctctccttgatgttggtcttattaggactacaactggcaaccgtgtctttggtgcccttaagggagc

SEQ ID NO: 109180 - DNA, 246 bp, Glycine max
gagagagagagggagtcagagaaaccctaggtaagaagaaaaaatgccggctggtcatggtttgagatcccgcaccagagattccttctctcgtcctttcaggaagctgggaaccatcgccctcaccacatacctgcgaacctaccacgtcggcgactatgttgacgtcaaggttaacggtgccgttcacaagggaatgccccacaaattctaccatggccgcaccggacgcgtctggaatgtcac

SEQ ID NO: 109181 - DNA, 261 bp, Glycine max
ctctcctcttcctctctactaatttcagctatggccgacgaagctgtggttgttccagatcccacccagatcgatgtcaagctctttaaccgctggagcttcgacgatattgagattactgacatttctctggctgattatatcggagtggcgacatccaagcacgccacgtatgtgcctcacaccgcggcaggtactcggtgaagcggttcaggaaggcgcaatgccccattgttgagaggctgaccaactctctcatga

SEQ ID NO: 109182 - DNA, 229 bp, Glycine max
atcaagttactatctataattaattaaattcctcgtggaatattgaagaagccatgtctacagctgggcaggtcatcaagtgcagagctgcggtggcatgggaagcagggaagccactgtcaatagaaaccatagaagtgtgcccaccccagaaaggtgaagtgcgtttgaggatcctctgcattccctttgccgtagtaatgtttattggtgggatgctaaggaccag

SEQ ID NO: 109183 - DNA, 250 bp, Glycine max
tctcgagccgaatcggctcgagaatgaacactggctatggtgagcgtactccggaggtgaaatgcgcaagttggaggattgctgtggaagcacacaacatctttggctttgagaccattcctgaagagtgcgttgaagcaacaaaggaatacatccatggcgaacaatatagatcagactccaaacagttaaccaacaagcttacttttatgccagagacctcgaagtccatcccaaggacacatttgtg

SEQ ID NO: 109184 - DNA, 164 bp, Glycine max
aagagaatggctcccaagggtttaatctttttggctgtgttatgcttctcagcactgtcactgagtcgttgtcttgcggaggataatggacttgttatgaacttctacaaggaatcatgccctcaggctgaagacatcatcacagaacaagtcaagcttctcta

SEQ ID NO: 109185 - DNA, 167 bp, Glycine max
agctcagcacgcagaggagcagaagcctaagccttcaacatggcgagagggttgaagaaacacttgaagaggctcaatgttccaaaatactggatgcttgacaagcttggtggggcctttgtatgtacagtactcacagttgttgatgatattatttgtcattttta

SEQ ID NO: 109186 - DNA, 268 bp, Glycine max
gggagtcagagaaaccctaggtaagaagaaaagatgccggctggtcatggtttgagatcccgcaccagagattccttctctcgtcctttcaggaagaagggaaccatcgccctcaccacatacctgagaacctaccacgtcggcgactatgttgacgtcaaggttaacggtgccgttcacaagggaatgcccccaaattctaccatggccgcaccggacgcgtctggaatgtcaccaaacgtgctgttggcgtcgaagtcaacaagca

SEQ ID NO: 109187 - DNA, 251 bp, Glycine max
aagggacccacactctccaaaacgtttatgactcacttgatgttcatctggggcagacttactctgtgttggttactgctgatcaaccaccccaagactacctcattgtcgtcacgacacgattcacctcccaagtgttgaatgctacctccatttttcgttacagtaactctggtggaggtgtactggccttttcccttgggggccaactattcaagttgattggtctttaaaccaagctcgctctctta

SEQ ID NO: 109188 - DNA, 251 bp, Glycine max
cctggccgcacaggccggcgtccgctacgccatgcagaatccccaatcctacgtcaccgccaacatcgctggcttcgtcaaccttctcgaggctgccaaatccgccaacccccaacccgccattgtctgggcttcgtccagctccgtctacggcctcaacacccaaaaccctttctccgagtccaccgcaccgaccagctcgccagcctctacgccgccaccaagaaggccggcgaggaaatcgcccacac

SEQ ID NO: 109189 - DNA, 251 bp, Glycine max
ctccccttgctgcggttgctccaccacctaatcacttcccctgtaaatcacgtttagttcgcacaaggttttaaaaaatggctgatgctgaggacattcaacctcttgttgttgataatggaactggaatggtcaaggctggttttgcaggtgatgacgctcctagggccgtgttccccagattattgggcgaccacgccataccggtgtaatggttgggatgggtcagaaggatgcttacgtgggtgatg

SEQ ID NO: 109190 - DNA, 254 bp, Glycine max
gccaagagggcttttgttcattggtatgttggtgagggtatggaagagggagagttctctgaggctcgtgaagatcttgctgccctggagaaagattatgaggaagtcggtgcagaggcaactgaagaagatggtgatgaaggagaaagatattgattagaagtttgcactgttatgttactttatctgtgttgttttttttcctcgtgctctgtgtatggtagttcttttcgtggaacttgccttgttccggt

SEQ ID NO: 109191 - DNA, 260 bp, Glycine max
gcttctgcaagctggttgctgtctaaccactggattgcttgctcaattgcatcctcaatcttcttcttgtcagccgggtcaagtttctcaccaatcttgtcatccttcacggtgttcctcatgttgtatgctgctcctccttctggtggaagtggtgctggccccaagattgaggaagtggactaaagtagttgctttcctccagatacctgttttaaaaacttattttactttatgcttttttaattggattttaatcg

SEQ ID NO: 109192 - DNA, 260 bp, Glycine max
gcaaaaatggcacctgcaacactgtctctgtctctcctcctcctgttctcactcagcatcgccgtaatcgttagatcgagctactacgactacgattgtgtgtacactgcatacgttagaaccggttcggtgttgaagggcggaacggactctaagatcgggctgaagctgtacgacaagtacggctactacatctacattacaaacctcgaagcatggggcggcttgatgggcaagggctacgactacttcgagcgcgg

SEQ ID NO: 109193 - DNA, 96 bp, Glycine max
ataggcatgaccctcttgttgagtatgctctgcctatttgaaaatttccacacctcttttaattgtcgtaatgatgtgtgaagtgtgtgttatttt

SEQ ID NO: 109194 - DNA, 262 bp, Glycine max
tctgcactcacttctagggttttctctgcgctataagcaatcatggcggatgaaacaccaaatgagatgaaggaggaggttccagaaattgttccttttgatcctaccaagaagaagaagaagaagaaaattacaattgtagatcctgctgatgaacctgtggagaaattggctgagaagacagaaaactctcagtttccgagggggttgagactgcatttactggtttgaaaaagaagaagaagaagcctgttgaaatggg

SEQ ID NO: 109195 - DNA, 257 bp, Glycine max
gtgccctcatcgctgatcttgttgaccttgaagcctctgtgtgcctttgcatccaactcagggtcctcggaatagtaaaccttgaccttaatttgcagttaatattaaacgcctgtggaccaagctacccgtcaaacgccacttgcccccgaacctaagaacagaatatgtatggcactaatcacatattacttcgtatcatggtgtttgtttgtctgtgtttaaagttaaggacgttatacccttcgtgcctgcta

SEQ ID NO: 109196 - DNA, 248 bp, Glycine max
gagataactagaaacagtgtgatgaaaatgaaggtccttgttttcttcgttgctacaattttggtagcatggcaatgccatgcggtacgatatgttccctctccgaatgaacactggctatggtgcccgtactccggaggtgaaatgcgcaagttggaggcttgctgtggaagcacacaacatctttggctttgagaccattcctgaagagtgcgttgaagcaacaaaggaatacgtccatggcgaac

SEQ ID NO: 109197 - DNA, 230 bp, Glycine max
cttttcctttcttagagatgctggtaatgggggagtttttgtatggtaatgttgcttcagcattcacaacttcaagtgtgcttgaggcccaaagtagaaagcccaacagatatgaagtttcccaatacagatatcgcaatgtgccaataaagcgcagagcatgggttgaaggtcagatgtctttcgatcagtctgtagtagcaattatgtctaaatgaaaagccaccatg

SEQ ID NO: 109198 - DNA, 251 bp, Glycine max
cagggtgttggaaggatcagcacgacactgagcatcagcaatggcaagcgcaagtgttggtaaagaactgacgctgtattcgtattggaggagctcttgttcccaccgagtccgaatcgctctcaacctcaaagggcttaaatacgaatacaagcccgtcaatctgctcaagggagaacatctcgccctgagtttctccagctcaatcctgttggttgtgtccccgttctagtggatgaccacgttgttct

SEQ ID NO: 109199 - DNA, 263 bp, Glycine max
ctcgcaagcaaaaagaaagaatcccaggcgaggagaaagatggaggggaaggagcaggatgtgtcgttgggagcgaacaagttccccgagagacagccgattgggagcgcggcgcagagccaagacgacggcaaggactaccaggagccggcgccggcgcccctggttgacccgacggagtttacgtctggtcgttttacagagcagggatagcagagtttgtggccacttttctgtttctctacatcaccgtcttaaccgtt

SEQ ID NO: 109200 - DNA, 264 bp, Glycine max
caagaatgagggagatattgcacgtgcaaggtgggcaatgcgggaaccaaatcggttccaagttctgggaagtgatatgcgacgaacacggcatcgaccccaccggaaagtacaccggcgacgaggcctccgatctccaactggagaggatcaacgtctactacaatgaggcctccggcggaaggtacgaccccgggacgtcctcatggatctggagcccggcaccatggacagcatcagatccggcccatacggcaagatctt

SEQ ID NO: 109201 - DNA, 248 bp, Glycine max
ctatactatgccattccgtggtctcagggaacactcggccttcttgttgctgctgagatcaggcttatacccgttaaggagtacatgaagctaacctataaacctgttgttggcaccctgcaagatcttgctcaggacaattgtgattcttttgctcccagagatggagaccaggataatgaggagaaggttccagactttgttgaaggaatgatttatacaccaacagaaggtgtgatgatgacagg

SEQ ID NO: 109202 - DNA, 247 bp, Glycine max
tagttacagagaagtgggttgatgggtgggatgatcctcgtttgatgacactagctggtttgcggcgtagaggcatgactccaactgcaatcaatgcttttgtacgaggaattggaataactagaagtgatggcactttgatttctgtggaacgccttgaatatcatgttagggaagattgaacaaaacagcttctcgtgcaatggttgtcctacatccactcaaggttgttattactaatcttgaa

SEQ ID NO: 109203 - DNA, 251 bp, Glycine max
cgtgttttcagctccggtaacctctccttctccgccgccgttgctatctccgccgtgaccttccatccctcaacgccccacagatcttcaatttgattgcttgggtcaacaatttctgtcattctcaatcatggcaactagacttcagtttgaaaataattgtgaacttggagtcttctctaaactcaccaatgcttactgtttggttgcgattggaggatctgaaagcttcgacagtgtatttgaagctg

SEQ ID NO: 109204 - DNA, 253 bp, Glycine max
agggtttctaattcttttcatcctcttcgcagagcctcagtagcttcgcattagcaatggcgagaatcaaggtgtacgagctgaggaacaagacaaaagcagagcttctgaaccaactgaaggatctcaaagcagaactcgctctcctccgcgtcgccaaggtcaccggcggagcccgaacaagctttccagaatcaaagtggttaggctttcgatagcgcaggtgctgacggtgatttcccagaagcaaaaa

SEQ ID NO: 109205 - DNA, 260 bp, Glycine max
gcaaaaatggcacctgcaacactgtctctgtctctcctcctcctgttctcactcagcatcgccgtaaccgttagatcgagcgactacgactacgattgtgtgtacactgcatacgttagaaccggttcggtgttgaagggcggaacggactctaagatcgggctgaagctgtacgacaagtacggctactacatctacattaaaaacctcgaagcatggggcggcttgatgggcaagggctacgactacttcgagcgcgg

SEQ ID NO: 109206 - DNA, 261 bp, Glycine max
tggagccttgccgatagagatcatgcatggcaagtttctgataccactgcagaatgtttgacgtgtcgtcgacttgtatcagtgctgccacaagacatcgtggaagtaaacatggaacttgaaattttacatgattcaatcaatgggatactgtcacttcagagtacaaatggaggtatgactgcgtgggagcccgcaggagcgtataaatggttggaactactcaatcctacggaatttattgctgacatacgtagttga

SEQ ID NO: 109207 - DNA, 266 bp, Glycine max
caacaatgtcgaagcgaggtcgcggaggatcggcagggaacaagttccgcatgtcactgggtctgccggtggcggcgacggtgaactgcgccgacaacaccggcgcgaagaatctctacatcatatcagtgaaggggatcaagggaaggctgaaccggttgccgtcagcttgcgtgggtgacatggttatggcaccgtcaagaagggaaagcctgatctccgtaaaaaggtgctccccgccgtcatcgtccgtcagcgcaagcgtg

SEQ ID NO: 109208 - DNA, 255 bp, Glycine max
cagattgagacaaagaatagatcctcaatacaatgaggttcaggctcagatggaaacaaatttgtttaaattgtctcttgatgatgttgaaactcctaaaggttccatgttggatcttaaaatttctcaatctaaaattgcacttcccaagaacacagttggaggaaccattctgcgtagtgatcattggcaaattttttgacagagggcaattttagagcaagtgttgatttgcagcgcactcatcgtattaaa

SEQ ID NO: 109209 - DNA, 245 bp, Glycine max
gatcgagataactagaaacagtgtgatgaaaatgaaggtccttgttttcttcgttgctacaattttggtagcatggcaatgccatgcgctacgatatgttccctctccgaatgaacactggctatggtgcccgtactccggaggtgaaatgcgcaagttggaggcttgctgtggaacacacaacatctttggctttgagaccattcctgaagagtgcgttgaagcaacaaaggaatacatccatg

SEQ ID NO: 109210 - DNA, 182 bp, Glycine max
caaacccgtgttctgatgcatggagtttggaatttctgaagcgtatcggatttcattgtgatatcatttgtgtcactggatggactgccatcccaatgcaggatgttcaggttacaattgattggtttatttcctctcaggaatgtgtctccagaatctattgtgtgttaaatcacaaaatc

SEQ ID NO: 109211 - DNA, 207 bp, Glycine max
tacaattgattggttcatttcctctcaggaatgtgttcccaggacctattgtgttttaaatccacaaaatccttttgtgttaaataggtggatgggaaaactgactttcccccagggcacttcccgaagtgttaagagaatgcctctttctatagggggaggagctggtgcaaagatgctattctcatgattatgccaaatgctgtt

SEQ ID NO: 109212 - DNA, 251 bp, Glycine max
ctcgcatctagttcctccgctcaacaactataataacatctttctctctccgaacagatcaaactatggccacctcaagcgccaaatcagtccatgatttcaccgttaaagatgccaagggaaatgatattaatcttggtgactacaaaggcaaggtccttatcattgtcaatgttgcccacaatgtggcttgactaattcaaattacactgagctcagtcagttgtatgagagatacaaacagataggtc

SEQ ID NO: 109213 - DNA, 250 bp, Glycine max
ctcgagccgctcttagaaagaaaaaaacttaaatcaaaatacttaatagcatggcgatacatttatacaaaacttctaccccaagcacacgcaatggagccgtagacagtcaagtaaaatccaatccacgaaatcatttgatctatggacagcatcgttgtggtaaaggccgtaatgccagaggaatcattaccgcaggcatagagggggaggtcataagcgtctataccgtaaaattgattttcgacgg

SEQ ID NO: 109214 - DNA, 252 bp, Glycine max
gcaaaaatggcacctgcaacactgtctctgtctctcctcctcctgttctcactcagcatcgccgtaaccgttagatcgagcgactacgactacgattgtgtgtacactgcatacgttagaaccggttcggtgttgaagggcggaacggactctaagatcgggctgaagctgtacgacaagtaggctactacatctacattaaaaacctcgaagcatggggcggcttgatgggcaagggctacgactacttcg

SEQ ID NO: 109215 - DNA, 257 bp, Glycine max
gttaggttctgcacgctctgcttccagcgagtgttctttcttcgtttcaacaccttaatttccatacaatatataatatataaaagaaatcgcacaagaaacctcactattcacatctgaatctgtaaacgagggtcaccccgacaagctgtgcgaccagatctctgatgcagtgctcgatacggccttgaacaggaccctgacagcaaggttgcctgtgcagacatgcaccaagaccaacatggtcatggtctttg

SEQ ID NO: 109216 - DNA, 168 bp, Glycine max
aagaaggcgtcttcataaacgcctttcttctccgtttccgttgcctcgttcgaattcgctttttgatctgcgaaaatgagagagtgcatctcgatccacattggtcaggatagaatacaggtcggaaatgcttgctgggagctctactgcctcgagcacggcatcggg

SEQ ID NO: 109217 - DNA, 256 bp, Glycine max
gttcaattgcagcaaaggataaaacaagaagccgaacagtttcggcagtggaaggcttcaagagagaaagagctgttgcaattaaagaaggagggaagaagaaatgagtatgaaagacacaagctgcaggctttaaatcagcggcagaaattggttcttcagagaaaaactgaagaagctgcaatggccaccaagaggttaaaggagttgttagaagcacgtaaaacttccagccgagaaactttagttacaatga

SEQ ID NO: 109218 - DNA, 250 bp, Glycine max
ggaagagagataccacttctcttgccaattcacagctgatctatttgccatgaaccacacagatttcattatcaccagtaccttccaggagattgctggaagcaaggacactgttggacagtacgaatctcacacagccttcacccttcctggactctaccgcgttgtgcatggtattgatgtctttgatccaaaattcaacattggctcccctggagctgatcataccatttacttcccccacactgaa

SEQ ID NO: 109219 - DNA, 245 bp, Glycine max
actccgatcaccccctcggatccggtatcggcttcaaagaaaccgactctcccaatttcaccggttctttttactccaagaccaaggcaatggtagaggatctgctgataaactatgataatgtgtgcacattgcgagtgaggatgcctatctcatccgatttattgaacccgcgaattttatcactaagatcactcgatatgagaaggttgtggatattccgaattcgatgactatattggatg

SEQ ID NO: 109220 - DNA, 247 bp, Glycine max
caccatcaaccactggagtgtggggcaaaggcagcttctttgcttgggaaggatcatgctaaaacgcagcaaaatactgttcatggatgaggcaacagcatccgttgattcacaaactgatgctgtaatacaaaagatcatccgtgaggacttcgcagatcgtacaattataagcatgctcacagaataccaacagttatggactgtgacagagttttagtcattgatgcaggctatgcaaaggaat

SEQ ID NO: 109221 - DNA, 161 bp, Glycine max
ttcccccagggcacttcccgaagtgttaagagaatgcctctttctatagggggaggagctggtgcaaagaatgctattctcatgaacatgccaaatgctgttctttcaatgtggagatattttgttggagatctcgtctttgaagtttctaagatgacttc

SEQ ID NO: 109222 - DNA, 240 bp, Glycine max
ggcggctttgtattgatcatctatatgggtcatctctacatcactgcaatggtggttgttatccaaatcttcatggcaagggagcttttcaatctactcaggagagctcatgaagataggcagctgccaggatttaggctattaaattggcattttttcttcactgcaatgttatttgtttatggacggattctgagtaaccgccggtttacacacatatcttcagacatggttttatat

SEQ ID NO: 109223 - DNA, 253 bp, Glycine max
ctcgagcgctcttagaaagacaaaaacttaaatcaaaatacttaatagcatggcgatacatttatacaaaacttctaccccaagcacacgcaatggagccgtagacagtcaagtaaaatccaatccacgagatcagttgatcagtagacagcatcgttgtggtaaaggccgtaatgccagaggaatcattaccgcagggcatagagggggatgtcataagcgtctataccgtaaaattgatattcgacggaat

SEQ ID NO: 109224 - DNA, 256 bp, Glycine max
gtgaaccctctctataaaacctcttccttctttcattcggtgtctattcccattttcttcctctaaaccctaaacatatctttctcttcttccttcgctcgttgttctccctcgcgtagatcgacaatggcggagacagagacgtttgctttccaggctgagatcaaccagctcctcagtctcatcatcaacaccttctactccaacaaggagataatccttcgtgaactcatcagcaacgcctccgatgctttgg

SEQ ID NO: 109225 - DNA, 256 bp, Glycine max
ctgaaaaaagttactggcatgtgtatgatcctgacaagtttcagatgtttgacaacagtgaaataggtctctattctaatcccactttggaagatatcccacattcagcttgggaccttttttgctgggacagtgagaaaactctgccaaataatttttctgcagaattgctctcttgcaaattcgatactgttactggccaatattatcctgagtgggctccaattaattgtcgagttcatcgacaaccaattca

SEQ ID NO: 109226 - DNA, 261 bp, Glycine max
gtgtcttatttttggttttgttggtgtcatgtgctagaggggaagacccttatagattctacacttggaatgttacatatggagacatttatccacttggtgttaaacaacaggggattttgataaactggcaattcccatggccacaaattgaagctgtgaccaatgacaacttgattatcaatgttacaacagcttggatgaacctttcctcttatcttggaatggagttctgcagaggagaaactcatggcaggatgg

SEQ ID NO: 109227 - DNA, 260 bp, Glycine max
aattcggatcgactattgatgacaagggagaaatcaataccgagcattatttgaccattcatagagaagctcctgctatttgattaagcaagaaaccgcacagcagattcttgttactggaatcaaggttgttgacctgcttgcaccatatcaaagaggaggaaagattgggttgtttggtggtgctggtgtaggaaaaatgtgcttattatggaacttttaacatgtagcaaaagctcatggtggtttctctgtgtttg

SEQ ID NO: 109228 - DNA, 248 bp, Glycine max
ctttctctctcccttagtcaaagggactcattgttcttctcccaggttatttagaaaagcaaaatggtgaagatttgctgcattggtgctggatatgtggggggtcctactatggcagtcattgcacttaagtgcccatccattgaagttgctgttgttgatatctctaaatcccgcattgcagcctggaacatgaccagcttcctatctatgaacctggccttgatggtgttgtgaagcaatgccgt

SEQ ID NO: 109229 - DNA, 249 bp, Glycine max
tactcgagcgaatcggctcaggctagagaggcagctcaatggacatcaatcaagtagacattctgttgcataatgactgtctttatctctcccaggagattcttgggtttgcatttgagtatcgaacagactttccaagttccatgaaggagcatgctgtgtttgttgatttagctccaagatttcagctgttggcagaagaaatattgcagagacaagttcaccttgttatttataatttgaaggagg

SEQ ID NO: 109230 - DNA, 246 bp, Glycine max
ctttgaaaattctgctgggccaagcaaacaccaagccgtggcactaaggagtggttctgatttctcagccttctataaatgcagcttcgttgcctaccaagatactctctatgtccactccctgcgccaattctaccgcgattgtgacgtttatggcacagtcgacttcatcttcggcaatgcagcaaagtgctccagaactgcaacttgtacgcacgcaagcccaatgaaaaccaaaggaacttg

SEQ ID NO: 109231 - DNA, 243 bp, Glycine max
cgagaatgtcgaaggaagtgagccagcagaggaaggactacgtagaccctccgccagcccccctcatcgacttggccgagattaagctctggtccttctacagagccctcatcgccgagtttatcgccacactcctcttcctctacgtcaccgtcgccaccgtcattggccacaaaaaacagaccggacatgtgacggcgttggccttctcggcatcgcatgggccttcggtggcatgatctt

SEQ ID NO: 109232 - DNA, 244 bp, Glycine max
tgaaaacgtcagttgcaattttgcggttgagttgaagtaaacactggaaaagctcacaacgacttcgttactaacgcccaacaatttggatttgttacatcacaagtagcttgttgtgggcaaggaccttacaatggtattgggctatgcacagcactctccaacctttgctccaacagagaccaatatgcattttgggatgcattccatccatctgaaaaggccaataggcttattgtggagg

SEQ ID NO: 109233 - DNA, 240 bp, Glycine max
gacctttaatgcccctgctatgtatgttgctattcaggctgttctttcactgtatgccagtggtcgtacaactggtattgtgttggattctggggatggtgtcagccacacagtccctatctatgagggttatgccctcccacatgcaatccttcgtcttgatttggctggtcgtgacctcacagattcttgatgaagattttgactgaacgtggatattcttttaccacctcagcagag

SEQ ID NO: 109234 - DNA, 254 bp, Glycine max
cgagagttgctttgactacagaaccatgcctgtctgttggagtgaattggatgatcgggccgagggctgccccctcttcccctcactctcctttccctaagatgaaccttgcttgagtcatcaaagcctttctgactcggcctggcccggtcgccctacgcgactggcgcttcaaaaggtagttgacttgcttactcgttagagtaggggtcgcgagagagcagagcgtaccgccctgccatagtcgcgagtct

SEQ ID NO: 109235 - DNA, 247 bp, Glycine max
atggaggagagtaatggacatcaatgatcgattcttgagaaaaattgctattggccagggacctgacgagaaaggaatggtgagagaaacaggctttgatatttcagttgctagtgagattatggctgttttggcactgacaacatccttagctgatatgcgagagaggcttgggaaaatggttattgggaatagcaagagtggtgaccctgtaactgctgatgatctaggtgttggaggtgcttta

SEQ ID NO: 109236 - DNA, 246 bp, Glycine max
acccctcttagtcccaattttctagggttttattcattttccgatggcttctgcagatgttgagtaccgttgctttgtcggtgggctcgcttgggccactgacgaccatgccctcgagagagccttctctcagtacggcgaaatcgttgaaacgaagattatcaacgatcgtgagactggcagatccagggttttggatttgtgaccttcgcctcggagcagtccatgaaagatgcgatcggagcg

SEQ ID NO: 109237 - DNA, 243 bp, Glycine max
gtgagttttgtttatttgaaattaacaagtagcaaagatgtttggaatcatcggaggaaacaagggtcacaagataaaggggaacttggtgattatgcgaaagaatgtgttggatatcaacagcattaccagtgttaagggtgtcatcggaaccggcattaacatcattggaggagtcgtcgacaccttactgctttggcgtcccacatctccatccagctcattagtgccaccaaggctgat

SEQ ID NO: 109238 - DNA, 244 bp, Glycine max
gcttgaaacagagcagagcgaccttgaagagctatggctgtcggaaagaataagaggatttccaagggaaagaagggtggcaagaagaaagccgctgatccctttgccaagaaagactggtacgatatcaaggccccttccctcttccaggtcaagaatattggcaaaaccctcgtctctcgtacccgggaaccaagattgcatccgaaggactcaaacatcgggtttttgaggtctcattggc

SEQ ID NO: 109239 - DNA, 245 bp, Glycine max
cgagctcgagccgttttcagcaacatttcctgttactgtaaaggatttcaaggataggtatattcgaaaaccttatgtcatcaaccttatggatgagctaactctgaaaggtattacacaattttatgcattcgtggaagagagacagaaagtccactgtctaaatactcttttttctaagctgcaaataaccagtctatcatcttctgcaattcagtaaatcgggttgaactccttgccaagaa

SEQ ID NO: 109240 - DNA, 208 bp, Glycine max
ttatttctgtctagctatcctgttcattggctgtctggtgatcaaccgtagggcttgcttctattggaccttgggttggtcaaggcactgctgcagggcaagctgtagaagggattgcacgacaaccggaggcagagggaaaaatacgaggtactttattgcttagtttggcttttatggaagctttaacaatttatggactggttgt

SEQ ID NO: 109241 - DNA, 248 bp, Glycine max
tcacagacaccgacacagatctgtcttccgaagcaggaactaaatatggctgacttgttggaatggtcaaagcaagataagaaacgaatgcttcatgtcgtctaccgtgttggtgaccttgatcgcaccatcaaattttacacagaatgtttaggaatgaagcttttgaggcaaagagatatcccagagggaaatatgctaatgcttttcttggatttggccctgaagaatcccattttgttgttgaa

SEQ ID NO: 109242 - DNA, 246 bp, Glycine max
gattcaacgactagtcactcctttgacactccaaaggaaacgagcaaggattgccgacaagaagaagagaattgctaaggcaaaatcagaagcagcagagtatcaaaaactcatcgcttccagattgaaggagcagagagatcgccggagtgagagcttggcgaacggagatccaaactctccagtgcgccaaaccaactgttacagcataggttgcttcctggtagagatatggtgaagtttaaa

SEQ ID NO: 109243 - DNA, 242 bp, Glycine max
ctttctctctgcttagggttttgatcgcatcggatcttcactctcttctccgatctcaaaatgcccgccgtttatggagctcgcttgaccaccttcgaagactccgagaaggagagtgatgacggttacgttcgcaaggtatcaggaccagtcgtcgttgcagatggcatggctggggctgctatgtatgaactcgtgcgtgttggtcatgataatctaattggtgaaattattcgtctcga

SEQ ID NO: 109244 - DNA, 194 bp, Glycine max
aagatttgaaattttgataaaccgcgatcacaggttgccgcaccttaaaaccggaaacaaaagcaatcgttacttggtttcaagaatttctcaatttcttcctatttctttgtgtactatttcttaagggaaagaaaatcactctctgtgctggccacagacttcgtgaatcattttcttttccacacaacata

SEQ ID NO: 109245 - DNA, 244 bp, Glycine max
tttttctgttccacagaaaaagctggcataagagtattaccagctttttctgttccacaggctactgccagatcttctactaatgcggaatcctctgcatgatctggaatttgtgttttctaccgcttgttcgtttgtttaattcaataaaggaaattaggcatgacccccttgttgagtatgctctgcctatttgaaaatttccacacctcttttaattgtcgtaatgatatgtgaagtgtgt

SEQ ID NO: 109246 - DNA, 241 bp, Glycine max
aacactcataacacaaagcacaaagcaaagctcatccttgagttaaaaaatggcagcagcttcttccatggctctctcatccccatccttggctggcaaggccgtgaagctgggcccatcagccccagaagtgggaagggtgagcatgaggaagaccgtcaccaagcaggtctcctcaggaagccatggtacggcccagaccgagtcaagtacttgggcccattctctggcgagcccccgt

SEQ ID NO: 109247 - DNA, 237 bp, Glycine max
agaggtttggcattacaagggttcacatggaagaggatgcagggaagctcctacatgcagagaatggaaattactcacaggttgatctaaatagggcaggggtacctttgcttgagatagtttctgagcctgacatgagaaatggtattgaagcagcagaatatgcggcagaattacagagttggtgcggtatttgggagtgagcaatggcaatatgcaagaaggttctcttcgttg

SEQ ID NO: 109248 - DNA, 236 bp, Glycine max
ctcgagccggcttctccaactagtcgaactcgaagttcgcgaccttcttacctcctacgaattccccggtgacgatacccccatcgtctccggctccgcactcttagccctagaagcccttatggcgaaccctgccatcaaacgcggcgacaacgagtgggtcgacaaaatctacaaactctggacgaagtcgacgactacattcacatcccccagcgccagaccgacctcccatt

SEQ ID NO: 109249 - DNA, 237 bp, Glycine max
caaaacactcataacacaaagcacaaagcaaagctcatccttgagttaaaaaatggcagcagcttcttccatggctctctcatccccatccttggctggcaaggccgtgaagctgggcccatcagccccagaagtgggaagggtgagcatgaggaagaccgtcaccaagcaggtctcctcaggagcccatggtacggcccagaccgagtcaagtacttgggcccattctctggcgag

SEQ ID NO: 109250 - DNA, 239 bp, Glycine max
gatcgagataactagaaacagtgtgatgaaaatgaaggtccttgttttcttcgttgctacaattttggtagcatggcaatgccatgcgtacgatatgttccctctccgaatgaacactggctatggtgcccgtactccggaggtgaaatgcgcaagttggaggcttgctgtggaagcacacacatctttggctttgagaccattcctgaagagtgcgttgaagcaacaaaggaatacat

SEQ ID NO: 109251 - DNA, 237 bp, Glycine max
cgcaggaagttcgccgagaagccgaagacgaaggagttcatcgcggcgatgaagcggtgggggctcgacccgaaggagaaggcgatgttcttgatgacggaggtgccggagaacgtgaggctatcgagcaggaacattgggaccttgaagatgcacacgccgaggacactgaatttgtatgatattcttgatgcggataagcttgtgctcacgcagggtgctgtggattacttgaat

SEQ ID NO: 109252 - DNA, 235 bp, Glycine max
aacaaacgcagaagccaccaccgcttgcagaggtgagagcgaatcgccgtcgacgaacaccacccaaacatgtcttctcttcgaaacgccattcctaggcgtgctcacaaagagcgttctcaaccgtcgtcgaggaaaaaattcggcctgttagaaaagcacaaagactatgtccagcgcgctaaagcattccacaagaaagaaggcactttgcggaaacttagggaaaaagctg

SEQ ID NO: 109253 - DNA, 234 bp, Glycine max
aagcacgtctacgagatggccggtatgaagggctactctggtcacttcgatgacgagaccatcgaggccatcaggaaccaccctgatgtcgactacatcgagcgcgactcagaggtccacactctcggccacgacgaaccggagatcgagaagaactccccatggggtcttgctcgttctcgcaccgcgactccctgagcttcggcacctggaacaagtacctctacgccgccg

SEQ ID NO: 109254 - DNA, 233 bp, Glycine max
tcctagtgtcttgactacaactgatgagagattggtaggcacagaacatgagggatatgatccttttcttggtggaattcaaaaatatgccactcccatgatgcccctagatgaagaaattctttctaaggttgcacaagacatggttgaggaatggtttgattgtgttgatgaggaggattcctttgaggaagtctctttaagtgcagcactcaatggtgttgagggtttgg

SEQ ID NO: 109255 - DNA, 238 bp, Glycine max
ggacaatcctgttcttgaaagatgatggtactttgaagccacttgctattgaattaagcaaaccacatccagatggagataatttgggtcctgagagtatagtggtgttgcctgcaactgaaggtgttgatagtacaatttggctattggccaaggctcatgttattgtgaatgactctggttatcatcagctcgtgagccattggttaaatactcatgcagtgatggaaccatttgc

SEQ ID NO: 109256 - DNA, 237 bp, Glycine max
cgtcgcagttgtaaccctaatcagaagaagcgcacttcaagcgagtgacagccaccagccatgggtcgtatgcacagccgcggtaagggtatatcctcttctgctttgccctacaaaaggacacctcctagctggctcaagatctcttcgcaagatgtcgaagaaaatatctgcaagtttgcgaagaaaggtctgaccccgtctcagattggtgtcattctcagagattctcacggt

SEQ ID NO: 109257 - DNA, 174 bp, Glycine max
ggaattctgctcgatgtcgacctggtggactcgactcgtttaaaaactactccgagggagagaatattccggtgaacgatttccggcgatatagccgcgactccgccgggcataaagatggttttctgagctacggcacgaacggcaacgtggtgcagcagagcttccatacct

SEQ ID NO: 109258 - DNA, 229 bp, Glycine max
gagcaattagcactgaaaaacagggctcccagatggcatgagcagcttcagtgctggtgcctaaacttcaagggtcgtgtttcagtggcttctgttaagaactttcaacttgtagctgttgttgatccatctcataatatttctgctgaggagcaagaaaaggtaatcttgcatttggaaagattggaaaagacatattcaccatggattactgttatccgctctctac

SEQ ID NO: 109259 - DNA, 236 bp, Glycine max
cgagctcgagccgctcgagccgcggcgaggtactgcagaagaaaaaaccgcaaaatccgatccaatttatcgtactcgattagttaacatgttggttaaccgtattctgaaacacggaaaaaaatcatagctcgatagataatttgataagccaatgacagaaacaaatccactatctgtttacgtcaagcaatacgtggagtaactcccgatatagcagtaaaagcaagacgcgt

SEQ ID NO: 109260 - DNA, 234 bp, Glycine max
ccacaaccgttacagcttggtttttctccctgtctcacccctctggcaagaactaagaaaaatctgccacggaaacttgttttcggcaaagacccttgacgcaagcacggaccttaggcgcatgaaaatgaaggagcttcttaccgatatccgccaaagaagcctcaacggcgaagtggtggacattggaagagcagccttcatggcatgcattaactttttatcgtacacgtt

SEQ ID NO: 109261 - DNA, 232 bp, Glycine max
ttatttttgacgcgtgaaataggcgccggcgttcatcgttgaaaagcgaaaatggatatacctcgtctgatacttggaacccaaggcctggaggtttccaagttgggatttggttgtgcggggcttagtggagtgtttgacggccctgttcctgacgaggttgtcatctctctaatcaagtatgcattcagtaatggaatcactttctttgatacttccgatttttacggtc

SEQ ID NO: 109262 - DNA, 232 bp, Glycine max
gcaatggcttctctggcaagcttagctgttgttcaaccatctactgtcaagggccttgctggaactaagctctctttcaagccctctcgccagagcttcagacccaagaatttcaggagtggtgccgttgtagcaaagtacggtgacaagagtgtgtactttgatttggaggatcaggcaacactactggtcagtgggacttgtacggctccgatgcaccttcaccctacaa

SEQ ID NO: 109263 - DNA, 229 bp, Glycine max
gactgatcgcattttctttgccaacaatacatatcttccaagcgagacaccagccccacttttgaagtacagcgaagaagaattgaagaatgtaagaggggatggaactggagagcgcaaggaatgggataggatctatgattatgatgtctacaatgacttgggcaacccggatagcggtgataaatatgcacgccccgttcttggtggttcagccttaccttaccct

SEQ ID NO: 109264 - DNA, 231 bp, Glycine max
cagcaatgtcattttcgttgttcgccacgccgcagcaacagcagcagcagtctccttttcagccacagcaaactagtttgttccttccgcagcagcagcagcatcaacaacaacagcaacaatttcaacaacagcaacaacagcagcagccgcaacatcagttgtttttgtttactaacgatagatctcccgctagttatagtaccaattgggcggatctacatcctgatt

SEQ ID NO: 109265 - DNA, 228 bp, Glycine max
cttatctcccaagtaaggtctcagagatagtggcaatttggagaaaagacctcaataaggtcaatccaaaagctgctgaatcattggctaatcctgaagaatatccaaatttgtttgaagattggcaagttgcactagctgtcgaatctaaagctgtggaaacaaggaatgtgtaccctcctgcggagcagtacgtcaaccatgctgacaaatcacacattacccttg

SEQ ID NO: 109266 - DNA, 225 bp, Glycine max
cccatttctctcttctgctcattcctttgactcctcattatcagggaaatggctctcactgggttactcttgttggcctttctcacgatgttctcctctgctcatgcctatggtggagggtggactaatgctcatgccacattctatggagggagtgatgcatctgggacaatgggtggggcatgtgggtatgggaacctctacagccaagggtatgtaacaaac

SEQ ID NO: 109267 - DNA, 226 bp, Glycine max
gagagagagagggagtcagagaaaccctaggtaagaagaaaagatgccggctggtcatggtttgagatcccgcaccagagattccttctctcgtcctttcaggaagaagggaaccatcgccctcaccacatacctgagaacctaccacgtcggcgactatgttgacgtcaggttaacggtgccgttcacaagggaatgccccacaaattctaccatggccgcaccg

SEQ ID NO: 109268 - DNA, 119 bp, Glycine max
gttgtgaatgcaggtggagaacggaaacgtctcctaaatatagcaatgcaactacgtaaatgctgcaatcacccatatctcttccagggtgctgaacctggccctccctttacaacagg

SEQ ID NO: 109269 - DNA, 133 bp, Glycine max
gaaagatttgttagagggaaatttttcctttgatattaaatctcgctctagattggaaaaagtttcctctacaaaagcacaatttgttagtggaaaaaccttcaaatatgatataattggggctggttcacat

SEQ ID NO: 109270 - DNA, 264 bp, Glycine max
tcgatacggaagcagatcgttttcgggtgaatggctattctgagatcgaacgagaaaaattgaatttaattagagcaatttatacgactttggaacaattagaaaattacaaaaacgaagccattcattttgaacaacaaagagtgattaatcaagtccgacaacgggttttacaacaagccttacagggagctctaggaactctaaagagttgcttgaacaacgagttacatttacgtactgtcagtgctaatattggcatgt

SEQ ID NO: 109271 - DNA, 249 bp, Glycine max
ctagatggcagtttgccaggagattttggctttgatcccctaggtcttggatctgatcctgagagcctgagatggaatgtccaagcagagcttgtgcactgcagatgggccatgttgggagctgctggcattttcatcccagaattcctcacaaagattggtatcctgaacaccccttcatgggacactgctggagagttggagtacttcacagacactaccacactcttcgtagttgagctctttttc

SEQ ID NO: 109272 - DNA, 269 bp, Glycine max
tcgggtccacggaattgactttaagagtggtcagaccaaaatgaaatcggtgttggtggatttcctagtaggggccggcatcaagccaacatctatagtgagttacaaccatttgggaaacaatgatggcatgaatctctcagcccctcaaaccttccgctcgaaggaaatttccaagagcaatgttgttgacgatatggtcaacagcaacgccatcctctatgagcctggtgaacatccggaccatgtggttgtcattaagtatgtac

SEQ ID NO: 109273 - DNA, 261 bp, Glycine max
agcggtgacatttgggctgtttttggctcgcaaggtgtctttgatccgagccatcatgtacatggtggctcagtgcttaggtgctatctgtggagttggtttggttaaggctttccaaaagtcttacttcaacaagtatggtggtggggctaattccctcgctgctgagtacagcacaggtactggattgggtgctgagattattggaacctttgttttggtctacactgtcttctctgccactgaccccaagaggaatgc

SEQ ID NO: 109274 - DNA, 261 bp, Glycine max
gattcccagaccttattttttctgtcatttgcttcaaatttcaggagattaattatggctcaacccacaacaagaataggccttgctggattggctgttatgggccaaaatctggcactcaatattgctgagaaaggctttcccatttctgtttacaaccgaaccacttccaaggttgatgagacagtagaacgagcaaaacaagaaggaaatcttccagtttatggctaccatgaccctgaagcttttgttcattccatt

SEQ ID NO: 109275 - DNA, 265 bp, Glycine max
gcgagcagcgtttgtttgttccttcctcagtcgttgtgacagtgtgtgtgagtgagtgagtgagagcgacgatgggcgcgagcagcgaccccacccaagacggttccgacgagcagcagaagcgttcggagatctacacctacgaggccccctggcacatctacgccatgaactggagcgtccgccgcgacaagaagtatcgcctcgccatcgcctccctcttagagcagtaccctaaccgcgtggagattgtccagctcgacga

SEQ ID NO: 109276 - DNA, 267 bp, Glycine max
atatattcatctttctcttttttagcttttcttttcctctaaaagtgagtccttccttcttcgatcacttgttcaattcacacatcatagcaatggcagcacgttcctacagccccatcatggttgccctctctttgcttcttttggtcacattctctaatgtagctgaggcttatacacgcagtggaacacttcgtccttcagattgtaaaccaaagtgtacttaccgttgctctgcaacttcacacaagaagccatgcatgtttt

SEQ ID NO: 109277 - DNA, 280 bp, Glycine max
attcggctcgagagcacttatattggacattgacccaacaacttgctcaccatacaatcaacggttgcaaccttaggccaggcgatctcctcggaactgggacagttagtggtcctgagccggagtcccgggcatgcttgctagaattaacgtggaatggacaaaacgcggtaccagtgaatgggttaaataagaaatttcttgaagatggagatgaagttatcttaactggatattgcaagggaaatggttacactattgggtttggtacctgctcggg

SEQ ID NO: 109278 - DNA, 187 bp, Glycine max
agcgacgctcaggaaaaactctaaactgtgaaaaaaccactgcgatcaatggcaacgatcaaggccgtgaaagctcgccagatcttcgacagccgtggaaatccaaccgtcgaagttgacgttattctcagcgatggaagcttccacagagccgccgtgcctagcggtggctcaacaggtgtttatg

SEQ ID NO: 109279 - DNA, 265 bp, Glycine max
ggtcaatgcagacggtattatagagaaaacattcttgtggggtaggtactctttggaaatgtctgctgttatttacaaggactgggttttcactgatcaagcattgcctaatgatcttgtcaagagaggagttgcggttaaggatccatctgctccccatggagttcggcttttgattgaggactatccttatgcttctgatgggctagagatatgggatgccatcaagtcctgggtgcatgaatatgtctcattctactacaag

SEQ ID NO: 109280 - DNA, 126 bp, Glycine max
gtgagggtcgtgcgattttcgctagtggaagtccatttgatcctgtagaatacaagggcaaagtgtactattctggccaggccaacaatgcatacatcttccccggctttggtcttgggttggtaa

SEQ ID NO: 109281 - DNA, 258 bp, Glycine max
aacaacacaaaattcattgcacagtgttattttcagtatcagcatcatggctccaattgcagtgggagatgtcattccagacggcattttggcttacttggatgaagaaaacaaaccccaaactgtctctattcactctctcgccgccggcaagaaagtcatcatctttggggttcccggtgccttcactcctacatgcagcttgaagcacgtgcctggcttcattgagagagcagaagagctgaaaagaaaaggtgt

SEQ ID NO: 109282 - DNA, 260 bp, Glycine max
caatgacggaactaatgcacaatccagaagccatgagaaaagcgaagaaggagatagcagaaacaataggagtaggaaaaccggtggaggaatccgacgtggcaaggctgccatacctgcaatcagtgataaaagaatctctgcgaatgcacccaccagcaccactgctactgccacgaagggccaaaacggacgtgcaagtctgcggctacacggtcccacaggggacacagatcctcatcaacgagtgggccatagga

SEQ ID NO: 109283 - DNA, 259 bp, Glycine max
acatttttgatcttccttcctctgaaacaagaacctaaatggagaattcgaccgaagaatcccatctccgatcggaaaactccgtcacttacgagtccccttaccctatctacggcatgtcattctccccctcccacccccaccgcctcgccctcggcagcttcatcgaagaatacaacaaccgcgtcgacatcctctctttccaccctgacacccttttggtaactccccacccttctctctccttcgaccaccctta

SEQ ID NO: 109284 - DNA, 262 bp, Glycine max
ttgaagttgaagtcttgcccttctctcttcaattccaaacacaagacatcatcatccatggctgcctccgtctccactgtcggagctgtcaacagagctcttttgaacctgaatgggtctggacctggggtttcagctcccagttcatccttctttgggagcagcttgaagaaggttattggctcaagggtccccaacacaaagatttcctctggaagcttcaagattgttgctgtagaagagaagaaagagattgaagaga

SEQ ID NO: 109285 - DNA, 196 bp, Glycine max
  unsure (1)..(196): unsure at all n locations
ctcgagccgaatcggctcgagggctaaccaaccctgacactcattcttctccgcttcctactcgatcatcgcttcagaatgccgccgaagttcgacccctcccagatcgtcgacgtcttcgtacgcggtcacggcggtgaggtcggcgcggcgagttccctcgccccgaagatcggtctcctcggtctcntcccca

SEQ ID NO: 109286 - DNA, 261 bp, Glycine max
agagtttgttgtgagctataagctagtttatcgtgaggagaatatgaagttgtttgttttctttgttgctgcagtagttttggtagcatggccatgccatggcgcaggctaccaaaggttccctctccgaatgaaaactggctatggtgagcgttcttcggaggtaaaatgcgcaagttttaggcttgctgtggaagcacacaacatccgactcgttaaaaccattcctgaagagtgcgttgaaccaacaaaggactacat

SEQ ID NO: 109287 - DNA, 258 bp, Glycine max
tttcaatttcaatcaacggttatacccttttctatttgagcatcatcatgtccaccgcagcgcacccaaggccaagaaaacggcgtcgtccaagaagcccctctcccatcctaccttcgccgcgatgatagcggaggcgatagcgagtctgaaggagagaaccggttcgagccaatacgcgataaccaaattcatcgaaggcaagcacaaggagttgcctccaacctacaagaagcttgttctcgttcatctcaagaa

SEQ ID NO: 109288 - DNA, 243 bp, Glycine max
tgccacagccgcaggagccgtagccttacactcctccctctgcaacatctctaacgacaaaccctcttctccactaagatcaccccccatccacgtctccccaaagcccaagagcctcttccaaaaccaccccttatacaccccaacccacacaaaactctcccttgaattcaaagagaaaatcctctgccttgaggtaatgggcgttgatgcaggcaaagcactgtctcaaaaccctgacct

SEQ ID NO: 109289 - DNA, 260 bp, Glycine max
  unsure (1)..(260): unsure at all n locations
cttctnggggaggccccgactatggcgtcctcagctgggataacaagcttactggtgctcaggttcttctcagtcgtttgaggttgttcctcagtcctggttatccctatgaagaaattttaagcacatttcacaatcagaccggcatagtcatgtgctcctacctcccaatgttcaccagctttaatagaacaaggggtggcttgattcaattgaaccatggcaggcctcagcctctccaatatgttgtcaatgcagct

SEQ ID NO: 109290 - DNA, 260 bp, Glycine max
ctcgagccgagatcactatcaccaatgacaagggtagactgtcaaaggaagatatcgagacgatggttcaagaggctgagaagtacaaatctgaggatgaagagcacaaaaagaaggttgaggccaagaatgctttggaaaactatgcatacaacatgaggaacactgtgaaggatgacaaaattggtgagaaacttgatcctactgacaagaagaagattgaggacgcaattgagcaagctatccagtggctagacagc

SEQ ID NO: 109291 - DNA, 229 bp, Glycine max
  unsure (1)..(229): unsure at all n locations
atggccacctccaacttctctattgttctctccgtctccctagccttctttttggtgctacttaccaaggcacactcgaccgataccgtttctttcaccttcaacaagttcaacccagtccaaccanacattatgctccaaaaagatgctagtatttcatcctctggggtgttacaactcaccaaagttggcagcaacggcgtgcccacctcgggatctctcggtcgtg

SEQ ID NO: 109292 - DNA, 260 bp, Glycine max
ctcggaggtaagatctgtgaaccagccttgaaccacacggcctcgccgattttcacaccattcttctcatggctggttcatagatcttctcggagggaagacttgactacttgggcaacccaaacctgatccatgctcaaagcatccttgccatctgggctgttcaggttgtgctcatgggttttgttgaaggttacagagttggtggaggaccccttggtgaaggacttgaccctatctaccctggtggtgcatttgac

SEQ ID NO: 109293 - DNA, 120 bp, Glycine max
ctggtttatggatgagtgctcttggggtagtcggtttggccctgaacctacgtgcctatgacttcgtttctcaagaaatccgcgcagcgaagatcctgaatttgagacttttcacacaac

SEQ ID NO: 109294 - DNA, 254 bp, Glycine max
ggacaaaggctcgtgaagttctgcaaagggaagatgacctgaatgaaattgttcagcttgtgggcaaggatgctttagctgaaggagataagatcaccttagaaactgcaaagcttttgagagaggattatcttgctcaaaatgcctttacaccatatgacaaattctgccccttctacaagtctgtttggatgatgcgcaacattatccatttctacaatttggcaaatcaggcagtagagaggggagctggt

SEQ ID NO: 109295 - DNA, 258 bp, Glycine max
tgttaattggtaaagatacatgtatttgatgtcctgcccaagaaagagaatccaaccccaggagccctgtcaaatggtgattcaacatagattctacatcttggaaccaagccaattttggagcagctttgtgataatgaaaccaaccagcaaaaagcattaaggctgcaaagaccaatgcaccaattgcggtacaatagagttgtaattcactagttattccagatgctctccaaatctgaaaaaaaccggaggtta

SEQ ID NO: 109296 - DNA, 254 bp, Glycine max
tgtgtggtcactgtgctctgctctcatctcattcatattcatttcaatggcaactcaaggtcaagtcattacctgcaaagctgcggtggcctgggaacccaacaagcccttaaccgtccaagacgttcaggttgctccgcctcaggccggcgaggtccgtgtccaaatcctcttcaccgctctctgccacaccgatgcttacaaatggggcggcaaggatcccgaaggtctcttcccctgtattctcggccacg

SEQ ID NO: 109297 - DNA, 265 bp, Glycine max
tgtgcgttgaagcaacaaaggaatacatccatggcgaacaatatagatcagactccaaaacagttaaccaacaagcttacttttatgccagagacctcgaagtccatcccaaggacacatttgtgttcagtatagatggcaccgtactctctaatattccatactacaaaaaacatggatatggggtggagaaatttaactcgaccttgtatgatgaatgggttaacaagggcaatgcaccggcactgcccgagactcttaagaa

SEQ ID NO: 109298 - DNA, 256 bp, Glycine max
aaaaacatggatatggggtggagaaatttaactcgaccttgtatgatgaatgggttaacaagggcaatgcaccggcactgcccgagactcttaagaattacaacaagctggtgtctcttggcttcaagattatattcttgtcaggaagaacactggacaaacaggccgtaacagaagcaaacttaaagaaggctggctaccacacatgggaaaaattaattctcaaggatccacaagatccttccactccaaatgc

SEQ ID NO: 109299 - DNA, 249 bp, Glycine max
caataagcaagagcaatacactgtggaaggagtgcagaatcttggagacaaagcagtgatgtgtcatgggctaaatttcagaactgcagtattttactgccataaagtccgtgaaacaacagctttcatggttccattggtggctggtgatggaaccaaaactcaggcacttgctgtttgccactcagatacttctggaatgaatcatcacatgcttcatgaactcatgggagttgatcctggaactaa

SEQ ID NO: 109300 - DNA, 249 bp, Glycine max
ggagtgtctggatttttgttggatttcatgatgggaggagtgtcggctgctgtgtccaagacggctgcggctccaatcgagcgagttaagttgctcatccaaaaccaggatgaaatgatcaagagtggtcggttgtctgaaccatacaagggaatcggcgattgtttcagtcgaaccatgaaggatgaaggggtgattgctctttggagaggaaacactgctaatgttatcagatacttccctactcag

SEQ ID NO: 109301 - DNA, 249 bp, Glycine max
ctccgttaaggataaggtttttcgcctcttcggaagggagagacccgttcactccgttttcggcgccggaaaacctgctgatgtgttattgtggaggaacaagaaaatttctgctggcatgcttggcggagcactgctgtttgggttctttttgagttgcttgagtatcaccttcttactctggtgtgtcacattttgatactgttgcttgcagttctgttcttgtggtccaatgcccatactttcatc

SEQ ID NO: 109302 - DNA, 245 bp, Glycine max
gtgctttcggtggaggaaatcggtcgtctataccgaataaggaagacggtgatgcagatgctgagggacagaaattttctggttggtgacttcgagatcaacatgtccaagcacgagttcaagtccaagaaggacaactccggcgaccagatctacgttttcttccccgacgaacccaaggtcggcgtcaagaccatgaagacctacacaaaccgcatgaactccgaaaacgtctacagagccat

SEQ ID NO: 109303 - DNA, 256 bp, Glycine max
atcagagaagaggttggccttactttggacaaagctgggaaagaggttctcggatatgcctccaaggtggttctcaccaaggatacaaccacaattgttggtgatggaagtacccaggaagcagtgaacaagagagttgcacagattaggaacctaattgaggctgctgagcaagagtatgagaaagaaaagctgaatgagagaattgctaaattatctggtggtgtggctgtcatacaggttggtgcacaaactg

SEQ ID NO: 109304 - DNA, 274 bp, Glycine max
ttcggattcacggaattcagttcaagagtggtctgactaggatgccctgaacgtataggtagtgtaacaattgttggtgctgtttcgccacctggaggagatttctcagaccctgtgacatctgtaaccctcagcatagttcaggttttctgggggttggacataaagcttgcccagaggaagcactttccttctgtaaactggcttacttcttattcaaaatactcaacggcacttgaaaccttttatgagcaatttgatccagattttataa

SEQ ID NO: 109305 - DNA, 247 bp, Glycine max
gttttcatcttaaagacctctttcctttggttctaatttattaccctgaaataatgaattgagttcgtataggcattttggatgatgctattgaaatagcctttcttgctatattttctggtaccccacccatttcataaagtattttcccaggtttaacgacagctacccaatattcgggagaaccttttcctgaacccatacgtgtttcagtaggtcttactgtaaccggtttgtctggaaatat

SEQ ID NO: 109306 - DNA, 255 bp, Glycine max
cgcacacgaggagcagcctcaggaggagaaggatgtctcacaggaagttcgagcacccaaggcacggttcactgggatttcttcccaggaagcgtgctgctcgtcacaggggaaaagtgaaggcattccccaaggatgacccatccaaggcacccaagctcactgcattcttgggttacaaggccggtatgactcacattgttagagaggtcgagaagccaggatcaaagcttcacaagaaggaaacttgtgagc

SEQ ID NO: 109307 - DNA, 259 bp, Glycine max
ggaggcgcagagtagagcagcagagaagagagaaaacggcactgcagccgtagaaggaaaaccgaccatggtgcacgtctccttttacaggaactatggtaagacgtttaagaagccccgccgtccgtacgagaaggagcgtctagacgcggagctgaagctggtgggggagtacgggctgcggtgcaagagggagctgtggagggtgcagtacgcgctcagccgcatccgcaacaacgcgcggaatctccttaccctc

SEQ ID NO: 109308 - DNA, 261 bp, Glycine max
caccaggcgcacgttagcacaaactatcatggccacggcaacagcagctgccacctcgtcctttatggggacgcgtctcctggaggctcactccggggcggggcgagtgcacgcccgattcggcttcggcaagaaaaaggctcccgcccaaaagaaagcctccaggggatcgggccgagacaccgacagacccctttggtatccgggcgccaaagcgccgaatacctcgatgggagtcttgtcggagactacgggttcgat

SEQ ID NO: 109309 - DNA, 256 bp, Glycine max
gcattgttgttggagtgagcgaagaatatgtattctagagattcatggggtggaccgttggagataaacgcgacggactcggcgacggaggacgagcggagcggaacctgcaggacgttgacagggcagcgctgtcgcgtcccttggatgagacgcagcagagctggctccttggccccggcgagcagaagaagaagaagtacgtcgatctcggctgcatcatcgtcagccgcaagatcttcaagtggaccctcgg

SEQ ID NO: 109310 - DNA, 248 bp, Glycine max
cttttctctctctcttgcagaacctaattttcattgcttccctcaaatttcaaaatgggtgagatgccccacatccagggtggccaatgcggcaaccagatcggcgccaagttctaggaggtgatttgcgcggcgcacgggatcgaacctaccggcaagtacggtggggactcggagttgcagctcgagaggatcaatgtctacgccaacgaggctacctgcggtcggttcgtgccgcgcgcggttct

SEQ ID NO: 109311 - DNA, 254 bp, Glycine max
ctttggggtttctctcttcaaactagggttttacagaatataagctctctctatctttggttttcgtcattcaaatccaatccaatatcaaatatgagtcgtcatcccgaggttaagtgggctcagagacttgacaaggtctatatcacggtgcaattggctgattcaaaaaatgccaaggtggatcttacaccagatggtatttttaccttctctggtagtgctggtgctgaagaccatcagtatgagctaaa

SEQ ID NO: 109312 - DNA, 256 bp, Glycine max
gcatggcaaaagaggagaggatagggtgcctttagattgggatactcgactgaaaatagccttaggtgctgcaagaggcattgctcgtattcatgttgagaatggtggcaagcttgtacatggcaacatcaaatcctcaaacatcttcctcaacaccaaacagtatggctgcgtgtctgaccttggcctggcaaccatatcaagctcacttgccttaccaatatcacgagcagccggttaccgtgcaccagaagtt

SEQ ID NO: 109313 - DNA, 264 bp, Glycine max
cttcccttcacattgcagaagagatggctcttgtgaaaccaatttccaatgtcactcccaaatttggcagcagccccagaatgggatcacactccaaattcagcaccataataagaatgtctgccactgccaccccaccaccaccaccctccacctccacaaagccagctgcaagcaacaagaagggcaacatcaaggagaccctcttgactccaaggttctacaccactgactttgatgagatggagaccctcttcaacactg

SEQ ID NO: 109314 - DNA, 260 bp, Glycine max
gttaacactcttcttcatcgtcgtcgcaatgggacgtgtgatccgtgcgcacgtaagggagcaggctcggtcttcaagtcccacacgcaccaccgcaagggctctgcacgcttccggagcctggacttcggggagcgcaacggctacctcaagggcgtggtcaccgacgtcatccatgaccctggccgcggcgcgccgctcgccaaggtcgccttccgccaccctttcagatacaagaagcagaacgagctcttcattgc

SEQ ID NO: 109315 - DNA, 258 bp, Glycine max
gaagcatctaagtgagatacacagtagttaggtagcaagcataagtgtctaaccttagaaacatatctgctacatatcgtgtgcattttggaattgtgccactaaaattctattcatctatggctgcctcatcttatgctatgcaatcaatccttgcaaaccctatgatccgcatttccagcgggtctagggagaaccattttggtgttcctgcttatcacatgagaaggaatgttggcctgagagttaggtccatgg

SEQ ID NO: 109316 - DNA, 260 bp, Glycine max
cagaagccaaaattctcttcctcggtctcgataatgcagggaagaccaccctccttcacatgctcaaagacgagagattagttcagcaccagccgacccaacaccccacttcggaggaattgcgcattgggaagatcaagtttaaggcttttgatttggggggccatcaagttgcccgcagagtctggaaagactattacgcaaaggtggatgcagtagtttacctggttgatgcctttgacaaagagaggcttgcagaa

SEQ ID NO: 109317 - DNA, 256 bp, Glycine max
cattacaccacgcttctaaattctgagaatgaattcgtaagatcgaagcaatagcctttttctctgccgccactggtttcgatcccacacccacaaacgcaaaccctccatcctttgaatgctcttgcgttttcctttcactacctcattcctaactcacacacacacaacgggtgatatcaatgtcgactcctgctaggaagaggctcatgagagatttcaagaggctgcaacaagacccgcctgcaggaatcag

SEQ ID NO: 109318 - DNA, 257 bp, Glycine max
ccaatagccgctattctactcgcaagcaaatcagaacaagagaagagaatggcaggagcagaggggctaaacagagaacagtacgtgtaccttgcgaagctgtcggagcaggcggagcggtacgaagagatggtggagttcatgcagaaggtggtggtggggtggacgccggcgtcggagctcacggtggaggagcgcaacctcctctcggtggcctacaagaacgtgatcgggtctctgcgtgccgcgtggcgcat

SEQ ID NO: 109319 - DNA, 257 bp, Glycine max
ttttcttttccagcctccaaatgagagagtacatcagattatttcaaggactgcaacatttgtcagcaaacatggaagccaatcagaaatcatcctgagggtgaaacaaggagacaatccaacttttggattcctaatgcctgatcatcatcttcatgcgtattttaggtttcttgttgatcaccaagaacttctgaaagttgacaaagatgatggaagctcaactgaggacatgaataggactctggggcttgatc

SEQ ID NO: 109320 - DNA, 253 bp, Glycine max
ctcgagcgcgccagttctgatatttacaccatctgctctcaagactgtgaattatggcatcctgcttgcacaaaagcaatggctatgtcatttaatccaaacccgtgttctgatgcatggagtttggaatttctgaagcgtaccggatttcattgtgatatcatttgtgtcactggatggactgccaccccaatgcaggatgttcaggttacaattgattggtttatttcctctcaggaatgtgttcccagaa

SEQ ID NO: 109321 - DNA, 265 bp, Glycine max
caccgtgtgtgtgttgtgtgtgtgtgtgagagagagagagagagagagagagagagagagagagagagaggttaggctatggctgatgagagcgtcgttgagtccccagtgaagaggcagagagatgatgatgaagaaaatgaggtctctgtttccatggatgtggagggtggcaaagaccctcttagtaacggtttatcatctgtgattcctgggtggttctctgaaattagttcaatgtggcctggagaggctcactccttga

SEQ ID NO: 109322 - DNA, 258 bp, Glycine max
cacagttctactctacgctctaaaccctctctctctctctctctcgatctatcatggctttgcccaatcagcaaaccgtggattaccctagtttcaaactcgtcatcgtcggtgacggcggtacaggaaagacaacgttcgtgaaaaggcatcttaccggtgaattcgagaaaaaatacgaaccgaccattggagtggaggttcacccattggatttcttcacaaactgcggaaagattcgcttctactgttgggata

SEQ ID NO: 109323 - DNA, 254 bp, Glycine max
caatcaacgtctctctctctcttcgggctacattcctgggatctgctggctttgcttttcaagggcaaaaaatgacagatgcaaagccagataaacccttgatggcatcttcatcgcgaaaccttcctgatttcaagaagtctgttaagttgaagtatgtcaagcttggttatcattacctcatcacccatggaatgtacctctgcctttccccccttgtggtgctgattgcagcccagctttctaccttctcc

SEQ ID NO: 109324 - DNA, 253 bp, Glycine max
gtctgtgtctgtttgtgtgtggttgttggtggatatggattctaaggatattaatggttgcctcatggataaacataaacctgtggtgacatcttctttggtttgtgaaaaggttgaagatcatgtcaacggagaagatgatagtgattccaattctttgttgcctcctcggagaggtggcatgtccagaaactgtgaaaagactcgccggaaagtgcagtggaatgataggactggaaacaagcttgctgag

SEQ ID NO: 109325 - DNA, 252 bp, Glycine max
ctcttcttctcttgcggctagggttttagcgcagttcttctagatttaaggcagatgggtaaggaaaaggttcacatcagtattgtggttattggccatgttgactctgggaagtccactaccactggccacctgatctacaagcttggaggcattgacaagcgtgttattgagagatttgagaaggaagctgctgagatgaacaagaggtctttcaagtatgcctgggtgcttgataagcttaaggctgag

SEQ ID NO: 109326 - DNA, 265 bp, Glycine max
ttcggctccagctcaaattcctgctgtagagaagtcgtattctactaaggttcataagtttgcaaaaattatgaaccttagacaaagtgttgttggtgatcttaaacttcttactgatgggaagttgtatgagggtaagcatattcctgtatctaatattagtgcaggggaaaatcatgtagttcaaatagccttaatggcacaggaggaaattctgtcttctagtgcaagtgctttcagaactgcaatggtgagtaaaaatagc

SEQ ID NO: 109327 - DNA, 260 bp, Glycine max
cttgttaggttacctctgtgacatttgtgctgctagttctcatatttgcggctgacaccgagaaggaaagcaggaaaaaaacaaaaaggagcagatgggtagctcaggtttctcatggaaattggcggatcatccaaagcttccaaagggtaagactgtggctgttgtggtattggatggttggggagaggccacacccaatgagtacaactgcatccacaaggccgaaacaccctgcatggattcacttaaaaagggtg

SEQ ID NO: 109328 - DNA, 255 bp, Glycine max
gggtttcgtttcgggtttgacgttgttcacaatcactttctgcgcttcactcactcccttcgtgcggttttctttctttgtcgaactcgtgcgaagatgcgtgagattcttcacatacagggagggcaatgcggaaaccagatcggagcgaagttctgggaggtggtgtgcgcggacacgggatcgattccacggggaggtaccagggggacaacgagttgcaactcgagcgagtcaacgtctattacaatgaag

SEQ ID NO: 109329 - DNA, 256 bp, Glycine max
ctcgagccgctaatatggaagatgtatatgtttgtgctgacaattttatggtggattatggactcaagaaccatatagatggacccagtgctttctatggggtatttgatggacatggtggaaagcatgctgctgactttgcttgtcatcatctgccaaagttcattgttgatgacgaagatttccctagagatattgaaaggatagttgcttcagcatttctgcaaacagacaatgcctttgcagaagcttgctc

SEQ ID NO: 109330 - DNA, 255 bp, Glycine max
gttaccatttgctcccagcactgagcttaaccgagcttcacaaagatgaatcgggaaaaattgatgaagatggccggttcggttagaactgggggaaagggcaccgtgagaagaaagaagaaggctgtccacaagacaacaaccacagatgacaaaaggcttcagagcaccctgaagagaataggggtgaatgccatcccggctattgaggaggtcaatatctttaaggatgacgtattatccagtttctaaatc

SEQ ID NO: 109331 - DNA, 255 bp, Glycine max
tgaacaatgatgagctacatgtggttatgttcccattccttgcatttggccacattagtccatttgttcagctctccaacaagttgttctctcatggtgttcatgtcactttcttgtcagctgcatccaacattcccagaatcagatcaactcttaatctcaatccagccatcaatgttatctcactaaagttcccaaatggtataaccaacactgctgaattgccacctcacttagctggaaatctcatacacg

SEQ ID NO: 109332 - DNA, 255 bp, Glycine max
ggctgtcctgctcgacaatgaagccatttatgacatctgcaggcgttcactggacattgagaggccaacctacaccaaccttaatcgtttagtttctcaggtgatatcatcactgactgcttccctgaggtttgatggagccttgaatgttgatgtcaatgaattccagaccaaccttgtgccataccccaggattcattttatgctttcatcttatgctcctgtaatttcagccgagaaggctcaccatgagca

SEQ ID NO: 109333 - DNA, 251 bp, Glycine max
ctaattaggtggagccagaggatttagtgatgttctttggaaagtgaaaaggtatcaaaaagaaggtccaagtcccagcattaccttcagttaccacagtattgatggtgaacaaggattccctggtgatctcctagtaactgtgagctccattctaactgggaaaaaccaattggttatacttatgaaaggaaaaactctaaacaagccaacaccagtgaatttggcaaaccatgcttactggaacctag

SEQ ID NO: 109334 - DNA, 255 bp, Glycine max
ctcgagcgaatcggctcgagagaatgtcgaaggaagtgcgccatgcagaggaaggactagcgtagaccctccgccagcccccctcatcgacttggccgagattaagctctggtccttctacagagccctcatcgccgagtttatcgccacactcctcttcctctacgtcaccgtcgccaccgtcattggccacaaaaaacagaccggaccatgtgacggcgttggccttctcggcatcgcatgggccttcggtgg

SEQ ID NO: 109335 - DNA, 253 bp, Glycine max
ggctaaccaaccctgacactccttcttctccgcttcctcttcgatcatcgcttcagaatgccgccgaagttcgacccctcccagatcgtcgacgtcttcgtacgcgtcaccggcggtgaggtcggcgcggcgagttccctcgccccgaagatcggtcccctcggtctctcccccaagaagatcggagaagatatcgccaaggaaaccgccaaggactggaagggcctccgcgtcaccgtcaagctcaccgtgc

SEQ ID NO: 109336 - DNA, 174 bp, Glycine max
gtgctggttcacattcttcagacgattttcctgaaaaggaagatcaagaataacccaaaaagattgatgccagattgagacatagaatagatcctcaatacaatgaggttcaggctcagatggaatcaaatttgtttaaattgtctcttgatgatattgaaactcctaaaggtt

SEQ ID NO: 109337 - DNA, 253 bp, Glycine max
ctcaaatcatggatttcttgcaatcacaagaaaatcagatacttgtgggtgtggccgtggccgttgtagccattgggcttggtgcagtatatctctattcatccaagaagaccaaaggttgcttggacccagagaactttaaggcattcaaacttgttaagcgtgcacagctgagccataatgttgcaaagttcacatttgcactcccaacacctacatctgttttgggtcttccaattgggcaacacataag

SEQ ID NO: 109338 - DNA, 251 bp, Glycine max
cgcacacgaggagcagcctcaggaggagaaggatgtctcacaggaagttcgagcacccaaggcacggttcactgggatttcttcccaggaagcgtgctgctcgtcacaggggaaaagtgaaggcattccccaaggatgacccatccaaggcacccaagctcactgcattcttgggttacaaggccggtatgactcacattgttagagaggtcgagaagccaggatcaaagcttcacaagaaggaaacttgt

SEQ ID NO: 109339 - DNA, 250 bp, Glycine max
gaaatggcaacagaaacaaaagtgcaagaattaggtggcatcaccgatgtgcatggagctgccaacagcgtcgagatcaacaatctcgctcgctttgctgtagaggaacaaaacaaaagagagaattcagttctggagtttgtgagggtgattagtgcaaagcagcaagtggttgctggagtgaattactacataacattggaagcaaaagatggtttgattaaaaatgagtatgaagcgaaggtttggg

SEQ ID NO: 109340 - DNA, 249 bp, Glycine max
atcgagataactagaaacagtgtgatgaaaatgaaggtccttgttttcttcgttgctacaattttggtagcatggcaatgccatgcgtacgatatgttccctctccgaatgaacactggctatggtgcccgtactccggaggtgaaatgcgcaagttggaggcttgctgtggaagcacacaacatctttggctttgagaccattcctgcagagtgcgttgaagcaacaaaggaatacatccatggcgaa

SEQ ID NO: 109341 - DNA, 248 bp, Glycine max
ctgtcgttccgtcgttgacgatggcgtttcgggtgcgaaccctgtactccgctctctctttcttctctctctcttgtccatcgcttccgccaatttcttcttctaagagcgtttcgatgacgggtgggaaaatcgatgggttaaatcagattggaaaaaagatgagaacgtggctggggagtggaaccacacctctggtcaatggaatggagacgctaatgacaaaggtattcaaaccagtgaggatt

SEQ ID NO: 109342 - DNA, 255 bp, Glycine max
gtactactaattaaagggcagcaactgggagttcaatgaacctggctagaacactgggtccagcaattgctgcacacaactacaagggcatgtggatctatctcacagctccaatacttggatctctatgtggggcaggtgcctacactgtgctcaagctgcctgatcacatcaggaagagtgatagcaacactgcaagagtgatagcaagactttacccagaatgagtgatttttgcacatgcacttatcatgc

SEQ ID NO: 109343 - DNA, 249 bp, Glycine max
ctcgagccgtcacagtgaaacgcagaagccctaactacgcacgcactcattcttgagaaaactcaatattcattcgtccatggcactctcttctcgtctcttttccaaatccaaattgatctatggctgtcaaatacttctgcaaaaggagcatgctattccagttcgtcactttgctaaagagtctgcccctcctgcccttaagggagatcagatgctgaagaacatttttgtggaggtgaagaacaa

SEQ ID NO: 109344 - DNA, 247 bp, Glycine max
cactcataacacaaagcacaaagcaaagctcatccttgagttaaaaaatggcagcagcttcttccatggctctctcatccccatccttggctggcaaggccgtgaagctgggcccatcagccccagaagtgggaagggtgagcatgaggaagaccgtcaccaagcaggtctcctcaggaagcccatggtacggcccagaccgagtcaagtacttgggcccattctctggcgagcccccgtcctacct

SEQ ID NO: 109345 - DNA, 245 bp, Glycine max
gaaaagagtgagagagagagaggagtgggaaatcgagaaaccctagtggagccggaagtggaagtgaagagagtaaatgacgatccattcggtggtgatacagaagctgcttagcaccaatgctcaggtgggtcgacgtgttgccgctcaccatttgaaggagttcacctatggcttccgcaacaaaatagatacaatagactccgacaagaccctcatttgcatgcgcagtgcctgccacttca

SEQ ID NO: 109346 - DNA, 273 bp, Glycine max
atagaggaaaaactcgatggaaaaatggtggtttaattctatgttgtttaataggaagttagaatacaggtgtgaattaagtaaatcaatggatagtcttggtcctattgaaaataccagtctaagggaagaccctaaaattttaaccgatatagaaaaaaaaattcacagggatttggattatttagaaatggaaggttttttttctagcgatctgaatactgtttctaagaatgatgatgatcattacatgtatgagactcaatttagttt

SEQ ID NO: 109347 - DNA, 271 bp, Glycine max
caaaatcttcatattcatcaaactcatcaaaatgaatctgtaccactcctccaccaccaccaccaccaccaccatcttcaccgtcatattcctcctccttgcaatattattcactctcacaccccacaaggccaacggtgccacgtgtcaccctgaggaagaagcgggcctgttgggcttcaaatccggtatccgatccgacccgtccggcctgctcagtaactggatatcgggtacggactgctgcacatggaccgagtagaatgccact

SEQ ID NO: 109348 - DNA, 249 bp, Glycine max
gctatgaagaagagcacgctttgttctagaaggtctggctctggcacttttccgagtcctggaacgcctaattatcttcacgccactgttgctatgcaaaagggttggagttcggagcgagttcctttgcacaccagtgctgcacgcaagcaggttggtgcggctctgttgcctttcaacaacggccgaactttgccgtccaaatgggaagatgctgagaggtggattcttagtcctgtttccggtgac

SEQ ID NO: 109349 - DNA, 266 bp, Glycine max
atcccctagggctcgcgttgttgcctacaaagcatgctggaataaactggatgaaggagggtgctatgatgcagatattctagaagcatttgatcatgccatttatgatggtgttgatgtcatctctgcctcgttgggtgggtctaatccctatcccgaagccttgttcacggatgggatttccataggggcattccatgcagttgccagaaacatagtcgtagtttgctctgctggaaatgatggaccacacctttaagtgtcac

SEQ ID NO: 109350 - DNA, 267 bp, Glycine max
agcggctttgtattgatcatctatatgggtcatctctacatcactgcaatggtggttgttatccaaatcttcatggcaagggagcttttcaatctactcaggagagctcatgaagataggcagctgccaggatttaggctattaaattggcattttttcttcactgcaatgttatttgtttatggacggattctgagtcaacgcctggttaacacagtaacttcagacatggttttatatcggctagtgagaatcttattaagtatc

SEQ ID NO: 109351 - DNA, 253 bp, Glycine max
cacccacctactcttctcctttctcttcttctgctgctcgatcgatcgatcgatctcgtcactctcttagctaccatggcgactgagaatcctttcaatagcattttgacgacgctcgaaaagcccggtggtgctggcgagtttggaaagtactttagcttgcctgctctcaacgatcgtagtatcgatatacttccttactctgtgaggacacttttggaatctgcaatccggaactgtgatgagtttcaag

SEQ ID NO: 109352 - DNA, 268 bp, Glycine max
tagcatttgcattgagattctaacacacccaaaactcctcttccttgatgaaccaactagtggacttgatagtgcagcttcctattatgttatgagtggaattgcaaatctaattcaaagggatggaattcaaaggactattgttgcttccgtccatcaacctagcagtgaagttttccaacttttccatgacctttttcttctctcttccggagagacagtatattttggtcctgcctctgatgcaaatcagttttttgcttcaaat

SEQ ID NO: 109353 - DNA, 265 bp, Glycine max
caatcccaaacaatctacagtttttgattgtcaataaggaaactcaaatgccatgaagtttgatttgcccactcagaactccacatttcaaacttcaaggcatttgagtttccttattgacaatcccaaacaatctacagtttttgatattctcttgggaatctctcaagattttgaaattgctggtaatactcttatgccagctttttctgttccacaggctactgccagatcttctgaaaatgcggaatccctgcatgatctg

SEQ ID NO: 109354 - DNA, 264 bp, Glycine max
tcagtttataagcatggcactttgtcctatgcgatcttcgtctgtctcttcaacagctattgttgcatgggctgagttactgcatcttacaggatactcgtcagctaacctctcaaagaacttctattccaagacatgtcccaacgttctcaacactgtaaaatctgtagttaaatctgctgttgtcagagaacctcgcagtggggcatctattgttcgtctcttcttccatgactgcattgttcaaggctgcgtgggtcaata

SEQ ID NO: 109355 - DNA, 268 bp, Glycine max
ctcgttctctctttctgttcttctcaaagacgcacgcaacgttcagaaaccaaatcggtttgagtcctcattacccgcctctctctggaaaccagcaaaaccacctttctctactatctatcggttccttttgtactctgagtgggtagaagacatggtgaggctcactgctgacttgatctggaaaagccctcatttcttcaacgcgattaaagagcgtgagttagatcttcgaggcaacaagatagctgtattgagaacttgggtg

SEQ ID NO: 109356 - DNA, 251 bp, Glycine max
gaaccctcatctccaatctgcaaatccaactaacatgggaagccagcaagccgccgtgtcgttcctgacgaacctggcccgcgccgctttcgggctgggcgcctccgcgatcctattgagctcctccctctacaccgtcgatggcgggcagcgcgccgtcctcttcgaccgtttccggggcatcctcgacgagaccgtcggcgacgggaccacttcctcatcacgtggtacagaaacctacatcttcgcat

SEQ ID NO: 109357 - DNA, 266 bp, Glycine max
tcaatttataagaatggcactttctcctattcgttcttcttctttctcttcatcagctattgttgcattggctgtgttactgcttcttacagggacctcttcagctaacctctcaaagaacttctattccaagacatgtcccaacgttttcaacactgtaaaatctgtagttaaatctgctgttgtcagagaacctcgcattggggcatctattgttcgtctcttcttccatgactgctttgttcaaggctgtgatgggtcaatac

SEQ ID NO: 109358 - DNA, 256 bp, Glycine max
cgggatgaaacacgctgctcgaattatgatcccgaagaagaagggctcaatcatttctttatgcagtgtagcaagtgccataggtggcttaggaccgcatgcatacacagggtccaagtatgctgtattggggctcataaagaatgttgcagctgaattggggaaacatgctataagagtgaactgtgtgtcaccttatggtgttgcaacaggtttggccttggctcatttgcctgaggatgagagaacgatgatg

SEQ ID NO: 109359 - DNA, 260 bp, Glycine max
gttcatttccaactccgtaaaatcaggcctcccttctcttgatgtagctctgctcgtctttcttggcatcttcgtttggactttggccgtatacacattgcaccgtttcctcttccatgtcaaaaccaagagctactggggaaataccttgcattatcttctccatggctgccaccacaagcaccccatggatagctatagacttgttttcccccctgtagctgcagctatattagccctcccgatcatgaacttagtga

SEQ ID NO: 109360 - DNA, 264 bp, Glycine max
tcggtgttgaatcatggatcagaaagtcgatttcagtgctccgcattccatgggaaccactatcatcggcgttacttacaacggcggtgtcgttctcggagccgactctcgaaccagcactggagtgtatgttgccaaccgagcatcggacaaaatcacacagctcactgataatgtttacgtgtgtcgctctggatcggctgctgattctcagattgtctctgactatgtgcgctacttccttcacaacacacgatacaactt

SEQ ID NO: 109361 - DNA, 264 bp, Glycine max
ctgaaaatcatttctggaaccattcttgcaacaattttgggaacaaccttctggaaactcttttcctttcttagagatgctggtaatgggggagtttttgttggtaatgttgcttcagcattcacaacttcaagtgtgcttgaggcccaaagtagaaagcccaacagatatgaagtttcccaatacagatatcgcaatgtgccaataaagcgcagagcatgggttgaaggtcagatgtctttcgatcagctgtagtagcaatta

SEQ ID NO: 109362 - DNA, 262 bp, Glycine max
ccgaacaccccgcacctataatccagcaccaatccaacccgttttcgctcggatctaggacctcagtgtctaagtgaataaggttggggtttgcgatcgctccgacgacgatccggaaggcgattggggtggtgaaggaccagaccagcataggaatagccaaggtcgcaagcaacatggcgccggagatggaggtcgcgattgtgaaggcgacgagccacgatgacgaccctgccagcgacaagtacataaggagatcttg

SEQ ID NO: 109363 - DNA, 263 bp, Glycine max
ggtgacaaaactactcacagagaaagacactcggagaccttgcaagacttcatcaatggctgtcaaagtttatattgtgtactactccatgtatgggcatgttgagaaactagcagaagaaataaagaaaggggcttcctctgtggaaggtgttgaggccaaattatggcaggtacctgagacgctgcaggatgaggtgctcggtaagatgagtgcaccacccaagagcgatgtaccagtcattaccccgaatgactatccga

SEQ ID NO: 109364 - DNA, 266 bp, Glycine max
aaggaattggaaagcatctgcaatcctatcattgccaagatgtaccaaggtggtgctggtcctgacatgggtggtgctggtgctggggcagctgaggatgattatgctgctccttctggtggaagtggtgctggccccaagattgaggaagtggactaaatgtgtagttgctttcatccatttatctgtttaaaacttatttgatgcttttttattgaattttaacttttatgatttttgttggatgggtactaattgttttgccc

SEQ ID NO: 109365 - DNA, 268 bp, Glycine max
ctaattcgctcgcagtcacccaagaggcgaatccttaccattgctcgagatgggtgaagaagtgaaggccgtggttccagagtctgttttgaagaagcagaagagagaggaggaatgggcgttggccaagaagcaagacctcgaggctgcgaagaagaagagagccgagagccgcaaactcatctacaacagagctaagcagtacgctaaggagtacgatcaccaggagaaggaattgattcggttgaaacggaggccaagctgaaag

SEQ ID NO: 109366 - DNA, 265 bp, Glycine max
ggaaaaggagggaaggggcttcttgcagcgaaaaccaccgcggcgaataaggacaaagacaaggacaagaagagacctatttctcgctcttcccgtgctggaatccagtttcctgtgggacgtatccataggcagctgaaacaaagggtccaagccaatggacgtgttggggcaacagctgcagtgtacttagcctcaattctagagtatctgactgctgaagttcttgaacttgctgggaatgcaagcaggatctgaaggtgaa

SEQ ID NO: 109367 - DNA, 266 bp, Glycine max
agaaaagccatggaggctcaagcaatcattggtgaagaatcaaaacaatttgaggcttggagagactcattggaaactgttcctaccattaaaaagttgagggcatatgctgaaagaataaggcttgctgagcttgagaagtgcctaggtaagatgggtgatgatatcaacaagaagacacaaagagctgtggatgatcttagcaggggtatagtgaataagttggcttcatgggccaatgcaacacttgagtgtgatggcagtga

SEQ ID NO: 109368 - DNA, 260 bp, Glycine max
gtgatttcagtgagtgatcggtgttcacttgatctcatcataatcgtcagcgtcaattgaagaagatgccgatcagaaacatcgccgtcggaaggcctgaagaggcgactcaccccgacacgttgaaggcggctttggctgagttcatctcaaccttcatcttcgtgttcgccggctcaggatccggcatcgcctacaacaagctcaccgacaacggcgctgccacccctgccggcctcatctccgctccatcgcccatg

SEQ ID NO: 109369 - DNA, 262 bp, Glycine max
cacaattcacaaccgaaacagtttccatctctctcacaaaatgacaacaatatcaaattgctcccttctcttcctcttcctcttcctctccaccctccacatagcttccaccctctcaacccccaccaacttcatcaagtcctcctgcagcaccacccagtacccagccctctgcatccagtccctctccgtctacgcctccaccatccagcaagacccccacgagctcgtccagacagccctctcccctccctcaaccaca

SEQ ID NO: 109370 - DNA, 265 bp, Glycine max
aagaaaaaaaaaaccctagccaacacaaccatcatggccacctctgctattcagcaatcagcattcactggtcaaactgctctgaagcagctcaatgagttcgtccgcaagaccggtggcgccggcaaaggtcgcactaacatgcgccgcaccgtcaagagtgctcctcagagcatttggtatggccctgaccgtcccaagtacttgggtccattctcggagcagattccatcatacctgaccggagaatccctggtgactacgg

SEQ ID NO: 109371 - DNA, 264 bp, Glycine max
cctcgctctatttctcagtctctgtgtttgcggctgaggattccgaacgagtgaccttcttcgtttctcgcaaagtttaagtaatcatgggtaaggaaaaggttcacatcaacattgtcgtcattggacatgtcgactctgggaagtcaactaccactggtcacttgatctacaagcttggaggtattgacaagcgtgtgattgagaggttcgagaaggaggctgccgagatcgacaagaggtcattcaatatgcctgggtgct

SEQ ID NO: 109372 - DNA, 262 bp, Glycine max
ctcttttcacatctccgtttggtttaggattgagtgttggatctagtcatctagatttaaaaaaaaaatgaagatcattgagaaaattcgcgcacttctgctgatccaaacagggtggtgttctcatttgagttcttcccccccaagactgaggatggtgtggacaatctgtttgagaggatggaccgcatggtggctcacaacccctctttttgcgacatcacttggggcgctggagggacaacggcgatcttacattgga

SEQ ID NO: 109373 - DNA, 254 bp, Glycine max
ctcgagccgttgctcgcacctttgacagaatgccttatctgctgactctgtcttcctttgaggctgacgatgttgccgctgctgttcctgctgctcaagatctggtggagcagttgtcttattaatggatgtgcttcaattcaaatagtctcgcactagtcatcattccttttgtttctgttgcttgcttggttgttcttcttcttcttgttgatcgtcgtggtcgttgaggtcttcaattttattttattatt

SEQ ID NO: 109374 - DNA, 259 bp, Glycine max
gtgttgaagaggcctacaacaagctaatagttgaacttgagagaagtgttcctacattggttggcattgaatgtcccaaggatgagaaacttcctcgtcgcaaaatttttgacaaacctaagacgcgctgcttcactattctccctatggagtttaatcttgtggttcgtcagaagtttttaaattttgtgaggttcattatgaagaaaagggacaagcttagttgtcaagttggaatcaaccatactccatggaatgg

SEQ ID NO: 109375 - DNA, 257 bp, Glycine max
ggcgcgccagttctgatatttacaccatctgctctcaagactgtgaattatggaatcttgcttgcacaaaagcaatggctatgtcatttaatccaaacccgtgttctgatgcatggagtttggaatttctgaagcgtaccggatttcattgtgatatcatttgtgtcactggatggactgccaccccaatgcaggatgttcaggttacaattgattggtttatttcctctcaggaatgtgttccagaacctattgtg

SEQ ID NO: 109376 - DNA, 262 bp, Glycine max
gatcgagataactagaaacagtgtgatgaaaatgaaggtccttgttttcttcgttgctacaattttggtagcatggcaatgccatgcgtacgatatgttccctctccgaatgaacactggctatggtgcccgtactccggaggtgaaatgcgcaagttggaggcttgctgtggaagcacacaacatctttggctttgagaccattcctgaagagtgcgttgaagcaacaaaggaatacatccatggcgacaatatagatcag

SEQ ID NO: 109377 - DNA, 260 bp, Glycine max
ttcgggatgtccctgctgttactcggctgcttaggaactacttgagccagtttgttgttgcacctgattttgatgaaaatgatgttgaacattggcttcttcccaatgagaatgtggtggatagtttcttggtggagagtccagagaatcatgagatcacagacttctgcagcttctatactcttccttcttccatccttggaaatcaaaattactcaattttgaaagctgcttattcttattatatgtttccaccaaaa

SEQ ID NO: 109378 - DNA, 249 bp, Glycine max
gtggttgttagcactgagaacattactcagaattggtactttgggaacaagaaatccatgctcattcccaattgcctatttcgtgtgggctgctctgcgctgcttctctctaacaagccggcagatcgaaggagggccaagtaccggcttgtccacgtcgtgaggactcatcgcggggccgacgacaaggcgttccggtgtgtttaccaggagcaagatgatgctgggaaaactggtgtttcctttcta

SEQ ID NO: 109379 - DNA, 255 bp, Glycine max
ccttactttagtggttctaaattgaaaagctttctagctggtcataatatcaccattactgatggtattgacaaaactagtgcaactttgcaatttagaaagttagcagattgtgattttctcatgagaaactttaagcagatgtctaatgttttgtgggtggctcctgaggacaaggcgagtttgtggtcacaacttcattatgtttcgtgtaataatctggaaatgcaagaagcttatcttgcaatctcgtaa

SEQ ID NO: 109380 - DNA, 257 bp, Glycine max
ctctttctgagatatttcgaatttcgatactttgatcagatccacaacactccttcattcatgacgcttggctcttcaggatccagtgtcgtggttccaaggaacttcagattgctggaggagcttgagaagggagaaaaaggaatcggagatggaacagttagctatggaatggatgatggtgacgacatttacatgcgctcttggactggaaccattattggcccctataatactgtacataaggaagaatttat

SEQ ID NO: 109381 - DNA, 252 bp, Glycine max
caaaaggagatttgtttctggggatggtgaagagatgacattgattccgggaaccagtgttgaagaggcctacaacaagctaatagttgaacttgagagaagtgttcctacattggttggcattgaatgtcccaaggatgagaaacttcctcgtcgcaaaatttttgacaaacctaagacgcgctgcttcactattctccctatggagtttaatcttgtggttcgtcagaagtttttaaatttgtgaggttc

SEQ ID NO: 109382 - DNA, 251 bp, Glycine max
ggaaagcataatcaaatcaaccatggctaccctcattgctcccatcaccttttcgcctggtttagatgcagaagctcttagaaaagctttccaaggatgggggactgatgagaagaccgttatagcaatattgggtcacagaaatgttcatcagaggcaacaaatcagtaagatttatgaggaaatttaccaagaggacctcatcaaacgcctagagtctgagctctctggtgactttgaggagctgtgta

SEQ ID NO: 109383 - DNA, 257 bp, Glycine max
ggactttccgttcacgacactcccttttatcgtttcacttccgtcgtcgtcgtcttcaattttggatcttcgaatcgaatcgcatcctatgggtagcagcagaggacacacgctcatggaggttggacccgacggggttgccgtcatcaccatcgtcaaccctcccgttaattcactttcctttgatgtattgcgcagtttaaaggagagttttgatcaggcgatacagagagatgatgtcgaggaatttgtgttac

SEQ ID NO: 109384 - DNA, 250 bp, Glycine max
ctctttctgagatatttcgaatttcgatactttgatcagatccacaacactccttcatccatgacgcttggctcttcaggatccagtgtcgtggttccaaggaacttcagattgctggaggagcttgagaagggagaaaaaggaatcggagatggaacagttagctatggaatggatgatggtgacgacatttacatgcgctcttggactggaaccagtattggcccctataatactgtacatgaagaag

SEQ ID NO: 109385 - DNA, 266 bp, Glycine max
gaggcacaggagggtgtagctattgaaatagcagaggctgtgcttggagcattgaagggggaactttcagccactgctgtcaatgctcctatggttgctcctgaggtgttgtcagaattggccccatatgtggtgctggctgagaagctgggcaggctagctgtgcagttggtgtgtggaggaagtggaatcaaatctgtgaaggttgtttatcgatcagctaggggcccagatgacttggacactagacttctgcgagccatggt

SEQ ID NO: 109386 - DNA, 265 bp, Glycine max
atttgaagcgtggttatgttgcctcaaactcaaaggatgaccctgcaaaggaggctgctaacttcacagcccaagtcatcatcatgaaccaccctggtcagattggaaatggctatgcccctgtcctcgactgccacacttctcacattgctgtcaagtttgctgaactcatgaccaagattgacaggcgatccggcaaagagcttgagaaggagcccaagtttttgaagaacggtgatgctggttttgttaagatgattccaac

SEQ ID NO: 109387 - DNA, 263 bp, Glycine max
gaaagggagaaagggtgtgagaatggagagcaaagaggaagatgtaagggttggagcaactaagttctcagaaaggcaacctattggtacagcagctcagggtgacaaggactacaaagaaccacccccagcacctttgtttgagcctggtgagctaaagtcatggtccttctacagagctggaattgctgagtttgtggccactttcttgttcctctacattaccatcttaactgtcatgggtgtcaacaggtcaccctcca

SEQ ID NO: 109388 - DNA, 261 bp, Glycine max
cggctcgagcggctcgagcggctcgagcggctcgaggaagctttgagagagagagagggaggacggagagtactgacgctacatcaagaagggtatttctagggattccatgcacaagaggcgtaccactggtggcaagaagaaggcatggagaaagaagagaaagtatgagcttgggcgtcaggccgcaaacaccaagttatcaagcaacaaaactatccggaggattcgtgttcgaggtggcaatgttaaatggagggc

SEQ ID NO: 109389 - DNA, 260 bp, Glycine max
ccaattttctagggtttatacaattttcgatggcttcttcagatgttgagtaccgttgctttgtcggtgggctcgcttgggccactgacgaccaagctctcgagagagccttctctcagtacggcgaaatcgttgaaacgaagattatcaacgatcgtgagactggaagatccaggggttttggatttgtgaccttcgcctcggagcagtccatgaaagacgccatcgaagggatgaacggccaaaaccttgacggccgt

SEQ ID NO: 109390 - DNA, 258 bp, Glycine max
ggaaaagaatattgactttgcagctcatagtccccaagaagagtcaggttctcttttagctaacctgattgggaatctggctttccctttgatcttgattggaggattgttccttctctcgagacgatccggagggatgggaggtcctggtgggcccggatttcctcttgcttttggtcaatccaaagccaagtttcaaatggaaccgaacaccggagtgacatttgatgatgttgctggggtggatgaagccaagca

SEQ ID NO: 109391 - DNA, 261 bp, Glycine max
cacagagcaagaacactgttccaatacggaatctaaggcaaagcaaaccaaacatcttgaatcatgggttcaacaggtgagactcagattaccccaacccacgtatctgatgaagaagcaaaccttttcgccatgcaactagccagtgcttctgtccttccaatgatcctcaaatcagcacttgagcttgatctgttggaaatcatagccaaggctggccctggtgttcatctttcccccactgacatttcttctcagctc

SEQ ID NO: 109392 - DNA, 254 bp, Glycine max
accatatgatgagaatgccttaaagaaagctgtggctcatcaacctgtaagcgttgctattgaagcctctggcagggctttgcaactttatcaatcgggtgtgtttactggtaaatgtgggacaagtttagaccatggtgtagtggttgttggatatggctctgaaaatggtgtggattactggctggtgaggaattcatggggcactggatggggtgaggatggctatttcaagatgcagcgcaacgtgagaa

SEQ ID NO: 109393 - DNA, 261 bp, Glycine max
aaagaagcaccatccataatatttattgatgagatagatgctgtggctaaaagtcgtgatggtaaatttcgcattgtcagcaatgatgaacgggaacaaaccttgaaccagctgctcactgagatggatggttttgacagcagttctgctgtcattgttcttggagcaactaatcgtgcagatgtcttagaccctgcactccgaagaccagggagatttgatcgagttgttatggtggaaacacctgataggatggaagag

SEQ ID NO: 109394 - DNA, 267 bp, Glycine max
cacgtatcaacttcaataatcgcatcgcagaagcagtttccggtgcatctcatcgtctccgaaaatgaacgacgcagatgtctcgaagcaaatccagcagatggtgcggttcatccgccaggaagctgaggaaaaggccaacgagatctctgtctccgccgaagaggaattcaatatcgagaagctgcagttggtcgaagccgacaagaagaagatcaggcaagaatacgaacgcaaagagcgccaagttgaaattcgcaagaagat

SEQ ID NO: 109395 - DNA, 262 bp, Glycine max
ggaagaaatggtgaaggcaaagtttgaggctactgccatagaaaaagagctgagggagactcatggtgcttggcttcccccttggcttgctgttcactatattcatagtaagtcttttgttgatagtcattggaacaaacatgggaaacctgctttggaaatggttactcaaaaggccctagagaaaaaggcacaagctggaaagtgggctgaacctcatgtggaaaccattaaaactaaatgggtcccagctgtaaaagaa

SEQ ID NO: 109396 - DNA, 261 bp, Glycine max
tctttctctctcccttagtcaaagggactcattgttcttctcccaggttatttagaaaagcaaaatggtgaagatttgctgcattggtgctggatatgtggggggtcctactatggcagtcattgcacttaagtgcccatccattgaagttgctgttgttgatatctctaaatcccgcattgcagcctggaacagtgaccagcttcctatctatgaacctggccttgatggtgttgtgaagcaatgccgtggcaagaacct

SEQ ID NO: 109397 - DNA, 261 bp, Glycine max
  unsure (1)..(261): unsure at all n locations
ttcttctcttgcggctagggttttagcgctcttcttctagatttatctccgatgggtacgganaaggttcacatcagtattgtggtcattggtcatgtcgactatgggaaatccactaccactggtcacttgatttacaagcttggaggcattgacaagcgtgttattgagaggtttgagaaggaagctgctgagatgaacaagaggtctttcaagtatgcctgggtgctggacaaacttaaggctgagcgtgaaagagga

SEQ ID NO: 109398 - DNA, 260 bp, Glycine max
ttggaatccaaaaatgagagaaatcatcagcattcacataggtcaggccgggatccaggttggcaactcctgctgggaactctactgcctggaacatggcatccagcccgatggcatgatgccaagtgactcctccttcggtgtagcccacgacgccttcaacaccttcttcagcgaaaccggatccggcaagcacgtccctcgcgccgtcttcgtcgatctcgagcccaccgtcatcgacgagtccgttgtggcactta

SEQ ID NO: 109399 - DNA, 254 bp, Glycine max
actcttcgttcttcgactgtctacgatctgctttctctgaattgtgaaaatgtcgctcggagaaactgcttgttcatacgcagctctcatccttcatgaagatggaattagtgtaactgctgacaagatcagcaccttgttgaaaactgcaaaggttccagtagactcttattggccaaccttgtttgctaaacttgctgagaagaaaaatctggcgatttgatagcaatgcggcagcggtggtgcaccgttgc

SEQ ID NO: 109400 - DNA, 257 bp, Glycine max
cgggatgaaacacgctgctcgaattatgatcccgaagaagaagggctcaatcatttctttatgcagtgtagcaagtgccataggtggcttaggaccgcatgcatacacagggcccaagtatgctgtattggggctcacaaagaatgttgcagctgaattggggaaacatgctataagagtgaactgtgtgtcaccttatggtgttgcaacaggtttggccttggctcatttgcctgaggatgagagaactgatgatg

SEQ ID NO: 109401 - DNA, 259 bp, Glycine max
gattcagcttacaatgacgctctttaagtttgctttcattccaggttacaggtttctgccaacgcataccaacaggaggatgaaagcaattgacaaagaaatacgagaatcacttatggtaatcatcaaccgaagattaaaagcaatcaaagcaggggagcctactaacaatgacttgttaggcatactcttggaatcaaattacaaggaatctgaaaaaagtagtggtggaggaatgagtttaagggaagtagtggaa

SEQ ID NO: 109402 - DNA, 258 bp, Glycine max
gggaagccaaagcgaaaccctaaccctaacggagagatggcggacacttggcatcgatattcgggacggagaaggacagggtgaactgtccgttctacttcaagatcggcgcgtgcaggacacggcgaccggtgctcccggcttcacacgaagcccacaattagcccaacgttggttctgtcgaacatgtaccagaggcccgacatgaacatgaacatcatcaccaaccccgatcagccccagccccaatctctcgac

SEQ ID NO: 109403 - DNA, 253 bp, Glycine max
atggtgacttctcagggtcccttatggtgcaaattgtggtcctccagtgtatcatttggtacaccttgatgctgttcttgtttgagtttagaggtgccagaatgcttatctctgagcagttccctgacactgctggctccattgtctccatccatgttgactctgatgtcatgtcattggatggaaggcaaccacttgagactgaagctgagatcaaggaagatggtaaactccatgtcactgtgaggaagtc

SEQ ID NO: 109404 - DNA, 253 bp, Glycine max
ctcgagccgctcgagccgcctgccatgtatgtggccatccaagctgtcctctccctatatgctagtggtacgcacaactggtattgttttggactctggcgatggtgttagtcacactgtgccaatctatgagggctatgcactccctcatgccattcttcgtttggatcttgctggccgtgatctgactgactctttgatgaagatcctcactgagagagggtacatgttcaccacctctgccgagcgggaa

SEQ ID NO: 109405 - DNA, 260 bp, Glycine max
actcgagccgattcggctcgagtgaaatttgtgattaattagccactgtgtgtctttttttacttatttgtcacctttctcagctctcaggttaaggactgaatcatgtgcatctggctccaaggcatgtcgtgagaaattgcgaagggataaacttaatgagaggtttctggaattgagttcgatcttggagcctggtagacagcccaaaacagacaaagttgcattattaagcgatgcggctcgagtggtaatccaat

SEQ ID NO: 109406 - DNA, 259 bp, Glycine max
ttggaatatgctgtcagctgcttattgcaaggtataaaatttggtctcgtcaattcaagaagccatcttgctcgtgtgctttatcttcttagcttcgatactcctaatgagcctgttggaaggtcatttgataagtactatgaacaagtaccacactgggtttggctttcttggattccacagctcttactctccctgcagaggacagaagctcctcactgtaaacttgttcttttgaagattgcaacattgtatcctc

SEQ ID NO: 109407 - DNA, 261 bp, Glycine max
gcgcaagatatttactgggttatttgtgcatcgctacagagacattgaccaaaatattagaatgtcatgcatcgaatcgttgggtgcatggatcctgtcatacccatcacttttcctgcaggatttgtacttgaaatatcttggatggacgctgaatgacaaaaatgctggtgtaagaaaggcttctataagtgctctgcaaaatctttatgaggtggatgataatgtgccaacccttggtttatttactgaaagattttc

SEQ ID NO: 109408 - DNA, 257 bp, Glycine max
gttccgagttttctgatcgctcatagagagttcgacgcggcggttgcagaagacgattgcaagatgaagttcaacatcgcgagtcccaccactggatgccagaagaagctcgagatcgacgacgatcagaaactacgagcattttgggacaagaggatctcacaggaggtcagcggagatgcacttggtgaggaatttaagggctatgtcttcaaaattactggaggttgtgacaaacaaggattcccgatgaaaca

SEQ ID NO: 109409 - DNA, 252 bp, Glycine max
atagcatcaggtggaggtcgtatgaatgtcacaatggatcgttatgagaatgactggaatgttgtgaaacgagggtgggatgctcaagttcttggtgaagccccttataagtttacaaatgctcttgaagctgtcaagaagctgagggcagaaccaaaggccaatgatcagtatctgcctccttttgttattgttgacgagagtgggaaacctgttggtccgatagttgatggagatgctgttgttacattc

SEQ ID NO: 109410 - DNA, 248 bp, Glycine max
gtgaaagagaatccgaggcgaagagaagagaaaaattaagatggaggggaaggagcaggatgtgtcgctgggagcgaacaagttcccggagagacagccgattgggacggcggcgcagagccaagacgacggcaaggactaccaggagccggcgccggcgccactggttgacccgacggagtttacgtcatggtccttttacagagcagggatagcagagtttgtggccattttctgtttctatacat

SEQ ID NO: 109411 - DNA, 252 bp, Glycine max
  unsure (1)..(252): unsure at all n locations
cctcgagccgattcggctcgagggccaccgacgcctccgccaccgaccctatccctgacgtcatgaagtcctccatccgccaggacatcgtcaacttcgtacactccaacatctccaagaacagccgacaatcctatgcagtcagccgccgcgctggccaccagacttccgccgagtcctggggaaccggtcgtgccgtctcccgtatcccccgtgttcccggcggcgganaccatcgcgccggccagggag

SEQ ID NO: 109412 - DNA, 253 bp, Glycine max
gaaaaaggcaaaaggagatttgtttctggggatggtgaagagatgacattgattccgggaaccagtgttgaagaggcctactacaagctaatagttgaacttgagagaagtgttcctacattggttggcattgaatgtcccaaggatgagaaacttcctcgtcgcaaaatttttgacaaacctaagacgcgctgcttcactattctccctatggagtttaatcttgtggttcgtcagaagtttttaaattttg

SEQ ID NO: 109413 - DNA, 254 bp, Glycine max
tgctcaaattttgatggttccagggcgcagattcatagctcatggacattttttcaaaaatctgactcagaaagtgcgagtccaaattgttacatctgaaaaaagttactggcatgtgtatgatcctgacaagtttcagatgtttgacaacagtgaaataggtctctattctaatcccactttggaagatatcccacattcagcttgggaccttttttgctgggacagtgagaaaactctgccaaataattttt

SEQ ID NO: 109414 - DNA, 258 bp, Glycine max
cgatctgctccgcggaatctaccagtacggcttcgagaagccctccgccattcagcagcgggccgtcacgcccatcattcagggccgtgacgtcatcgctcaggcccaatccggaacggggaaaacgtccatgattgctctcaccgtttgccaggtcgtcgatacctccgtcagagaggttcaggcattgatattgtcaccaacgagggaactggcctcacagactgagaaagttatattggctattggggatttcat

SEQ ID NO: 109415 - DNA, 258 bp, Glycine max
tctcgagccgaatcggctcgaggctttcttttatgctagtgaacgcatagtccatcacaacgacatatttatattcggcataactaacaccgtactctctaatatcccatactatgaaaaacatggatatggggtggaggaatttaatgaaaccttatatgatgaatgggttaacaagggcgacgcaccggcattgccagagactcttaaaaattacaacaagctgttgtctcttggcttcaagattgtattcttgtc

SEQ ID NO: 109416 - DNA, 259 bp, Glycine max
agtctataaagctgcacaatacgttaaatttcattccaggttaaaggtttctgccaacgcataccaataggtaggatgaaagcaattagacaaagagaataccgaggatcacttatggaacatcatcaaccgaagattaaaagcaatcaaagcaggggagcctactaacaatgacttgttaggcatactcttggaatcaaattacaaggaatctgaaaaaagtagtggtggaggaatgagtttaagggacatagtggaa

SEQ ID NO: 109417 - DNA, 251 bp, Glycine max
ctcaaagattaagccatgcatgtgtaagtatgaactaattcagactgtgaaactgcgaatggctcattaaatcagttatagtttgtttgatggtatctactactcggataaccgtagtaattctagagctaatacgtgcaacaaaccccgacttctggaagggatgcatttattagataaaaggtcaacacaggctctgcctgttgctttgatgattcatgataactcgtcggatcgcacggcctttgtgc

SEQ ID NO: 109418 - DNA, 252 bp, Glycine max
cttacagacaagagcaagcttgatgctcagccagagttgttcattcacattattcctgacaagaccaacaatacattgtctatcattgacagtggtattggcatgactaaggccgatttggtgaataacctcggtactattgcaaggtctgggaccaaggtaattcatggaagccctggctgctggtgctgatgtgagcatgattggacagtttggtgttggtttctactcggcttatcttgtagctgacaa

SEQ ID NO: 109419 - DNA, 250 bp, Glycine max
tccaacaagccacggtgaacatgggaaacaagttttacacgcaggaacagcttctgtcggcactatcatccaaagttggcgatgaactacgatagttccttctgtactattattggtagcagtagctgtagctttctatgtaaattagtgttcttatttttggttagtcctttttggtagcttggactaaattaattttattgaggtaatttgattgggaagctgaatgatcaaccagggatagtagtaa

SEQ ID NO: 109420 - DNA, 252 bp, Glycine max
gtttttacaatccttcaaaaattttgtttctttgtgtgtgtatggtgatgataacttaattagtgttcatgaatatgtcaagccttactttagtggttctaaattgaaaagctttctagctggtcataatatcaccattactgatggtattgacaaaactagtgcaactttgcaatttagaaagttagcagattgtgattttctcaagagaaacttaagcagatgtctaatgttttgtgggtggctcctgag

SEQ ID NO: 109421 - DNA, 253 bp, Glycine max
ctgctcgagcatcaatgattctttattaactggattagagtttgttgatggctttcaaagctattactttgtgaaaaggtggactatgcatcaattgctagtggagtgtccatcaatctatgagatgttggcaaatccatattatgaatggaaaaagcaaccagaaattctagtttggcgaaagcataccaaggatggggacaataacatcaatttggaatcttatggaccaacccagagtatctctttattt

SEQ ID NO: 109422 - DNA, 247 bp, Glycine max
aaagcattccatagcctcccataaaaatgaagaatactatcttctctgctctctttctactttgtgccttcaccacctcatacctaccttcaaccaccgcggtggtcgataccgacggtgatattcttcagaatcctggcacatactttatcttgtccgtttttcgacccggcggcggagtagaattcgccgccactggaaacgaaacttgccctctcactgtcgtgcagactctcttcgggagggg

SEQ ID NO: 109423 - DNA, 251 bp, Glycine max
aatgaaggtccttgttttcttcgttgctacaattttggtagcatggcaatgccatgcgtacgatatgttccctctccgaatgaacactggctatggtgcccgtactccggaggtgaaatgcgcaagttggaggcttgctgtggaagcacacaacatctttggctttgagaccattcctgaagagtgcgttgaagcaacaaaggaatacatccatggcgaacaatatagatcagactccaaaacagttaacc

SEQ ID NO: 109424 - DNA, 269 bp, Glycine max
acgcaatgagttcgtcgaacctcagagatcttcaacgcgaattggagaacaaagccaatgatctcagcaagcttcaaaaggaaattgcgaagaatcaccaaatgagaaagaaatacacggtccagcttggcgagaacgagctcgtccttaaggaactggatttattgaaagacgacgcaaatgtttataagttgattgggccagtacttgttaagcaagatttggccgaggccaatgcaaatgtccgcaagagaatcgaatacatctca

SEQ ID NO: 109425 - DNA, 270 bp, Glycine max
cgggcaagggccacatggagaatggccatcagcgccgtcaagctcttctggaagaagccagaccagcgctacaagatcgagccactccaagacgacgaggaactcggcaactctaattaccccgtcgtgcttgtccagattccaatgtgcaatgagaaagaggtgtacaaggtgtcgattggagcagctgtaatctttcatggcctgcggatcgtctcgtcatccaagtgcgtgatgattctactgaccctaccgtcaagcaaatggtgg

SEQ ID NO: 109426 - DNA, 280 bp, Glycine max
gctgtaagacgtgtgcggataagaaggacaatgcggcaatgtttgccacaaggtaactgggtggaacaattggtctcaaaaatttgttgaaatggaaggggaggaaacatttgaaccatcttttcttggatatgctgatgaggttgttgaggagcgaatttctgatgatgctgtagttatgatcaaagggaccaaaactacaagcgcagtcactttgattctaagaggtgcaaatgaccatatgcttgatgagatggacagagctctgcatgatgcattg

SEQ ID NO: 109427 - DNA, 270 bp, Glycine max
gacttacacaattgctggacgtgtgaactttcattacagaacaagttgccttttacactggtcccacagttggaggacttctgaatgctacatgtgggaatgttactgagctcataatagcaatatttgcccttagcagtaacaaaattgccgtggtcaagtattctctgttgggttctattctttcaaaccttcttctggttcttgggacctctctattatgtggtggcattgcaaacgttggagtggaacaaaaatatgatagaagac

SEQ ID NO: 109428 - DNA, 274 bp, Glycine max
caaggcagaaagcaagctcatcctagagttttaaaaatggcagcagcctcctccatggctctctcttccccatccttggctggcaaggccgtgaagctgggcccatcagcccccgaagtcgggagggtcagcatgaggaagaccgtcaccaagcaggcctcctccggaagcccatggtacggcccagaccgcgtcaagtacttgggcccattctctggcgagcccccgtcctacctcactggcgagttcccaggtgactacggctgggacactg

SEQ ID NO: 109429 - DNA, 265 bp, Glycine max
gtatatattaaggcggcacagacccaagtgggtgtaagtcagtcttgggagtgagtcactcttcttgcataacccagatctgacaatatgcgaagaactggcttgttacatttgttatgccttgtcattgctttagtaagtgtgcaagcagaagatgcgtataagtattacacatggacggtgacttatggaactatttctccattgggtagtccccagcaggttattcttatcaatggtcagtttcctgggcctagacttgact

SEQ ID NO: 109430 - DNA, 294 bp, Glycine max
tacgaagtcggaatcggctcgagctgagcgcaacagcaactgcagcaatggctcccaaacgaggtggaaaggctccggctcatgccgctaagaagaagcctgagaaggtttcgaatccgttgttcgagaagcgtccaaagcagttcggaatcggaggggcgttgcctccgaagagagacttgactcggttcgtgaagtggccaaagaatgttcaaattcagaggaagaagaggattctgaagcagaggttgaaggttcctccagctttgaaccagttcaccaaaactcttgaca

SEQ ID NO: 109431 - DNA, 277 bp, Glycine max
ccattcctgaagagtgcggtgaagccacaaaggattacatccatggcgaacaatatagatcagactccaaaacagttaaccaacaagcttacttttatgccagagacctcgaagtccatcccaaggacacatttgtgttcagtatagatggcaccgtactctctaatattccatactacaaaaaacatggatatcgggtggagaaatttaactcgaccttgtatgatgaatgggttaacaagggcaatgcaccggcactgcccgagactcttaagaa

SEQ ID NO: 109432 - DNA, 278 bp, Glycine max
ctagccatgacatgttggatatcttgctgggatatttctgaccagagtagcgagaagattcataggaagcagatcaagcatttgttccttgacctattcgttgcggggacggatacaacagcctacggcttagagagaacaatgacggaactaatgcacaatccagaagccatgagaaaagcgaagaaggagatagcagaaacaataggagtaggaaaaccggtggaggaatccgacgtggcaaggctgccatacctgcaatcagtgataaaagaatc

SEQ ID NO: 109433 - DNA, 252 bp, Glycine max
  unsure (1)..(252): unsure at all n locations
agancaacattcactgaacaatggatggtcttggggcaaaggagctttgaaaagattttgttgtttctgggactgcatctgagtctctgtatggtgcttgtgaggcgatgtttaaagcttgacatggaaccagaggaattgtttgagaccatctcccaagcactgctatcatctgtagatcgtgattgtttgagtggctggggaggacatgtctatgttgtcacgcaaccgaagtgaaggaaaggattttga

SEQ ID NO: 109434 - DNA, 267 bp, Glycine max
ctcgagccgaatcggctcgacgcacaacgagacgggacgcaccgtcgcctgcaagtcaatacccgaagcggaagctgctctgcaaggaggactacgacgacgtatggagggagattcagataatgcaccacctctccgagcaccccaacgtcgttcgcatccacggcacctacgaggacgccgcctccgtccacctcgtcatggagctctgcgagggaggggagttgttcgacaggattgtgcagaaggggcactacagcgagcgcc

SEQ ID NO: 109435 - DNA, 270 bp, Glycine max
taagagattcattattgaaatttggataaggtaaacaatttaattggattggtcgaatggtatcaaaaaaatggagtactaactcccatttcttatttattattgaattaaccgatcaacttgctttgttatcgaacatttctttttgatttcaaaaattttccggaaaaaatttgaatctatttttatatgcgaatcaatcctactacttctggtcctgaggtttctgcgcttgagaaaaaaaatctgggacgtatcgcccaaataatt

SEQ ID NO: 109436 - DNA, 275 bp, Glycine max
tgtcgccagcaccaagagactcttcaagatcacgctctctctcctccgcctcggcttcaactccttcaaatgcaaaacggcagccaagatggccgtggccaggatcaagctgctgaggaacaagcgagaggtggtcgtgaggcagatgcgtcgcgacattgctcttcttctccagtctggtcaagacgccaccgctcgcatcagggttgagcatgtcatgagagagcaaaatgttttggctgcaaatgagttcattgaactcttctgtgaattag

SEQ ID NO: 109437 - DNA, 270 bp, Glycine max
ctcgagccgaatcggctcgagcgcacaacgccacgggacgcacctacgcctgcaagtcaataccgaagcggaagcagctctgcaaggaggactacgacgacgtatggagggagattcagataatgcaccacctctccgagcaccccaacgtcgttcgcatccacggcacctacgaggacgccgcctccgtccacctcgtcatggagctctgcgagggaggggagttgttcgacaggattgtgcagaaggggcactacagcgagcgccagg

SEQ ID NO: 109438 - DNA, 270 bp, Glycine max
catcatcaaagttttttcctttctctgctctttgccttctctgacacatttggtgcctcgtagagcgtgttttggcaggaaggtggtatggcgaaggacgttgaggttgctgagcgtggctccttctctgggaaggactaccaggaccctccaccagcaccactcattgatgctgaggagctcacaaagtggtccttttacagggctctcattgctgaattcattgccactttgctcttcctctacattactgtgctcacagtcataggg

SEQ ID NO: 109439 - DNA, 271 bp, Glycine max
atggttttgaccaaacagttaatgttaaagttattatggcaactaacagagcagacactttggaccctgctctgttgcgtcctggaaggcttgatcgtaagattgagttccctttgcctgatagacgtcaaaagaggctcgtatttcaggtttgcacagccaagatgaacttgagtgatgaggtagacctggaggattatgtttctcgtcccgacaaaatcagtgctgctgagatatcagctatttgtcaagaagctggaatgcatgctgt

SEQ ID NO: 109440 - DNA, 269 bp, Glycine max
ggagattggtacacccgcaatcatacggatttgaggaaggcccttgatgatggaaaagatcttggcatgccggatggtgttctcatcaacgggaaaggcccttaccgatataacaacacacttgttcctgatggcattgattatgaaaccattgaagttcatcctggaaaaacttaccgacttcgtgtacataatgttggagtatcaacaagtctgaatttcaggatccagagtcataacttacttctagcagagacagaggggtctta

SEQ ID NO: 109441 - DNA, 270 bp, Glycine max
ctggaataaaactatgtgagctaaagtatgtttaatttgacaggaagatatagatctcatggccagcttgaattttgatgcctaccggttctcaatctcgtggtccagaatttttccaaatggaactggccaagtaaattggaaaggtgtagcatactacaataggctgatcaattacttgctagaaaaaggtattactccatatgcaaatctctaccattatgatcttcctttagcacttgaggagaggtacaacggattattgagccg

SEQ ID NO: 109442 - DNA, 188 bp, Glycine max
gaaattttgataaaccgcgatcacaggttgccgcaccttaaaaccggaaacaaaagcaatcgttacttggtttcaagaatttctcaatttcttcctatttctttgtgtacgatttcttaagggaaagaaaatcactctctgtgctggccacagacttcgtgaatcattttcttttccacacaacatac

SEQ ID NO: 109443 - DNA, 276 bp, Glycine max
aatttgtttaaattgtctcttgatgatgttgaaactcctaaaggttccatgttggatcttaaaatttctcaatctaaaattgcacttcccaagaacacagttggaggaaccattctgcgtagtgatctattggcaaattttttgacagagggcaattttagagcaagtgttgatttgcagcgcactcatcgtattaaaggaatgattaaaatggtggctacagttggtattcctgagaatacaggtatagcattggcctgtgctatgaatagttct

SEQ ID NO: 109444 - DNA, 267 bp, Glycine max
gctatggacaaagagctcaggtctcatccgaatctggattgcttctgtagtgggagcactgctgtgactatagtgaagcagggttcgaatctgttcatgggctatatcggggattctcgagcaatcatgggatccaaggatagcaatgactccattgtggctattcagttgactgttgatttgaagcctgatttgccaagggaagcagagagaattaagaagtgcaaaggtagggtatttgctttgcaagatgagcctgaagtgcct

SEQ ID NO: 109445 - DNA, 258 bp, Glycine max
agggtttatacaattttcgatggcttcttcagatgttgagtaccgttgctttgtcggtgggctcgcttgggccagtgacgaccaagctgtcgagagagccttctctcagtacggcgaaatcgttgaaacgaagattatcaacgatcgtgagactggaagatccaggggttttggatttgtgaccttcgcctcggagcagtccatgaaagacgccatcgaagggatgaacggccaaaaccttgacggccgtaacatcac

SEQ ID NO: 109446 - DNA, 228 bp, Glycine max
ccaagggccaaactccattgtttcctcgtatatttggtcatgaagctggagggattgtggagagcgtaggtgagggtgtgactcatctctaaccaggggaccatgccctcccagtgtttaccggggagtgtggagaatgccctcattgcaagtcagaggagagcaacatgtgtgatcttctcaggatcaacactgataggggtgtcatgatccatgacagccaaacaa

SEQ ID NO: 109447 - DNA, 268 bp, Glycine max
actcgaccgattcggctcgaggtttcaaacctaggaagttggaagacatggcagcaacattgatggcagcaacaagttctggcactcttaaagcaactcctttcctaggccaaggcaagggtgccaatgccaatgctcttagggatgttgtttccatgggaactgggaagtacaccatgggcaatgatttgtggtatggaccagacagagtgaaatacttgggacccttttcagctcagaccccttcatacttgaaaggagaattccc

SEQ ID NO: 109448 - DNA, 269 bp, Glycine max
ttcgggatgtccctgctgttactcggctgcttaggaactacttgagccagtttgttgttgcacctgattttgatgaaaatgatgttgaacattggcttcttcccaatgagaatgtggtggatagtttcttggtggagagtccagagaatcatgagatcacagacttctgcagcttctatactcttccttcttccatccttggaaatcaaaattactcaattttgaaagctgcttattcttattataatgtttccaccaaaactccgctg

SEQ ID NO: 109449 - DNA, 272 bp, Glycine max
catccatgcagaagcttgtgtacaacagccagcaaacaactggaggggaatctttagcatgtcatcatattcagagtatttcaatgtagacacagatgttgtcttaatcagattgataagttccttgaatccagttgctgcagactttttcagcaagatagatgctaaccctgatttatatgggcttatatggatctcaacaacattggtttttgtgcttgcctcacttggaaatctggccacgttccttatgcaaaaacatgcagataaca

SEQ ID NO: 109450 - DNA, 271 bp, Glycine max
tgagaatctcaaaatcctctcccaatgcaactcccattacatcaaacatgtggagttctttattgtggaaacaaaataagaaagtttcacctaccagttctgctaaatttagagtgctggcaattaagtctgacaatagcaccatcaacaggctcgagggtctacttaatttggatatcactccattcactgacaagataattgctgagtacatttggattggggggacaggaattgatgtgcgcagtaaatcaagaacaatatcaaagcc

SEQ ID NO: 109451 - DNA, 273 bp, Glycine max
ggttgtgaaagcagagaagtgagatacactaagttatcctcataaatacactctaattaggtggcaagataagtgtctaaccttagtaacattgccacatattgtgttcatttatgaattgtgccactaaaattctattcaattcatctatggctgcctcttcttatgctatgcaatcaatcctggcaaaccctttgatccgcatttccagcgggtctagggtgaaccaatttggcgttcctgctttgcacatgagaaggaatgttggcctga

SEQ ID NO: 109452 - DNA, 278 bp, Glycine max
agcatagtcaatccatggacgggtcaaccaccatcaagcctgagttgctggtctcgggttcggaagacatgtcggcggctgattccaaaaaagcaatatcagctgccaagcttgctgagcttgccttgattgaccccaaacgtgcaaaaaggatatgggcaaataggcagtctgctgcgaggtcaaaagagagaaagatgcgatacattgctgagcttgaaaggaaggtgcaaacattgcaaacagaagcaacatctttgtctgcacaattaactctc

SEQ ID NO: 109453 - DNA, 273 bp, Glycine max
atcgagccgcattttttcaaaaatctgactcagaaagtgcgagtccatattgttacatctgaaaaaagttactggcatgtgtatgatcctgacaagtttcagatgtttgacaacagtgaaataggtctctattctaatcccactttggaagatatcccacattcagcttgggaccttttttgctgggacagtgagaaaactctgccaaataatttttctgcagaattgctctcttgcaaattggatactgttactggccaatattatcctgag

SEQ ID NO: 109454 - DNA, 270 bp, Glycine max
tgcttggccgcatattcaatggttctggaaaaccaattgataatggtccacccattttacctgaggcttacttggacatatcaggaagttccatcaaccctagtgagagaacctatccagaggagatgatacagacaggaatatctaccattgatgtcatgaattctattgctagaggtcaaaagatccctctattctcagctgctggtctcccccataatgaaattgctgcacagatatgccgtcaggctggcttagtcaagcgactag

SEQ ID NO: 109455 - DNA, 268 bp, Glycine max
agccaaggttatggaactgatacaacagcactgagcactgctctgttcaacaatggcttgagctgtggtgcacgctatcaaattaaatgtgtgaatgatccacagtggtgccttcctggctccatcatagtcactgccacaaatttctgtccacctggtggttggtgtgaccctcccaatcaccactttgatctgtctcaacctgttttccagcacattgctcaatacagggctggaattgtgcctgtagtttacagaagggtgaggt

SEQ ID NO: 109456 - DNA, 268 bp, Glycine max
gtttggcatctgaatccccaaaatatcgaaatctgagagaggcattgattggtaaggtaaggtaatggcggaagagagtaaatctagcagcgaggaaagtgtgaagctgttcgtagggcaagtgcccaagcacatgaccgaacccgaactccttgcaatgttcaaggagttcgcgctcgtcgacgaggtcaacataatcaaagacaaagcaactcgtgcttcccgaggttgttgcttcctgatttgtccgtcaagggaggaggcggat

SEQ ID NO: 109457 - DNA, 276 bp, Glycine max
  unsure (1)..(276): unsure at all n locations
agcatagtcaatccatggacgggtcaaccaccatcaagcctgagttgctggtctcgggttcggaagacatgtcggcggctgattccaaaaaagcaatatcagctgccaagcttgctgagcttgccttgattgaccccaaacgtgcaaaaaggatatgggcaaataggcagtctgctgcgaggtcaaaagncagaaagatgcgatacattgctgagcttgaaaggaaggtgcaaacattgcaaacagaagcaacatctttgtctgcacaattaactc

SEQ ID NO: 109458 - DNA, 277 bp, Glycine max
gtgcatttcaatccacatcggccaggccgagaattcaggttataaacgcctgctgggagctttactgcctcgaacacggcattcagcctgatgggcatatgccaagtgacaagaccgttggtggaggtgatgatgctttcaacaccttcttcagtgaaactggggcaggaaagcacgtgccccgcgcgatttttgtagatcttgagcccactgtgattgatgaggttaggactgggacataccgccaactattccatcctgagcagctcattagtgg

SEQ ID NO: 109459 - DNA, 269 bp, Glycine max
aaaaacccttctttctttcaggttcattacttgatcagtgtcaaaagggtagttgcaaattgcaatggctaagcattatgttgagggtggttccttctcagcaaaggactaccatgatcctcctccagcacctttgattgatgctgaggaactcacacagtggtccttctacagggctttgattgctgaattcattgccacattacttttcctttacatcacagtgctcactgtgattggttacaagagccagagtgatgtcaaggccg

SEQ ID NO: 109460 - DNA, 264 bp, Glycine max
ctttctctttctctgccaacctgcacactcttcactcgatcaaacagaaaatggcaaagaatgtggggatccttgccattgacatctacttccctcccgcttgcgttcagcaggaagcattggagactcatgatggtgccagtaaagggaagtataccattggtcttggacaagattgcatgtcattctgtaccgaagtagaagatgtcatctcaatgagtttgacagtggttacttctcttcttgagaaatatgagattgatc

SEQ ID NO: 109461 - DNA, 264 bp, Glycine max
cttgaaacagagtgaaaaccactttgagatgaatcctttcacattggttgatggaaagccttatcctttggatatgagaggcgagctagatgacactgctgctttcaagaacttcaagaagtggggagacattgaatttccgctgccatttggaagggttatgagtgccaccgagtctttcattcatggattagatgaaaagacaagtgcatccttaaaattcacagtgttgaaccctaagggccgaatttggacaatggtagc

SEQ ID NO: 109462 - DNA, 266 bp, Glycine max
agaggttttgacgcaacacactttcactgagaaaggatctctatctaccaaggagcagaataaaacccttctctctggtaagtgaataagagaatggcttcagatcggaaacttcacactttcgaggaggtggcaaagcacgaccagaccaaggattgctggctcatcatttctggcaaggtgtatgatgtcacccctttcatggaggatcatcccggaggtgatgaggttttgttatctgcaacagggaaagatgcaaccaatga

SEQ ID NO: 109463 - DNA, 263 bp, Glycine max
taaatgcaactaccacaaagacttacgcacaaagaaccatatttttcttgcaaagtgatggaaccttgacgccattggccattgagttaagtaagccgcatcctcagggtgaaggatatggtcctgttagcgaagtctacgtgccttcgagcgagggagttgaagcttacctttggttactggcaaaggcttatgttgttgtgaatgactcgagctaccatcaactcgtcagccactggctaaacactcatgcggttgttgag

SEQ ID NO: 109464 - DNA, 268 bp, Glycine max
caaacattatgctccaaaaagatgctagtatttcatcctctggggtgttacaactcaccaaagttggcagcaacggcgtgcccacctagggatctctcggtcgtgccctttacgctgccccaatccagatttgggacagcgaaaccggcaaggtagccagctgggctacatcctttaaattcaacattttcgcacccaacaaatcaaactcagctgacgggcttgccttcttcttggcacccgtcgggtctcagccccaatccgacga

SEQ ID NO: 109465 - DNA, 268 bp, Glycine max
gcatatgcacatgagctgccacgatatggtcttgaagtagggcttacaaattatgctgcagcttattgcactggtctcctgttggcccgaagagtcctcaaaacacttgaaatggatgaggagtacgaaggaaatgttgaggctactggagaggactattcagtggaacctgctgagagcaggaggccattccgtgctctccttgatgttggtcttattaggactacaactggcaaccgtgtctttggtgcccttaagggagctctgg

SEQ ID NO: 109466 - DNA, 271 bp, Glycine max
gtggtgccttatcgctgtggttatcatcttcttcttcctctttcttagatctcttctttctctacgccgcacgccgaatccatggccggaaaaggatagggtcctgctatctcaatcgatctcggaaccacctactcttgcgtcggtgtgtggcaacatgaccgcgttgaaatcatcgccaacgaccaagggaacagaaccacgccgtcttacgtcggattcactgacaccgagcgtctcatcggtgatgcggccaagaatcaagtcgcca

SEQ ID NO: 109467 - DNA, 270 bp, Glycine max
atagaaaatcctcacccattttcttcgtagccaaacactctcaaattctcagttatgtcgtggcaagcgtatgtggatgatcacctactgtgtgaaatcgaaggtaaccacctcactcacgccgctatcatcggccaagacggaagcgtttgggctcagagcaccaacttccctcagttcaaacctgaggaaataactgccatcaataatgactttaatgagcctggatcacttgctccaactggattgtatatcggtggcaccaaatac

SEQ ID NO: 109468 - DNA, 273 bp, Glycine max
gggattagttatactcctgaccaagttgtggttagtatcggagccaaacagagcattgctcaggcagtgcttgcagtttgctcccccggagatgaggttattattccagctccattctgggttagttacccagaaatggcaaggttggctgatgcgacacctgtgattcttccaaccttaatatctgataatttccttttggatcccaaactccttgaatccaaaattactgaaagatcgagactgctcattctttgttcaccatctaaccca

SEQ ID NO: 109469 - DNA, 273 bp, Glycine max
cctactttcagctcctaagagcacgcatcactgttgcacttcttactcgttctccctcttttttttcttcttcttcttcttcgctaaaccccccctttatttttcctatctcactaacatcgatgggagacgagaataagaccaagtcccctgcttccggcgtgtggtccaccatcaagcctttcgtcaatggcggagctccggcatgctcgccacctgcgtcattcatcccatcgatatgatcaaggtgaggattcaacttgggcaaggatc

SEQ ID NO: 109470 - DNA, 265 bp, Glycine max
ggagccttgaatgttgatgtcaatgaattccagaccaaccttgtgccataccccaggattcattttatgctttcatcttatgctcctgtaatttcagccgagaaggctcaccatgagcagctatcagttggtgaaatcaccaacagtgcattcgagccatcatctatgatggccaagtgtgatccccgccatggcaaatacatggcgtgctgtctcatgtacagaggtgacgtagtgcctaaagatgttaatgcagctgttggaa

SEQ ID NO: 109471 - DNA, 260 bp, Glycine max
gcaataactcgttgtacattcctagtgtgtgggagagacatggctaagatgtgtgttttggtgttggttcttgctctggctgtggccacaagtgccagaaacgttcccaaccccaaggatgctggtcttaaggaccagaagaacttcatcagctatggtggagttggtggttattccgggattgggaacaatggactgccttttggaggagctggtaccggactaggtggtggtttgcgcggatgtggtggacttggtgg

SEQ ID NO: 109472 - DNA, 259 bp, Glycine max
gaaagataaagcattccatagcctcccataaaaatgaagaatactatcttctctgctctctttctactttgtgccttcaccacctcatacctaccttcaaccaccgcggtggtcgataccgacggtgatattcttcagaatcctggcacatactttatcttgtccgtttttcgacccggcggcggagtagaattcgccgccactggaaacgaaacttgccctctcactgtcgtgcagactctcttcgggaggggctttc

SEQ ID NO: 109473 - DNA, 257 bp, Glycine max
gttaatttgttgagagagagcaatcaaaaacattcatggcgtcttccaaggagagagaagaaaacaccaattaaccaccacctgataggctgatacaatacaatctcctttcctttttcgacaacaagaatggctgcgaaatctagttcgagttcgacaacaacaaacgtggtgactctgaaggcggcgtgggttctcccgcagcgcacgcagaacatccgtgaggtgtacgaggttgggcggaagctcgggcaggg

SEQ ID NO: 109474 - DNA, 259 bp, Glycine max
gtgaattatggaatcctgcttgcacaaaagcaatggctatgtcatttaatccaaacccgtgttctgatgcatggagtttggaatttctgaagcgtaccggatttcattgtgatatcatttgtgtcactggatggactgccaccccaatgcaggatgttcaggttacaattgattggtttatttcctctcaggaatgtgttcccagaacctattgtgttttaaatccacaaaatccttttgtgttaaataggtggatggg

SEQ ID NO: 109475 - DNA, 258 bp, Glycine max
cggagaagaaccgcaaggagatctgcaaatacctcttccaagagggagtttgcttcgcgaagaaggacttcaatttggccaagcaccctgagatcgacgtgccgaatctgcaggtgattaagctgatgcagagtttcaagtctcgcgagtacgtgagagaaacttttgcttggatgcactattactggttcctcaccaacgatggcatcgagtttctcagaacttaccttaaccttccttccgaaattgtccctgcta

SEQ ID NO: 109476 - DNA, 257 bp, Glycine max
ggcgggtagggtttcgacgtgcttcttcttcgtgtttgctctttctctccttcttccttttcagatctccgctgaggaatcatcggagaaagagttcgtactcacattggatcactctaactttcacgacactgtcagcaagcacgatttcatcgttgtcgagttctacgctccatggtgtggccactgtaagaagcttgctcccgagtatgagaaagctgcttctatcttgagtagtcatgatcctccggttgttt

SEQ ID NO: 109477 - DNA, 261 bp, Glycine max
ctcgagccggctcgagaacgaaacgaagcgtgccacaacgtcgatttcactgcagggttattcgcctacggagggttaaagaaccagttcccctacgtcttaaaatggctagggctaagcggcgaaaagctccatgctgacctcgcgcgtgaggttcggcgcgtggtgaacgacgagggaggtgtcacgttcaccgcgttggagaacatgcctctcgtgaagtccgtggtgtacgaggtaatgcggatcgaacctgcggtg

SEQ ID NO: 109478 - DNA, 260 bp, Glycine max
aaagagagaggcggtgatgtcttcaattagattcctatggatcctgatggtgtctttgacggcatcatgcgcgttaagccaaccgcagaagctatcggcgtacgatgttctgatggagtacgggttcccggtgggtcttcttcccaagggagccatagggtattcgctcaacagagacagcggcgagttcgcagtgtatttccaaggagcgtgcagcttcgacatagagtcctacacgctcaagtacaaatccaccatca

SEQ ID NO: 109479 - DNA, 258 bp, Glycine max
aaagtttctgacatgaatgttgatcctaaagcaatgggaaatggctctattgctagttcaagtaattccagtagctccaaatcatatcttgcaaatggagtatctccagatggaccatacaattatttaaacaacgatttctcatttccaccagaaggcgtaccttctctaagattaccattggtaaccagccatgagaccagtttggtggctcgatgtcgtagagtatatgcccatgctcatgattatcatattaat

SEQ ID NO: 109480 - DNA, 259 bp, Glycine max
cagaaggataagctgtggcctatgctgcaaaagcttggggtcaccatgaaatctgaggagaaggacctcatgggtaaagcattgatgaagcgtgtcatgcaaacctggctttcagcaagtagtgctctaatggaaatgatgatatttcatctaccctctccatcaacagcccagaagtatcgtgtggagaacttgtatgagggtcctcttgatgatcaatatgcttctgctatcagaaattgtgatcctgaaggtcctc

SEQ ID NO: 109481 - DNA, 258 bp, Glycine max
gatcgagataactagaaacagtgtgatgaaaatgaaggtccttgttttcttcgttgctacaattttggtagcatggcaatgccatgcgtacgatatgttccctctccgaatgaacactggctatggtgcccgtactccggaggtgaaatgcgcaagttggaggcttgctgtggaagcacacaacatctttggctttgagaccattcctgaagagtgcgttgaagcaacaaaggaatacatccatggcgaacaatatag

SEQ ID NO: 109482 - DNA, 256 bp, Glycine max
ctcgagccgtgcaggcagtgtcatctctcctttgacgacaagatgagcatcccaattccacatcggcagttattcatagacggagactggaaagtccccgtcctcaagaatcggattcccatcatcaacccttccactcaacacatcatcccggatatcccagcagctactaaggaagacgttgatctcggtgtcgctgccgccaaagctgccctctcccgcaacaagggcgccgattgggcctccgcttccggct

SEQ ID NO: 109483 - DNA, 255 bp, Glycine max
cgatctttgaagtaagaagagtgtgttgtgttgaagtatccaagatgttgattggttctctcttatccaggcgtcctaagatcaaggggactgtggtgttgatgaccaagaatgtgttcgacgtcaacgacttcaaggcgtctactaggggcggaccagccgctgttgccggcggcatcttcggtgccgcccaggacattgttggtggaatagttgatggtgctacggccatcttcagccgtaacattgccatac

SEQ ID NO: 109484 - DNA, 260 bp, Glycine max
cttcttctctggttgattcggatctagagtcttcagtttctcctcgttgttcttcgctttcctgttttcaatttcgattctttcgttaatttaataagatgtttgggagggcaccgaagaagagcgataatacgaggtactacgaaatcctcggcgtctccaagaacgcttcgcaggatgatctgaagaaggcttacaagatagccgccattaagaatcaccccgacaagggcggtgatcccgagaagtttaaagagctg

SEQ ID NO: 109485 - DNA, 258 bp, Glycine max
atatagcccaagccctatacaaccaaatcctaacacacacccatttgattcagtttccatggctagcctcaaggttgcatttttggctgcagtgctctgcatggttgtcgtgagtgcacccatggcacatgcagctatcacgtgcgggcaggtgacgaatcgcctgatcaattgcatcggttacctccagaacggaggaacgccgccgtcgggatgctgcaacggcgtgaagagcctcaatgccgccgccaagaccac

SEQ ID NO: 109486 - DNA, 258 bp, Glycine max
ccgtgattgggcttcgtgcgaacttcggaccaagcattccggccatttcggtgggacttcaggagagaaggggaagtttgggctgaccaccgctcagattcttagggttgtgaagaacctggacctcgcgggcatgctggattgcctgcaactgctgcattttcatattggttctcagattccctcaacagcgttgcttgctgatggtgtgggagaggctgcgcagatctactgcgagttggttcggctcggggcgaa

SEQ ID NO: 109487 - DNA, 258 bp, Glycine max
ggagcctccgagaggttaactctgcataaggttgacctccttcatcttgactccgttagatcagttattaacggttgccatggtgtctttcacactgcttctcccgtcaccgataaccccgaagaaatggtggagccagcggtgagtggagctaagaatgtgatcatagctgctgcagaggctaaagttagacgtgtggtgttcacctcatccattggtgccgtctatatggaccccagtaggagcatcgatttggtg

SEQ ID NO: 109488 - DNA, 255 bp, Glycine max
  unsure (1)..(255): unsure at all n locations
gtgagtgaatagggatcagggatgtggaggctgaagatagcagatggaggaaatgatccatacatattcagcacccacaatttcgctcngaggcagacatgggagtttgatcctgaagcaggcagtctggaggaacgggcccaggttgaagcagctcgtcagcatttctaccacaaccgcttcacggtcaagccctgcgctgacctcctttggcgttatcaggttctcagagaaaataacttcaaacaaacaatt

SEQ ID NO: 109489 - DNA, 257 bp, Glycine max
attgcaatcaaattagttcattctctttgcgcagttccctacctctcctttcaagatgcagatcttcgtcaagaccctcaccggaaagaccatcacccttgaggtggaaagctctgacaccatcgacaacgtcaaggccaagatccaggacaaggaaggaattcccccggatcagcaacgtctcatcttcgccggaaagcagctcgaggacggccgtaccctcgccgactacaacatccagaaggagtcaacccttc

SEQ ID NO: 109490 - DNA, 257 bp, Glycine max
actcctcaaatggagacacctttagtgatccagaagttcacttcagaatctgactacttgccggtgaaaagcttgaaggatttgaagtttgttttgtggacagagacagtgaagatatggagaatagcattccctatggcactgtctgcactgcttcagtttctcacaatctcctcaacttccatctatgctggccatcttggagacattgaactttcttctatctctgtttaccaaggtgtcatcagtgccatcta

SEQ ID NO: 109491 - DNA, 251 bp, Glycine max
gtcaataatggcaattgcttgtgcttttattgcaaccttttctttgatcctattatgtagattaaaggttcttttcaagacaagagccattggtaaataccctttagtattttcaagcactttcctttctttcagtgtgtgatattttcttttaggtaatttaatctcttgtactcaacgtggaaaaaaatatatataaatccatgcttttacttaaaaaaaaaaaaaaaaaaaaaaaaaaagggggggcc

SEQ ID NO: 109492 - DNA, 256 bp, Glycine max
tttcgaggccttggtctctgggaagactactgaatggcaaaagattgatgtgaatgaaaggataactggtcttgagcggctcaatccaacacctcgccccacaacgtcaccctgcttggaggggcgatggaactttgagtggtttggttctggaagtccaggcttgtttgctgctaggtttatatttgaaatctttccttcaactttggctaatttgtcaaaaatggattttgttattaaggatggaaatgcgaag

SEQ ID NO: 109493 - DNA, 254 bp, Glycine max
ggctttacagtgtttctcttccttcttcttcttcttcttcttcttcttcgttgaatcgcgattgttctgtgcgagagacagaagagagagatcgaaaatggcgttggctttcgacgagttcggaaggccgttcataatcctgaaggagcaggagcagaagagcagactccgaggattggacgctcagaaagtcaacatctccgccggcaaagccgtggctcgcatcctccgaacctccctcggccccaaaggca

SEQ ID NO: 109494 - DNA, 256 bp, Glycine max
aaaacgtccacacattctccgtcgccacaacaacaatggctccgaagaaaggtgtgaaaggttccgttgtagcagcgaagaagaaggttcaggagaaggtgacgaatcctttgttcgagaagcgtccgaagcagttcgggatcggaggcgcgctgccgccgaagcgggacctgacgcggttcgtgaagtggccgaagaacgtccaaatccaacgcaagaagcgcatcctcaagcagaggctcaaggtccctcctgc

SEQ ID NO: 109495 - DNA, 256 bp, Glycine max
acacaatggtcattgcagcaacccctcttctcttctttcttcttaatttatgcctaagaggcacttatgctgactatggaggtggatggcaaggtggtcatgctacattttatggtgggggtgatgcatctggcacaatgggaggggcttgtggttatggaaatttgtacagccaaggctatggaaccaacactgcagcactcagcactgctctattcaacaatggcatgagctgcgggtcttgctatgagatgaa

SEQ ID NO: 109496 - DNA, 256 bp, Glycine max
gcaaaaccaatggggctggtgagaagcgtaccttggaagttgacgctgtcattggcgctgacggggctaattctagagtcgccaagtctattgatgccggtgattatgagtatgccatcgcttttcaggagagggtaaaaatcccggatgataagatggtgtattacgagaaccttgcggagatgtacgtgggcgatgatgtttctccagatttctacgggtgggtgtttccaaaatgtgaccatgtggctgtagg

SEQ ID NO: 109497 - DNA, 253 bp, Glycine max
gttttaaatccacaaaatccttttgtgttaaataggtggatgggaaaactgactttcccccagggcacttcccgaagtgttaagagaatgcctctttctatagggggaggagctggtgcaaagaatgctattctcatgaacatgccaaatgctgttctttcaatgtggagatattttgttggagatctcgtctttgaagtttctaagatgacttctccctacattaaatgtacagtctctttcttcatagcat

SEQ ID NO: 109498 - DNA, 256 bp, Glycine max
ttcatattcatcaaactcatcaaaatgaatctgtaccactcctccaccaccaccaccaccaacaccatcttcaccgtcatattcctcctccttgcaatattattcactctcacaccccacaaggccaacggtgccacgtgtcaccctgaggaagaagcgggcctgttgggcttcaaatccggtatccgatccgacccgtccggcctgctcagtaactggatatcgggtacggactgctgcacatggaccggagtag

SEQ ID NO: 109499 - DNA, 254 bp, Glycine max
caacttcttctcgaacaagtttggtgtgaggccattgagagatagccccgatgaaatgatggcagccttataccttcaagtcagcataattagccaggctctaatcttcgtcacaaggtcccgcagctggtcttttgttgaaagacctggtcttctcctactaggtgcattttttattgctcagttggtggcaacttttatagcagtgtatgctaactggggctttgcaagaataaagggaatgggatggggtt

SEQ ID NO: 109500 - DNA, 224 bp, Glycine max
aaagaagctttcttgagttgagttaacagcatggagagggatgaagatgttaaggtttgagcacagaaattctcagagaggcaagcattggggacaggagctcagggtgacaaggactacaaggaggcaccaccagcacccttgtttgagccaggggagttaaagtcatggtctttttacagagctgggattgcagagtttgtggccacattcttgttcctcta

SEQ ID NO: 109501 - DNA, 250 bp, Glycine max
cacaaacaaattgttggtttccatgttgctggaagcaaaggaagactgggatatgcttcattgataccatatgttgagccagttgtgcaagctcaaagtgctgaagtttattttgacttcttccctgtggaggttgatagtcaagagggagttgctcacattggtgaattgaaatctggtgtctatgttccattgcctacaaaaactaatttggtggaaactcccaaggaatggcaactggatctacctt

SEQ ID NO: 109502 - DNA, 257 bp, Glycine max
atatagcccaagccctatacaaccaaaccctaacacacacccatttgattcagtttccatggctagcctcaaggttgcatttttggctgcagtgctctgcatggttgtcgtgagtgcacccatggcacatgcagctatcacgtgcgggcaggtgacgaatagcctgatcaattgcatcggttacctccagaacggaggaacgccgccgtcgggatgctgcaacggagtgaagagcctcaatgccgccgccaagacca

SEQ ID NO: 109503 - DNA, 252 bp, Glycine max
ctcttcttcgtctcacatctcttcgttccttcgattcgttccattctttccaaaatggccaaagactcagttcgcgttctcgtcactggagctgcagggcaaattgggtatgctcttgtccctatgattgctcggggagtgatgttgggtcctgaccagcccgtgctcctccacatgcttgacattcatccggcagcagagtcattgaatggggttcacatggaattggtggatgctgcattccctcttctt

SEQ ID NO: 109504 - DNA, 254 bp, Glycine max
ggtggattcaaaattgctagtcgccccgggattccagtgccttttcctactccagcaggagatttcaccatattggcaggagactggtacaagagaaatcacacagatttgagggcaattttggatggtggaagtgaccttcccttccctgatgggattatcatcaatggtcgtggttccaatgcttacacattcacagttgatcaaggcaagacatacagattcaggatatcaaatgtagggctcaccacttc

SEQ ID NO: 109505 - DNA, 250 bp, Glycine max
ctcgagccgtggaagcgcaggagttcggagagatgatggagcacgtcgacgaggtcaatttcgccctcgatgggcttcggaagggtcagcctctgcggatcagaagggccagcttggtgtcgctcttgacaatttgcgccaccacgcaccagagaaggctcctcaggactcaagggatggcaaagacaataattgattctattttgggcctcagtcttgatgattctcccagcaatcttgcagctgcaac

SEQ ID NO: 109506 - DNA, 252 bp, Glycine max
  unsure (1)..(252): unsure at all n locations
acattgttcatattagatcaccatgatgcattcataccgctcgtgagtttgatcaatggccttcccactgcaaagtcttatgncataaggaccatccttttcttgcaagacgatggcacattgaagccattagccattgagttaagtgtgccacatcctaggggacatgagtttggagccgatagtagagtagtcttgcccccagccgcagtcaacagcgctgaaggcacaatttggttaattgccaaggct

SEQ ID NO: 109507 - DNA, 268 bp, Glycine max
ggccttcggctcgacgtgaggcgctagagactgatgatgaagtctgctatgtgtgcagtggtggttgtcgcacttcttcttctggcggcggtggggcccatggctgaggctgtgacatgcaccccaacagagttgagtccgtgtcttccagcaatcacttccggtgctaaaccttccaatgcttgttgcacgaagctgaagcagcaaaaaccatccttatgtggctacctcaaaaacgctagcttgaagcagtatgttaactctccta

SEQ ID NO: 109508 - DNA, 252 bp, Glycine max
  unsure (1)..(252): unsure at all n locations
agacaattggntactggagatacataaccatatacagacatctcaaggccaaccccgagttccaatgttatcccattttnnagtactttgagaactggtgccaggntgagaacaggcatggagatttcttctctgccctgatganggcacagccacaatttctaaatgactggnaggcaaagttgtggtctcgattcttctgtctatcggtttatgttacaatgtatctcaatgattgccaacgtacagctt

SEQ ID NO: 109509 - DNA, 264 bp, Glycine max
  unsure (1)..(264): unsure at all n locations
attcgactcgagttacttcttctcgcacaagtttggtgagctgccantgagngatagccccgatgaaatgatggcagccttatacgttctagtcggcataattagccaggctctaatcttcgtcacaaggtcccgcagctggtcttttgttgaaagacctggtcttctcctactaggtgcattttttattgctcagttggtggcaacgtttatagcagtgtatgctaactggggctttgcaagactaaagggaatgggatgggg

SEQ ID NO: 109510 - DNA, 263 bp, Glycine max
cacaaatcttagccgccattgatttttcctcttccatttctcttactttctcagcctttttcgattacccatttggttatttcgccctaatggctcttgctccatccaaagtttccaccttttctggtttttctccaaacccagtgttgggggtgctcagaaaaacccaacttgctctgtttctctgagctttttgaatgagaaacttggaagcagaaaccttagggtttgtgcctcaacggtgcctctcactggggtgattt

SEQ ID NO: 109511 - DNA, 257 bp, Glycine max
ggcaatttgtaagaaagatgtttggagagttgaatgtggaatcccttctggatttccgctcacagttatttgcaatagcatttttaatgagatgctcattagatatagctatgaaaaattactgcgccaggctaagctccaagtatgtttttacaatccttcaaaaattttgtttctttgtgtgtgtatggtgatgataacttaattagtgttcatgaatatgtcaagccttactttagtggttctaaattgaaaag

SEQ ID NO: 109512 - DNA, 262 bp, Glycine max
ggtggctacagttggtattcctgagaatacaggtatagcattggcctgtgctatgaatagttcttttagggggcgcgccagttctgatatttacaccatctgctctcaagactgtgaattatggaatcctgcttgccaaaagcaatggctatgtcatttaatccaaacccgtgttctgatgcatggagtttggaatttctgaagcgtaccggatttcattgtgatatcatttgtgtcactggatggactgccaccccaatgc

SEQ ID NO: 109513 - DNA, 260 bp, Glycine max
ttttggtattgtttttcaggctaagtgccttgaaactggggaatctgttgccataaagaaggtgttgcaagacaggagatataagaatagggaactccaggttatgcgcacagttgacaattctaatgttgtcaactaaagcactacttcttttcaactaccgataaagatgagttgtaccttaacctggttttggagtatgtacctgaaactgcatacaaagtttcaaaacactatgttaggatgcaccaacacatgcc

SEQ ID NO: 109514 - DNA, 206 bp, Glycine max
gaaatttttcctttgatattaaatctcgctctagattggaaaaagtttcctctacaaaagcacaatttgctagtggaaaaaccttcaaatatgatataattggtgctggttcacattcttcagaagattttcctgaaaggaagatcaagaaaaacccaaaaagattgttgccatctgaatatgaacctcatagtatcgaggatcta

SEQ ID NO: 109515 - DNA, 264 bp, Glycine max
aaaaaatgaccaagatcttctttgtattgctgttatgtctgatcatagcagcttcttctgggtttgtgaattgctttgatgttgaaaagaaggaaaagattggaatatttgagctcaataaaggtgacctttctttaaggtcaccaactggggtgcttcaattttgtccctggtgattcctgataagaatggaaagttgagtgatgttgttcttggatatgattctgttaaggattacactaatgatacaacatattttggagc

SEQ ID NO: 109516 - DNA, 263 bp, Glycine max
ttccaatatattccattctctctgtgtatttccctacctctcccttcaagatgcagatcttcgtcaagaccctcaccggcaagaccatcacccttgaggtggaaagctctgacaccatcgacaacgtcaaggccagatccaggacaaggaaggaatccccccggaccagcaacgtctcattttcgccggaaagcaacttgaggacggccgtacccttgctgactacaacattcagaaggagagtactcttcacctcgtcctcc

SEQ ID NO: 109517 - DNA, 259 bp, Glycine max
taacactcattaattgcaagaatggcacttcgttgcttggtgatgtccctttctgttctcttcactcttggtcttgcgagagaaagccatgccagagacgaagatttttggcatgctgtttggccaaacactccattccaagttcattgcgagatcttctaaagcctggccctgcaagtgttgaaatcgatgagcaccctatgcaaattgaagaaacacagtacccgaaaaccttcttctataaagaagaccttcatcc

SEQ ID NO: 109518 - DNA, 263 bp, Glycine max
ctcataacacaaagcacaaagcaaagactcatccttgagttaaaaaatggcagcagcttcttccatggctctctcatccccatccttggctggcaaggccgtgaagctgggcccatcagccccagaagtgggaaggggagcatgaggaagaccgtcaccaagcaggtctcctcaggaagcccatggtacggcccagaccgagtcaagtacttgggcccattctctggcgagcccccgtcctacctaaccggtgagttcccagg

SEQ ID NO: 109519 - DNA, 262 bp, Glycine max
tggaaccattctgcgtagtgatctattggcaaattttttgacagagggcaattttagagcaagtgattgatttgcagcgcactcatcgtattaaaggaatgattaaaatggtggctacagttggtattcctgagaatcaggtatagcattggcctgtgctatgaatagttcttttagggggcgcgccagttctgatatttacaccatctgctctcaagactgtgaattatggaatcctgcttgcacaaaagcaatggctatg

SEQ ID NO: 109520 - DNA, 261 bp, Glycine max
gagagatccatcgatcaattaatttccaatggccgatcagctcaccgacgaacagatctctgagttcaaggaagcctttagcctcttcgacaaggacggcgatggttgtattaccaccaaggaacttgggactgtatgcggtcgcttgggcagaacccaactgaggctgagctgcaggacatgataaatgaggttgatgctgatgggaatggtaccattgatttcccagaattcctcaatctcatggcgcgcaagatgaaa

SEQ ID NO: 109521 - DNA, 261 bp, Glycine max
tgttcaaggtagacctcatcagaagcatgccttgacaatatctctatcactgaaatgtcaataagggtctcgaacttgggtgtgattgttctcagatatgccttttgaggaggtctaccttggccaaagggataatcaaattggactacggattcaaaggcattggaagctttcaaaaagtttggaaacaaactggcagaaattgagggaaaaatcacacagaggaacaatgatccaagtctgaaaagccgacatgggcca

SEQ ID NO: 109522 - DNA, 180 bp, Glycine max
attttgataaaccgcgatcacaggttgccgcaccttaaaaccggaaacaaaagcaatcgttacttggtttcaagaatttctcaatttcttcctatttctttgtgtacgatttcttaagggaaagaaaatcactctctgtctggccacagacttcgtgaatcattttcttttccactctta

SEQ ID NO: 109523 - DNA, 260 bp, Glycine max
ctcgagccgaatcggctcgagtacaaaacagaacagagcaaagagagagtgtgtgaaaagagcaacaagaaacagaacaacaatggcgacacttaaggttcctcagcctcttccccccgttgcagatgattgtgagcagctccgaaaagccttctcaggttggggaactaacgaggagctgattgtatcgatcttggctcataggaatgctgctcagaggaagcttatcagagaaacttatgcccagacctatggagaag

SEQ ID NO: 109524 - DNA, 257 bp, Glycine max
cttgcagagaaggtggtcagatacaaagttttggtatttcgttttactgatgttgggaaacttcccgctccagttctccagtttgttgaggtgtcatttggttatactcctgataatctcatctacaagaacttgactttggggttgatttagattctcgggttgcgctggttgggcccaatggtgctgggaagagtacactactgaagctaatgacaggtgacttgatgcctagtgatggcatggtccgacgtcat

SEQ ID NO: 109525 - DNA, 255 bp, Glycine max
gggagctcattgacaatggctgaaacaaagtgggtcatgaaggacaaaagatggtctctccatggaatgacagctctagtcacaggaggcacccgaggcatagggcatgccattgttgaagagttagctgagttggagcaactgttcatatatgtgcacgtaatcaagatgatattgataaatgtttagaagagtggaaaaacaagggacttaatgtgactggttcagtatgtgatttactatgttctgaccaac

SEQ ID NO: 109526 - DNA, 260 bp, Glycine max
gcccttgccacctctgccctcgttgtctctggggcaagtgctgaaggtgttccaaagaggctaaccttcgacgaaatccagagcaagacctacttggaagtgaaggggacaggaacagcaaaccagtgcccaacattgatggtggattggactcatttgccttcaagccggggaaatacaatgccaagaagttgtgccttgagccaacttcattcacagtgaaggccgagggtgtggccaagaatgctccccttgagttc

SEQ ID NO: 109527 - DNA, 260 bp, Glycine max
ctcactcgggcgagattctaataccagctgcttgcaccattgtttcttcgctcaaaaacgataatgtcgactcctatgttctatctgagtccagcctctttgtttatgcctacaagatcatcatcaaaacctgggtactactaagctattgcttccaatcccacccatattgaagttcgctgaaatgctttcccttaatgttaagtctgtgaattacaccaggggaagtttcattttccccagtgctcagccatatcccc

SEQ ID NO: 109528 - DNA, 260 bp, Glycine max
caattcttcgctttaacgaaaaaggacacattttcccttacaatggcacgaaccaaacaaactgcgcgcaagtccaccggaggcaaggcacctcggaagcagctcagcacaaaagccgccagaaagtcagctccgcgaccggcggagtgaagaagccgcatcggttccgccctggcacggtggcgctgagggagatccggaagtaccagaagagcacggagctcctgatccggaagctccccttccagcgcctggtgcgc

SEQ ID NO: 109529 - DNA, 258 bp, Glycine max
caaacaaaaaactcaattctcttctgttcttggtttttgcttttcctcattctctcattctcaacaccaccaaaatgataattgtttcccaggatgccctcaactaactccaagctctcatggatcaagtgctcttgaggaggagccactgcagagaacgtttcagaatgttcatctaggatgtgtcgccgaaaccttaacgcggtttctaatagcaagggagtggaatgctaccaaggcccatcaaatgatagtcga

SEQ ID NO: 109530 - DNA, 258 bp, Glycine max
aagaagagtgtcatttagcatggaagataatcataaagagtacctaagccagaccctagagccaggggacatgtctgcaactagctttgatgatgaagaggtgacaagtgatggagaatatggtgatggacagactggggcaggaaggaaccagagataatatgtcgacatatcgatcatgtcaatatgcttggtctcaataaaactgcacttagacttcggtttttgataaattggcttgttacctcattactgcaa

SEQ ID NO: 109531 - DNA, 258 bp, Glycine max
cgtgaagaagaagaagatcaagagggaaatcaaaatattacagaatctttgtggagggcctaatgttgtaaagttgcttgacattgttagagaccagcaatcgaagaccccaagtcttatatttgaatatgtaataacactgattttaaagtgctctatcctacattgtcagactacgacatacgatattatatttttgaacttctgaaggcactggattattgccattcacaaggaatcatgcatcgtgatgtgaaa

SEQ ID NO: 109532 - DNA, 257 bp, Glycine max
gaagcacacaacatctttggctttgagaccattcctgaagagtgcgttgaagcaacaaaggaatacatccatggcgaacaatatagatcagactccaaaacagttaaccaacaagcttacttttatgccagagcctcgaagtccatcccaaggacacatttgtgttcagtatagatggcaccgtactctctaatattccatactacaaaaaacatggatatggggtggagaaatttaactcgaccttgtatgatgaa

SEQ ID NO: 109533 - DNA, 257 bp, Glycine max
ctcgagccgcttctctcgttctctctttctgttcttctcaaagacgcactcaacgttcagaaaccaaatcggtttgagtcctcattacccgcctctctctggaaaccagcaaaaccacctttctctactattatctgttccttttgtactcttcctgggtagaagacatggtgaggctcactgctgacttgatctggaaaagccctcatttcttcaacgcgattaaagagcgtgagttagatcttcgatgcaacaag

SEQ ID NO: 109534 - DNA, 254 bp, Glycine max
ctcgagccgattcggctcgagctactctgaagggaaagtacgatgccgacaaaaacggcgctgcctttgccaacatcgccatcaacgccggcgacgtcaagttccgagcctccgtaacggaagccactttcataacggtcccagcttcaccggcttggcgctcgccgtcgagaaacccggttccttcatcgtcgactacaacgttcccaaaaaggactttcggtttcagtttatgaacacggttacggttgggg

SEQ ID NO: 109535 - DNA, 148 bp, Glycine max
tcgcgatcacaggtagccgcagcttagaagcggaaacaaaagcaatcggtacttggtttcaagaatttctcaatttcttcctatttctttgtgtacgatttcttaagggaaagaaaatcactctctgtgctggccaagacttcgtgaa

SEQ ID NO: 109536 - DNA, 148 bp, Glycine max
ctctaacctacctctttttcttctctctcaacaacttcaccttcttcctcctcgatcatgtctcacttcaagggcaagtaccatgatgagcttatcgccaatgctgcgtacattggcactcctggaaaggctgtctggccacagactt

SEQ ID NO: 109537 - DNA, 258 bp, Glycine max
cactatttgtatcgaatgaccatactccatgctatctctctacttgctcctgtgatgggctctgaaatcactcgttcagaattattgcctattgttattactgcatctaaagacagagtacccaacattaagtcaatgtggcaaaggtcttggagtcaatcttccccatagtggatcaatctgttgtggagaagacgattcgtccaagtctggttgagctcagcgaggatcctgatgttgatgtaagatttttttcca

SEQ ID NO: 109538 - DNA, 253 bp, Glycine max
ctttttcctttggctcttcaactttttactggtcctaccaagcagaagccattccttgaggcatggggggattatcttagtgatgaaaaatgctttgaagatgctgcggcaatttatatgtcctgtttcatctggataaggctctgaagtcttatcgtgctattaataactggagtggggtgcttacggttgctgggatccttaatttgggaaaggatgagctactacatcttgccagtgagctctgtgaaga

SEQ ID NO: 109539 - DNA, 255 bp, Glycine max
gcgagatatctatttagatctctgaaaaacagagtttcatttcaattcagtcttattattagggtttgccgattgagagagaaagagaaatgggagaacgaaaaggaatcccaatggctttggggctcttgcgatgatcctcttcttcattgcttcctcttcctctcacctcgttcgcgcttccgatgacgccgacgacgcgatcttctacgagtcgttcgacgaggattttgatggacggtggattgtatccga

SEQ ID NO: 109540 - DNA, 209 bp, Glycine max
attctctatgattcgatattctaatgtcgttaggggaaagagattgtctgtgtgtgagtcgatatggctggaaactgcgagggtcctgctatcggaatctttcttcgggatcgacttacgctcgcgtcggcggtggctacacgatcgcgtttcgatcatggccaatgatcactggaacagaactacaccatcgtacgtggctttctccg

SEQ ID NO: 109541 - DNA, 168 bp, Glycine max
gttcgctctttctttctcccctacacaaaacatggctttgcccaatcagcaaaccgtcgattaccccagcttcaagcttgtcatcgtcggcgacggtggcacaggaaagacaaccttcgtgaagaggcatccactggtgaattcgagaagaaatatgaaccgaccatt

SEQ ID NO: 109542 - DNA, 256 bp, Glycine max
gacggcgtcttcataaacgcctttcttctccgtttccgtttcctcgttcgaattcgctttttgatctgcgaaaatgagagagtgcatctcgatccacattggtcaggctgttatccaggtcggaaatgcttctgggagctctactgcctcgagcacggcatcgggcccgatgggcaaatgccaagtgacaagacagttggcggtggtgatgatgctttcaatactttcttcagcgagactggtgctggaaagcacg

SEQ ID NO: 109543 - DNA, 164 bp, Glycine max
atttctcagcgcgtaaagcatggctttgttggtggagaaaaccacgagaggtcgcgagtacaaggtcaaggacctttcccaggccgacttcggccgcctcgagatcgagctggccgaggttgagatgccggcctcatggcctgtcggaccgagttcggcccctc

SEQ ID NO: 109544 - DNA, 255 bp, Glycine max
ggcaccgaacgaacagtctccggccaacttcagctcttgcgtgcgaaaattctcggaatattttgaatccaggaaatcatgcacgctccagttctagttctcaaggactctttgaaacgagagtctggattaaggtccgctatgctattattcaggcggcaaaggctgttgctgatgtagtccgaacaacattgggacctaggtccatgctaaaaatgcttcttgatgctcaaggaggaattgtggttaccaatg

SEQ ID NO: 109545 - DNA, 256 bp, Glycine max
cttttgatccgtgctctgtgattcccagaccttattttttctgtcatttgcttcaaatttcaggagattaattatggctcaacccacaacaagaataggccttgctggattggctgttatgggccaaaactggcactcaatattgctgagaaaggctttcccatttctgtttacaaccgaaccacttccaaggttgatgagacagtagaacgagcaaaacaagaaggaaatcttccagtttatggctaccatgacc

SEQ ID NO: 109546 - DNA, 252 bp, Glycine max
gcggtgatttggtaagggccaatgaaattctaccatcaattcctaaagagtatcataacagtgtggctcgtatcctggaatcacgagggatgatagaggatgctcttgaagtagctactgaccctgactaaggtttgatctagccatacagcttggaagattagaggttgctaagggtattgcttctgaagtgcagagtgagtccaaatggaagcaattgggagaattagccatgtctactggaaagttaga

SEQ ID NO: 109547 - DNA, 165 bp, Glycine max
ctatgtcatttaatccaaacccgtgttctgatgcatggagtttggaatttctgaagcgtaccggatttcattgtgatatcatttgtgtcactggatggactgccaccccaatgcaggatgttcaggttacattgattggtttatttcctctcaggaatgtgttcc

SEQ ID NO: 109548 - DNA, 257 bp, Glycine max
ctcgagccgcttctctcgttctctctttctgttcttctcaaagacgcacgcaacgttcagaaaccaaatcggtttgagtcctcattacccgcctctctctggaaaccagcaaaaccacctttctctgatatcatcggttccttttgtactctgagtgggtagaagacatggtgaggctcactgctgacttgatctggaaaagccctcatttcttcaacgcgattaaagagcgtgagttagatcttcgaggcaacaag

SEQ ID NO: 109549 - DNA, 257 bp, Glycine max
agccgtcgcactttgcgttttctgcgtcatctccgattccccgacaatggccacccaaatgagcaagaagagaaagttcgtagctgatggagtgttcttcgctgaactgaacgaggttctgacaagggagtagccgaggacggatactccggcgtggaagttagggttacgccgatgcgcaccgaaatcatcatcagagccaccagaacccaagccgttctcggtgagaagggaaggagaatcagggaacttacctc

SEQ ID NO: 109550 - DNA, 165 bp, Glycine max
tacgttttgcccaagcaccttgatgagaaggtggctgcacttcacctgggcaaacttggagctaagctgacccagcttagcaagtcccaggctgattaatacagtgtgcctgttgagggtccatacaagccgctcactacaggtactaagtgattgagatgatca

SEQ ID NO: 109551 - DNA, 260 bp, Glycine max
  unsure (1)..(260): unsure at all n locations
cacaaattctcaaatccaaatccaattccaattccaattcccaagcttctgaaaccctaattcctcatcttgaaaatgagagnaatcttgcacatccagggagggcaatgcgggaaccagatcggagcgaagtctgggaggtgatatgcgacgagcacggcatcgaccacaccggaaagtacggtggtgactctgtactccaattggaacgcatcaatgtatattacaacgaagtgagtggcggaaggcacgttccacgc

SEQ ID NO: 109552 - DNA, 264 bp, Glycine max
ctctaacctacctctttttcttctctctcaacaacttcaccttcttcctcctcgatcatgtctcacttcaagggcaagtaccatgatgagcttatcgccaatgctgcgtacattggcactcctggaaagggtattttgctgctgatgagtcaacagggacaattggcaagcgtttggccagcatcagtgtagagaacattgaatccaacaggcgagctcttagggagctgcttttcactgctcctggtgttcttcaatatctca

SEQ ID NO: 109553 - DNA, 271 bp, Glycine max
  unsure (1)..(271): unsure at all n locations
tttggatagaagtaaatttggaagagggaggttgaagtgttgttttcagttagcaaggggttactttctgcaaagatgagtatgccattgttggtagagcttctcttgagtcagatgtcttcagttttggggtggttcttcttgaacttatcagtggtcgccatcccatccataaatctactggcaaagatgaagccttgttatatgggctactcctagnttacaggatagtaggcgagtaataagggagttggttgattcacaattgaaa

SEQ ID NO: 109554 - DNA, 271 bp, Glycine max
ctcgagcgagcagagcagatattagaagatggcagacgctgaggatattcaacccctagtttgcgactatggaacaggaatggttaaggcaggatttgcaggagatgatgccccacgtgctgtgtttcctagcattgttggtcgtcctcgtcacactggtgtgatggttggtatgggccagaaagatgcattgttggtgatgaagcacagtctaaacgtggtattctgactctcaagtatccgattgagcatggtattgttagcaactggg

SEQ ID NO: 109555 - DNA, 270 bp, Glycine max
gtgagatatttattggacctgtttattatcagcggctgcgtcacatggtttcagacaaatttcaggttcgatctactggcacaattgaccaggtcacccggcagccgataaaaggacgaaagcgtggtgggggaattcgatttggagaaatggaacgcgactctctgcttgcacatggagctgcatatctctgcatgataggttgcacacctgttctgattatcacattgccgatgtttgttcactttgtggaagcatgcttgcaacaac

SEQ ID NO: 109556 - DNA, 275 bp, Glycine max
ctcttacacaccgaagcactgctactactactactttctctctagatatgggttctggtgctgtgcaactgtttctgatcttggggctcttggctagctcatgcttagcccaagcaccaggtgctgcaccgtcacaaccacccactacaaccccatcaccaccaccacccagatcagcacctgcaccagacccatcacaccagcaaccccaccaccagcaaccccaccaccagcagcatctccaccaccagcagcaactccaccaccagcagcaa

SEQ ID NO: 109557 - DNA, 276 bp, Glycine max
caccgcacgaatatcttgtcgcttggagcgatccgagaaaaactccgtaaacatgttggtttaccaggacctccttacaggtgatgagcttctctctgactccttccgttacaaggaaattgagtctggaatgctgtgggaagttgacgggaagtgggttcgctaaaggagcagttgatgtagacattggtgcaacccttctgctgagggtggaggagaagatgatggagttgatgatgcagctgttaaggttgttgacattgttgacacatcaga

SEQ ID NO: 109558 - DNA, 279 bp, Glycine max
acaaggcagaaagcaagctcatcctagagttttaaaaatggcagcagcctcctccatggctctctcttccccatccttggctggcaaggccgtgaagctgggcccatcagcccccgaagtcgggagggtcagcatgaggaagaccgtcaccaagcaggcctcctccggaagcccatggtacggcccagaccgctcaagtacttgggcccattctctggcgagcccccgtcctacctcactggcgagttcccaggtgactacggctgggacactgctggg

SEQ ID NO: 109559 - DNA, 279 bp, Glycine max
gaagtcatcagattttctcgtttatggaatcaaatcagtggctcaagacgtcttgcccgtgttgactgatgcgtttgatggcaatcttttgagccttgagtttgataactttgctgaagtgcgcaaactctatgaaggtggagttacactacctacaaactttcttagcaagatcgcccctataccagtggtcaggaaatttttcgaactgatggcgaacagttcctcaagtatccaccacctaaagtgatgcaggtggataagtctgcatggatgact

SEQ ID NO: 109560 - DNA, 274 bp, Glycine max
ctcgagcgtatttttcttcctcagtagtgtcatttacgcttctcttctctgcagcaactatgcctaaccctaaggtcttcttcgacatgaccatcggcggtcaatctgctggccgcatcgtgatggagctctacgccgacgtcactgctcgcaccgccgagaacttccgcgcgctttgcaccggcgagaagggcgagggcggagcggcaagcccctccactacaagggctcgtccttccaccgcgtgatcccgagtttcaggtgtcacggtggc

SEQ ID NO: 109561 - DNA, 288 bp, Glycine max
gcattgccgatcaaagtggtcttatttgaaaaacacttgggcgttggcgcaaatgtctgctatcgttaattatctctggatacaacaggctcactgagaaaacaatttttacttgcagagatttggacatctctggttgtctactatacaatagcatctcaatttagagaatttcagcagtgagaaaagatgggagaatgttatcaacaacgtatacagatgccacctaatgcaatgcggtagcatctgtataccttgttgatctacattcctccatcttgtctcact

SEQ ID NO: 109562 - DNA, 268 bp, Glycine max
gaaaagaagaagagtgatagtgggcgagctcgtaaaaacgtgtacataggaatcaggcaaaggccatggggcaagtgggccgcggagataagggacccacacaagggtgttcgtgtctggctcggcaccttccccaccgccgaagaagccgcccaagcctacgacgacgccgccatacgcatccgcggcgacaagccaagctcaacttcccggccaccaccatttccgccgccgccgccgctccgccaccctccaaaaagcaacgctg

SEQ ID NO: 109563 - DNA, 276 bp, Glycine max
cagcttcacgaggtcatggcgagcaagtccaagatctacatcgccatggagctcgtccgcggcggcgtgctcttcaacaagatcgccagaggccgtctccgggaggagatggccagactttacttccaacaactcatctctgctgtggacttctgccacagccgcggcgtctaccaccgtgacctcaagccaggacacttctcctcgacgacgacggcaacctcaaggtcaccgacttcggcctcagcactttctccgagcacctccggcacgacg

SEQ ID NO: 109564 - DNA, 275 bp, Glycine max
ccgaaccaaaacctgaagcctagaaccttcttccgtctcacagtttgccggaatcagcgatggatcctcagcctgagccagttagctacatctgcggagattgtggaatggagaatacgctgaagcctggtgacgttatacagtgccgtgagtgcggttaccgtatcctttacaagaagcgcactcgtcgatgtcccaatacgaggcacgctgaagaaaactgctctgacattggcaagtaatttccatggaaattgttactacatctgtgttgt

SEQ ID NO: 109565 - DNA, 272 bp, Glycine max
ctcgaccgaaattttgataaaccgcgatcacaggttgccgcaccttaaaaccggaaacaaaagcaatcgttacttggtttcaagaatttctcaatttcttcctatttctttgtgtacgatttcttaagggaaagaaaatcactctctgtgctggccacagacttcgtgaatcattttcttttccactctagtttatgccatgaacactctcctatttgatataggacttcgtgtcagatttaaacttcttctgtatctttctcagttctctg

SEQ ID NO: 109566 - DNA, 274 bp, Glycine max
aatacccttaatggcacaggaggaaattctgtcttctagtgcaagtgatttcagaactgcaatggtgagtaaaaatagcaagcctcaagctactgcaatgcatgtgggagctatagaaattatcattgatagtttcgcaagtcctgactgtaacatagttggtgcaatgcttttggttgatacttatcatccaatcctgaaaatgcagtacgtagtatttttgttgcgcctttcagaggcggaaggcccattcgggtggttacatttccgaata

SEQ ID NO: 109567 - DNA, 278 bp, Glycine max
gaaattcggtatcatcaagggcaccatgaccaccactcactcctacaacggcgaccaaaagcttctcgacgcgagccaccgtgacctgaggcgcgccagggcggcagctctcaacattgtccccacttcaacaggagcagcaaaggcagtggcccttgtcctcccaaccctcaagggcaaactcaatggcattgactccgtgtgccaacaccaaacgtctcagtggtggacctcgttgttcaggtctcaaagaagacctttgcagaagaagtgaatgc

SEQ ID NO: 109568 - DNA, 242 bp, Glycine max
gcgctgaagtatcaaagaagtagattggttcccgcttaaacaagcgtccaagcacaagggagactgtcgcgttgatgatcaagaatgtgttcgacgtcaacgactgcatggcgactaccaggggcggaccagccgctgtagccggcggaaactacggtgccgcccagacattgatggtggaatagtagacggtgctacggccatcttcagccgtaacatagccatacagtagatcagtgcca

SEQ ID NO: 109569 - DNA, 256 bp, Glycine max
caaaaagaaagaatcccaggcgaggagaaagatggaggggaaggagcaggatgtgtcgttgggagcgaacaagttccccgagagacagccgattgggacggcggcgcagagccaagacgacggcaaggactaccaggagccggcgccggcgccgctggttgactcgacggagtttacgtcatggtcgttttacagacagggatagcagagtttgtggacattttctgtgtctctacatcaccgtcttaaccgttat

SEQ ID NO: 109570 - DNA, 271 bp, Glycine max
ttcaaaaatatgccactcccatgatgcccctagatgaagaaattctttctaaggttgcacaagacatggttgatgaatggtttgattgtgttgatgaggaggattcctttgaggaagtctctttaagtgcagcactcaatggtgttgagggtttggactatatggaaagaattcctacttgccacatctggggttttcctcatgtgctttcacgcaaaaatggtctctaaggcataaggagatttgtttctggggatggtgaagagatgac

SEQ ID NO: 109571 - DNA, 271 bp, Glycine max
aaagttgcaagagttaaagcaaaaaccaaagtgagagagaaaatgatgaagccatcgatgctcagatctcttcactctgccgccacccgcggcgcctcccacctctcccgccgtggctacgcctccgagccggtgccggagcgcaaggtggccgttctaggtgccgccggcgggatcgggcaacccctctcccttctcatgaagctcaaccccctcgtttccagcctctccctctacgatctccacggaactcccggtgtcgccgccgatg

SEQ ID NO: 109572 - DNA, 276 bp, Glycine max
agaacaagtagttgagaactaagaaggagaagcaaatggcttcctcaatgacctcttctccagctgctaccactgtcaaccgtgccggtgccggcatggctgctccattcactggcctcaagtccatggctggcttccccaccagaaagaccaacaatgacattacctccattgctagcaacggtggaaagtgcaatgcatgcaggtgtggccaccagttggcaagacagaagttcgagactctttcctacctgccagaccttgatgatgcacaat

SEQ ID NO: 109573 - DNA, 273 bp, Glycine max
agaggacgtgaagttactgtcactaatgatggtgctacaatcttgaagtccctccatattgataacccagctgctaaagtccttgttgacatatcaaaagtacaagatgatgaggttggggatggaactacctcagttgttgtattggctggtgaacttttaagggaggcagaaaagctggttgcagccagattcatcctatgacaataatatcaggtttccgaatggcagcagagtgtgctcgtaatgctttgttggagaaggttgtcgaca

SEQ ID NO: 109574 - DNA, 276 bp, Glycine max
cccagttgggtgagattctaacaccagctgcttgcaccattgtttcttcgctcacaaacgataatgtcgactcctatgttctatctgagtccagcctctttgtttatgcctacaagatcatcatcaaaacctgtggtactactaagctattgcttccaatcccacccatattgaagttcgctgaaatgctttccttaatgttaagtctgtgaattacaccaggggaagtttcattttccccagtgctcagccatatccccatcgcaacttttctga

SEQ ID NO: 109575 - DNA, 220 bp, Glycine max
caagacgctcaagatctgcgctaatcatctcattttgcctacgatgagtgtgcaagagcacgctgggaacgagaaatcctgcgtttggcatgctagggattttgctgatggtgaactcaaggacgagctcttctgcatccgttttgcttctattgaaaattgcaaaagcttcatggaaacattccaagaagttctgaaacacaaaaggcagaggatgaga

SEQ ID NO: 109576 - DNA, 279 bp, Glycine max
  unsure (1)..(279): unsure at all n locations
attttattgtctgggacaacagtgaccttgtgccccatgagatcatgggtggcctgaaaaatgtctatgcaattggtgccggaatggtagcagcccttaccaatgagagtgctactagcaaatctgtctactttgcacgctgcacatcagccctgatatttgtcactcatttgttggctgaagagcctgagaaacttcagggccactattggctgacacttatgtgactttactaaaaggtcgnaacgcatggtatggtcagatgttagctaaggggtg

SEQ ID NO: 109577 - DNA, 275 bp, Glycine max
  unsure (1)..(275): unsure at all n locations
tgctgctgccattgcctatggattggacaagaaaggtggcgagaagaacattctagtctttgatcttggtggtgggacctttgatgtcagtatcttgacaattgataatggtgtttttgaagttcttgccacaaatggagatactcatcttggaggtgatgactttgatcagagaataatggagtacttcattaattgatccagaaaaagcagtcgnaggatattagcaaggacaacagagcacttggcaagctgaggagagaggctgagcgtgc

SEQ ID NO: 109578 - DNA, 262 bp, Glycine max
ctctctctctctcccttttcttgaaacttccctctttcctttaaggattccctcctaatttggtgggattatccctcatcagcattgccattccctgtttcactcaccacattgaatacatggaaaagcttattcgcatgttccctttgctccttgttcttcttctgtgccccaattttgcctttgctggcatgactacggccaagctcttagcaagagccttctgttctttgaagctcagagatctggttaccttccacac

SEQ ID NO: 109579 - DNA, 164 bp, Glycine max
tgaaattttgataatccgcgatcacaggttgccgcaccttataaccggaaacaaaagcaatcgttacttggtttcaagaatttctcaatttcttcctatttctttgtgtacgatttcttaagggaaagaaaatcactctctgtgctggccacagacttcgtgaa

SEQ ID NO: 109580 - DNA, 274 bp, Glycine max
cgatctcagattccggtcactcctctcgctggcgatcccattttcctccgtcctccgtcgagtctcttccgattcgaatcgttcccagcctagtgctatcatgatatccctgttacgattatgtgttcatgctagtgctgagtgtagattctggtgtaggcaagtcatgtctactccagaggtttgctgatgttcatatcttgacagctatatcagtaccattggagtggacgaaaaaatccgcactgtggagcaggatgggaagactattaac

SEQ ID NO: 109581 - DNA, 278 bp, Glycine max
gtggtggagtgtgcagaagagcgtcgcagtcgcaaccctaatcagatgaagcgcagcttcaagcgagtgacagccaccagccatgggtcgtatgcacagccgcggtaagggtatatcctcttctgctttgccctacaaaaggacacctcctagctggctcaagatctcttcgcaagatgtcgaagaaaatatcgcaagtttgcgaagaaaggtttgaccccgactcagattggtgtcattctcagagattctcacggtattgctcaggtcaatagcgt

SEQ ID NO: 109582 - DNA, 235 bp, Glycine max
ggaccaaacagcatccgcggcacgacggtaaccctccaacaacaacacttccgctgcgaaaaatgtctctggtggcgaacgaggatttccagcacattctgcgtgtgctgaacaccaacgtggatgggaagcagaagataatgttcgcaatgacctccatcaagggtattggaaggagattcgccaacatcgttgcaagaaggctgatgttgacatgaacaaacaggctggtgag

SEQ ID NO: 109583 - DNA, 249 bp, Glycine max
ctcaacttctgctcttccaactcctacaacgctcttctccgcactcatgggcaaggtcaagatcggaatcaacggatttggaagaattggccgtttggttgactgagattctctgcaaagagacgatgttgaactcgttgacgttaacgagcctatcattaccaccgattacatgacatacgtgtttaatccgacagtgttcacggacactggacagcatcacgatgtcagcgttaacgacgagaagac

SEQ ID NO: 109584 - DNA, 271 bp, Glycine max
cagtagccgagattccgtgagttgcaaaaatgaagacgattctttccaccgagaccatgaactttccggacggcgtgagcatcatagttcatgccaaggtcatcgaagttgagggcccccgcggaaaattggtgcgatacttcaagcatttgaatctcgattttcagctcattactgacgaaaacggtaaatctagctgacaatcgacgcgtggtttggttctcggaaaacatccgccgccatacgcaccgccttgagccacgtggagaat

SEQ ID NO: 109585 - DNA, 266 bp, Glycine max
gaaaactctgcaaacatgttggtttatcaggacctccttacaggtgatgagcttctctcggactccttccgttacaatgaaattgagaatggaatgctgtgggaagttgaggggaagtgggttgttaagggagcagttgatgttgacattggtgcaaacccttctgctgagggtggagaagatgaggagtcgatgacgcagctgttaaggttgttgacattgttgatacattcagacttcaggagcaaccgcttttgataagaaac

SEQ ID NO: 109586 - DNA, 268 bp, Glycine max
tgctcatcaagtccaagatccaacctaccttttgcaatctcaattcaatggcgtcctctctcattgcgaacgcttcctctcctcttccctcctctccaggtccctccttcgccccgccgcttccgcttcccaccgctctttcaacaccaacgccatgctccagtatgacaaccgcgccgacgacccagcaccgacatcgatcgtcactccgaacgctctttacctagcactgcgcgccgcgacgatatcttctcagatgtgttggatc

SEQ ID NO: 109587 - DNA, 274 bp, Glycine max
acttgcccttttctggttctccccaaaaaaatagattttcatcattttttgaccccatttttaaagaactaaaaaaaaaaacgaaacaatttcaatttttcacttttcgagttctaaaagttttaagtgaaaaattgaaatcgtttctaactatcttaatagaaaaagcaaaaaggattagcaaaagtttatcgaaagtattcttaaaagtattctcaaaagtattctaagcctaacgaaaataaaacaatttttcaaattgctatttattaaa

SEQ ID NO: 109588 - DNA, 260 bp, Glycine max
aacccctatgaacaagcaatatcaattattgggaaaaccttggctgcatttgatgaggataacttgattccttgttttggattcggggatgcatcaacacatgatcaagatgtcttcagtttctatccagatgaacgattttgcaatggatttgaagaagtgttgagtcagtatagggaaattgttccaatattcgacttgcaggtcctacttcatttgcaccaattgttgaaatggccatgacaatagttgagcagagt

SEQ ID NO: 109589 - DNA, 270 bp, Glycine max
caagattccatttgtgcccatctctggtttcgagggtgacaacatgattgagaggtccaccaaccttgactggtacaagggaccaactctccttgaggctcttgaccaaatcaatgagcccaagaggccctcagacaagccactcaggcttccattgcaggatgtctacaaaattggtggtattggtacgtgccagtgggacgtgttgagactggtgtcgtgaagcccggtatggtggtgactttggtcccactgggctgacactgaggt

SEQ ID NO: 109590 - DNA, 270 bp, Glycine max
gtcgcatcatctccgagagcgcgattatgaaggaagatgataacaactggccggaacctgatcgggtggggcggcaggagctggagattgttatggggaacgagcacatttcgtttacgacttcaaagattgggtctcttgttgatgttcagagcagtgctgacccagagggtcttcgcatcttttacatcttgttcaggatttgaagtgctttgtcttctctttgatttcccttcacttcaagatcaagcctatctagggtgtttgcaa

SEQ ID NO: 109591 - DNA, 259 bp, Glycine max
attgaatgtcccaaggatgagaaacttcctcgtcgcaaaatttttgacaaacctaagacgcgctgcttcactattctccctatggagtttaatcttgtggttcgtcagaagtttttaaattttgtgaggttcattatgaagaaaagggacaagcttagttgtcaagttggaatcaacccatactccatgaatggattggtttggccaatagattactgagtaagggcaacgatattctgtgttgcgattatgctagttt

SEQ ID NO: 109592 - DNA, 175 bp, Glycine max
ggctcgaggaaattttgataaaccgcgatataacgttgccgcaccttcaaaccggaaacaaaagccatcgttacttggtttcaagaatttctcaatttcttcctatttctttgtgtacgatctcttacgggacagaaaatcactctctgtgctggccacagacttcgtgaatcat

SEQ ID NO: 109593 - DNA, 269 bp, Glycine max
ccacaaatatcatggaaaattgctgggagaatgcaagagttctgaaggaaggaatcgagagaacaggtcggtttaacatcatctccaaggatatcggtgtgccacttgtagccttctccttgaaagacagtagtcaacacacagtgtttgagatagcagaccatctgagcaaattcgggtggatagttctgtccatacaatgccaccagatgctcaacacattgctgtccttcgggtggtgatcagggaggatttcagccgcggcttgg

SEQ ID NO: 109594 - DNA, 270 bp, Glycine max
ttgactttcttgagatgtggaggccattctttcagccttaccatttgatcattgttcaagatggtgaccccaccaaaaccatcaaggttcctcctggctttgactatgagctctacaaccgtaatgacatcaacaagcttttgggtccaagggcttcttgcatctccttcaaggactccgcgtgtgcctcttcggctacatggtgtccaagaagaagtacatcttcaccattgatgatgactgctttgttgccaatgatccatctggaaa

SEQ ID NO: 109595 - DNA, 184 bp, Glycine max
gtaattttgataaaccgcgatcacaggatgacgcaccttataaccggaaacaaaagcaatcgttacttggtttcaagaatttctcaatttctacctatttctttgtgtacgatttcttaagggacagataatcactctctgtgctggccacagacttcgtgaattagtctcatgtccagacaac

SEQ ID NO: 109596 - DNA, 265 bp, Glycine max
ggcaaagacaacctgggaagtacttttctgagattgctgccaggttttatgtggcagaagttctccttgctttggaatacttgcacatgcttggggtgatctacagagaccttaagccggaaaatgtgttggtgagagaagatggtcatataatgctatcatattttgatctctctctaaggtgtctgtcagtccaactcttgtgaagtcatcaaactctagcttggagacaaaaagctcaggatactgcattcagcctgcttgc

SEQ ID NO: 109597 - DNA, 269 bp, Glycine max
attttagaaacagcaccccgcctacttgaagaattaatgaagatggcagttataccgcgaaatgctcaggggcatggatggctgaggcctgcaattggtgttgttgagctttctcaatgtatcgtccaggctgttcctctcagtgctagaaagtctactggtggatcacctgaaggaattgcaccattctgcagttgccacatataagtgagactattattaagaaggtggcccgcaagacagtgagaacatttcaggaacttcatgac

SEQ ID NO: 109598 - DNA, 275 bp, Glycine max
gagaaacctttttttgatacaatagctagggcactaaggcctggcggagttctttgtaatatggcagaaagtatgtggcttcatacacaccttattcaagatatgatctctatttgccgagaaacattcaaaggttctgtatgttatgcttgggccagtgtaccaacatatcctagtggtgtgataggcttcttctctgtgcaacagaagggccgcctgttgattttgtgaatcctatcaatcccattgaaaagttggaaggtgctaatgagcac

SEQ ID NO: 109599 - DNA, 255 bp, Glycine max
caaaatcctctgcgagagagaaagagagaggcggtgatgtcttcaattagattcctatggatcctgatggtgtctttgacggcatcatgcgcgttaagccaaccgcagaagctatcggcgtacgatgttctgatggagtacgggttcccggtgggtcttcttcccaagggagccatagggtattcgctcaacagagacagcggcgagttcgcagtgtatttccaaggagcgtgcagcttcgacatagagtcctac

SEQ ID NO: 109600 - DNA, 257 bp, Glycine max
agcgcgttggaaagctatgtggacaatcgtacggagctgggcaagtgcacatgctgggcgtgtacatgcagcgctcgtgggtgatcctgaacaccaccgcgatcctgctgacgctcctctacatcttcgcggcgccgctgctgcgggcgatagggcagacggaggcgatttcggcggcggcgggggatttcgcggtgtggatgatcccgcagctgttcgcgtacgcggtgaactacccggcgcagaagttcctgcag

SEQ ID NO: 109601 - DNA, 232 bp, Glycine max
cggctcgagctttgctaacggatccaaatcctgatgaccctttggtgcctgaaattgctcaaatgtgcaagaccgtcaaagtcaagtatgagtccactgctagaagctggacccagaagtatgccatgggctaaaactcgatctctgccctcttgtcccctccagtacgtgttggaattgtgaacttgtgcgcttcaaaaacgctcccttttatagtagtatatattaatat

SEQ ID NO: 109602 - DNA, 239 bp, Glycine max
gagaagttcaagcgcatgtgtgaaaagtccatgatgaagaagtgatgcatgcacatgacggaggagtttctgaaagagaatcctgacatgtgcgagtacatggcgccatcgctggacgtgacacaagacgtatggtgatggaggtgcgaagctgggaaaacgagccgcaacgaaagcgattaaggagtggggtcaaccaaagtcaaagatcacacaccttgtgttctgcaccacttcag

SEQ ID NO: 109603 - DNA, 251 bp, Glycine max
ggcactgatagctcctgcagcattgattgctcaaaatgctggaatagaaggtgagattgttgtggagaaaataaagagtggtgaatgggaggtcggttacaatgtctatggtagacaggtatgagaatttagtggaggctggagttatcgaccctgccaaggtaacaaggtgtgcattgcagaatgctgcttcagttgctggaatggtgttgaccacacaggccattgtggtggaaaaacctaagcccaag

SEQ ID NO: 109604 - DNA, 101 bp, Glycine max
gctctactaactagaaagaaagggcttttctcgcttgtttagtaaagcccactctttggccttatcttgcatgtgacgacgacgtcgagttggcggcggag

SEQ ID NO: 109605 - DNA, 255 bp, Glycine max
gtcgtcttgcccgcagaccaaggtgctgaaagtacaatttggctaattgccaaggcatatgttgttgtcaatgactcctgctatcatcaacccatgagccactggttaaatactcatgctgtgattgaaccatttgtcatagcaacaaacaggcatcttagtgtgctccaccctatttataaacttttgttgcctcactatcgttccaccatgaacatcaatggactcgcaagacaatcactcatcaatgcaggt

SEQ ID NO: 109606 - DNA, 255 bp, Glycine max
cttctttcaaggaaaatggctcttcttggatttcttctgggacttttcttaatggtcactcatgtcaaggggtatggttttggaggttggaccaatgcacatgccaccttctatggaggtggtgatgcttctgggacaatgggtggggcttgtggttatggaaatctgtatagccaaggttatggaactgatacaacagcactgagcactgctctgttcaacaatggcttgagctgtggtgcatgctatcaaatt

SEQ ID NO: 109607 - DNA, 264 bp, Glycine max
tgcagatgttgaacgttaccctcgcctgtcttggccgtatgggggccaccattgtgctgcagatggtctgcctggtgaatgctgagctgtaccctacattcatcaggaatcttgggatgatggtatgctctgccctgtgtgacctgggtgggatcttcacccccttcatggtgttcaggctgacggaagtttggcaagccctgcccctcattttgtgtggggttttgggcctgactgctggggccatgactcttcttctcccag

SEQ ID NO: 109608 - DNA, 241 bp, Glycine max
gatattttgttggagatctcgtctttgaagtttcttagatgacttctccctatattaaatgtacagtctctttcttcatagcatttggaaatttggctgatgacaccatcaattttgaggcctttccccacaagctggtgcactttggagatattcaggaaaaagttgtattgaaattttcacaagaggaatttcttacagcttggtcaactcaggtgcgtcctgcaacaactctgtttgc

SEQ ID NO: 109609 - DNA, 248 bp, Glycine max
ctgacaccctcccatttgctacaatgggatgacgttcacttgctgcaatgtctgtatttgcgtctaagtacaaggaaagtttgagtagggatgaaggcattaagctagttgttgaggagatatgtgctggtatatttaatgacctaggaagtggaagtaatgttgatgtttgtgtgataaccaagggacataaggaatatctcaggaaccaccttctaccaaatgctcgtacctatgtcaatccaaaa

SEQ ID NO: 109610 - DNA, 258 bp, Glycine max
  unsure (1)..(258): unsure at all n locations
attaggaaagcccttgatatgatacgtagatntgctgatgaggatcctgatgagtccactgacaaagaaaagttagttgatacgtcatctgacaataatgagaagaaaggtcaatattccaagttctggaatgagtttggtaaatccattaaacttggtatcatcgaggatgccaccaacagaaatcgtttggcaatactgctcagatttgagatcaccaagtctgagggaaaattgacatctctggatcagtacata

SEQ ID NO: 109611 - DNA, 254 bp, Glycine max
ttgtacactgccattcgtggcatcaaggatcctattaagtactacgaaaaggtggtgcggaatgcaatcaaaaaggttggaactgatgaggatgcactcacccgtgtggtcgtgagccgggctgagaaggacttgaagataatctcagaggtttactacaagagaaacagtgttcttcttgagcatgctattgccaaggaaacctctggggactacaagaagttccttctcacactgttgggaaaagaagacta

SEQ ID NO: 109612 - DNA, 256 bp, Glycine max
ggaagaagctgctgccatggctctctcatccccatccttggctggcaaggccgtgaagctgggcccatcagccccagaagtgggaagggtgagcatgaggaagaccgtcaccaagcaggtctcctcaggaagcccatggtacggcccagaccgagtcaagtacttgggcccattctctggcgagcccccgtcctacctaaccggtgagttcccaggcgactacggctgggacactgctgggctttccgcagaccca

SEQ ID NO: 109613 - DNA, 254 bp, Glycine max
ggaagaattgcttcctgagaaacacgatgattaccacgtcatgttaaggttcctgaaagcgaggaagttgaatattgaaagagcaaagcatatgtgggctgatatgctacaatggaggaaggagtttggtactgacactattatggaggattttgagttcaaagaaatagatgaagtggtgaattattatccacatggccatcacggtgttgataaggagggaaggccgtttacatcgagagactcgggaaagt

SEQ ID NO: 109614 - DNA, 271 bp, Glycine max
ggaattctgctcgagatggggtcatctctaacttgacggaagccagagataacattcctgctccatcttctaactttactaccctacaaacactctttgccaaccaaggacttgatttgaaggacttggtcctgctctctggtgctcacacaattggtatcgctcattgctcatcattgtcaaaccgcttgttcaatttcactggcaagggtgatcaagacccgtcattagacagtgaatatgctgcaaatctgagaggcttcaagtgcag

SEQ ID NO: 109615 - DNA, 266 bp, Glycine max
cgtcttttgggcaccattcctcagtctatttcactgcagactgtttggaatcagatggcaacagtgagaacaccattgaattttgattctagcaagcagagcttttgtcaattttctattgaccttctcggtggaggaatgttagtggacaaaactggagattggatcacacttatacaaaattctccaattagtaacttgttgagagttgctgcttggaagaaaggctgtctaatggtcaagattgtgatgtctgggaatgcagc

SEQ ID NO: 109616 - DNA, 98 bp, Glycine max
gaactacctccccaccatcaacacccaaagctgatattctacttaaactacttcttgtcagtacataaaatgatataggacattaaaacatttatgta

SEQ ID NO: 109617 - DNA, 254 bp, Glycine max
gtcgaatgacgatggctatcttgactgtacccccagttcctccttccaccagagctgctgtcatgcagctctaccgtgcttttgaggggtttggatgtgatactagtgctgttatcaatattcttgctcattcagatgctacacagcgtgcctacatccaacaagagtacagatcaatgtagtctgaggaactttccagacgcttagcttcagagcttagtggagtattagagactgcagttctgctctggttg

SEQ ID NO: 109618 - DNA, 260 bp, Glycine max
gaatgagggtgccaagtccttgttcaagggtgccggtgccaacatcctccgtgccgttgccggtgctggtgtgcttgctggttatgacaagttgcaggttcttgtgttcggcaagaagtacggctctggtggggcttaagttctaatgctgagtcagtactattatttgtttttagatggcgatgaaaaaaaccattgagttccaagagtcttagactaattgctgccgcaaattttgtttaataaatttactagatggg

SEQ ID NO: 109619 - DNA, 265 bp, Glycine max
gaagaattaagatggctaccttgactgtacccccagttcctccttcccccagagatgatgccatgcagctctaccgtgcttttaagggatttggatgtgatactagtgctgttatcaatattcttgctcatcgagatgctacacagcgtgcctacatccaacaagaatacagatcaatgtattctgaggaactttccaaacgcttagcttcagagcttagtgcccagttagagactgcagttctgctctggttgcatgacctgca

SEQ ID NO: 109620 - DNA, 259 bp, Glycine max
ggcggtttcatcctaaatcgtccaactctaaccagaagattgctcccagagccaggaaccaaagaatatggtgaacttaccagtaatcatcaaaaggcttatttgagaacaattacaggaaagactgaggcccttgtggacctaacagtgatagagatattgtcaaggcatgcttctgatgaggtctaccttggacagagtgacaatccaaattggactgatgacacaaaggcaattcaagcctttaagaagtttggaa

SEQ ID NO: 109621 - DNA, 254 bp, Glycine max
ctcgagccgcaaaacactcataacacaaagcacaaagcaaagctcatccttgagttaaaaaatggcagcagcttcttccatggctctctcatccccatccttggctggcaaggccgtgaagctgggcccatcagccccagaagtgggaagggtgagcatgaggaagaccgtcaccaagcaggtctcctcaggaagcccatggtacggcccagaccgagtcaagtacttgggcccattctctggcgagcccccgt

SEQ ID NO: 109622 - DNA, 226 bp, Glycine max
tccagttgaagatgaatgggggaaaacgtttctcctgctgtttgtattgcaaatgttcatggtaatttagaacagtgaaatgttgccccaattaaatgttatgctcaagtttttaaccgttcaaaaaaaaaaaaaaaaaaaaaaaaaaaaaaaaaaaaaaaaaaaaaaaaaaaaaaaaaaaaaaaaaaaaaaaaaaaaaaaaaaaaaaataaaaaaagagaggacg

SEQ ID NO: 109623 - DNA, 252 bp, Glycine max
ctttggatgctaggcaagacatggtggtggtagaggtaccaaagctagggaaagaggctgcagtaaaggccataaaggagtggggccagccaaagtcaaagattacccacttgatcttctgcaccactagcggtgtggacatgcctggtgctgattaccaactcaccaaacaattgggccttcgcccttatgtgaagaggtacatgatgtaccaacaaggttgctttgcaggtggcacggttcttcgtttgg

SEQ ID NO: 109624 - DNA, 256 bp, Glycine max
ctgatgccttttcgggaacccagatttccaccattctgagtaacttcacacaccatataacatcaaatgatgtggggcttgtggaaacttgggcaatcaatccctcgccgtcttgctcacggtaataataaagctgttgcttgtcgatattttgcctcagatgctgagctgaaaaagacagtcctccatgacttccatgttgctaatggagggaagatggtgccatttgctggatggagcatgccaatccaataca

SEQ ID NO: 109625 - DNA, 252 bp, Glycine max
  unsure (1)..(252): unsure at all n locations
cggctcgagcggacatgtcaccgcccagtcagctgtgttcactcaccattgtcgatcagattctgtctagtgaagggcagacaccagaaaaacccagatccagttttacagcgcaccagagttctgtgactactcatgtcccagttccagatcaaaccagcccaagagtccagaccactcctcncagctggaccagtgatgctggcgaacacaaggaagccagacagcagccaaaaccaagagccagcaact

SEQ ID NO: 109626 - DNA, 273 bp, Glycine max
gccttgggctgtgttttccctgaactcttgtcccgcaacggagtcaagtttggtgaggccgtgtggttcaaggccgggtctcagatattcagtgagggcgggcttgactacttgggcaacccaagcctgatccatgcacaaagcattcttgccatctgggccacccaagttatcttgatgggtgcagttgagggttaccgtattgctggtgggcctcttggtgaggtgactgatccaatctatccaggtggcagctttacacattgggtcttg

SEQ ID NO: 109627 - DNA, 110 bp, Glycine max
gaaggtcattccagctcactgtttacagcgctctgtgctccggtcattctcctatgatgggtatgacctcacgatagagttctgcctatagtatgtcgcaacacattacg

SEQ ID NO: 109628 - DNA, 224 bp, Glycine max
aaattttattcaaattcttccatacataaagttcgaattgaaagattaaattaaagagaatcacacatgtttgtccatatattattatttattatttattataaaaacaaaacacaaaaaactcaccgaattcctatcttatataaaaagaacgaatatttaaaaaaaaaaaaaaaaaaaaaaaaaaaaaaaaaaaaaaaaaaaagggggggcccccctttttt

SEQ ID NO: 109629 - DNA, 226 bp, Glycine max
cgatctcctcttctcctgcgccaaggaccacaaccctaccgtctggtttgccgacaacggcgaacgcttgggcacttatcgcggccacaacggcgccgtttggacctgcgacgtctcaagagattcggctcgactcatcacgggaagtgccgatcagaccgccaagctatgggacgtgcaaagcggcctgcaattatacaccttcaacttcgattccccggccagg

SEQ ID NO: 109630 - DNA, 270 bp, Glycine max
gttgatcgagataactagaaacagtgtgatgaaaatgaaggtccttgttttcttcgttgctacaattttggtagcatggcaatgccatgcgtacgatatgttccctctccgaatgaacactggctatggtgcccgtactccggaggtgaaatgcgcaagttggaggcttgctgtggaagcacacaacatatttggctttgagaccattcctgaagagtgcgttgaagcaacaaaggaatacatccatggcgaacaaatagatcagactcc

SEQ ID NO: 109631 - DNA, 262 bp, Glycine max
tgtctatctctcgttgtagcgtagcgcagcagttgaatttggaaaacaagatgtctcaccgcaagttcgagcattcgagacacggttcccttggctttctcccaaggaagcgagcttctcgtcatcgcggaaaggtgaaggctttcccaaaagacaatcctagtcacccatgcaggttgactgcctttgtgggctacaaagctggaattgaccacattgttagagaggtggagaacctggattcaagcttcacagaagagac

SEQ ID NO: 109632 - DNA, 271 bp, Glycine max
tgcacggtcattgatgctcctggacatcgtgactttatcaagaacatgattactggtacctcccaggccgactgtgctgtccttattattgactccaccactggtggttttgaagctggtatttctaaggatggacagacccgtgagcatgctcttcttgctttcaccctaggtgtgaagcagatgatctgttgctgtaacaagatggatgccactacccccaagtactctaaggctaggtatgatgaaatcgtgaggaagtctcttctta

SEQ ID NO: 109633 - DNA, 272 bp, Glycine max
gttgatcgagataactagaaacagtgtgatgaaaatgaaggtccttgttttcttcgttgctacaattttggtagcatggcaatgccatgcgtacgatatgttccctctccgaatgaacactggctatggtgcccgtactccggaggtgaaatgcgcaagttggaggcttgctgtggaagcacacaacatctttggctttgagaccattcctgaagagtgcgttgaagcaacaaaggaatacatccatggcgaacatatagatcagactccaa

SEQ ID NO: 109634 - DNA, 261 bp, Glycine max
gcgcctctcatccgtgatgggcgtatggagaagttctactgggcaccaacaagggatgaccgcattggtgtctgcactggaatttttcgcaccgattcaattcctgaacaggacgttgtcaagattgttgacaccttccctggccaatccattgatttctttggtgcactgagggccagagtagatgatgacgaagtgaggaagtggatttctggtgttggtgttgacggcattgggagaaaccttgtgactcaaagatgg

SEQ ID NO: 109635 - DNA, 268 bp, Glycine max
gcagtcactgctctgtttcaccgagtttgggcgtttagatcagaaccaaatcgtgttctcttccattggcaaacatggcaactcaaatgagcaagaagagaaagtttgttacggacggagtgttctttgccgaactgaacgaggttctgacacgtgaattggcggaggacggttactccggcgtggaagttagggttacgccgatgcgcaccgagatcatcatcagagccaccagaacccaagccgttctagggagaagggaaggaga

SEQ ID NO: 109636 - DNA, 269 bp, Glycine max
gtggacataagtggcaaccccattttcccaggtggcacatattacattatgccatcaacttgtggcgctgccggtggtggattgaaactaggccggacacgaaactcaaactgcccagttactgttttgcaagattactcagaaatcttccgtggcacaccagtcaaattcagcatacctgggataagccctggaatcatctttacaggtactccacttgaaatcgagttcgcagagaaaccttattgtgctgatcctccaaatgggtg

SEQ ID NO: 109637 - DNA, 273 bp, Glycine max
agggcaatgcaccggcactgcctgatgctcttaagaattacaacaagctggtgtctcttggcttcaagattatattcttgtcaggaagaacactggacaaacaggccgtaacagaagcaaacttaaagaaggctggctaccacacatgggaaaaattaattctcaaggatccacaagatccttccactccaaatgcagtttcatacaaaacagcagcgagagagaaactgataaggcagggatacaacattgttgggatcattggagaccaat

SEQ ID NO: 109638 - DNA, 272 bp, Glycine max
tttctctgtaagccttgctttcaattttctccttacaaaaaaatcctttcccttctctagtccccataactagcaaaataagccaatagaaaactgttccatatagtttcccattcaaatttgttttgattttcattttaactcaatggagaatagaacaagctctgtactcccacctggcttcaggtttcaccccactgatgaggaactaattgtgtactacctttgcaaccaagcctcatcaaggccatgccctgcatcatcattccaga

SEQ ID NO: 109639 - DNA, 269 bp, Glycine max
actagaaacagtgtgatgaaaatgaaggtccttgttttcttcgttgctacaattttggtagcatggcaatgccatgcgtacgatatgttccctctccgaatgaacactggctatggtgcccgtactccggaggtgaaatgcgcaagttggaggcttgctgtggaagcacacaacatctttggctttgagaccattcctgaagagtgcgttgaagcaacaaaggaatacatccatggcgaacaatatagatcagctccataacagttaac

SEQ ID NO: 109640 - DNA, 270 bp, Glycine max
acacaaggcagaaagcaagctcatcctagagttttaaaaatggcagcagcctcctccatggctctctcttccccatccttggctggcaaggccgtgaagctgggcccatcagcccccgaagtcgggagggtcagcatgaggaagaccgtcaccaagcaggcctcctccggaagcccatggtacggcccagaccgcgtcaagtacttgggcccattctctggcgagcccccgtcctacctcactggcgagttcccagtgactacggctggg

SEQ ID NO: 109641 - DNA, 267 bp, Glycine max
gcgtgggagggtccgaagttggagatagtgattctggttctgttctgttcttctttctactcacaacaacatcagaatcagaaacaacaacggccaccactaacttggaagatgttccctctctggatctcatgactgagctccttcgtcgtctcaagtgctcttccaaacctgacaagcgtcttattctcattggcccacctggatctggaaaaggcacccagtcaccaatcataaaagatgagtactgctttgccacttagctac

SEQ ID NO: 109642 - DNA, 267 bp, Glycine max
ctggtacctaccgctggatggcacctgagatgatcaaacgaaaatcctatgggagaaaggttgatgtatatagttttgggcttatcttatgggaaatggtgactggaactataccatatgaggatatgactcccatccaggctgcttttgccgtagtaaataagaatgcaaggccagttattccttcagactgtccacctgcaatgcgagctttaatcgagcaatgttggtctttgcatccggacaagaggccgagttctggcaggt

SEQ ID NO: 109643 - DNA, 256 bp, Glycine max
cgaatatacattgctcgcagatggatttagcatagatccgcagaaagagattacgttggtgaggcaagttgagtatcgagattctctcgtggaagcagcatggccactatgcagtggcatagaagccatatcatcattacctagatttgagagattaatgtatggcaggtaagctttataacgaggagccatatgtatgtgtggaatgaactccatcactcttaaataagagtcgttttgttactctctcctagag

SEQ ID NO: 109644 - DNA, 263 bp, Glycine max
aagagaacactttcatcgactgctcagaccaccattgaaattgattctttatacgagggaattgatttctactccactgttaatcgtacataatatgaggagctcaacatggatctcttcaggaaatgtatggagccggtggagaaatgtttgagggatgctaagatggacaaaattagtgttgatgatgttgtccttgttggtggttctaccagaattcccaaggttcaacaactgctgcaggacttcttaatggaaagagc

SEQ ID NO: 109645 - DNA, 266 bp, Glycine max
gtggaaatgcaagctacgtacttaatggggtgccccgaatgagagagaggccaattggggatttggttgctggtcttaagcaacttggtgcagatgttgattgctttcttggcacaaactgtccacctgttcgtgtaaatgggaagggaggacttcctggcggaaaggtgaaactgtctggatcagttagcagtcaatacttgactgctttgcttatggcagctcctttagctcttggtgatgtggaaattagattgttgataaac

SEQ ID NO: 109646 - DNA, 266 bp, Glycine max
ccaaaatcttcttcattatggacttcgtacgcggcggcgagctgttcgggaaaatctcaaagggccgattcgccgaggatctcagccgcaaatactttcatcaactgatctccgccgtggggtactgccactcgcgcggcgtattccaccgcgacctcaagcaggagaatctcctcctcgacgagaacggcgatttgagggtctcggatttcgggttgagtgcggttcgggatcagatccgacccgatggctgctccacaaaacat

SEQ ID NO: 109647 - DNA, 270 bp, Glycine max
ctaaaccctactcattctccatacctcaacgaagaggttaaagagacggcaacactttgctgtccgccttgaccgagcagagcttcgtcttggccctcgattttgccctaaagtactctcagtcacaacagacaccgtcgtcgtcgtcgtcgtcatcaatggcaccgaagcagaccaaggctgagaagaagatcgcttacgatgcgaactgtgcgacctaatggaggagtacggccagatcctcgttgtggactccgataacgtgggatc

SEQ ID NO: 109648 - DNA, 267 bp, Glycine max
gaaaatttcattaccaatgcagttcgattccttgaagatacacaaacagctgatggttcatggtatggaaattggggagtttgcttcacttatggctcttggtttgcacttggaggtctagcagctgctggtaagacttacaccaattgtgctgccattcgcaaagccgttaaatttctacttacaacacaaagagaggacggtggatggggagagagttatctttcaagcccaaaaaagatatatgtacctcagaaggaagccgat

SEQ ID NO: 109649 - DNA, 267 bp, Glycine max
aacacaaggcagaaagcaagctcatcctagagttttaaaaatggcagcagcctcctccatggctctctcttccccatccttggctggcaaggccgtgaagctgggcccatcagcccccgaagtcgggagggtcagcatgaggaagaccgtcaccaagcaggcctcctccggaagcccatggtacggcccagaccgcgtcaagtacttgggcccattctctggcgagcccccgtcctacctcactggcgagttccaggtgactacggc

SEQ ID NO: 109650 - DNA, 248 bp, Glycine max
cttccatccctcaacgccccacagatcttcaatttgattgcttgggtcaacaatttctgtcattctcaatcatggcaactagacttcagtttgaaaataattgtgaagttggagtcttctctaaactcaccaatgcttactgtttggttgcgattggaggttctgaaagcttctacagtgtatttgaagctgagttagcagatgttatccctgtggtcaagacatccattggtggtactcgtatcatt

SEQ ID NO: 109651 - DNA, 272 bp, Glycine max
agtaactccaactccaagtcacattggtgacaaagttagaaacaaggagaaagaaagaagatggcaggaaagaaaatcccagatgtgttgctgaattcaggacacaaaatgccagttataggcatgggaacttcagtggagaatcgtccatcaaatgagacccttgcttctatctatgttgaagccattgaggtgggttaccgtcattttgacactgctgcagtgtatggaacagaggaagccataggcctagccgtggccagagccataga

SEQ ID NO: 109652 - DNA, 288 bp, Glycine max
tcggctcgagcaactggcttggcgatttaaacccaaattccaaagtgataattcccaatgcatatggtgtgtcttccatacagaatgcaaaagttggggacaatttccaatttgaaagattaggtactttacgttgactacttgttgtttcttcatctatctttgcttaatatctcatccttatatctgctattccaggctattttgtggtcgaccaggactcgacatcagaaaaacttgtttttaataggactgtcaccttaaaggacagctatagcaaaggtggaa

SEQ ID NO: 109653 - DNA, 281 bp, Glycine max
tatttattagaatttgccagagaattagaagaataaacataataccccagatggcttcaaaaacttgttcctcccttgcccttttcctcacactcaacctcgttttcttctcacttgtctctgcatgcggttatacaccatgccctggtccaaacccaaagccaaggcccaaccccaaccctaaccctaaccccagcccaagtggctcgtgcccccgtgacgcactcaaactaggtgtatgcgccaatgtgctaaacttggtgaacgccactttgggtcaa

SEQ ID NO: 109654 - DNA, 281 bp, Glycine max
atggccacctccaacttctctattgttctctccgtctccctagccttctttttggtgctacttaccaaggcacactcgaccgataccgtttctttcaccttcaacaagttcaacccagtccaaccaaacattatgctccaaaaagatgctagtatttcatcctctggggtgttacaactcaccaaagttggcagcaacggcgtgcccacctcgggatctctcggtcgtgccctttacgctgccccaatccagatttgggacagcgaaaccggcaaggtagc

SEQ ID NO: 109655 - DNA, 277 bp, Glycine max
tatagagagagagagtttttagagagagaaaggatgaagatcacggcattgttggtgcttaaatgcacaggtgagggttccgatcccgttattctggcgaacgcttccgacgtcagccacttcggttacttccagcgttccagcgtcaaggagttcatcgtcttcgtcggtcgcaccgtcgcccgtcgcacccctcagggccaacgccaatccgtacaacatttagagtacaaggtgcacacatacaacagaaatggtctttgcgcgttgggattta

SEQ ID NO: 109656 - DNA, 277 bp, Glycine max
ggcctaatgaaaggtgagttgcagaatgccagagaggccattcgctggggcactgattatcttctcaaagccactgcacatccaaacaccatttatgttcaggtgggggatgctaagaaggaccatgcttgttgggagagaccagaggacatggatactccaagaagcgtgtttaaaatagatgcaaacacacctggttcagaagttgccgcagaaactgctgcagctcttgcagctgcttctctggtttttagaagaagtgaccccacatactcca

SEQ ID NO: 109657 - DNA, 176 bp, Glycine max
aagggagggaagaagaaggcagctgatccctttgccaagaaggattggtatgacattaaggccccttctctttttcaagtgaaaaatgttggcaaaaccctcgtctctcgtacgcagggtaccaagattgcttctgaaggacttaaacatagagtgtttgaggtctccttggctga

SEQ ID NO: 109658 - DNA, 211 bp, Glycine max
ggcgtccacattcattggaaactcgacctcgattcaggagatgttcaggagactgtgcgagcagttcacggccatgtttaagaggaaggctttcttgcattggtacactggtgaaggcatggacgagatggagttcacggaggcagagagcaacatgaatgaccttgtgtctgagtaccagcagtaccaggacgccactgctgaggacgaa

SEQ ID NO: 109659 - DNA, 205 bp, Glycine max
agtcaagagggagttgctcacattggtgaattgaaatctggtgtctatgttccattgcctacaaaaactaatttggtggaaactcccaaggaatggcaactggatctaccttgtgacaaaattcctagtgtcttgactacaactgatgagagattggtaggcacagaacatgagggatatgatccttttcttggtggaattcaaa

SEQ ID NO: 109660 - DNA, 273 bp, Glycine max
ctcgagccgattcggctcgagtaagtcccttccctattgtaatatctgccagcctcaaaaaagacttgctctgcctctgacactctctgagtaggactacactgccatggctgcctcagtctccactgttggagctgtcaacggagctccactgagcttgaacagctctggagctggagcttcagttcccagttcagccttctttggcaccagcttgaagaaggttattgcctcaagggtccctaacgtcaagatttcttctggaagtttcaa

SEQ ID NO: 109661 - DNA, 274 bp, Glycine max
ggtaaaagtgttgtcccaaagaaagagcatctttctcctttctttcatcaccgttggaagagactgagatgggttcaaaaaccaagacttttacctttgaggaggtggctaagcacaatcacaggaaggattgctggattatagtcaaagggaaggtgtatgatgtcaccccatttttggatgatcatccaggaggtgatgaagttttagtgactgcaacagagaaggatgccaccactgattttgaagatattgggcacagtgattcagcaac

SEQ ID NO: 109662 - DNA, 276 bp, Glycine max
aaagaaacaaagaagtaaacacactgtttcatactttcgtttcgttcattcggcgtagaagcaaaagagagagatagagagagggaaaaaggttgctaccaacaacaaacaaaaacagtgttgcttgattccgcggtggcgagaaccgacgtgagcggcggaggagaggcgcggaacggtggtcttcagggttttctgacgtctctgttctcgaccctcggcggtgttttcgggtcaacgtttcaagaaccgcatcaaagtgttatcatggcttcc

SEQ ID NO: 109663 - DNA, 275 bp, Glycine max
gttccaactcattcttcagcacttttctttcaatacaatactgcactgggacccccttatcgtgttttggtggacaccaacttcatcaatttctcaatccagaataaattggatctggagaaagggatgatggactgcttatatgctaaatgcaccccttgtattacggactgtgtgatggcagaactcgagaaattagggcaaaaatatcgtgtagctctaaggattgccaaggatcctcgatttgagagaatactatgtactcataaagggac

SEQ ID NO: 109664 - DNA, 175 bp, Glycine max
accgccgcaccgaaaattcgggggggggcgggacactgcgaggtgggtagtttatctggggcggatgcctcctaaagagtaacggaggtgtgcgaaggtaggctcaagctaagattctgctcgtgagcgtaatggtataagcctgcctgactgtgagaccgactggtcgaacaga

SEQ ID NO: 109665 - DNA, 266 bp, Glycine max
cgagataactagaaacagtgtgatgaaaatgaaggtccttgttttcttcgttgctacaattttggtagcatggcaatgccatgcgtacgatatgttccctctccgaatgaacactggctatggtgcccgtactccggaggtgaaatgcgcaagttggaggcttgctgtggaagcacacaacatctttggctttgagaccattcctgaagagtgcgttgaagcaacaaaggaatacatccatggcgaacaatatagatcagactcca

SEQ ID NO: 109666 - DNA, 262 bp, Glycine max
acgtgaaattagggttcatcgaggaggaagaagaagaagaagatgttatacctgttgcctcacttgcactctggatgggccgtcgatcaagcaatcctcgccgaagaggagcgtctcgtcgtcatccgtttcggccacgactgggacgaaacctgcatgcagatggacgaggtgttggcgtcagtggcggagacgataaagaactttgcggtgatatacctggtggacataacggaggtgccggatttcaacaccatgtacg

SEQ ID NO: 109667 - DNA, 202 bp, Glycine max
gccatcaggttcctgatctaaggaatcttcaatacgtgagtgattttgtcacaaaagctggctatggatctgaaagtgtagctgatgaagaagcagcaacagttactttgtccagtgatatttgtagagttaatcgtgcttctacaaaaagtgctgtcaaactgcaagaggttggacccaggatgactcttcaactagttaa

SEQ ID NO: 109668 - DNA, 260 bp, Glycine max
gagaaagagcgtgagaagaatgttgtagaaacatatgaggctctgcagtttcttgagaatgagatcaaggacaagaaattctttggaggagaagaggttgggttggtagatatagctggtgtcaacatagcattttgggtccctttgattcaagaaattgcagggttggagctattaagcagtgagaaatttcctaagctttacaagtggagccaagaatttgtgaaccatccaattgtcaaagaaggtcttccccctag

SEQ ID NO: 109669 - DNA, 259 bp, Glycine max
gagaaattcgcaaaccctaatttcggaaagatcggcgatggctgcctccaaggatcgcgagaaccttcgtctacatcgccaagctcgccgaacaggccgagcgatacgaagagatggtggaatcaatgaagaacgttgcgaatctcgacgttgaactgactgtggaggagcggaatttactttctgttgggtacaagaatgtgattggtgctcggagagcatcgtggaggatcctgtcttccattgagcaaaaggaaga

SEQ ID NO: 109670 - DNA, 139 bp, Glycine max
ctcattaattgcaagaatggcacttcgttgcttggtgatgtccctttctgttctcttcactcttggtcttgcgagagaaagccatgccagagacgaagatttttggcatgctgtttggccaaacactcccattccaagt

SEQ ID NO: 109671 - DNA, 257 bp, Glycine max
gataactagaaacagtgtgatgaaaatgaaggtccttgttttcttcgctgctacaattttggtagcatggcaatgccatgcgtacgatatgttccctctccgaatgaacactggctatggtgcccgtactccggaggtgaaatgcgcaagttggaggcttgctgtggaagcacacaacatctttggctttgagaccattcctgaagagtgcgttgaagcaacaaaggaatacatccatggcgaacaatatagatcag

SEQ ID NO: 109672 - DNA, 246 bp, Glycine max
gcaggatcagtcgttgcatctggatctcatgacagggaaattttcctctggaatgtgcatggggattgcaagaacttcatggttctgaaaggtcacaagaatgcagttttagatcttcactggactacagacgggacacaaatagtctctgccagcccggacaaaacagtgagggcatgggatgtggaaacaggaaaacaaatcaaaaagatggtagaacatctctcatatgttaaatcatgttgt

SEQ ID NO: 109673 - DNA, 235 bp, Glycine max
gatgtttgggtgatgaatgttgtacctcgtgatggatataacacactaaagcttatatatgacagaggcctcatagggtctatccatgactggtgtgaagcatattcaacatacccccggacttatgatttactcaatgcatggactgtggttttctgacttgaaacgagagggtgcagtccagaggtctactgattgagatagaccgtttgcttaggcctacaggttcatcatc

SEQ ID NO: 109674 - DNA, 247 bp, Glycine max
caaaaggctctctcacgcagtcgcagtgagtgaaaaggaaaaccctaattgcggtattctcagtgccttcgagagaaagaaaaaatggcagataatcttgttctccgtggcaccatgcgcgcccacaccgacgttgtgacggcgattgccactcccatcgacaactccgacatgatcgtcaccgcctcacgcgacaaatccatcatcctctggcatcttaccaaggaggacaagacttacggtgtcc

SEQ ID NO: 109675 - DNA, 245 bp, Glycine max
ggatgctcaagataaagctgcacgagggtatgctaaagaagaagaaaagaaagaagggtggcttaagtggctcaactccaaagcagagagctctgtttagtatgtgagttttgggagcatgaacaagttcccttactctcagctcgttgaaatagcacgtgcgcttgaagattcggggcatgattttatctgggtggtgaggaaaaacgatgggggtgaaggagataactttttggaggagtttg

SEQ ID NO: 109676 - DNA, 243 bp, Glycine max
ggaatttcttacagcttggtcaactcaggtgcgtcctgcaacaactctgttggctgatgggtgcccatatttgtatgctatggtgcatgatagttcagtgtctacaataccaggtgattttgtcattggtgtcaagttgacaaccataaacaatatgtgtgcatatgggctcaatcctggtatttcaggttctcgtcttttgggcaccattcctcagtccatttcacagcaaactgtttggaa

SEQ ID NO: 109677 - DNA, 244 bp, Glycine max
cagaaagcaagctcatcctagagttttaaaaatggcagcagcctcctccatggctctctcttccacatccttggctggcaaggccgtgaagctgggcccatcagcccccgaagtcgggagggtcagcatgaggaagaccgtcaccaagcaggcctcctccggaagcccatgttaccgcccagaccgcgtcaagtacttgggcccattctctggcgagcccccgtcctacctcactggcgagttc

SEQ ID NO: 109678 - DNA, 240 bp, Glycine max
atttgcatagggctgaacattcacactgctcccgttgagatgcgtgagaagcttgcaattccagaatcccattgggctcaggctattaaggacctttgcgctttgaaccatatcgaagaagccgcggttctcagcacgtgtaaccgcatggagatctatgttgtggctctttcccagcaccgtggtgttaaggaagttactgattggatgtctaaggtgagcgggatttcaatacctgag

SEQ ID NO: 109679 - DNA, 245 bp, Glycine max
  unsure (1)..(245): unsure at all n locations
gtgatgagaagcctgcagttgaagaagatgtagctgatggaaacaaggacagccctactaatgaaanccgaagaaaaagagcctgaagataaggaaatgactctggaggaatatgaaaaagtgttggaagagagaaggaaggccttccaagcactcaagactgaagagagaaaggtggacactaaagagtttgaatccatggcaggcctatcaagcaagaaagataatcatgacatattcattaa

SEQ ID NO: 109680 - DNA, 170 bp, Glycine max
aaggacagaagcaaagacgccgagacgataccgagcccatggaagaatcaatccttataagtcatctccgtgccacatggtgtggatattatctggcaaagaaggccctgtgatggaggaggccgagacgactttggcagcatgcaagaaatcgcgagctctgcgaagtg

SEQ ID NO: 109681 - DNA, 241 bp, Glycine max
atacggcttgcggacttagacttatccgcaaaccggttatccggttctgtcccgttcgaactcgggacaatgccggttctatccacactgaaaatggatagtaactctttagagggcttaattccttcgagtttgttgagtaatgggggtatgggcattttgaaccttagtcgaaacgggtttgaaggctccatacccgatgtgttcgggtcacactcgtatttcatggctttggatttgt

SEQ ID NO: 109682 - DNA, 242 bp, Glycine max
gccactgcaactctaggttttcaggctacaaggttgggggttagaccatctcctgtagtggcagctatttcatcaagagggccaaattttctcacccttgaaattctgaagcctgatgtggtggctcctggggtgaacattcttgctgcttggagtgaggccattggtccatcaagtttgccaacagatcacagaagggtgaagttcaacatactctcaggaacttcaatgtcatgccctca

SEQ ID NO: 109683 - DNA, 238 bp, Glycine max
acagtgttgagatcaaatcactcaaggaactcactggcaagctcttccaggatatcagcaatctggatcatgcagcaaaaattaagagcagcccagaagcagagaagtactatgctgctactgtatcttctctgaacgatgtccttgccaaacttggttaatgtgattaatttcttgctttcttgtgtaagctttgtgcatcattttctcagacactttgttgactgatattttaaga

SEQ ID NO: 109684 - DNA, 242 bp, Glycine max
ttggaactcttgtttcacatttaatcattaaagatgggaaagtttcatgataacttataaattataatataaaaaaaaaaaaaaaaaattaaaaaaaaaaaaaaaaaaaaaaaaaaaaaaaaaaaaaaaaatttaaaaaaaaaaagggggggcccccccctttttttttctccccccccccgttttttttttccgccccctttccccggggctccctcttttcccctttgggggtttttttt

SEQ ID NO: 109685 - DNA, 243 bp, Glycine max
  unsure (1)..(243): unsure at all n locations
gacgaacacgttgaatgtgaaactcagagctggtaccaagaagtttcaaagctaaagncaaagtatgagtctcttcaaaggacccngaggcatttgcttggggaagatcttggaccattgaacataaaggagctgcagaatattgagaaacagcttgaaggggctttagcacaagcaagacaaaggaagacacaaatcatgattgaacaaatggaagagcttcgcagaagggagcgccatctt

SEQ ID NO: 109686 - DNA, 241 bp, Glycine max
ggatcaactgaggagagtgagagaaaagagaagagaagatgacaacacgcttcaagaagaacaggaagaagaggggccacgtcagcgctggccacggtcgaatcggaaagcacaggaagcaccctggaggacgcggtaacgccggaggcatgcaccaccacaggatcctcttcgacaaataccaccctgggttcttcggcaaggtaggaatgcgctattttcacaagcttcgcaacaaatt

SEQ ID NO: 109687 - DNA, 237 bp, Glycine max
aagcagatcaatctctctctctctctcaaccataatagtcatgggttttaaggaggattttgagcagtatgctgagaaagcaaaaactttgccacctcctcactcacacgaagacttgcttatcctttatggattgtacaaacaggccaccgttggacctgtcaacaccagccgtcctggaatgttcaacatgagggacagagctaaatgggatgcatggaaggctgttgaagggaa

SEQ ID NO: 109688 - DNA, 238 bp, Glycine max
accaaagccaatcccaatttctctctcaccattcgtggcggccaagtcattctcgctccctccgatcccaccaatgagtaccagcattggtataaggatgagaagtacagcactagggtgaaggatgaagaggggtgccctgctttctctttgatcaacaaggccactcttgaagccttgaagcactccatcggtgccactcatcctgttcggctgataccttacaagcccgactatc

SEQ ID NO: 109689 - DNA, 167 bp, Glycine max
atggaatcagaggagagtgacctaacaagaatagagatttccaacatacctggaggacaagaagcttttgaaaaagccacacaattctgttacggcgttaacttcgcgatcaccgttcacaacgtggcggcgctgcactgcgccgccgtgttcctccacacaacata

SEQ ID NO: 109690 - DNA, 241 bp, Glycine max
gggagtcagagaaaccctaggtaagaagaaaagatgccggctggtcatggtttgagatcccgcaccagagattccttctctcgtcctttcaggaagaagggaaccatcgccctcaccacatacctgagaacctaccacgtcggcgactatgttgacgtcaaggttaacggtgccgttcacaagggaatcccccacaaattctaccatggccgcaccggacgcgtctggaatgtcaccaaac

SEQ ID NO: 109691 - DNA, 216 bp, Glycine max
aacactttcacactctttctctctttctctctctctctcagaatcttctcctctctccgattcctatttattaattggagttttctcgcgcctttttctttccctgaaaacatttcatcttcgtattgatgtcggaaaagggtcggccacttcccaaatttggtgaatgggatgcaatgatccagcctcagctgaggggttcacagtgatttttaa

SEQ ID NO: 109692 - DNA, 239 bp, Glycine max
cgaaaacagagtacaagatttaaacacgcgaacaccgtgtttgaaaatcgaacataagagaagagggtgcaatcgttagggtttccaagatggaaggcatggttgatcacctggctttcgagcggaacaattcgcagttcgatgtcgacgagatgaagatcgtttgggccggttctcgtcacgcttttgaagtatctgacaaaatggctcgcctcgttgccattaatccggcattcaga

SEQ ID NO: 109693 - DNA, 237 bp, Glycine max
gtccgttaatccttttgtgtttgcactgcgcttcgttttgggtgccttggcagccacatggtttgtgttggttccaatttacatgtggctcaaatgatcaagttgttcccaaaggtcagccaatctaagagatattagtagttagtgatccttttgatactttatcagtttcttttcaaagtttcatcaaatgtactctcaattaagagaaatttgatcaaatgtcaagtagtttat

SEQ ID NO: 109694 - DNA, 238 bp, Glycine max
agatcttgaagggctttcagagggcgctagtgtaattgaagtggttaagaaggttaagccacatgtgctccttggattgtctggagttggtggtgttttcaatgcagaggtgcttaaggcaatgagagaatctgtttcaacaaaacctgctatctttgcaatgtctaatcccaccatgaatgctgagtgcactgctattgaagctctaagtcatgctggagaaaatatagtgtttgca

SEQ ID NO: 109695 - DNA, 231 bp, Glycine max
gaggaattttagtggacaaaactggagattggatcacacttatacaaaattctccaattagtaacttgttgagagttgctgcttggaagaaaggctgtttaatggtcaagattgtgatgtctgggaatgcagcagtcaaaaggagtgattgggcctcattggtatctttgtttttaacaaacagcaacagtacagagcattttgatgcatgtaagtggacaaaatcagaac

SEQ ID NO: 109696 - DNA, 232 bp, Glycine max
ctgctttgcttggtcgtatcccatctactgttggttaccaaccaaccttgtctactgatcttggagctcttcaagagcgtattacaacaaccaagaagggctcaattacctctgtccaagctatctatgtgctctgctgatgacttgacagatcctgctcctgctaccacttttgctcacttggatgccacaacagtgttaacacgacagatctccgagcttggtatctatc

SEQ ID NO: 109697 - DNA, 226 bp, Glycine max
caaagaatagatcctcaatacaatgaggttcatgctcagatggaaacaaatttgtttaaattgtctcttgatgatgttgaaactcctaaaggttccatgttggatcttaaaatttctcaatctggcatcaatcttttttggtttttcttgatcttccttttcagggcaagtcccacatggatgttccaaacagcccggaattctcgattgatgttcctccttacct

SEQ ID NO: 109698 - DNA, 233 bp, Glycine max
gagataactagaaacagtgtgatgaaaatgaaggtccttgtttacttcgttgctacaattttggtagcatggcaatgccatgcgtacgatatgttccctctccgaatgaacactggctatggtgcccgtactccggaggtgaaatgcgcaagttggaggcttgctgtggaagcacacaacatctttggctttgagagcactcctgaagagtgcgttgatgcaacaaatgaata

SEQ ID NO: 109699 - DNA, 228 bp, Glycine max
gagtcctcaaaacacttgaaatggatgaggagtatgaaggaaatgttgaggctactggagaggattattccgtggaacctgctgagagcaggaggccattccgtgctctccttgatgttggtcttattaggactataaccggtaaccgtgtgtttggtgcccttaagggagctctggatggggggttggatattcctcacagtgacaagaggtttgctgggtttgata

SEQ ID NO: 109700 - DNA, 227 bp, Glycine max
acaagcttggcaaagctggagatgaatctcactctgctcttactgagtttgataggaccgagaaagacattaccccaataggtggtttccctcactatggtgttgttaaggatgattatatcatggtcaagggatgctgcgttggtcccaagaaaagggttattacattgcgccaatccctccttaagcagacttctcgtgttgctctggaggagatcaagctcaag

SEQ ID NO: 109701 - DNA, 222 bp, Glycine max
gcgtgatcgtggtggacaatttcttcacgagaagaaaagagaacgtgatgcaccattttgggaaccctagattcgagctcatccgacacgacgtcgttgtacctctcctgctcgaggttgatcagatctaccatctggcttgccctgcttcccctgtccactacaagttcaaccccgtcatacatatcaagacgaatgtggtggggaccttgaacatgctgg

SEQ ID NO: 109702 - DNA, 233 bp, Glycine max
ccaaattatggccaacgcaattgatatattagaatcaaaacagaatctcaagattctaccagtatttgtttccattgatcctcaacgtgatactccctcacaacttcgtgattaccttaaagagtttgattcaagaatcataggattaactggacctgttgcagctattaggcagatggctcaagaatatcgtgtttactttaaaaaggtagaagaggatggcaatgattatc

SEQ ID NO: 109703 - DNA, 236 bp, Glycine max
aagaaagagaagagaagaatcgaagacgaagatggaggacgcatcagcatcaaagttcattccacaccaaatcggaggtgtccaaaacgacgcgcttcgattcggtctccatggagtcaagagcgacatcgttggttctcaccctcttcaatcttcactccaatctacaaggagaatggatgaagcgatgaagaggcaatgcaaagttaacctgtacggaactgcttttcccatga

SEQ ID NO: 109704 - DNA, 270 bp, Glycine max
caggacaagattcgtcccttgtggaggcactacttccaaaacacacagggtctcatttttgtggttgacagcaacgacagggacagagttgttgaggccagagatgagttgcacaggatgttgaatgaggatgaactgagagatgcagtattgctcgtatttgctaacaaacaagatcttcccaatgcaatgaatgctgctgaaattaccgacaagctgggtctccactctctcagacagcgccactggtacatccagagcacctgcgca

SEQ ID NO: 109705 - DNA, 265 bp, Glycine max
cccttttaaaaggctggaatcccagatggtgtgcttaatatagtacctggatttggcccaactgctggcgcacaataagctcacacatggacatagatgcggtcagttttactggttcaattgaagtagggcgtgaagtgttgcaggctgcagcttggagcaatttaaaaccggtttcacttgaattaggaggcaagtctcctctcattattttcaatgatgcggatatagacaaagcttccgagcttgctctctttggcatcat

SEQ ID NO: 109706 - DNA, 258 bp, Glycine max
gtgagggtcgtgcgattttcgctagtggaagtccatttgatcctgtagaatacaagggcaaagtgtactattctggccaggccaacaatgcatacatcttccccggctttggtcttgggttggtaatctcaggagcaatcagagtgcatgacgatatgcttctagcagcttcggaagccttggctaaactggtgaccgaggagaactacgaaaagggcttgatttatccaccattctctaacatcagaaaaatttcag

SEQ ID NO: 109707 - DNA, 257 bp, Glycine max
aaatcatcacacacacatactaagaagcaacaattcttctacaatggatctcctccttctggaaaagaccctcataggtctcttcctcgctgcggtggtcgccatcgccgtctccaccctccgcggccggaaattcaagctcccaccgggcccactccccgtcccaatcttcggcaactggctccaagtcggcgacgacctcaaccaccgcaacctcaccgatttggccaaaaaattcggtgacatcttcctcctcc

SEQ ID NO: 109708 - DNA, 257 bp, Glycine max
ggaccgaattggtgcagcgtgacgtcagcgtctgcctcgatgaaaagaacgccttcaccattgcaatccaccatgagtttgcggccaggaccttccctaagcctacccgcaaaggggtagtaaaatactagagtttttgtaagtgcctttcttatcacttcaacagggtctttcatggaggactctttattattaccatagaattgtatgaaggggatttggaaacgaagcccttcttggtcatcaatgtccgatag

SEQ ID NO: 109709 - DNA, 260 bp, Glycine max
ggaaaaagttgtattgaaattttcacaagaggaatttcttacagcttggtcaactcaggtgcgtcctgcaacaactctgttggctgatgggtgcccatatttgtatgctatggtgcatgatagttcagtgtctacaataccaggtgattttgtcattggtgtcaagttgacaaccataaacaatatgtgtgcatatgggctcaatcctggtatttcaggttctcgtcttttgggcaccattcctcagtccatttcacagc

SEQ ID NO: 109710 - DNA, 265 bp, Glycine max
gacaaaactagtgcaactttgcaatttagaaagttagcagattgtgattttctcaagagaaactttaagcagatgtctaatgttttgtgggtggctcctgaggacaaggcgagtttgtggtcacaacttcattatgtttcgtgtaataatctggaaatgcaagaagcttatcttgtcaatctcgtaaatgtgttacgagaattgtatttgcacagtccagaggaagctcgccaattgagaaggaaagctctttctcgtattgaat

SEQ ID NO: 109711 - DNA, 262 bp, Glycine max
gcaactgttgcaacctcagctggggagaagcccgtccgtgagcttatagctgatgatgcctggttgaatggggaattcattactactgttcaacaacgtggcgctgcaattatcaaagctagaaagctttcaagtgcactatcagctgctagtgctgcttgtgaccatattagagactgggttcttggaactcctcagggcacttgggtatcaatgggagtatattctgatggttcctacaatgttccagctggacttatat

SEQ ID NO: 109712 - DNA, 263 bp, Glycine max
gaagaagatggagatgtatcagatctggagcaggagaatagcgttgggagcgttcgcgtttgttgctgcttttcctatcggcctcagcagacgacgtcgttgtgctctctgaagataacttcgagaaggaagttggtcaggacagaggagctctcgttgagttctatgctccttggtgtggacactgcaaaaagcttgctccagaatatgaaaagcttggtagcagcttcaagaaagccaaatctgttttaatcggcaaggtt

SEQ ID NO: 109713 - DNA, 258 bp, Glycine max
aaaaaaaggaagactaaaactaaaactaaaaccccactcagtcttccagtgaaaaaagaaaggcagcgatggaagaagacttcgacatccccggcggcgaggaaatggatctcggcgaagacaaggtcggcgaggagcgggagatcggctcccgcggcctcaagaagaagctcctcaaagaaggtcaaggctgggaaacccccgaagtcggcgacgaagtccaagttcattacacggggactttgctcgacggaacta

SEQ ID NO: 109714 - DNA, 268 bp, Glycine max
catcaaagacattaaggagttcaaagaaagcactaaggttgacaaggtggttgtcctgtggacagccaacacagagaggtacagcaacgtagttgtgcggactaaacgacaccatggaaaacctctttgcttccttggacaggaatgaggctgagatttccccttccaccttgtatgccattgcttgtgttatggaaaatgttcctttcatcaatggaagccctcagaacacctttgtcccaggactcattgatctggccatcaaaag

SEQ ID NO: 109715 - DNA, 256 bp, Glycine max
caaaaatattattaagatgatcaacattattggagctcttgttctactctttgcatttctcttcctcagttgtgtgtatgcacaagacacaacaacccttgtgcctgcaatcataacttttggtgattctgctgtggatgtagggaacaatgactatcttcccacccttttcaaggctgattaccctccttatgggagggactttgttaaccaccaacctactgggaggttttgcaatggcaaattagctactgat

SEQ ID NO: 109716 - DNA, 255 bp, Glycine max
aagcaagctagagttcacctgcttgatagagagcctttccaggatgcgtttggaccgaagactaagaggaagcgccccatcctcttggcggctgactacgagtcattgctgaagaaagccgatgggtctcaggatgcttttgaagagaagtatggttccagtgtatccgcggaaggtaatgatgaagatggatttagagatttagtgcgacatacaatgttcgaaaagggtcagagtaaacgcatatggggtgag

SEQ ID NO: 109717 - DNA, 258 bp, Glycine max
attcacttcatatgtaactcctgggtttacaattcaaaacactacaagactgatcgcattttctttgccaacaatacatatcttccaagcgagacaccggctccacttgtcaagtacagagaagaagaattgaagaatgtaagaggggatggaactggtgagcgcaaggaattggataggatctatgattatgatgtctacaatgacttgggcgatccagataagggtgaaaagtatgcacgccccgttcttggaggt

SEQ ID NO: 109718 - DNA, 260 bp, Glycine max
cgattacaataagaacagtgtggtgagaacgtaccctcaaataccaggtggagatccacggtgttatcctagcaccggttccgcggttttgcttcctttgaagaatcttcgagcacctaaagtggaggctgaggttttaatctgtggtggagccccgagaggagcttaccagaatgctttatcgggtaagtttgttccagcgttggaaacgtgcgctcggattaaaataaccgacccgaacccgaaatgggatatggaaa

SEQ ID NO: 109719 - DNA, 266 bp, Glycine max
agaggatccagcttgtggtcccctcattgattccgttgccctcaaggttttgtacccacccaaaagaacaagagccaatttgttgaaaaatggcaatttcgaagaaggtccatatatatttcccaactcgtcttggggggctttgatcccaccgcatatagaggattctcacggtcctttgccaggatggattgttgagtctcttaaggcggtgaaatacattgattctgatcactttgctgtgcctgagggaaaaagagctattg

SEQ ID NO: 109720 - DNA, 261 bp, Glycine max
tggagccagagatcttgcttgatggggagcatggtattgatagaacttttgaagtagcccaaaaggtctgggcagaggttttcttctaccttgctgagaacaatgtcctttttgagggtattctccttaagcctagcatggttacacctggagccgagtccaaggacaaggccagtcctcagacagttgctgattacaccctcaagctccttcacaggagaattccccctgctgtccctggaattatgtttttgtctggtg

SEQ ID NO: 109721 - DNA, 259 bp, Glycine max
gaattgttgtaactttttgattcctaaattctctaaaattcgaaattctaatttcgttaggggaaagagattgtttgtgtgtgagtgagtatggctggaaaaggcgagggtcctgctatcggaatcgatttgggaacgacgtactcttgcgtcggcgtgtggcaacacgatcgtgttgaaatcatagccaacgatcagggtaacagaactaccccatcctacgtggctttcaccgacacagaacggttgatcggcgatg

SEQ ID NO: 109722 - DNA, 166 bp, Glycine max
tgtcttgtgtatttgaaattaacaagtagcaaagatgtttgtaatcttcggtggaaataagggtcacaatataaagggtaacttggtgattatgctaaagaatgtgaatgatatctataacattaccagtgtcaatgctaccattggaatcggcatatacatcatt

SEQ ID NO: 109723 - DNA, 257 bp, Glycine max
gaaacatttgagcaaaaatggttcaagcacagcctctacaacatgttggtaatggtgcagggaaagaagatcaagcttattttgatccaagtgctccaccacccttcaagattgcaaatatcagagcagcaattccaaaacattgctgggagaagaacacattgagatctctgagttatgttctgagggatgtgttggtagtgactgcattggtagctgcagcaatcggcttcaatagctggttcttctggccactc

SEQ ID NO: 109724 - DNA, 164 bp, Glycine max
tgaaattttgataaaccgtgatcacaggttgtcgcaccttaaaaccggaaacaaaagcaatcgttacttggtttcaagaatttctcaatttcttcctatttctttgtgtacgagtgcttatggtatagagaatcattctctgtgctggccacatacttcgtgaa

SEQ ID NO: 109725 - DNA, 256 bp, Glycine max
  unsure (1)..(256): unsure at all n locations
aggcaatgttgttcatcaacttcactgccgaaggtgctgaatctttcaaatcaaaataccgtgaagctgctgagcaacataaacaacagggtgtaagctttttggtgggagatgttgagtctagtcaaggtgctttccagtattttggactgaaagaagaacaagtacctctaattatcattcaacacaatgtcgggttttagtttnttaaacccaatttggaagctgatcacattccaacttggttgaaggcgta

SEQ ID NO: 109726 - DNA, 254 bp, Glycine max
gtgatgagtacttaattagtgttcatgaatatgtcaagccttactttagtggttctaaattgaaaagctttctagctggtcataatatcaccattactgatggtattgacaaaactagtgcaactttgcaatttagaaagttagcagattgtgattttctcaagagaaactttaagcagatgtctaatgttttgtgggtggctcctgaggacaaggcgagtttgtggtcacaacttcattatgtttcgtgtaat

SEQ ID NO: 109727 - DNA, 255 bp, Glycine max
gcttcagaaactatgctcatgaaagcttatgcttttttgaagtacaacaatgcgaccaatttgattgtcaggacccatttggcagaattggtcaatgaagactttatgatgaaaaatttaattttattggcacaattgggactccagcttttcatcgacaaattgctgcacacttagagaaaatgccattatggcaaaaagcaattttgtgtggaatgggacattgtttgtctcggaaaagcaaagaaacatggt

SEQ ID NO: 109728 - DNA, 255 bp, Glycine max
aatacaatgaggttcaggctcagatggaaacaaatttgtttaaattgtctcttgatgatgttgaaactcctaaaggttccatgttggatcttaaaatttctcaatctaaaattgcacttcccaagaacacagttggaggaaccattctgcgtagtgatctattggcaaattttttgacagagggcaattttagagcaagtgttgatttgcagcgcactcatcgtattaaaggaatgattaaactggtggctacag

SEQ ID NO: 109729 - DNA, 252 bp, Glycine max
ctcgagccggtctcttcctacttgaagaaggttggttacaacccagacaagattccatatgtgcccatctctggtttcgagggtgacaacatgattgagaggtccaccaaccttgactggtacaagggaccaactctccttgaggctcttgaccaaatcaatgagcccaagaggccctcagacaagccactcaggcttccattgcaggatgtctacaaaattggtggtattggtaccgtgccagtgggacgt

SEQ ID NO: 109730 - DNA, 257 bp, Glycine max
cgagataactagaaacagtgtgatgaaaatgaaggtccttgttttcttcgttgctacaattttggtagcatggcaatgccatgcgtacgatatgttccctctccgaatgaacactggctatggtgcccgtactccggaggtgaaatgcgcaagttggaggcttgctgtggaagcacacaacatctttggctttgagaccattcctgaagagtgcgttgaagcaacaaaggaatacatccatggcgaacaatatagat

SEQ ID NO: 109731 - DNA, 261 bp, Glycine max
aaggaatcaaaccttaataaaaagtcccccaaaatggctccaacaagaaaccaccttcttcacattgccatgttcccatggtttgcaacaggtcacatgactccattcctccacctttcaaacgacttagccaaaaggggtcacaaaatcacgttcttgctacctaaaaaagccaaactacaactccaacacctcaacaaccatcctcacctcatcacattccataccctcacaattcctcatgtaaaaggccttcctcat

SEQ ID NO: 109732 - DNA, 255 bp, Glycine max
atggcaccgaagcagaccaaggctgagaagaagatcgcttacgatgcgaactgtgcgacctaatggaggagtacggccagatcctcgttgtgaactccgataacgtgggatcgaaccagctccagaacattcgcaagggtctccgtggcgactccgtcgtcctcatggggaagaacaccatgatgaagcgctcagtcaggatgcacgctgagaaaaccggaaacaacgcctatctcaaccttatcccgctccttg

SEQ ID NO: 109733 - DNA, 253 bp, Glycine max
ggctgtcctgctcgacaatgaagccatttatgacatctgcaggcgttcactggacattgagaggccaacctacaccaaccttaatcgtttagtttctcaggtgatatcatcactgactgcttccctgaggtttgatggagccttgaatgttgatgtcaatgaattccagaccaaccttgtgccatacccacggattcattgtatgctttcatcttatgctcctgtaatttcagccgagaaggctcaccatgag

SEQ ID NO: 109734 - DNA, 255 bp, Glycine max
aatctcctttccaaatggccagcgttgaggttgcacagcaaacaccaacaacagttccagaaaatgaaacaaccgaggtaagcaagacccaggaaacaaccccagtcactgaggctcctgcaacagaacaaccagcagctgaggttcctgcaacagaacaaccagccgctgaggctcctgccccagaatcaaccaccgaagcaccaaaggaagaaaccaccgaggcaccaacagaaacagtagaaaaaacaacta

SEQ ID NO: 109735 - DNA, 251 bp, Glycine max
agagactaatgaggatgtacaatgtgagggtctgtggatattgccctgaaattcatgttggtgcccagggtcacaaagctcaaaactgtggagcccataaacaccaacaacgcaatgggcagcatggttggcagtctgcagttctgaatgatttgatcccaccaagatttgtgtggcatgttcctgatgtaaatgcaccgctagaacgagagcttaggaatttttatggccaggcgcctgcagtagtagaa

SEQ ID NO: 109736 - DNA, 252 bp, Glycine max
attgtgttttaaatccacaaaatccttttgtgttaaataggtggatgggaaaactgactttcccccagggcacttcccgaagtgttaagagaatgcctctttctatagggggaggagctggtgcaaagaatgctattctcatgaatatgccaaatgctgttctttcaatgtggagatattttgttggagatctcgtctttgaagtttctaagatgacttctccctacattaaatgtacagtctctttcttca

SEQ ID NO: 109737 - DNA, 255 bp, Glycine max
cttcttcttcgctccgtgccatgtcttcctctctcgctcttccatccactcccttcttcgcctctggaacaagaatcttcgctctcaagcactctctccctcgctctagggtttccatgagcgtctccgctggatctcaggcttccgttcaccaggctttgttcgccgattacaaggcctccacttcattcctcttcccgggccagggtgctcaagctgttggaatggggaaagaagctcaaaatgtgcctgctg

SEQ ID NO: 109738 - DNA, 255 bp, Glycine max
gattggtggtacactggaaattaaccatggctcaacctgcaagcctcacaagaataggccttgctggcctggctgtgatgggccaaaaccttgctctcaacattgctgagaaaggctttcccatttctgtctacaaccggaccgcgtccaaggttgatgagacagttgaaagagcaaaacaagaaggaaaccttcctgtgtatggctaccatgaccctaaattctttgtccaatccattcaaaagccaagggtca

SEQ ID NO: 109739 - DNA, 260 bp, Glycine max
agaagaggtcgagtttcacagcagcaatggtgtacgtcaaggctcagaaatcaaaagcctacttcaagagatatcaagtcaagttcaagagaagaagagagggaaaaaccgattaccgtgccaggattcggttgattaatcaggacaagaacaaatataacactccgaaataccgatttgttgttcgctttagcaacaaggacattgttgcacaaataatatctgctagcattgctggcgatattgttcttgctgcagca

SEQ ID NO: 109740 - DNA, 258 bp, Glycine max
gcactttcatacaaatcagcaatgagagagaatctgttgaggcagggatacagaattgttggaatcattggagaccaatggagcgatctgcttggagaccacagaggcgaaagcaggacctttaagcttcctaatcccatgtactacattgagtagtaccttcacctctctcaacaatctagctagagtttgctcctatctatatgtaataaggtatgctgatatgcactattcaaataggagcattagctatgtttg

SEQ ID NO: 109741 - DNA, 256 bp, Glycine max
aagcaatgtcgtggcaagaaccttttcttcagcactgatgttgagatacatgtctatgaggcagacatagtgtttgtctctgtcaacaccccgacaaaaactcgcggtcttggagccggtaaggccgcggatttaacgtactgggtgagtgcagcacgcatgattgctgatgtatccacgagtgacaagattgtggtggagaaatccactgtccctgtgaaaactgctgaggccatagagacaattttgactcaca

SEQ ID NO: 109742 - DNA, 254 bp, Glycine max
gattactgggacatcccaagctgactgtgctgttcttatcattgattcgaccactggtggttttgaagctggtatttccaaggatggacagactcgtgaacatgctctgctttcattcacccttggtgtgaaacagatgatttgctgctgtaacaaaatggatgctactacacccaagtattccaaggccaggtatgatgaaattgtgaaggaagtctcttcctacttgaagaaagtaggatacaaccctgaca

SEQ ID NO: 109743 - DNA, 253 bp, Glycine max
ctcgagccgctcgagccgcaacaacaaagaaaacagagaaactttcatttcatatattttcatcatcgcagcaaaggaatcaatcaatcaaaaaccatggcaggcttcagtggcgacgaaaccgctcctttcttcggcttcctcggtgccgctgcggccctcgtcttctcctgtatgggagcggcgtacggaacggcaaagagtggggtgggggtggcgtcgatgggcgtgatgaggccggagctggtgatga

SEQ ID NO: 109744 - DNA, 252 bp, Glycine max
cttcatccatagacatggccaccgtcacttctgcagccgttgcacttccctcattcactggcctcaaggcaagcgcaggcaaagtgagtgccgcagttaaagtctcagctccccaagccacaaggttgggcatcaaggcttcgctgaaagacgttggagtcgctgttgtggccactgccgcgagtgcagtgctggctagcaacgccatggccattgaagtgttgctgggtggtgatgacgggtctctggctt

SEQ ID NO: 109745 - DNA, 248 bp, Glycine max
ggcagccatgacttccaatagagtgattgtcccagtcaagttgttgttatagtatagtaaaggtacttcaacccagtcggtgcacaccctagcggttgtattggggaggatccccgcggaattccaaacaatctcatgccatttgttcagcaagtagcagttggccgacggctgcactgacagtttttggaaatgattataatacaactgatggcactggggttcgggattacattcatgttgttgat

SEQ ID NO: 109746 - DNA, 247 bp, Glycine max
tattggcaaattttttgacagagggcaattttagagcaagtgttgatttgcagcgcactcatcgtattaaaggaatgattaaaatggtggctacagttggtattcctgagaatacaggtatagcattggcctgtgctatgaatagttcttttagggggcgcgccagttctgatatttacaccatctgctctcaagactgtgaattatggaatcctgcttgcacaaaagcaatggctatgtcatttaa

SEQ ID NO: 109747 - DNA, 271 bp, Glycine max
aaacaatgatggctggtgttagtggcagtagcactactcccttattgtgctctttgttctttatttcttccttactttttgcttcctgcacccatgcctcctcccaggcacctcctccaattgtggatggactttcatgggatttctataggacgagctgtcccatgcttgaagggatagtgagcaagcatctccagaaggtgttcaagaaggacaatggtcaagctcctgccttactcaggatcttcttccatgactgctttgttcaggg

SEQ ID NO: 109748 - DNA, 270 bp, Glycine max
caaggctctactctactgcttcaccttctgctctagaaaatttagtggtgatacatggcttcggctactctctctgtagccaaaccagcccttcaggcaaatgggaaaggcttctctgaattctctggcctccgcagctcatcaggcttccttcccttttctagaaaatcttcagaggatttccattctgtcattaccttccagacctatgcagttggaagcagtggaggatacaagaagggtgtgacagaagcaaaactgaaggttgcc

SEQ ID NO: 109749 - DNA, 261 bp, Glycine max
gaaaaaggcaaaaggagatttgtttctggggatggtgaagagatgacattgattccgggaaccagtgttgaagaggcctacaacaagctaatagttgaacttgagagaagtgttcctacattggttggcattgaatgtcccaaggatgagaaacttcctcgtcgcaaaatttttgacaaacctaagacgcgctgcttcactattctccctatggagtttaatcttgtggttcgtcagaagtttttaaattttgtgaggttc

SEQ ID NO: 109750 - DNA, 213 bp, Glycine max
ccagctttttctgttccacaggctactgccagatcttctgaaaatgcggaatcctctgcatgatctggaatttgtgttttctttcgcttgttcgtttgtttaattcaataaaggaaattaggcatgaccctcttgttgagtatgctctgcctatttgaaaatttccacacctcttttaattgtcgtaatgatatgtgaagtgtgtgttatttt

SEQ ID NO: 109751 - DNA, 264 bp, Glycine max
ccaagaattggaaagtgaagttctcaatgcccttatggctcagaacccaaatatatataacattggtccacttcaattgttaggaaggcattttcctgataaagacaagggcttcaaggtgagtgggtcaaatctttggaaaaatgactcaaaatgtatccaatggctagaccaatgggaaccttcctcagtcatatatgtgaattatggaagtattactgtgatgtccgaggatcatttgaaagaatttgcttggggactagc

SEQ ID NO: 109752 - DNA, 263 bp, Glycine max
cagatgataaacgtgcagaacaaaaactcttcgtactttgtcgagtggattcccaacaatgtcaagtcgagtgtgtgtgacattgctcctagagggctctccatggcgtccacattcattggaaactcgacctcgattcaggagatgttcagcagggtgagcgagcagttcacggccatgtttaggaggaaggctttcttgcattggtacactggtgaaggcatggacgagatggagttcacggaggcagagagcaacatgaa

SEQ ID NO: 109753 - DNA, 266 bp, Glycine max
caatgaagcccaacgacaacatggcaatgctggccaagaccgactccgaggttagcagcctcacgcagtcctcgccgacgcgatccccgcgacgggcagtgtactatgtgcagagcccgtcgcgagactcatcgcacgacggggagaagactacgaactcgtttcactcgagtccgctgcagagcccattgggctccccgccccactcccactccaactcctccttgggccatcactcgcgcgagtccgcctccacgcgcttctct

SEQ ID NO: 109754 - DNA, 263 bp, Glycine max
tgagagcaaagatggttgaagtctttaactgctggatgccccgtaggagcggctcaactgctacagccaccctatttgaaggtcaccaactctctcttgagtatcttgtgaggactcttctgaaactttatgttgacattgagttcactggttctcacacacagttctattataagtttaacatccgccataatattgccgaactcctcgaatgattgtggcaagtccctagtcatcgtaatgcttggagacagattgctaag

SEQ ID NO: 109755 - DNA, 265 bp, Glycine max
gatgtttgggtgatgaatgttgtacctcgtgatggacctaacacactaaagcttatatatgacagaggcctcatagggtctatccatgactggtgtgaagcatattcaacatacccccggacttatgatttactccatgcatggactgtgttttctgacattgaaacgagagggtgcagtccagaggatctactgattgagatagaccgtttgcttaggcctacaggtttcatcatcataagagataaacagcatgtgattgatt

SEQ ID NO: 109756 - DNA, 274 bp, Glycine max
cacagcagagatcaagggctctgtgcatcatgtcgggcactgggacagtttcttcagtcactctgcgacagctgcttctaccaatgctagtgtaacttttgagggacgattccaaatactatgcttgtctggttcttacttggttgccgaagacggtggaccctccaatagaactggtggcattagtgtttcgctctctagccatgatggtcatgttattggtggtggtgttgctgtgcttattgctggaggccccgtgcaggtgatgttgtgc

SEQ ID NO: 109757 - DNA, 270 bp, Glycine max
ctcatcggatcgatcaagcatcagggagctttgagggttgattctctggtgtagtagcaatcagcacaatagaaaatgttttttgacggatatggatatcatgggacatcatttgagcagatatatcgatgctacccagcttcctttattgaaaagccccaaatcgaaagtggtgacaaaattatcatgcctccatcagcccttgaccgtctagcatctctgcatattgattacccaatgttgtttgaactccgtaatgatgctgccgag

SEQ ID NO: 109758 - DNA, 267 bp, Glycine max
tgttactggtgaaccacttatccagcgcaaggatgacactgcggctgttcttaagtcaagactggaggcatttcacaagcaaaccgaaccggttattgattactattcaaagaagggccttgttgctaatcttcatgctgagaaaccacccaaagaggtgacagttgaagtggagaaagtgctgtcttaaatggagatcacccttcgatcctggggctcgaaccgcaattgttcttttttcgctacaggaaaacttttcgttgccat

SEQ ID NO: 109759 - DNA, 261 bp, Glycine max
cggccgtacccttgctgactacaacattcagaaggagagtactcttcacctcgtcctccgtctccgtggtggcatgcagatcttcgttaagacactcaccggcaagaccataaccctagaggttgaaagctccgacaccatcgataacgtcaaggccaagatccaggacaaggagggtatccccccggaccagcagcgtctcatcttcgccggaaagcagctcgaggacggccgcaccctcgccgactacaacatccagaa

SEQ ID NO: 109760 - DNA, 264 bp, Glycine max
ctggattatgacaccaagcccttgcatgaggatcctgttcccgactctgctgttccagaaaaccaggtatcagaggtcaaccctagtttagggtctcaagtaaaatctgattctatttctactgattctctgtcaattaatcaaaagaatgaactaaaggatactataattactgataatgtcaaattagaacaagatattgttaagccggagatggtggaagaaccatcatccagaaatgatgttcctgtttcttatgatgaa

SEQ ID NO: 109761 - DNA, 264 bp, Glycine max
aaacactcataacacaaagcacaaagcaaagctcatccttgagttaaaaaatggcagcagcttcttccatggctctctcatccccatccttggctggcaaggccgtgaagctgggcccatcagccccagaagtgggaagggtgagcatgaggaagaccgtcaccaagcaggtctcctcaggaagcccatggtacggcccagaccgagtcaagtacttgggcccattctctggcgagcccccgtcctacctaaccggtgagttcc

SEQ ID NO: 109762 - DNA, 263 bp, Glycine max
tttcactcttcttcgtctcaaatctcttcgttccttcgattcgttccatttcttccaaaatggccaaagacccagttcgcgttctcgtcactggagctgcagggcaaattgggtatgctcttgtccctatgattgctaggggagtgatgttgggtcctgaccagcccgtgatcctccacatgcttgacattcctccggcagcagagtcattgaatggggttaaaatggaattggtggatgctgcattccctcttcttaaaggt

SEQ ID NO: 109763 - DNA, 222 bp, Glycine max
ggaaaaagaatccatggaccgaccccatcgtctccaccccgtaggaactacgagatcaccccaaggacgccttcggcatccaggggtcgcggaccgaccatagaaccctgttcaaaaagcggaacgcattagctatccgctctcaggttggacagtaagggtcggagaagggcaatcactcattcttaaaaaccagtattcttaagagcaaagagtcgggcg

SEQ ID NO: 109764 - DNA, 266 bp, Glycine max
cagggcttgactcacttgttcttggggaaggtcaaattcttgctcaggtgaagcaggttgtgaaagctggacagggagtgcctggttttgataagaaaatcagtggtttgttcaagcaggcgatatcggttgggaagcgggttagaaccgagactaacatttcatctggatcagtttctgtaagctcggctgctgtggagcttgcactgatgaagctaccggaaattacctttgctgattctggagtgttggtggttggtgctggg

SEQ ID NO: 109765 - DNA, 267 bp, Glycine max
cagagaccgaaatacttcgagatggcccgtacaaagcaaactgctcgtaagtcaactggaggaaaagctcccaggaagcagcttgcaaccaaggctgcacgtaagtctgcaccaacaactggtggtgtgaagaagcctcatcgttatcgccctggaactgttgctcttcgtgagattaggaaataccagaagagctatgagctcctaatcaggaagcttcctttccagaggttggttcgtgaaattgcccaggatttcaagactgat

SEQ ID NO: 109766 - DNA, 257 bp, Glycine max
gtcaagttgacaaccataaacaatatgtgtgcatatgggctcaatcctggtatttcaggttctcgtcttttgggcaccattcctcagtccatttcacagcaaactgtttggaatcaaatggcaacagtgagaacaccattgaattttgattctagcaagcagagcttttgtcaattttctattgaccttctcggtggaggaattttagtggacaaaactggagattggatcacacttatacaaaattctccaattag

SEQ ID NO: 109767 - DNA, 254 bp, Glycine max
tgaaatggctcccaagggattaatctttctagctgtgttaatatgcgtttcagcactgtcactgagtccttctgttacgggggaatggcaaaatcatggccttgttatgaactactacaaagaatcatgccctcaggctgaagacctactcacagaacaagtcatgcttctctacaagcgccacaagaacactgctttctcctggtacaggtacatcttatatgactgtgctgttccaagttgtgatgcatcac

SEQ ID NO: 109768 - DNA, 261 bp, Glycine max
atttccaccaaacccgtaatagaagatgtttgcgaataaatggcgactaagaggagcgtgggaaagttgaaggaacgtgatttgaaggggaagagggtgttcgtgagggtcgatctgaacgtgcctttggatgacaaccttaacatcaccgatgacactagagtccgtgctgctgttcccaccatcaagtacttgactggttatggtgctaaagtgatcctttctagccatttgggacgtccaaaaggtgtaacacctaaa

SEQ ID NO: 109769 - DNA, 264 bp, Glycine max
gaatcatcttccaacttgtctcgttatgatggtatcagatatggaaaccaagtttatgctgatgagctagattctctttatggaggttcccgggctcaagggtttggttctgaggttaaaatgagaattttgatgggaacatatgccctttcagctggttactatgatgcatattacaaacgtgcacagcaggtaaggaccataattaggaatagctttaaggaggccctcagtcaaaatgacatcttgatttcccctgcagct

SEQ ID NO: 109770 - DNA, 249 bp, Glycine max
cttttcttgaaacttccctctttcctttaaggattccctcctaatttggtgggattatccctcatcagcattgccattccctgtttcactcaccacattgaaaacatggaaaagcttattcgcatgttccctttgctccttgttcttcttctgtgccccaattttgcctttgctggccatgactacggccaagctcttagcaagagccttctgttctttgaagctcagagatctggttaccttccacac

SEQ ID NO: 109771 - DNA, 264 bp, Glycine max
aaacactcataacacaaagcacaaagcaaagctcatccgtgagttaaaaaatggcagcagcttcttccatggctctctcatccccatccttggctggcaaggccgtgaagctgggcccatcagccccagaagtgggaagggtgagcatgaggaagaccgtcaccaagcaggtctcctcaggaagcccatggtacggcccagaccgagtcaagtacttgggcccattctctggcgagcccccgtcctacctaaccggtgagttcc

SEQ ID NO: 109772 - DNA, 147 bp, Glycine max
gaaattttgataaaccgcgatcacaggttggcgcaccttaaaaccggaaacaaaagcaatcgttacttggtttcaagaatttctcaatttcttcctatttctgtgtgtacgatttcttaagggaaagaaaatcactctctgtgctgg

SEQ ID NO: 109773 - DNA, 264 bp, Glycine max
gtgcgatctagccggagatgaagttggggacgatattgaatacattgatttatacaatatttatgctccactatgcaagaatgcaaatctcacatccctgccaaaaaggaactcaattgtgactgatccatgtagtgagtattatgtgtatgcatatcttaatagaaaagatgttcaagaggctctccatgccaatgtaaccaacctcaaacatgactgggaaccctgtagcgatgtcataacaaagtgggttgatcaagcttc

SEQ ID NO: 109774 - DNA, 258 bp, Glycine max
tctaaattgaaaagctttctagctggtcataatatcaccattactgatggtattgacaaaactagtgcaactttgcaatttagaaagttagcagattgtgattttctcaagagaaactttaagcagatgtctaatgttttgtgggtggctcctgaggacaaggcgagtttgtggtcacaacttcattatgtttcgtgtaataatctggaaatgcaagaagcttatcttgtcaatctcgtaaatgtgttacgagaattg

SEQ ID NO: 109775 - DNA, 261 bp, Glycine max
ctgaagtgggtggaatgaatagcaataccaccggcgctgcagcagtgaacgaccagctctccaacaccacctccatcttcggcctccgcctatgggtggttctcggggtgtgcgtgggcgccgccatcgtcctcatcctcttcctcatctctgtctggctcgccttcaagcgctcttccaaaaccaatcctgttttcatccccgacgtctcctgagagatccaagaaatcaggctcgacaccaaccccactctccaacccg

SEQ ID NO: 109776 - DNA, 264 bp, Glycine max
cgtaaatgtgttacgagaattgtatttgcacagtccagaggaagctcgccaattgagaaggaaagctctttctcgtattgaatggctgcaaaaagctgatgtgcctaccatagcacagattgaagagttccattcgatgcagaggatgatgaatgctcctgattcaaatgataatattgatctactgttgagcattgatttgttgggtttacaaggagcaggtaaagcgtttccaaacaagattgtttttgatgataagttgtg

SEQ ID NO: 109777 - DNA, 268 bp, Glycine max
aacactcataacacaaagcacaaagcaaagctcatccttgagttaaaaaatggcagcagcttcttccatggctctctcatccccatccttggctggcaaggccgtgaagctgggcccatcagccccagaagtgggaagggtgagcatgaggaagaccgtcaccaagcaggtctcctcaggaagcccatggtacggcccagaccgagtcaagtacttgggcccattctctggcgagcccccgtcctacctaaccggtgagttcccaggc

SEQ ID NO: 109778 - DNA, 268 bp, Glycine max
ctcttcctcactcgcattcacacaagccgcagcagcacgtcctctcgtcatcgtgcaggccctcgacagtgacatggccaccgacgcctccgccaccgtccctatccctgacgtcatgaagtcctccatccgcccggacatcgtcaacttcgtacactccaacatctccaagaacagccgacaaccctatgcagtcagccgccgcgctggccaccagacttccgccgagtcctggggaaccggtcgtgccgtctcccgtatcccccgt

SEQ ID NO: 109779 - DNA, 256 bp, Glycine max
  unsure (1)..(256): unsure at all n locations
cantttttcaaaaatctgactcagaaagtgcgagtcagatttttgcaaaaatgtccatgagctatgaatctgcgccctggaaccatcaaaatttgagcatcagtgtttcccaagctcatgctggctttgcatttagacataattgctactacagactgatcgaaagacatctgaccttcaacccatgctctgcgctttattggcacattgcgatatctgtattgggaaacttcatatctgttgggctttctacttt

SEQ ID NO: 109780 - DNA, 261 bp, Glycine max
caagtatcccattctgcatttgagtggaaacagattgctgagccggttatgcagttatatcatggaaacaactgatggttcaaacatagaggccaaagaaagtgctctagtttggaattacgagtatgcagaccgagactttggttcatgccaagctaaggagctttttgatcatctggaaagtgttcttgccaatgagcctgtttctgttaaaagtagtccaaacattgttgaagtgaaacctcagggtgtgagtaaggg

SEQ ID NO: 109781 - DNA, 258 bp, Glycine max
tccttttcttggtggaattcaaaaatatgccactcccatgatgcccctagatgaagaaattctttctaaggttgcacaagacatggttgaggaatggtttgattgtgttgatgaggaggattcctttgaggaagtctctttaagtgcagcactcaatggtgttgagggtttggactatatggaaagaattcctcttgccacatctgagggttttcctcatgtgctttcacgcaaaaatggtgacaaaggcaaaaggag

SEQ ID NO: 109782 - DNA, 257 bp, Glycine max
tgtagatcttgttgaagaaatggatgcaacaataaacagggatggagttctggtgaaatgtgagatcaatggtgaggttcaagtgaattcccatatcacaggtcttcctgatttgactctttcatttgcaaatccttcaatccttgatgatgtgaggttccatccctgtgttagatatcggccctgggaatccaatcaaattctttcattcgtgcctcctgatggacgatttaagcttatgagttacagagttggaa

SEQ ID NO: 109783 - DNA, 259 bp, Glycine max
gaaggcataatgagggagcttctacttgatttctatacaagttctggaaatagaaagcccgataatataatcatattcagggatggtgttagtgagtcccagttcaatcaagttttgaacattgaacttgatcaaattatcgaggcttgcaagtttttagatgaaaagtggaatcccaagtttttggtgattgttgctcaaaagaaccatcatactaaattctttcaacctggagctcctgacaatgttcctcctggaa

SEQ ID NO: 109784 - DNA, 260 bp, Glycine max
gaagagagatgggggactgaagtgggaaccggtggagcagggcggagtgggtgcagcagtacgatctcttaggcaaaatcggagaaggcacttacggcctcgtcttcctggcccgaaccaaaggcactccctccaaatccatcgccatcaaaaagttcaagcaatccaaggacggcgacggcgtctcccccaccgccatccgcgaaatcatgctgctcagggagattacgcacgagaacgtcgtcaagctcgtcaatgtc

SEQ ID NO: 109785 - DNA, 266 bp, Glycine max
acaatttctctctggattgagaagactactgaaaaggagatttctgatgatgaggatgaggaagagaagaaggatgaggagggtaaagttgaagatgtggatgaagataaggagaaggaggagaagaaaaagaagaccattaaggaggtatctcacgagtggtcattggtgaacaagcagaagcctatttggatgaggaaacctgaagagattacgaaagaagaatatgctgctttctacaagagtcttaccaatgattgggaaga

SEQ ID NO: 109786 - DNA, 258 bp, Glycine max
ctgccttacaacttgtgctcagaaaatctctggcttatggtggtttgtcgcgtggccttcatgaaggtgcaaaagtgattgagaagcatgctgcacaactctgtgttcttgcagaagactgtgaccagcctgactatgttaaactggttaaggccctttgtgcagagcacaatgttagcctgctgacagttccgagtgcaaagacccttggagaatgggctggtttgtgcaagattgattccgaaggaaagcaaggaa

SEQ ID NO: 109787 - DNA, 209 bp, Glycine max
aaacgaggatgctcagctgactcctcttttccgtcttggggctggagcatgtgcgggaataattgccatgtctgcaacttatccaatggacatggttcgaggcagaataactgtaccaacagagaagtccccttaccagtacagaggaatgtttcatgctctgtcaactgtactcagggaagaaggtccacgtgctttatataaggggt

SEQ ID NO: 109788 - DNA, 255 bp, Glycine max
attcatggctagagagattcttattctgcgccatctggatcatcccaatgttgtcaaactggaaggtttggtgacttcaaggatgtcatgcagtttgtaccttgtctttgaatacatggatcatgatttggctggacttgctacaagccccacaattaagttcacagagtctcaggttaaatgttacatgcatcagctactttctggattggaacactgtcacaaccgtcatgtgctgcatcgtgatataaaggg

SEQ ID NO: 109789 - DNA, 255 bp, Glycine max
agcaagccctcaagtttccaccacctcatgtaaataaagttcgtgagtctgaatggatgactgatgaagaatttggaaggatgatgcttactggtgttaatcctggcatgattcaacgccttcaagagttccctccaaagagcaagctagatcccacagagtttggagatcaaactagtacaataaccacagaacacttggagatcaacttggtggactcaccgtagaacaggcactgaaaggtaacaaattgtt

SEQ ID NO: 109790 - DNA, 260 bp, Glycine max
ctcgagccgcttgggaagaatggagtggaggaagttctgggcttaggacctctctcagattactgagcaacaaggcctcgaaagccttaagcctgaactcaaatcatcaattgagaagggaatcaaatttgccaaccagtaattgaacatgttatcacatacgtgtctggtaggctaatgttaatgttattccttcaagaaccaaatcaaattttgcaatctcagaaccattgttgtattgttgccggcagtggtgtggc

SEQ ID NO: 109791 - DNA, 258 bp, Glycine max
ttcaatttcaatcaacggttatacccttttctatttgagcatcatcatgtccaccgcagcgcacccaaggccaagaaaacggcgtcgtccaagaagcccctctcccatcctaccttcgccgcgatgatagcggaggcgatagcgagtctgaaggagagaaccggttcgagccaatacgcgataaccaaattcatcgaaggcaagcacaaggagttgcctccaacctacaagaagcttgttctcgttcatctcaagaag

SEQ ID NO: 109792 - DNA, 257 bp, Glycine max
caagaggtgccggagcaagtttcgtcacgccggaacgatgaccggcggcggatccacggggaggttgccgacgtggaaggagagagagaacaacaagaggagagagagaagacgaagagcgattgcagctaagatctacactggccttcgagcccaggggaactacaagcttccaaagcactgcgacaacaacgaggtcctgaaagctctctgcgccgaagctggctggatcgtggaagaagatggcacaacttatc

SEQ ID NO: 109793 - DNA, 257 bp, Glycine max
cgagaagctcatacagcggttagaatcggcggtgttgcgcttggagtcgctatcctccggactccacccctccgcttcacaatccggcggcgcccacgctcccgatgcggcgctcgatccctccgtcgtcgccttcgccgatctgatcgaccagtacgtcggtagggtttccggcgctgcagaggttatcggcggacaggtcttgggtgtcaccaagctggtgcaggaagctttcaatgttcagaaagagcttttga

SEQ ID NO: 109794 - DNA, 258 bp, Glycine max
ggtttgactattttcgctcctaacgatgaagcgtttaaggcgaaaggcgtacctgatttgagcaagctcacgaacgctgaagtggtttcgctcttacagtatcacgccgccgctaagtatcttcccgttggatctctgaaaacgacgaaggattcaattaacacgttggcctccaacggcgccggaaagttcgatttgaccgtttccgtcgccggagattcccttacgctccacaccggagtcgattcctcgaggata

SEQ ID NO: 109795 - DNA, 256 bp, Glycine max
atgaaatcaaggattctgtggttgctggattccagtgggcatcaaaagaaggtgctttggccgaagaaaacatgagagccatttgctttgaagtatgtgatgttgttctgcacgctgatgctatccacagaggaggtggtcaaatcatccctactgccaggagagtcttctatgcttcccagattactgccaaacccaggcttcttgagcctgtctacctggttgaaatccaggctcctgagcaagctcttggtgg

SEQ ID NO: 109796 - DNA, 126 bp, Glycine max
cgctcgtaccttatgtcttctgctccttggattaaagttccgtatccgttccagtggggtacccccatattcagagctagtcacgtctttgggatgatgggggcagcacttgtctcttctgctgag

SEQ ID NO: 109797 - DNA, 244 bp, Glycine max
actcgagcgaatcggctcgagggatgatgcaaatactgtctctaccccctatacagctgctattcttgaatatcgagtagtgattcatgacccaactgtcacatcatcctatgataatcacataaacgtggcaaatgggaatgctgtgtttgatattcatcatccttgcagggcgaatgttgctatacagagggagcttcacaaacctgagtctgaccgttcttgcatacatttggaatttgat

SEQ ID NO: 109798 - DNA, 243 bp, Glycine max
caatcatcaataccagacgaagatttttggcatgctgtttggccaaacacttccattcccagtgcattgcgagagcttctaaagcatggccgtgaaggtgttgaaattgataatctccccatgcaaattgatgatacgcagtacccaaaaaccttcttctatgaacaagaccttcatcctggcaaaacaatgaatgtacaattcagcaaaagtccctttacacaaccttttacaatattgaca

SEQ ID NO: 109799 - DNA, 241 bp, Glycine max
tggtgacaatgtgcccccacctgtgaatacgtttgcagagattgatttgggtgaagcacttaatcagaacataagaaggtgcaaatatgtgaggccaacacctgttcagcggcatgctataccaatatccctagctggacgggatttgatggcttgtgcccagactggttctggaaagacagctgcattctgtttcccgattatcagtggaattatgaggggccaatctgtgcagaggcca

SEQ ID NO: 109800 - DNA, 242 bp, Glycine max
cgcctttctctctcttctttttactctctctctgtctctctctacgctttctcgttcgagatccctcaagggatccactaactgaaggagaaatggggttgacattcaccaagcttttcagccggcttttcgccaagaaggaaatgcgaattctgatggtgggtctcgatgcagctggtaagaccaccatcctgtacaagctcaaacttggagagatcgttaccacaattcccaccattggg

SEQ ID NO: 109801 - DNA, 243 bp, Glycine max
aattggcttgatgggaattcgtgcatgttaaaattcatatatagttgcaatggctcgattttcattggatgagatatcagacactggtgcctttgtgagatctgcttccacattcagaaattggatttcgagggacctgaattcgcaatttccaccagaatcagggaggtatcatctctatgtatcatatgcttgtccttgggcttccaggtgccttgcttacttgaatattaaaggacttaa

SEQ ID NO: 109802 - DNA, 246 bp, Glycine max
aaagtttcctctacaaaagcacaatttgttagtggaaaaaccttcaaatatgatataattggtgctggttcacattcttcagaagattttcctgaaaaggaagatcaagaaaaacccaaaaagattgatgccagattgagacaaagaatagatcctcaatacaatgaggttcaggctcagatggatacagatttgtttaaattgtctcttggtgatagtgaaactcctataggttccatgttggat

SEQ ID NO: 109803 - DNA, 242 bp, Glycine max
ttctcgagcgaatcggctcgagctatgactgttcagcccataacgctctgggttggggaccgaaccaggcagcttgatggtgcccatgtcgagtttctaagaggagttgctaatcccttgggaattaaggtaagtgacaagatggatccaaatgagcttgttagactcattgagatcttgaatccccaaaacaaaccagggagaataactgtgattacgaggatgggagctgaaaatatgag

SEQ ID NO: 109804 - DNA, 243 bp, Glycine max
tagcttaacaacagcacaaagcgggttactgtctgttcaagctaccatctctctctctctttcttagtgcctccttgccagaagttaaaatggcccaagaaactttcctattcacatctgaatcagtgaacgaggggcaccctgacaagctctgtgaccagatctccgatgctgtgctcgatgcatgcttggagcaggaccctgacagcaaggttgcctgtgaaacctgcaccaagaccaaca

SEQ ID NO: 109805 - DNA, 240 bp, Glycine max
gagaagagctttgatgaggagaacaagctcgagcccgagaggaagatttggctagccaaggaactcggcttgcagcctaggcaggtggcgatttggtttcagaaccgccgcgcgcgctggaagaccaagcagatggaaaaggactatgattccctgcagactagttacaatgatctcaaggctaactatgacaaccttctcagggaaaaggataaactcaaagctgaggtggcaaggctc

SEQ ID NO: 109806 - DNA, 239 bp, Glycine max
tgctcgagcgaatcggctcgagctccattgttggaatctggtatgcaaaaagacagagggttaattgtggagtattttggaaggatgtcttactttgctcataacgttaatcagccccaagagaaagatttgttagagggaaatttttcctttgatattaaatctcgctctagattggaaaaagtttcctctacaaaagcacaatttgttagtggaaaaaccttcaaatatgatataat

SEQ ID NO: 109807 - DNA, 240 bp, Glycine max
caatcatcaataccagacgaagatttttggcatgctgtttggccaaacacttccattcccagtgcattgcgagagcttctaaagcatggccgtgaaggtgttgaaattgataatctccccatgcaaattgatgatacgcagtacccaaaaaccttcttctatgaacaagaccttcatcctggcaaaacaatgaatgtacaattcagcaaaagtccctttacacaaccttttacaatattg

SEQ ID NO: 109808 - DNA, 239 bp, Glycine max
atttcggctaataagaagtccaacaacaaccccattgttgttattgacaactatgacagcttcacctataatctctgccagtatatgggggagttagggtttcactttgaggtctaccgcaatgatgagttgacagtggaggagttgaaaaggaaaaatcccagaggagtgctgatatcacccgggccaggagcacctcaagattcgggcatatctttgcaaacagttttggagcttgg

SEQ ID NO: 109809 - DNA, 238 bp, Glycine max
ctatactaaggtgaaaaaggagagatggcagctgcaacatctagtgctgtgttaaacgggtttggatctcacttcttgtgtggaggaaagaggagccatgcccttcttgctgctagcattggagggaaagttggtgcttctgttagtcctaaaagagttattgtggcagttgctgctgcaccaaagaagtcatggatccccgctgtaaaaggtggtgggagtttcatagacccagaat

SEQ ID NO: 109810 - DNA, 239 bp, Glycine max
atttcattcctggcattgatggtccaagtgagggtgttcctcgggttcttgcatgctttagcaataatcttctcagaggagagcccctcaagcttgtggacggtggccagtcccagagaacctttgtttacattaaagatgctattgaagctgtcttgctgatgattgaaaaccctgccagggccaatggccacatatttaatgtgggtaacccaaacaatgaggttactgttaggcag

SEQ ID NO: 109811 - DNA, 239 bp, Glycine max
cccgattcgaggaaactcgcatcaaccgcgagcgcgatgtcattctccgggagatggaggaggttgagggtcaaactgaggaagtgatttttgaccacctacacgctactgcattccagtacactcctcttggaagaaccattcttggacctgctcagaacattaagacgatcaccaaagctcatctgcagagttacattcagacacattacacagctcctaggatggtgatagctgca

SEQ ID NO: 109812 - DNA, 238 bp, Glycine max
cagaaacaaaatcaccaccttcaaagtcttctctctcgagaatcatcgaataaaactagggtttccgatcgtcgtcgaggagaatgccgaagaacaagggaaagggaggaaagaaccggaagcgcgggaagaacgaggcggacgacgagaagcgggagcttgtgttcaaggaggacggccaggagtacgcgcaggtgctccggatgctggggaacggccgctgcgaggcgatgtgcat

SEQ ID NO: 109813 - DNA, 241 bp, Glycine max
aacagtctctcgccagaaaggaggcagagaccgagagagcaactgcacgcactgtaactctctcaccgtttcttccgctttgatggaacagtacgagaaggttgagaagataggcgagggaacatacggcgtcgtttacaagggtcgcgaccgctccaccaacgagaccatcgccttgaagaagattcgcttggagcaggaggatgagggggttcccagcaccgccattcgcgagatttct

SEQ ID NO: 109814 - DNA, 237 bp, Glycine max
aacaaatcaaagccatggccacctccaacttctctattgttctctccgtctccctagccttctttttggtgctacttaccaaggcacactcgaccgataccgtttctttcaccttcaacaagttcaacccagtccaaccaaacattatgctccaaaaagatgctagtatttcatcctctggggtgttacaactcaccaaagttggcagcaacggcgtgcccacctcgggatctctcg

SEQ ID NO: 109815 - DNA, 234 bp, Glycine max
cgtgcatcatccgagtcagcagatgtagaggaggacgggggagaaagtggatctgcagctagaggaaagactataactcaggcagtcaagaagggtcttatccaaaatacagtccccatcttcatagagttgaaacgtttattggaaaccaagaatagtcctctcataggttctctcatggagtgcctccgcattattctaaaggactataagaatgagattgatgacatattg

SEQ ID NO: 109816 - DNA, 239 bp, Glycine max
  unsure (1)..(239): unsure at all n locations
ggggagtcttgcatctttgaagaaaattgaagaaggaaagggcatcattgtgcgatttgttattggtagaagtgaaaatcgtggagactgnctagataaagacattgatcatgataataggctgactaatgacttcttaattctcgataatcatgtggaaacaaatgttgcattcccaaagaaggtcaaattgttctttgctcatgctgcagacgaatgggatgcttagttttatgcaa

SEQ ID NO: 109817 - DNA, 238 bp, Glycine max
cacagacaaagcaatggcaaagaccgagttagaggtgactgttgagagcaagaacaaagacctcaagcacctggggtttgtgaggattgctgctattcaaacatttgtgattgtgtcaaatctgtatgagtacgcaaagcagaattctgggcctttgagatccgtcgtaggaacggttgagaacactgtaaccaccattctcggtcctgtctgcaacaaattcaaggacgtccctgat

SEQ ID NO: 109818 - DNA, 234 bp, Glycine max
gagataactagaaacagtgtgatgaaaatgaaggtccttgttttcttcgttgctacaattttggtagcatggcaatgccatgcgtacgatatgttccctctccgaatgaacactggctatggtgcccgtactccggaggtgaaatgcgcaagttggaggcttgctgtggaagcacacaacatctttggctttgagaccattcctgaagagtgcgttgaagcaacaaaggaatac

SEQ ID NO: 109819 - DNA, 227 bp, Glycine max
gagatagagagagatctatctatctatcaagatggcgttgttggttgagaaaacaagcagtggaagggagtacaaggtgaaggacatgacgcaagccgatttcggaagattggaaatcgagctggcggaggttgaaatgcccggcctcatgtcctcccgcaccgagttcggcccctctcaacccttcaagggcgctaggatcaccggctccctccacatgaccatcc

SEQ ID NO: 109820 - DNA, 239 bp, Glycine max
tgtgttcacaagagcaagaagaataaccaaatgtataagagaaaattgctgggagaatgcaagagttctgaaggaaggaatcgagagaacaggtcggtttaacatcatctccaaggatatcggtgtgccacttgtagccttctccttgaaagacagtagtcaacacacagtgtttgagatagcagaccatctgagaaaattcgggtggatagttcctgcctatacaatgccaccagatg

SEQ ID NO: 109821 - DNA, 236 bp, Glycine max
gagagatgaagatgtctttacgttctggatccgatctgtgaactgtgatccatcgtcaatctttcagtaacaaacatgatcggactgttcttgttgctgtggctgctgctatcggcaacttgctgcaaggatgggataatgccaccattgcaggatctattttgtacataaagagggagtttaatttacaaagtgaacccacaatagaaggtctaattgtggccatgtcacttatt

SEQ ID NO: 109822 - DNA, 235 bp, Glycine max
gttggaacacctgggaggattcttgctctggctagagataaggaccttggtttaaagaatgtgaggcattttatacttgatgagtgtgacaagatgctcgaatcacttgatatgagaagagatgtgcaagagatcttcaaattgactccccacgataagcaagtgatgatgttttcagctacactcagtaaagagatccgacctgtttgcaagaaatttatgcaagatcccatgg

SEQ ID NO: 109823 - DNA, 235 bp, Glycine max
agagcggattcatcttcggtcattttattttgtataataaaagaaagataataaagagaataatcatattaaatattaaatagaaaaaatggcccgatcatttatcaaaggccaatcttcggtagaagagaaggttcctttggaacacttatttctatttcagtataccgggtctctttctttcatttcaaaaaatttatagaatttcgattttgaaatgaaagaaaagtgtggg

SEQ ID NO: 109824 - DNA, 235 bp, Glycine max
tcgtgacaccatgaacatcaatggactcgcaagacaatcactcatcaatgcaggtggcattattgagcaatcatttctgcctgggccatttgctgtggagatgtcttcggcagtttacaaggggtgggttttcactgatcaagcccttcctgcggatcttatcaagagaggaatggcattggaggatccatcctctccctatggccttcgccttgtgatagatgactacccttat

SEQ ID NO: 109825 - DNA, 238 bp, Glycine max
gggaagtgccctgggggaggagctggtgcaaagaatgctattctcatgaacatgccaaatgctgttctttcaatgtggagatattttgttggagatctcgtctttgaagtttctaagatgacttctccctacattaaatgtacagtctctttcttcatagcatttggagatttggctgatgacaccatcaattttgaggcctttccccacaagctggtgcattttggagaaattcagg

SEQ ID NO: 109826 - DNA, 231 bp, Glycine max
aatcacactcccatcttctcatctcgtaaaccctaaaccccgttttcagtgacatcgagatcgatcgaacatggatgaggagtacgatgtgatcgtgttgggcacgggtctcaaggagtgcattctcagcggtcttctctccgtcgatggcctcaaggttctgcacatggacaggaatgactattacggaggagaatccacttcgctcaatcttattcagctttggaagag

SEQ ID NO: 109827 - DNA, 190 bp, Glycine max
aaagtttcctctacaaaagcacaatatgtgagtggaaaaaccttcaaatatgatataattggtgctagttcacattcttcagaagatgttcctgataaggaagatcaagaaaaacccaaaaagattgatgccagattgagacaaagaatagatccaacatggaaccgtgatgagtatcgacatgatatat

SEQ ID NO: 109828 - DNA, 224 bp, Glycine max
gttttgtttatttgaaattaacaagtagcaaagatgtttggaatcatcggaggtaacaagggtcacaagataaaggtgaacttggtgattatgcgaaagaatgtgttggatatcaacagcattaccagtgttaagggtgtcatcggaaccggcattaacatcattggaggagtcgtcgacaccgttactgctttgtcgtcccacatctccatccagctcattag

SEQ ID NO: 109829 - DNA, 237 bp, Glycine max
gcctcaagctactgcaatgcatgtgggagctatagaaattatcattgatagtttcgcaagtcctgactgtaacatagttggtgcaatgcttttggttgatacttatcataccaatcctgaaaatgcagttcgtagtatttttgttgcgcctttcagaggcggaaggcccattcgggtggttacatttccgaataccattgtgcagattgaaccagacatgaattcaaggtttcagct

SEQ ID NO: 109830 - DNA, 235 bp, Glycine max
ggcaaaagaggctgagaaattaaatgaacaagctgcagtggctaacccagaggaagtggtttcaatggttgagatgagcatccaaaacagcacagagaggaggaagttgggatttttctcttgtggaactggcaaccccattgatgattgctggcgttgcgaccccaactggcaacgcaatcggaagcgtcttgcagattgtggcattggttttggccgaaacgccatcggtggc

SEQ ID NO: 109831 - DNA, 233 bp, Glycine max
actccagagccaaggtaggttaaacaatcttcttcatcgtcgtcgccgcaatgggacgtgtgatccgtgcgcacgtaagggagcaggctcggtcttcaagtcccacacgcaccaccgcaagggccctgcccgcttccggagcctggatttcggagagcgcaacggctacctgaagggtgtcgtcactgacgtcatccacgatcctggccgtggcgcgcctctcgctaaggtcg

SEQ ID NO: 109832 - DNA, 232 bp, Glycine max
tcagattcccctaattcttgcttgattttgcgctttcgctagattttcttcaaaatgactcaagatctagagatgaaggatcgctcaacgccttccaactccgtttcttcgcctgctccatctactctgcagcatttgaaggagatagcgtctcttatcgagaccggttcgtactcgaaggaagttcgtagaattgctcgcgctgttcgccttacaattgcgttgaggcgga

SEQ ID NO: 109833 - DNA, 251 bp, Glycine max
ggatgatatgatgttagactcaagtggcttggcctttttcataggagaaagcagcattatggtagatttatgatgaggctgaagcttccaaatggggtgacaacaagtgcccaaacacgatatttggctagtgtgatcaggaagtacggaaaagatgggtgtgctgatgtaacaacgaggcagaattggcaaattcgtggtgtggtgctacctgatgtgccagaaattctcaagggcctcgatgaggttgg

SEQ ID NO: 109834 - DNA, 252 bp, Glycine max
atcagagagaaactgactttcccccagggcacttcccgaagtgttaagagaatgcctctttctatagggggaggagctggtgcaaagaatgctattctcatgaacatgccaaatgctgttctttcaatgtggagatattttgttggagatctcgtctttgaagtttctaagatgacttctccctacattaaatgtacagtctctttcttcatagcatttggaaatttggctgatgacaccatcaattttgag

SEQ ID NO: 109835 - DNA, 258 bp, Glycine max
agagaatggccccaagggtttaacctttctggctgtgttaatatgcgtttcagcactgtcactgagtccttctgttgcgggggaagggcaaaataatggccttgttatgaacttctacaaggaatcatgccctcaggctgaagacatcatcacagaacaagtcaagcttctctacaagcgccacaagaacactgctttctcctggctcaggaacatcttccatgactgtgctgttcagagttgtgatgcttcactgtt

SEQ ID NO: 109836 - DNA, 256 bp, Glycine max
tgtgaagggacttccttcacttatgtgtcaagcaacttctttgctggttacttcctgcccaacttgtcacagcctggagccacagctgcccccagagacagagttattatcctaggagatggaaaccccaaagctgtttttaacaaggaagaggatattggaacttatacaatcaattctgtggatgatccaagaaccttgaacaaaattctctacattagaccaccagctaataccttgtcgtttaatgagcttg

SEQ ID NO: 109837 - DNA, 252 bp, Glycine max
gtgatgataattaattagtgttcatgaatatgtcaagccttactttagtggttctaaattgaaaagctttctagctggtcataatatcaccattactgatggtattgacaaaactagtgcaactttgcaatttagaaagttagcagattgtgattttctcaagagaaactttaagcagatgtctaatgttttgtgggtggctcctgaggacaaggcgagtttgtggtcacaacttcattatgtttcgtgtaa

SEQ ID NO: 109838 - DNA, 253 bp, Glycine max
caactctattttcttctttgggtgatgtgtttgcaatcacagctgctggtgattttgtagcgcatgtgttgaatgcttatactggagaggatgttgctggaaagatcttgtcatttgcccagaagggtccaagaggaatttgcattctctctgccaatggagctatctcgaatgtcaccatacgccaacctggttcttctggtggcattttgacttatgagggtcggtttgagagattatctttgtctggatc

SEQ ID NO: 109839 - DNA, 255 bp, Glycine max
ttcttcgttgtctcttcttcgctgtctttgaagccttcttttgtgtggaacagagcagatttcacctcccggggttttttgaactgtgcccatgtctaaagtcttcagctttaccggaaatgatgatttttatcatgggggtcctatttatcctaacccgaaggaaccgtgtctcttcttgtctcttggccgtcaagttgatgtttaccttcctcttcagaagaggtctcgcttcagtgttccatttgatatcag

SEQ ID NO: 109840 - DNA, 250 bp, Glycine max
cttggaaacatttttaagaaagctttagagaaaaatgatgctggagaccatttcccagtaattgccttcaacttaggtggaaacctcgtaataaggatcgtaagcgagcaaactgatattcttgaaccatttactgcgtcgagtttgccaagttctcttatattgtggaaggaagcaaatgctaaaggaagtctatttcaaagatttccttcagatttgttgacacagctgaagacagattgtctcgtcc

SEQ ID NO: 109841 - DNA, 248 bp, Glycine max
tggtgtggtatgggtgagttatcattagctgacagggccactatggccaacatgtctcctgaatatggtgcaaccatgggcttcttccctgtagaccacgttacattacaatacctcaaattaactggaagaagtgatgagactgtgacaatgatagaggcctatctcagggcaaacaaattgtttattgactataatgagcctcaaccagaaagagtttattcatcctatcttgaattgaaccttga

SEQ ID NO: 109842 - DNA, 255 bp, Glycine max
ggaagaatgctatgtttgccatgcttggtttctacttccaagcttatgtcactggagaaggtcctgttgagaaccttgcaaaacatctcagtgacccttttggcaacaacttgctcactgtcatttctggatctgctgagagagctccaactctctaaatcattcatcttcatgtttttctccaatcttacttaatgtacaatacatatcactgagatattaaggcatttggctttgttccttggaactcaaaaa

SEQ ID NO: 109843 - DNA, 175 bp, Glycine max
cgagaaaccgagatcacaggttgccgcaccttaaaaccggaaacaaaagcaatcgttacttggtttcaagaatttctcaatttcttcctatttctttgtgtacgatttcttaagggaaagaaaatcactctctgtgctggccacagacttcgtgaatcattttcttttccacaca

SEQ ID NO: 109844 - DNA, 255 bp, Glycine max
aacactttcaacacaaagcagaaagcaaaggtcatcgttgagttaaaaaatggcagcagcttctgccatggctctctcatccccaagcttggctggcaaggccgtgaagctgggcccatcagccccagaagtgggaagggtgagcatgaggaagaccgtcaccaagcaggtctcctcaggaagcccatggtacggcccagaccgagtcaagtacttgggcccattctctggcgagcccccgtcctacctaaccgg

SEQ ID NO: 109845 - DNA, 252 bp, Glycine max
ctctatgcaactttgggaggaggtcttgtatataaccgaacctgagaattggtctccaaatgctctttatcaagccactaggatttttgcttctaattttggtgcaaaaaaggcagagcgcttctacaagcttgtgttgcttccaagagtgagagaagatataaggaagaacaaacggctgcattttgctttatatcaaactctgaaaaaggctttgtacaaacctgctgcattctttaagggcatactgtt

SEQ ID NO: 109846 - DNA, 253 bp, Glycine max
tgaaagctacgaggaggattttgaaaatcctgaaaagaagcccagaaggaacaagtacgctttcgcatgtgctattttggcttcaatgacttccatcctactaggctacgatattggagtgatgagtggaccagcactgtacatacaaagagatctcaaggtatcggatcttcaaattcatatcctgatcggtatcataaacctctactctcccgtcggttctttcatcgccggcagaacctccgactggata

SEQ ID NO: 109847 - DNA, 260 bp, Glycine max
gagtctgttccctagattcagccacagttggaaaaaaaaaaaaggttgttcgagatggcacgtacgaagcaaactgctcgtaagtccacaggaggaaaggcacctaggaagcagctcgcaaccaaggctgcacgtaagtctgcaccaactactggtggtgtgaagaagccacatcgttatcgtcctggtaccgttgctcttcgtgagattaggaaataccagaagagtaccgagcttttgatcaggaagctccccttcca

SEQ ID NO: 109848 - DNA, 245 bp, Glycine max
aaacagcagagagaagagaagggctacacaaacacaatctctaatggcactcaggatgtgggcttcttccactgccaatgcactcaaactctcttctgtctccagacctcatctcttgcctcctttttctttctccagatgcttatcttccgtcttggatggacttaagtacgctgattcacatgaatgggtcaagcacgaaggctcagtcgccaccattggtatcactgaccatgcccaggacc

SEQ ID NO: 109849 - DNA, 140 bp, Glycine max
cgaccagaaggtagattacgtgttcaaggtggtgctaattggtgattcagccgtggggaagtcgcagatacttgcacgcttcgcgagaaacgagttcagtttggattcaaaggccacaatcggcgtcgagttccaaacgc

SEQ ID NO: 109850 - DNA, 248 bp, Glycine max
acacgttccaccaactagtcagttgaggttcaaaaccttgcattccctgcaaacccctctgaccctcaccttgtggaatggatcaaataccctgggaaccccgttttggtgccaccaccaggcattggggccaaggactttcgtgacccaacaacagcgtggctcacctcagaagggaagtggcgaatcaccataggttccaagctcaacaaaaccggcattgcgttggtttatgacactgaggactt

SEQ ID NO: 109851 - DNA, 248 bp, Glycine max
aacttatgaaccttagacaaagtgttgttggtgatcttaaacttcttactgatgggaagttgtatgagggtaagcatattcctgtatctaatattagtgcaggggaaaatcatgtagttcaaatacccttaatggcacaggaggaaattctgtcttctagtgcaagtgatttcagaactgcaatggtgagtaaaaatagcaagcctcaagctactgcaatgcatgtgggagctatagaaattatcatt

SEQ ID NO: 109852 - DNA, 251 bp, Glycine max
tgggctatagaggttgatgaatactctcaaacatcagtttcttcaatttgggcagttggagatgttacaaacaggataaatctcaccccagttgctttgatggagggaggagcattagtaaaaacgctgtttcaggataacccaacaaaacctgattatagagctgttccttctgctgtattttctcaaccaccaattggacaagttggtcttactgaggaacaggctgtacaacaatatggagatattga

SEQ ID NO: 109853 - DNA, 255 bp, Glycine max
ggcgtcttaaccaggctatctatcttctaacaactccagctgaaccaattcttgttgcatcttcacgtggaccactgttgacaacagcttcaacaataacctgaatggggttctggtcagtcaacaaatgaataatctccatagcatgtttgatgatcctaacagccaagagtttcttgccattgtttctaccgtgcatcatgagagagttggtcagcctctcaacaatggggcattgcgccttcctgaaccgct

SEQ ID NO: 109854 - DNA, 249 bp, Glycine max
ggcagataaatcactgtatctagtgttattgtctaatggaaacctagctgaacaaggtgacttagaggatggcaggcattatgctgtttgggaggaccccttcaagaaaccttcttatctgtttgccttggttgccgggcaattgcagagcagagatgacacatttgttacccgttcagggaggaaggtgtcccttaggatatggacacctgcagatgatgtacctaagactgcacatgctatgtattc

SEQ ID NO: 109855 - DNA, 244 bp, Glycine max
gcctataagagcattgaaagatgaggataaagggtaccctcctgtgtaccctgttggaccaattgtccaaagtggtgatgatgatgcaaaagggttggacttggagtgtttaacatggttggacaaacaacaagttggttcagttttgtatgtttcttttgggagtggtggaacactttcgcaagagcaaataactgagcttgcttttggtttggaattgagtaatcacaagttcttatgggtt

SEQ ID NO: 109856 - DNA, 248 bp, Glycine max
taggaagaggcggtcagagtgagaaagagaaagagagaattcgtaaaccctaatttcggaaagatcggcgatgactgcctccaaggatcgcgagaacttcgtctacatcgccaaactcgccgagcaggccgagcgttacgaagagatggtggaatcaatgaagaacgttgcgaatctcgacgttgaactgacggtggaggagcggaatttgctttctgttgggtacaagaatgtgattggtgctcgca

SEQ ID NO: 109857 - DNA, 252 bp, Glycine max
cgccgaatatcttgttgtttggagcgatccgagaaaaactctgtaaacatgttggtttaccaggacctccttacaggtgatgagcttctctctgactccttccgttacaaggaaattgagaatggaatgctgtgggaagttgaggggaagtgggttgttaaaggagcagttgatgtagacattggtgcaaacccttctgctgagggtggaggagaagatgagggagttgatgatgcagctgttaaggttgtt

SEQ ID NO: 109858 - DNA, 250 bp, Glycine max
gaggttctttgctcaacaagacccatgaggattggaccagcctctaataaaacccctgccactcagtcccagccaaaagcttcatatctgaattctcaacctcaaggctcacagaatgagaatgatccaaataatacgactatttttgttggcaatttggatcctaatgtaaccgatgatcatctgaggcaagttttcagccagtatggagaattagttcatgtgaagattccagcaggcaagcgatgtg

SEQ ID NO: 109859 - DNA, 247 bp, Glycine max
ctgactgctgcggctgccacagctttgcgtggggctgcgacattgaaagcgagggccctgaaggaagtgtggaatattgcagcagtgattcctgtggagaaaaatttggcagtagctggtggacataataacaacaataacgcaagtaatggaaattctaagagtagcttcagcggtgaacttgtccctgaagaaaatttcttgggtatatgcagtagagaattatatcacagaggttgtgaactcc

SEQ ID NO: 109860 - DNA, 249 bp, Glycine max; identical to SEQ ID NO: 108692

SEQ ID NO: 109861 - DNA, 245 bp, Glycine max
cactggttctcttcctgatagtattgtgaatcttgggcagctcgggattcttgattttcataacaataagctctctggggagcttcctaaggggattcgttcgtggaagaagctcaacgatttgaatttggcgaacaatgagattggtgggaggattcctgatgagattgggggtttgtccgtgctgaattttctggatctttctagaaaccggttttcggggaaagtgcctcatgggttgcaga

SEQ ID NO: 109862 - DNA, 243 bp, Glycine max
aaaacaaagaaaaaaaaaaccctagccaacacaaccatcatggccacctctgctattcagcaatcagcattcactggtcaaactgctctgaagcagctcaatgagttcgtccgcaagaccggtatggccctgaccgtcccaagtacttgggtccattctcggagcagattccatcatacctgaccggagaattccctggtgactacggatgggacactgctggattatcagctgacccggaaa

SEQ ID NO: 109863 - DNA, 247 bp, Glycine max
ctccctcctcttcacacattttctgtgagctctaacaaacattctcgttcacactttcagattgtgtgaagatgggggtgggtggccgaactgatgttcctcctgccaacaggaagtcagaggttgaccctttgaagcgggtgccatttgaaaaacctccatttagtctcagccaaatcaagaaggtcattccacctcactgtttccagagttctgttttccgctcattctcctatactgtttacga

SEQ ID NO: 109864 - DNA, 248 bp, Glycine max
agcattgaatatgatgcgtgtacaattccaaatgattgtggttcattggttgttgccaaggttggaaatcacaaacaaattgttggtttccatgttgctggaagcaaaggaagactgggatatgcttcattgataccatatgttgagccagttgtgcaagctcaaagtgctgaagtttattttgacttcttccctgtggaggttgatagtcaagagggagttgctcacattggtgaattgaaatctgg

SEQ ID NO: 109865 - DNA, 238 bp, Glycine max
cgaggttagtttagaacctacaaagattgcagagatccttaaagatcgtccatcttggttccgtgactgtcggagcctagaagtttttactatgtttcctgctggaaatggaggaaccattgaacttgtttacacacagacatataaccaaacaacactggctcctgctcgggatttctggactctgagatataccacaagtttggaaaatggcagtcttgtggtttgtgagaggtct

SEQ ID NO: 109866 - DNA, 242 bp, Glycine max
gtgtatgagtgcaattctggtcagcattgagatgggtcaattttctcatgttacaagctatgttagcaaggcagaacaggcaccagatgcccctgaagcagtaacagttgcaaagctacgatgtgctgcaggattggctaatctagaggccaaaaagtacaagcttgctgcccgaaagtttctagaaacaggacctgaactgggaagtcactataatgacgtaattgcatctcaagatgttg

SEQ ID NO: 109867 - DNA, 244 bp, Glycine max
gcgagaaaattatgaaccttagacaaagtgttgttggtgatcttaaacttcttactgatgggaagttgtatgagggtaagcatattcctgtatctaatattagtgcaggggaaaatcatgtagttcaaatacccttaatggcacaggaggaaattctgtcttctagtgcaagtgatttcagaactgcaatggtgagtaaaaatagcaagcctcaagctactgcaatgcatgtgggagctataga

SEQ ID NO: 109868 - DNA, 253 bp, Glycine max
tgtgaagggactccttcacttatgtgtcaagcaacttcattgctggttacttcatgtgcaacttgtcacagcttggagccacagctgtccccatagacagagttattatcctatgagatggaaaccccaaagctgtatttaatcaaggcagaggatattggaacttatagaatcagttgtgtggatgatccaagaaccttgaacaaaattctctacattagaccaccagctattaccttgtcgtatcatgagc

SEQ ID NO: 109869 - DNA, 241 bp, Glycine max
gcagcagagggaggagcggcattaaaaatgcagatcttcgtgaaaaccctaacggggaagaccataaccctcgaggtcgaaagcagcgacaccattgacaatgtcaaggctaagattcaagacaaggaaggcatcgctccggatcagcagcgtttgattttcgccggaaagcaacttgaagatggaaggaccttggccgattacaacatccagaaggaatcaacccttcaccttgtcctca

SEQ ID NO: 109870 - DNA, 242 bp, Glycine max
ggagaagttgttgatgttcgttttgctacagatgatactgggcagtttaaaggatttggacatgttgagtttgcaacagcagaggctgcccaaaatgctcttgggttgaatggacaacaattgtttaatcgtgaactccggcttgatttagctcgggaaaggggtgcatatacccccaacagcagcaactggaacaactcatcccagaaaagtgaaagaggccagtctcaaacaatatttgt

SEQ ID NO: 109871 - DNA, 253 bp, Glycine max
gagggagcaagtgcagaaggtgttccaaaaaggctaaccttcgacgaaatccagagcaagacatacttggaagtgaagggaactggaactgctaaccagtgcccaaccattgaaggtggagtggactcattcgccttcaagccagggaaatacaacgcccagaagttgtgcctggaaccaacttccttcacggtgaaggcagagggcgtggccaagaacgccccacccgaattccagaacaccaagctcatga

SEQ ID NO: 109872 - DNA, 247 bp, Glycine max
cggctcgagcggctcgagcggctcgaggagagagagagagaggtatcacagtgaaacgaagaagccctaactacgcacgcactcattcttgagaaagctcaatattcattcgtccatggcactctctttgtcgtctcttttccaaatccaaattgatctatggctgtcaaatacttctgcaaaaggagcatgctattccagttcgtcactttgctaaagagtctgcccctcctgcccttaagggaga

SEQ ID NO: 109873 - DNA, 242 bp, Glycine max
gtggtttcagtgagtgatcggtgttcacttgatccttcataagtcgtcatcatcatcatcatcatcaccgttgattgaagaagatgccgatcagaaacatcgccatcggaaggcctgaagaggctattcaccccgacacgttgaaggcggggttggctgagttcatctccaccttgatcttcgtgttcgccggttcaggttccggcatcgcctacaacaagctcaccgacaacggcgccgcc

SEQ ID NO: 109874 - DNA, 244 bp, Glycine max
gtaagatgaaggagcgtctcgttggggtttctgaggaaaccaccactggagttaagaggctctatcagatgcaggcgaatgggactcttctcttccctgctattaatgtcaatgactctgtcaccaagagcaagtttgacaacttgtatgggtgccgtcactctctccctgatggtctcatgagggctaccgatgttatgattgctggaaaggtggctgttgtggctggatatggtgatgttgg

SEQ ID NO: 109875 - DNA, 245 bp, Glycine max
ccaatattattaagatgatcaacattattggagcacttgttctactctttgcatttctcttcctcagttgtgtgtatgcacaagacacaacaacccttgtgcctgcaatcataacttttggtgattctgctgtggatgtagggaacaatgactatcttcccacccttttcaaggctgattaccctccttatgggagggactttgttaaccaccaacctactgggaggttttgcaatggcaaatta

SEQ ID NO: 109876 - DNA, 248 bp, Glycine max
aaaaagtttcctctacaaaagcacaatttgttagtggaaaaaccttcaaatatgatataattggtgctggttcacattcttcagaagattttcctgaaaaggaagatcaagaaaaacccaaaaagattgacgccagattgagacaaagaatagatcctcaatacaatgaggttcaggctcagatggaaacaaatttgtttaaattgtctcttgatgatgttgaaactcctaaaggttccatgttggat

SEQ ID NO: 109877 - DNA, 241 bp, Glycine max
gaaaaaacgacattcattcatctatggctacccttattgctcccagcaaccactctccccaagaagacgctgaggctctcagaaaggcttttgaaggatgggggactgatgagaaaactgtcatagtaatattgggtcatagaactgtttatcagaggcagcaaatcagaagagtctatgaggaaattttccaggaggatcttgtgaaacgcctagagtctgagatcaaaggagactttga

SEQ ID NO: 109878 - DNA, 243 bp, Glycine max
ccttaatggcacaggaggaaattctgtcttctagtgcaagtgctttcagaactgcaatggtgagtaaaaatagcaagcctcaagctactgcaatgcatgtgggagctatagaaattatcattgatagcttcgcaagtcctgactgtaacatagttggtgcaatgcttttggttgatacttatcataccaatcctgaaaatgcagttcgtagtatttttgttgcgcctttcagaggcggaaggc

SEQ ID NO: 109879 - DNA, 245 bp, Glycine max
cacttgaccagattagtgagcccaagaggccctctgacaagcccctcaggcttccccttcaggatgtgtacaagattggaggtattggaactgtgccagtgggacgtgttgagaccggtgtcttgaagcctggaatggtggtgacttttgcaccaactggactgacaactgaagtcaagtctgtggagatgcaccatgaatctcttacagaggcacatcctggtgacaatgtgggattcaatgtt

SEQ ID NO: 109880 - DNA, 243 bp, Glycine max
cggctcgagtttcacacatgaccatgctacctcattcattaactatgattgcaacactaataatcatttttcttgcacaaacacttgtgggggtgagttcacttcctgaagctgataaaataaccaatttgccggggcagccacgggtcgaatttcagcaatattctggttatgtcaccgtggatgatcaaaatcaaagagctttgttttactactttgttgaggctgaagaaaacccttctt

SEQ ID NO: 109881 - DNA, 242 bp, Glycine max
tcagtggaatgattctttcccgtgctcccaagcaatgtaattttgtagaatggcgaggacataaagttgtttataaaaggtatgctagtctctatttctgcatgtgcattgatcaagatgacaatgaattagaagtccttgaaataattcatcattttgtggagattcttgaccggtattttggcagtgtctgtgaactggacttaatattcaactttcacaaggcctactatatactagat

SEQ ID NO: 109882 - DNA, 244 bp, Glycine max
tgtggtgccttatcgctgtggttatcatcttcttcttcctctttcttagatctcttctttctctacgccgcacgccgaaaccatggccggaaaaggagagggtcctgctatcggaatcgatctcgtgtaccacctactcttgcgtcggtgtgtggcaacatgatccgcgttgaaatcatcgccaacgaccaagggaacagaaccacgccgtcttacgtcggattcactgacaccgagcgtctca

SEQ ID NO: 109883 - DNA, 238 bp, Glycine max
aaaagagagaatgcaaatctggagtttgtgggggtgattagggcaaagcagcaggtggtggaagggttcatatactacatcactttggaagcaaaagatggtgaaaccaaaaatgtgtatgaaacgaaggtgtgggtgagatcatggttgaactccaaggaggtcctcgaattcaagcccatcagtattaatcctctttcggtgtcggtctagtttttataaggttacagaaataaat

SEQ ID NO: 109884 - DNA, 238 bp, Glycine max
gttcattcccaggttgtgatggcagcagcaccagcagctaccttcgctattggaaccaccggttccctcggccaaagaggaagctcgcttcctcaatcaaagtcctttgggttgaaattcaactctctgaatcatttgaagagcttctgtggcctcaaggccatgtcatccgtgagatgtgagtcggaatcctccttcttcggtaacaaaaccggtgctgctctacgggcgtcttttg

SEQ ID NO: 109885 - DNA, 243 bp, Glycine max
tggtcaaaaggagtgattgggcctcattggtacaagtgtttttaacaaacagcaacagtacagagcattttgatgcatgtaagtggacaaaatcagaaccacattcctgggaattgatcttcccaatagaggtatgtggtcccaataatggttttgaaatgtggagttctgagtgggcaaatcaaacttcatggcatttgagtttccttattgacaatcccaaacaatctacagtttttgata

SEQ ID NO: 109886 - DNA, 242 bp, Glycine max
ctaattcgctcgcagtcacccaagaggcgaatccttaccattgctcgagatgggtgaagaagtgaaggccgtggttccagagtctgttttgaagaagcagaagagagaggaggaatgggcgttggtcaagaagcaagacctcgaggctgcgaagaagaagagagccgagagccgcaaactcatctacaacagagctaagcagtacgctaaggagtacgatcaccaggagaaggaattgattc

SEQ ID NO: 109887 - DNA, 243 bp, Glycine max
gtgagggccttccatggcttccgcttgtgcttcctctgcaattacagctgttgccatctctacgccgagttccgggcagaagaatggatcaggaggttgttttcttagtggcaggaaattgagggtgaaaaaggagagagcagcaattggaggacgatcgatgggcactacagtgtgcgcagttgctgagcctgacagacctctatggttcccaggcagcacccctcctccatggcttgatgg

SEQ ID NO: 109888 - DNA, 247 bp, Glycine max
attctagccattcgaattcccaatctaaaaccctaataccttcaaagaacgaagtagtggatcagtgatggcacctaaggcagagaagaagccagcggagaagaagcccgcggaggagaagaagtcctcggtgggagacaaggctccggcggagaagaagccgaaggccggaaagaagcttccgaaggagggaggagccggcggagaaggggggaagaagaaaaagaggaacaagaagagcgtggag

SEQ ID NO: 109889 - DNA, 242 bp, Glycine max
ctcgagccgtccagcttttcatcgacaaattgctgcacacttggagaaaatgccattatgacaaaaagcaattttgtgtggaatgggacattgtttgtctcggaaaagcaaagaaacatggtattctgcgatgaaggaaaaatttgtacaaatgatgaagagcatctatgaaacagaagttacagattggccagtaccactgaaaatcatttctggaaccattcttgcaacaatttgggaac

SEQ ID NO: 109890 - DNA, 240 bp, Glycine max
gaaaagcaaacagagtgtctaatcgaagatagaagaagagatggctaaatctccagaaactgaacttcccgtcgaagctttcggttgggctgcttcagacacttctggcacccttgcaccttttgatttctccagaagagaaaatggcgttgatgacgtcattctcaagattctcttctgcggggtttgccactcggatctccacactctcaaaaacgactggggtttcaccacttaccc

SEQ ID NO: 109891 - DNA, 241 bp, Glycine max
tgatgaacttgggcttggacatccaagagctgccaagtactctgtctatgtgatagtctttcagtcacttttcttgggaatctttttcatggctattattttggcgactagagattattatgccattatttttacaaacagtgaggttttgcataaggccgttgcgaaactaggatacctcctttctgtgacaatggttctaaacagtgttcaaccagtggtttcaggtgttgctattgga

SEQ ID NO: 109892 - DNA, 240 bp, Glycine max
gacaaattgggatcactaatccaacacactacttttttccaaaatctcaaagtgctgcagattacaaggcagcaagtagagctctggacttcttctttggttggtattctgatccggttttctatggtgactatccggagagtatgaaatcttcagtaggttctaggctcccaaaattcacaaaagctgaatctgaaggtctaaaaattccatagattttcttggtgtgaattactacac

SEQ ID NO: 109893 - DNA, 241 bp, Glycine max
ctcgctctttcagctttgacttttgttggaaactaaggcctaatcaaaatggtgaagttcacagctgaagagctacgtcgtattatggactataagcataatatccgtaatatgtctgtcattgctcatgttgatcacggaaaatcaaccctcactgattctcttgtggctgctgctggtattattgctcaagaagttgccggtgatgtccgtatgactgatacccgtgcagatgaagctg

SEQ ID NO: 109894 - DNA, 245 bp, Glycine max
  unsure (1)..(245): unsure at all n locations
ngaacttcaagggactaaaagacaagatcaatttggtccctataaaccttcaagacaggccagcttggtataaggagaaagtctaccctgaaaataaggtgccatccttggagcacaatggcaaggtgttgggagaaagtcttgatttgatcaaatatgtagatgaaaactttgaagggacacctttgtttcccagagatcctgccaagaaagagttcggagagcaattgatatcccatgttgat

SEQ ID NO: 109895 - DNA, 244 bp, Glycine max
acgcccctgttgctaagtacttggtcaggaacgaagatggtgtctccattgctgctctcaacctcatgaaccaggacaaaatcctcatggaaagctggtactatttgaaagatgcagtccttgaaggcggtattccatttaacaaagcatatggaatgacagcctttgaataccatggaacggatccaaggtttaacaaggttttcaacaaggggatggctgatcactctaccattacaatgaa

SEQ ID NO: 109896 - DNA, 246 bp, Glycine max
  unsure (1)..(246): unsure at all n locations
tnaggagccctctcttcaggtcaccatctagactgcaatcatggctgatggaccacagcatccatcagttgttcagaagctagctggacagtcttacctggtgtccaggcttagccccaactttaactccaggaattattctgcaactggttcttacgtcaatggcggaatgcactcgcctgggttggctgttgtgtcacctgtatctccagttactgtgcatgctccagcagagaaaggagtgag

SEQ ID NO: 109897 - DNA, 235 bp, Glycine max
catggagctccaggaagagaaatgttgagtgagagcaagctgagggatcttctgcatggttctgagtatgttctcacttatgaagataaagatggagattggatgcttgtaggggatgtgctatgggaaatgttcattgagacttgcaaaaggctgaaaattatgaagggttctgatgccattggtttagctcccagggccatggaaaagtctaaaagcaggatttagggtatcc

SEQ ID NO: 109898 - DNA, 240 bp, Glycine max
tcaatatctctgttggcgagagtggagatcgtctcaccagagccgccaaggtgttggaacaacttagtggccaaaccccagtgttttccaaagcacggtacactgttcgttcctttgggattagaagaaatgagaagattgcatgctatgtcactgtcagaggtgacaaggcaatgcaacttttggagagtggtttgaaggtgaaggaatatgaacttcttagaaggaacttcagtgata

SEQ ID NO: 109899 - DNA, 240 bp, Glycine max
attcttggcattttcctgagctggtgaaaattgtaaatgataattatctgtatgccaaagttgcaaaatttattgaggataaggcaaagttggctgaagacacgattccaggcttaactgacatagttggagatgaagataaagcaaaggagattgtggaagctgccaaagcctccatgggacaggatttgtccccagtggacttaatcaatgtccatcaatttgcacagagggtaatgg

SEQ ID NO: 109900 - DNA, 241 bp, Glycine max
  unsure (1)..(241): unsure at all n locations
atttccgaataccattgtgcagattgaaccagacatgaattcaaggtttcagcttttgagtaccactaccaatggtgattttgttcaaggaaaagatctcgcaatggttaaagttaatgtagcangtgctgccgttggtttgacatcaagttacactccaactccattgttggaatctggtttgcaaaaagacagagggttaattgtggagtattttggaaggatgtcttatgttgctcat

SEQ ID NO: 109901 - DNA, 244 bp, Glycine max
aagtattgacacattctctggaacctttcccagtagaaataagtcaatcagagtcacagttggttgatttccgtgatagtgcaatattattgtctccctatcatgtcaagcaacagacaacttttattaagactccaagcacccgggtagaatcattcacagtggtggaccccactaaacgtgctggtacagagttgaaatacgggccatatgaaaatcatcccccgtattcatattctcctgt

SEQ ID NO: 109902 - DNA, 237 bp, Glycine max
aacttaattagtgttcatgaatatgtcaagccttactttagtggttctaaattgaaaagctttctagctggtcataatatcaccattactgatggtattgacaaaactagtgcaactttgcaatttagaaagttagcagattgtgattttctcaagagaaactttaagcagatgtctaatgttttgtgggtggctcctgaggacaaggcgagtttgtggtcacaacttcattatgtt

SEQ ID NO: 109903 - DNA, 240 bp, Glycine max
ggcacgcttgtcactgctcattttcgcgttctgcgccgtcgccgtcgccgtcgccgtcgcgggctcctccttcgatgatgccaaccctatccgtttagcgtcggacttggagtcgcaggtgctggacgtgatcggacagagccgccacgctctctccttcgcccgcttcgctcgccgccacggcaagcgctaccgttccgtcgacgagatccgcaaccgcttccggatcttctctgataa

SEQ ID NO: 109904 - DNA, 243 bp, Glycine max
caatttcaatcaacggttatacccttttctatttgagcatcatcatgtccaccgcagcgcagcccaaggccaagaaaacggcgtcgtccaagaagcccctctcccatcctaccttcgccgcgatgatagcggaggcgatagcgagtctgaaggagagaaccggttcgagccaatacgcgataaccaaattcatcgaaggcaagcacaaggagttgcctccaacctacaagaagcttgttctcg

SEQ ID NO: 109905 - DNA, 241 bp, Glycine max
tgacgatggtgtgtgcacaggtcatgggaaaccatgttgcaatcacagtgggtggatcaaatggtcattttgagctcaatgtgttcaagccaatgattgccaattgtctcctgcattcgctgagactgcttggagattcgtctgcttcctttgaaaagaattgtttgagaggtattcaagctaatagggaaagaatttcaaaattactgcatgagtcacttatgcttgtcacatccttaaa

SEQ ID NO: 109906 - DNA, 258 bp, Glycine max
aaaggattctacccgccgctcgatgggaattgcgcttcaaggcgtctcgtagggctaatccgcctcacgagggtcaccaacggcacgtgcctttggggggccgaggccccctactgctggtcggcaaacggacggcgggcgcacgcgtcgcttctagcccggattctgacttagaggcgttcagtcataatccaacgcacggtagcttcgcgccactggcttttcaaccaagcgcgatgaccaattgtgcgaatcaac

SEQ ID NO: 109907 - DNA, 248 bp, Glycine max
gaaagcagagaagtgagatacactaagttatcctcataaatacactctaattaggtggcaagataagtgtctaaccttagtaacattgccacatattgtgttcattttggtattgtgccactaaaattctattcaattcatctatggctgcctcttcttatgctatgcaatcaatcctggcaaaccctttgatccgcatttccagcgggtctagggtgaaccatttggcgtcctgctttgcacatgag

SEQ ID NO: 109908 - DNA, 258 bp, Glycine max
caatatttgatattgttgttggtgatgttataccccttaaaataggagatcaggttcctgctgatggagtattaatcacgggccattcacttgcaattgatgaatccagtatgactggtgaaagcaagattgttcacaaggatcacaaaacaccatttattatgtctggttgcaaagtagcagatggagttggtgttatgctggtaactggtgttggtataaatactgaatggggattgttgatggccagtatctcag

SEQ ID NO: 109909 - DNA, 261 bp, Glycine max
tgtttgccaccactggatatgactcagcagcccccatggcaagaattagttgcaactgatctgcatgggaatgaatggcattttagacatatttttcgagggcaacccaggcgccacttactgaccactgggtggagtgtctttgtcagttccaaaaaattagtggctggtgatgcatttatattcttaaggggtgaaaatggagagctgcgagttggagttaggaggctcatgagacagcaaagcaacatgccatcttct

SEQ ID NO: 109910 - DNA, 261 bp, Glycine max
tgactggggggggtatcactatgcaatcgacgccgggaagctcaggatacttggatttgtatccagagcggaagatgtcctttttcaaaaatccttacattctcggactggctgctgtcgccggcatcggtggtctcctcttcggctacgacactggtgtgatatcaggggctcttttatacattaaggatgattttgaggaggttagaaacagcaatcttctccaggaaacaatagtcagcatggctattgccggggcaa

SEQ ID NO: 109911 - DNA, 261 bp, Glycine max
ctcctccgaggagttttgacactggttgtagccctcaagatgcgggtttcaaggagtcactaccaagtcaagtgcgtgcaccagcagtgttcaagtgtgttcgtgtaacatcagtggatgatggtggggaagatgagtatgcgtatcaagcagttgtgaagattggtggccatgtcttcaaagggtttctctatgatcaaggggttgaggacaaagaagggtaccctaatttatctgaattacatttgagtggtggtggtg

SEQ ID NO: 109912 - DNA, 252 bp, Glycine max
attccctaaaatggccactctttcctcctacgaccacttcatcttcactgccttagctttcttcatatctggcctaattttcttcctcaaacagaaatccaaatccaaaaagttcaacctccctccaggaccccccgggtggcctattgttgggaacctcttccaagttgctcgttctgggaaactttctttgagtatgtgaacgatgtgagactcaaatatggctcaatcttcaccctcaagatgggaaca

SEQ ID NO: 109913 - DNA, 255 bp, Glycine max
cacccaatctttctgctatagttgggagtgctgttgcagccaaactcatggggacagctggtggtctagcatctcttgcaaagatgcctgcttgtaatgttcagcttcttggtgccaagaaaaagaatcttgctgggttctccacagcaacatctcaatttcgtgtaggttaccttgagcaaacaaaaatatttcagactactcctccttctctaaggatgcgagcatgccgactcctggctgcaaagtctacac

SEQ ID NO: 109914 - DNA, 245 bp, Glycine max
gaacgctgctgccgaaacccttccggaaccctaaggtaagtgagtaatcagtggttgagaatggtggagaaggcgaagggtagaaaggaggaggtggttacacgtgagtacaccattaacctccacaagcgcctccatggctgcacatttaagaagaaagctcctaaagctataaggagataaggaaatttgcccaaaaggccatggggaccaatgatgtgagggtggatgtgaagttgaacaag

SEQ ID NO: 109915 - DNA, 259 bp, Glycine max
agctaggaagtggtgttgtttttgtgttagtgctatgggaaggcaaccctgctgtgacaaacttggggtgaagaagggtccatggactgctgaggaagacaagaagctcatcaacttcattctcaccaatggccaatgctgttggcgcgccgtgccaaagctcgctggcctcaagcgctgtggcaagagttgtcgccttcgttggacgaattatcttcgtccagacttgaagagagggctactcacagaggcagaggag

SEQ ID NO: 109916 - DNA, 260 bp, Glycine max
ggagatacagtgaggaaaaagccagaaatgtagtaatacttggttgctgaacatgcagctgcaaataacaagatcttcatgatgaacctttctgctccctttatatgtgagttctttaagggtgctctggacaaagttctgccatatatggattatgtttttggaaatgaaactgaagcaagaacattttctaaagctcaaggctgggagactgataatgttgaagaaatagctttaaagatttctcaattgccaaaagc

SEQ ID NO: 109917 - DNA, 259 bp, Glycine max
ctatttttcaagtaacttaaggtttcaaacctaggaagttggaagtcatggcagcaacatttatggcagcaacaacaagttctggtactcttaaagcaactcctttccttggccaaggcaagggtgccaatgccaatgctcttagggatgttgtctccatgggaactgggaagtacaccatggtactcttcttcttccttttttatgttttactatcacaaaagttttatggtgttgattacgtagtgtggttgatatg

SEQ ID NO: 109918 - DNA, 246 bp, Glycine max
gtgaagagatgacattgattccgggaaccagtgttgaagaggcctacaacaagctaatagttgaacttgagagaagtgttcctacattggttggcattgaatgtcccaaggatgagaaacttcctcgtcgcaaaatttttgacaaacctaagacgcgctgcttcactattctccctatggagtttaatcttgtggttcgtcagaagtttttaaattttgtgaggttcagtatgaagaaaagggaca

SEQ ID NO: 109919 - DNA, 260 bp, Glycine max
cactctcacattatttctaggatccctttttttcatttcacttcacttcatccatctttcagctatgaacgctctagcagccaccaaccgtaacttccgacgtgcagctcacattctcggtttggacactaagcttgagaatagccttctcattcccttcagggaaatcaaagttgaatgcacgatcccaaaagatgacggaacactagtatcatatgtaggattcagaattcaacatgacaatgctcgtggaccgatga

SEQ ID NO: 109920 - DNA, 253 bp, Glycine max
ctctcgctttgtgttggaagaggggaatcgtagatctgatttcattctttcttttaataataattttgtgatcagaattattgagctgaagaaaagacaatgggattgtgggaagcttttctcaattggctacgcagccttatcttcaagcaggaaatggagttatctctaataggacttcagaatgctgggaagacttcccttgtaaatgtagttgctactggtggatatagtgaggacatgattccaactg

SEQ ID NO: 109921 - DNA, 253 bp, Glycine max
cataagccgagcatggccaccgcaagagcagcaggcacctcgtccttcatggggacgcgcctcctggaggcccactccggggcggggcgggtgcaggcccggttcgggtttggcaagaagaaagccgccgccccgaagaaagtttccagggggtcgggctctagctccgataggcccctgtggtatccgggcgccaaggcgcccatgtacctggatgggagccttgtcggagactacgattcgacccatttgg

SEQ ID NO: 109922 - DNA, 253 bp, Glycine max
ctcgagccgctagtactagtaaggtttacggtgatccgttggagcatcctcagaaagagacttactggggaaatgtgaatccaatcggtgagaggagctgttacgatgaagggaaaaggactgcggagacgttggccatggattatcatcggggtgctggtgttgaggttcgtattgctcgaattttcaacacatatggaccccgcatgtgtttggatgatgggcgtgttgttagcaattttgttgcacaggc

SEQ ID NO: 109923 - DNA, 251 bp, Glycine max
cttcaacatagacgtcaccgacattaagaagctccagagcggtgtgaacaagctcgcggatctggttggggtcacgcttggtcccaagggaagaaatgttgttctcgagagcaagtatggctcgccgaaaatcgttaacgacggtgtcactgtcgctaaagacgttgagttggatgatcccgttgagaatattggtgccaagttggtgagacaacggctgccaagacaaacgacttggctggtgatggaac

SEQ ID NO: 109924 - DNA, 254 bp, Glycine max
cttcgagttgtaacctctctcttcaaccctaacttagggtttatgttctaaaacccttttcaggttgattggaggagataaaaatgctcgtgttgtttgaaacccctgcgggttttgccctgtttaaagtgctggatgaaggcaagctttctaaagttgaggacttgtggaagaattttccagcgcagatactgctagacaggtggtcaagttgaaagcattttctaaatttgagaacacttcagaagctctag

SEQ ID NO: 109925 - DNA, 252 bp, Glycine max
ggtgccttatcgctgtggttatcatcttcttcttcctctttcttagatctcttctttctctacgccgcacgccgaaaccatggccgtaaaatgacagggtcctgctatcggaatcgatctcggaaccacctactcttgcgtcggtgtgtctcaacatgaccgcgttgaaatcatcgccaacgaccaagggtacagaaccacgccgtcttacgtcggattcactgacaccgagcgtctcatcggtgatgcggc

SEQ ID NO: 109926 - DNA, 257 bp, Glycine max
gtctttgtggtggtgatgaaaaattgatgcgtgaaaggacacacctgctgttggcttgttgttcaaggatggcaatttgtaagaaagatgtttggagagttgaatgtggaatcccttctggatttccgctcacagttatttgcaatagcatttttaatgagatgctcattagatatagctatgaaaaattactgcgccaggctaaagctccaagtatgtttttacaatccttcaaaaattttgtttctttgtgtgtg

SEQ ID NO: 109927 - DNA, 265 bp, Glycine max
catcttgctccctcagaagcgaagaagaagccacagagaactagtctcctactctcacccgcaagaaaaaaatggcatctcacatcgttggatacccccgtatgggtcccaagagagagctcaagttcgctctcgagtctttctgggatggcaagagcagcgccgaggatttgcagaaggtgtcttctgatctcagggcatccatctggaagcagatggctgatgctgggattaagtacatcaccagcaacactttctctcacta

SEQ ID NO: 109928 - DNA, 248 bp, Glycine max
cgagataactagaaacagtgtgatgaaaatgaaggtccttgttttcttcgttgctacaattttggtagcatggcaatgccatgcgtacgatatgttccctctccgaatgaacactggctatggtgcccgtactccggaggtgaaatgcgcaagttggaggcttgctgtggaagcacacaacatctttggctttgagaccattcctgaagagtgcgttgaagcaacaaaggaatacatccatggcgaac

SEQ ID NO: 109929 - DNA, 250 bp, Glycine max
cgcaacaaaaagaaagaatcccaggcgaggagaaagatggaggggaaggagcaggatgtgtcgttgggagcgaacaagttccccgagagacagccgattgggacggcggcgcagagccaagacgacggcaaggactaccaggagccggcgccggcgccgctggttgacccgacggagtttacgtcatggtcgttttacagagcagggatagcagagtttgtggccacttttctgtttctctacatcaccg

SEQ ID NO: 109930 - DNA, 167 bp, Glycine max
ccgcgatcacaggttgccgcaccttaaaaccggaaacaaaagcaatcgttacttggtttcaagactttctcaatttcttcctatttctttgtgtacgatttcttaagggaaagaaaatcactctctgtgctggccacagacttcgtgaatcattttcttttccacac

SEQ ID NO: 109931 - DNA, 246 bp, Glycine max
tcagctctccttctcgcactttcagctttgacttttgttggaaacgaagtcctaatcaaaatggtgaagttcacagctgaagagctacgtcgtattatggactataagcataatatccgtaatatgtctgtcattgctcatgttgatcacggaaaatcaaccctcactgattctcttgtggctgctgctggtatcattgctcaagaagttgccggtgatgtccgtatgactgatacacgtgcagat

SEQ ID NO: 109932 - DNA, 247 bp, Glycine max
agaaagtgcgcgtggtgaaaaagcatggcttctcagctcctgagacgcaccttcggaagtcgtttccttgcaaaccctagggccttctcctccgctgcttccactccgatccgcgccactctcttccccggcgacggcatcggccccgagatcgccgattccgtcaaacagatattccaagcagctgatgtcccaatagaatgggaagagcactatgtaggaactgccattgaccctagaacgcaga

SEQ ID NO: 109933 - DNA, 251 bp, Glycine max
ctgatggtgggtctcgatgctgcgggtaagaccaccattctgtacaagctcaagcttggagagattgtcaccaccattcccaccattgggtttaatgtggaaactgtggaatataagaacatcagcttcactgtctgggatgttggaggtcaggacaagatccgtcctttgtggagacattacttccaaaatacacaaggacttatttttgtggttgatagcaatgacagggaccgagttgttgaagctag

SEQ ID NO: 109934 - DNA, 251 bp, Glycine max
gtggatcgctagggactacaaggggctacaagataagatcaatttggtccctattaaccttcaagacaggccagcttggtataaggagaaagtctaccctgaaaataaggtgccatccttggagcacaatggcaaggtgttgggagaaagtcttgatttgatcaaatatgtagatgcaaactttgaagggacactttgtttcccagtgatcctgccaagaaagagttcggtgagcaattgatatcccatgt

SEQ ID NO: 109935 - DNA, 188 bp, Glycine max
gaaattttgataaaccgcgatcacttgttgccgcaccttataaccggaaacaaaagcaatcgttacttgatttcaagaatttctcaatttcttcctacttctttgtgcacgatttcttaagggaaagaaaatcactctctgtgctggccacagacttcgtgaatcattttcttttccacacaacatac

SEQ ID NO: 109936 - DNA, 257 bp, Glycine max
  unsure (1)..(257): unsure at all n locations
ggttccttgacaaagctgcaatcctagatgagaactgctcaaagttgganaacagggaaaacccttggatagtttccacagtgactcaggttgaggaggttaaaatggtaatcaagctccttcctatttggtctacatgtatcctcttctggacaatctattctcaaatgaataccttcaccattgagcaagctacattcatgaatcgaaaagttgggtctctagttgtcccagcaggatctctatcagcttttctc

SEQ ID NO: 109937 - DNA, 247 bp, Glycine max
aatttctttaaattgtctcttgatgatgctcaaactcctaaaggttccatgtaggatcttaaaatttctcaatctaaaattgcacttcccaagaacacagttggaggaaccattctgcgtagctgatctattggcaaattttttgacagagggcaattttagagcaagtgttcatttgcagcgcactcatcgtattaaaggaatgattaaaatggtggctacagttggtattcctgagaatacaggt

SEQ ID NO: 109938 - DNA, 248 bp, Glycine max
cactcaaccaccacacctctcctcgttcacgctacccctttctgctcttcttctacctttcaagttttaaaagtataaagatggcagagacattcctatttacctcagagtcggtgaacgagggacaccctgacaagctctgcgaccaaatctccgatgctgtcctcgacgcttgcctcgagcaggacccagacagcaaagttgcctgcgaaacatgcaccaaaaccaacttggtcatggtcttcgga

SEQ ID NO: 109939 - DNA, 250 bp, Glycine max
tctcaacataacaaaaaaagtcaacccagagagcgcgtcttaataaacgctcttctctgaaaacccccatttcttttcttctgtcttcttctctttcgcttcttcgatcttcgatcttcgtcgctgaaaatgagagagtgcatttcaatccacatcggccaggccgtgattcaggttggaaacgcctgctgggagctttactgcctcgaatacggcattcagcctgatgggcagatgccaagtgacaaga

SEQ ID NO: 109940 - DNA, 249 bp, Glycine max
aggaatcagagggcaagttgaagggaattcttggttacactgaagatgatgtggtctccaccgactttgtgggcgatagcagatcaagtatttttgatgcaaaggctggaattgcattgaataagaactttgtgaagcttgtctcttggtatgacaacgagtggggatacagctcacgtgtcattgacctgcttgtattcgttgccaagaagtcttttaaggttgtactgaaaaaaaagtagcttgtct

SEQ ID NO: 109941 - DNA, 234 bp, Glycine max
ctcgagccgtgttgatcgagataactagaaacagtgtgatgaaaatgaaggtccttgttttcttcgttgctacaattttggtagcatggcaatgccatgcgtacgatatgttccctctccgaatgaacactggctatggtgcccgtactccggaggtgaaatgcgcagttggaggcttgctgtggaagcacacaacatctttggcttatgagacattcctgaagagtgcgttga

SEQ ID NO: 109942 - DNA, 249 bp, Glycine max
ccagtgttgaagaggactacaacaagctaatagttgaacttgagagaagtgttcctacattggttggcattgaatgtcccaaggatgagaaacttcctcgtcgcaaaatttttgacaaacctaagacgcgctgcttcactattctccctatggagtttaatctgtggttcgtcagaactttttaaattttgtgaggttcattatgaagaaaagggacaagcttagttgtcaagttggaatcaacccata

SEQ ID NO: 109943 - DNA, 249 bp, Glycine max
ctcgagccgtgctgctgtgcctgagaggatgtcaaatggctacttgcttattggtactagaggaggattgaaccaacaaagaactgggataacagatgctgttgttgttgcccgaattcttaatgccacactagtagtaccggagttggatcatcattcttattggaaggatgacagtgacttcatccatattttcgatgttgattggttcatttcttatctcgcaaaagatgttactattgttaaaag

SEQ ID NO: 109944 - DNA, 181 bp, Glycine max
agatcctcaatacaatgaggttcaggctcagatggaaacaaatttgtttaaattgtctcttgatgatgttgaaactcctaaaggttccatgttggatcttaaaatttctcaatctataattgcacttcccaagaacacagttggaggaaccattctgcgtagtgatctattggcaattttt

SEQ ID NO: 109945 - DNA, 247 bp, Glycine max
caagttccccaacgcccacgtagtgctaccggaaggcatcgagcacctctccgccgccaccaacaatgaaaccgcctacaagatccacatggcggcgcatctcatcatgccccagctcgagtctctggtcaaacactctccaccggacgtcgtcatccctgacatcctcttcacctggaccaaagacttctcccagaaactctccatctcgcggctagtcttcaaccctatttccatcttcgacgtc

SEQ ID NO: 109946 - DNA, 262 bp, Glycine max
ctcgagcgctacaatccgatttctgatattgaaaatctggttgtggcaccaatctctagagcttctgctagacaaagagctggtagggctggacgagttcgaccaggaaagtgttacaggctatatacagaagatattttcttaaccacatgtctaatgaggggattccagagatacagagatcaagtatggtctcctgcgttatccagttaaaggccttggggattgataatatcttgggctttgactggccagcgtctcc

SEQ ID NO: 109947 - DNA, 261 bp, Glycine max
  unsure (1)..(261): unsure at all n locations
cgatcatgtctcacttcaagggcaagtaccatgatgagcttattgtcaatgctgcttacattggcactcctggaaagggtattcttgctgctgatgagtcaacagggacaattggcaagcgtttggccagcatcgtgtagagaatgttgaatccaacaggcgtgctcttagggagctgcttttcaccgctcccggtgctcttaaatatctcagtggtgtcatcctctttgaggaaactctctaccagagnacagctgcagg

SEQ ID NO: 109948 - DNA, 262 bp, Glycine max
agaactgggtcctttgtatagcatggtcaccagatggaaagtatcttgtaagtgggagcaagactggagaacttattggcagggactccccaaactggaaagtcattaggcaatccactaattggccacaagaacggattactggtatctcttgggaacctgtccacctgaatgctccatgccgtcgctttgtaagtgccagcaaagatggggatgctcgtatatgggatgtttcgttaaagacatgtgttatgcgtctcag

SEQ ID NO: 109949 - DNA, 263 bp, Glycine max
ttcaagacaaggaagggatcccacctgaccagcagagacttatctttgcgggtaaacagcttgaggatggtcgcacccttgccgactacaacatccaaaaggaatccactctccacctcgtgcttcgcctcaggggtggcatgcaaatctttgtcaagactttgactggcaagaccatcaccctcgaggtcgaatcctcggacaccattgataatgtcaaggccaagatccaggacaaggagggtatccctccagatcagcag

SEQ ID NO: 109950 - DNA, 262 bp, Glycine max
agctctatacatcacagcgtttggagctgcagggataaggccatgcgtgtcttcttttggagcagaccagtttgatgagagaagcaaaaactagtttgcacaccttgacagattcttcaacatcttctatctgtcgtgaccataggtgcaattgtggccttcacagtggtggtgtacgtgtagatgaaatttggatggggatctgcatttgggtcactggcaattgcaatgggaatatctaacatggtcttcttcataggca

SEQ ID NO: 109951 - DNA, 264 bp, Glycine max
tgaagatgggggctggtggccgaactgctgttcctcctgccaacaggaagtcagaggctgaccctttgaagcgggtaccatttgaaaaacctcagtttagtctcagccagattaagaaggccattccacctcactcgttccagcgctctgttctccgctcattctcctatgttgtttatgacctcaccatagccttctgcctctattatgttgccacccattacttccacctccttcccggtcctctctctttcgtggcatggc

SEQ ID NO: 109952 - DNA, 261 bp, Glycine max
gaacttttaaacaagaacttgataaagggtaatattcttctttgtggatattccttcaactttgttgttggctctgcatcaatcaagaaagtctcagaaacagcaaaggcccttggtgcagttggatttgttcttagtgttgaaaacaattccccaggaacaaaatttgatccagtccctgttggtcttcctgggattctcatcacagatgtcagcaattctaaggaacttatagattattataatatcactacaccaaga

SEQ ID NO: 109953 - DNA, 262 bp, Glycine max
caaagacattaaggagttcaaagaaagcactaaggttgacaaggtggttgtcctgtggacagccaacacagagaggtacagcaacgtagttgtgaggactaaacgacaccatggaaaacctctttgcttccttggaaggaatgaggctgagatttccccttccaccttgtatgccattgcttgtgttatggaaaatgttcctttcatcaatggaagccctcagaacacctttgtcccaggactcattgatctggccatcaaa

SEQ ID NO: 109954 - DNA, 263 bp, Glycine max
cactctcatagctgtagcggcgacactaagatcggagaaagaatggcgaaaacgacgtcgttgctgctctttacactgctcctcttcggaaccctagctctcatccaggcgaagaaatcgaaggaggatttgaaggaggtgacccacaaggtttactttgatgttgagattaatggaaaagaagcaggtcgtattgtaatgggtctttatgggaaggctgttccaaaaactgcagaaaacttccgagcactttgcacagggga

SEQ ID NO: 109955 - DNA, 263 bp, Glycine max
cacttgtccattctccaaaacaaaatgaagagcctcctcttctctctcttcctcttcctcttcttagcctcctccgccgtcgccaccgtccccgcccacaacatcacccgcatgctggccgcacaccccggcttctcaccttcaaccactacctctccgtcacccacctggccgaagagatcaaccgccgccagaccatcaccgtcctggccctcgacaatgccgccatgtcctccctcctcgacaagcacctctccctcccc

SEQ ID NO: 109956 - DNA, 266 bp, Glycine max
aaggcagaaagcaagctcatcctagagttttaaaaatggcagcagcctcctccatggctctctcttccccatccttggctggcaaggccgtgaagctgggcccatcagcccccgaagtcgggagggtcagcatgaggaagaccgtcaccaagcaggcctcctccggaagcccatggtacggcccagaccgcgtcaagtacttgggcccattctctggcgagcccccgtcctacctcactggcgagttcccaggtgactacggctgg

SEQ ID NO: 109957 - DNA, 259 bp, Glycine max
gccttggcaactgaaccaccaactgattccctgatggatcaaagtccaaagggtcgaagagaacctcttgtatcaaatattatgtggaggaatctgctgatacaggctatgtaccaagtgtccgtcttgctttacttaatttccgaggtgtgagcttactggctttgagggatgagcccaaccgccctgcaatcaaagtgaagaactctctgatatttaatgcatttgttctttgtcaagtctttaatgaatttaatgc

SEQ ID NO: 109958 - DNA, 257 bp, Glycine max
gcgtgatgctcttgctgtggtagcagaggttgcccaccaagtcaaaccggaagaaattgttggcatagctggcaaactttctgatgctgagtccatgattgcactaaaagatttcataaataggatggggtcaatgatgtatggggtgaaggcattggtgtaaatactaatgctgatttcagatcaggatatattatgaatactagcattgctggtcttgaaaaagcggatgcgttcctgttggttggcacccagcc

SEQ ID NO: 109959 - DNA, 261 bp, Glycine max
tggcgttagaagaaggaaaagcttttgagcgtatgggttctaggcggcttgctggcttgcttgtatctctttgggtaagaaagaatcttagaacacatgttggggacattgatgctggggccgtcccgtgtggtttggacgtgcaattggtaataagggaggagtgggtttgagaatcagagtgtatgacaggataatttgctttgtgaattgtcacttggccgcacacttggaagcagttaatcggcggaatgctgattt

SEQ ID NO: 109960 - DNA, 255 bp, Glycine max
ggcttgtagactcaaagggtttgattgttggttcaagaaaggcttcacttcaacacttcaagcagccttaggctcatgagcatgagcctgttggcagtctcctagaagctgttaaggtaatcaagcctacagtttgattggatcatcaggagtgggaaaaacatttacaaaggaagtaattgaggctgtgacttctatcaatgaaaaacctcttgttttggccctctccaatccaacttcacagtctgagtgtac

SEQ ID NO: 109961 - DNA, 258 bp, Glycine max
cagaaatggaaggagagaaagaaaatcccgatggtaacgccgctttggtgaactccttctgcgaaatcacttcctcttccaaggaagaagctcttttctttttggagagccacaatttcgacctagacgctgcgtttcgactttcctcgacaacgccaacaaccccctcatccctctcaacgacgaccttgccattcccaaccccaacgccgtttcccctccctcagattctcactctccggacttcaacccttctcg

SEQ ID NO: 109962 - DNA, 258 bp, Glycine max
aagagatgtacaatcaatggcctttctttagggtcacacttgatttggtggaaatggtgtttgccaaaggagatccgaaaattgccgctctgaatgatagactccttgtttcaaaggatctgtggccgtttgcggatcaattgaggaacaaatatgaagaaactaggaaactcctacttcaggtggctggacacaaggaaattcttgaaggggacccttacttgaagcaaagactcaggcttcgtcatgctcccatta

SEQ ID NO: 109963 - DNA, 259 bp, Glycine max
tatatctatagccaaagcaggaataacaactgttcttaattcaaggacttcagttcttgctgctgccaaccctccatcaggccgatacgatgatcttaagactgcacaggataacattgacttgcagacaactattctttctaggtttgatttaattttcatcgtgaaagacgtcagaatgtacagtcaagacaagataatagctaatcatatcataaaggtccataaatcagctggtggaaggatgggagagagcaga

SEQ ID NO: 109964 - DNA, 262 bp, Glycine max
ccgtgaagtcattgctattctgatgcagcgacatgtccttgttgatggcaaagtcaggactgacaaaacataccctgctggttttatggatgttgtatcaatccctaaaacaaatgagaacttccgcctgctgtatgacaccaaaggtcgattccgtctccactcagtcagggatgacgaggctaagttcaagctttgcaaagttcgctcagtgcagtttgggcaaaagggtatcccatacttaaacacctacgacggtcgc

SEQ ID NO: 109965 - DNA, 258 bp, Glycine max
aaaacactcataacacaaagcacaaagcaaagctcatccttgagttaaaaaatggcagcagcttcttccatggctctctcatccccatccttggctggcaaggccgtgaagctgggcccatcagccccagaagtggaagggtgagcatgaggaagaccgtcaccaagcaggtctcctcaggaagcccatggtacggcccagaccgagtcaagtacttgggcccattctctggcgagcccccgtcctacctaaccggtg

SEQ ID NO: 109966 - DNA, 259 bp, Glycine max
gtttatcgtgaggagaatatgaagttgtttgttttctttgttgctgcagtagttttggtagcatggccatgccatggcgcaggctaccaaaggttccctctccgaatgaaaactggctatggtgagcgttctcggaggtaaaatgcgcaagttttaggcttgctgtggaagcacacaacatccgagcctttaaagccattcctgaagagtgcgttgaaccaacaaaggactacattaatggcgaacaatttagatcaga

SEQ ID NO: 109967 - DNA, 255 bp, Glycine max
ggattctacccgccgctcgatgggaattgcgcttcaaggcgtctcgtagggctaatccgcctcacgagggtcaccaacggcacgtgcctttggggggccgaggccccctatctctggtcggcaaacggacgcgggcgcacgcgtcgcttctagcccggattctgacttagaggcgttcagtcattatccaacgcacggtagcttcgcgccaatggcttttcaaccaagcgcgatgatcaattgtgcgaatcaacg

SEQ ID NO: 109968 - DNA, 258 bp, Glycine max
ctgcctaaaaggattgaaagatgggtcaagcactaggttgctatcaagttgatcagtcaaatgtggctatcaaggagcattttggaaaatttgatgatgtcctagaacctggatgtcattgcctgccttggttcttgggtaccagattgctggtagtttgtcactgcgtgtgcagcaacttgatgttcgatgtgagacgaaaaccaaggacaatgtctttgtcactgtggttgcatctgtgcaataccgagctgtgtc

SEQ ID NO: 109969 - DNA, 254 bp, Glycine max
gtgaaccctctctataaaagcgcttccttctcatttggaacctattccattctctaaaccctaaacgactctatctctcttcgttttgttcttccttgcgctcctcctcgttcgttcgttctccctcgcgagatcggcaatggcggagaccgagacgtttgctttccaggctgagatcaaccagctcctcagtctcatcatcaacaccttctactccaacaaggaaatcttccttcgtgaactcatcagcaacg

SEQ ID NO: 109970 - DNA, 256 bp, Glycine max
aaacgcctttattctccgtttccgtttccttcccggaattcgatttttcatctctgaaaatgagagagtgcatctcgatccacattggtcaggccggtatccaggtcggaaatgcttgctgggagctctactgtcttgagcacggcatcgggcccgatgggcaaatgccaagtgacaaaacagttggcggaggtgatgatgctttcaacactttcttcagtgagactggtgctggaaagcacgtgccacgtgccgt

SEQ ID NO: 109971 - DNA, 254 bp, Glycine max
gtgaaaggaaagcaaacatgcttgatcaggtccaacaccctacaatcatggacaaggttgctggtcagctccatctccgttctggtgtttctggtattaggagttatgaaggagcctactgccaccccaaatgtaccaaagaccctcttttgggaattactcgaatgctgcattgcagtatcctgtgatgccctcatgcaaagctactatggatttgtctgctgctgcaacaactgcctcccccgtctttggtt

SEQ ID NO: 109972 - DNA, 252 bp, Glycine max
gcgcagtcttacggccccataatatcggtttggttcggttcgaccctaaacgtcatcgtttcgaactcggagctggcgaaggaggtgctgaaggagcacgatcagctgctggcggaccgccaccggagcggtcggcggcgaagttcagccgcgacgggaaggatctaatttgggccgattatgggccgcactacgtgaaggtgaggaaggtttgcacgctcgagcttttctcgccgaagcgcctcgaggccc

SEQ ID NO: 109973 - DNA, 251 bp, Glycine max
cactcgcgggcaaaaagaaagaatcccaggcgaggagaaagatggaggggaaggagcaggatgtgtcgttgggagcgaacaagttccccgagagacagccgattgggacggcggcgcagagccaagacgaggcaaggactaccaggagccggcgccggcgccgctggttgacccgacggagtttacgtcatggtcgttttacagagcagggatagcagagtttgtggccacttttctgtttctctacatca

SEQ ID NO: 109974 - DNA, 252 bp, Glycine max
gtgagagaaagagaaatggcaacaagcgaagaagtggttgcggcggcgccggagcagccgcgccggaggcagggttgaagcacaaactggagagaaaatggacgttttggtgcgacaaccaatccaaaccaagcaaggcgctgcttggggaacctctcttcgcaaggtctacaccttcgacaccgttgaagagttctggtgtttgtatgatcaggtattcaagcccagcaagttgcaaatcaatgccgattt

SEQ ID NO: 109975 - DNA, 258 bp, Glycine max
ccaccatcaatactattttcttgtcgttgagaagcttcgcgaacgaaagcaaagaaccctagaccgtcacagaaccattccatagccatgtctggtgttggccctctttctcaggattgggaacctgtcgtcctccgcaagaaggctcccaccgccgccgccaagaaggacgagaaagccgtcaacgccgcccgccgctctggcgccgaaatcgaaaccctaaaaaagtataatgctgggacaaacaaagcagcatct

SEQ ID NO: 109976 - DNA, 252 bp, Glycine max
gtgctctgctcgtgcctctagggttatcatatctccatttccatttcctctctctcagtttccaagaatcttaagctatgggaaagtcttacccaaccgtgagcgctgattaccagaaggccgttgagaaggcgaagaagaagctcagaggcttcatcgctgagaagagatgcgctcctctaatgctccgtttggcatggcactctgctggaacttacgacgtgagctcgaagaccggtggtcccttcggaa

SEQ ID NO: 109977 - DNA, 257 bp, Glycine max
ctcgagccgcaatactgggccgttgggctgtcttccaaaaatactcgcactggctcagaacgaaggatctagattcattgggatgtctttctagttataactctgcagcaagattgtttaatgaagagctgcttcattcaactcagaaactaagatctgaactgaaagatgctactttagtctatgttgatatttataccattaagtatgacctcatcacaaatgccgcgaaatatggtttctcgaatccgttgatg

SEQ ID NO: 109978 - DNA, 251 bp, Glycine max
ctcgttcttcctttgccttctccttcttcttcaaccctttttctttctctttctttcgcactttcattctctgaaaaaatctaagtccctttggtcttcatcttctgttctgatccatgtatggcttctaacgcatcttgaaggagctcaaggatttgcagaaggatcctcctacctcatgcagtgcaggccctgtggctgaggacatgtttcactggcaagccacaatcatgggacctgctgatagccca

SEQ ID NO: 109979 - DNA, 251 bp, Glycine max
ctcttggcttcaagattgtattcttgtcaggaagatatcttgacaaaatggccgtaacagaagcaaacctaaagaaggctggcttccacacatgggagcagttaattctcaaggatccacatcttatcactccaaatgcactttcatacaaatcagcaatgagagagaatctgttgaggcagggatacagaattgttggaatcattggagaccaatggagcgatctgcttggagaccacagaggcgaaagc

SEQ ID NO: 109980 - DNA, 253 bp, Glycine max
ctgcatcggaagaaaccctagccactctcccggcgtcacgatgcagatcttcgtgaaaaccctaacgggtaaaacgatcacgttggaggtggagtcttcggacaccttcgacaacgtgaaggccaaatccaggacaaggaaggcatccctccggaccagcagcgcctcatcttcgccgggaagcagctggaggacggccgcaccctcgccgactacaacatccagaaggagtccacgcttcacctcgtcctcc

SEQ ID NO: 109981 - DNA, 250 bp, Glycine max
aaccgatattggggtcacatttgatgatattggagctttagaaaatgtgaaggacaccttgaaggaattggttatgcttcctcttcagaggcctgagttgttttgcaaaggacagctgaccaagcttgcaagggaatattgctttttgggccccctggcacaggaaaaacaatgcttgcaaaggctgtagcaactgaagctggagcaaatttcattaacatttcaatgtccagcattacttcaaagtggt

SEQ ID NO: 109982 - DNA, 253 bp, Glycine max
aatctggtttgcaaaaagacagagggttaattgtggagtattttggaaggatgtcttacgttgctcataacgttaatcagccccaagagaaagatttgttagagggaaatttttcctttgatattaatctcgctctagattggaaaaagtttcctctacaaaagcacaatttgttagtggaaaaaccttcaaatatgatataattggtgctggttcacattcttcagaagattttcctgaaaaggaagatcaa

SEQ ID NO: 109983 - DNA, 252 bp, Glycine max
gtgaagctgggcccatcagcccccgaagtcgggagggtcagcatgaggaagaccgtcaccaagcaggcctcctccggaagcccatggtacggcccagaccgcgtcaagtacttgggcccattctctggcgagcccccgtcctacctcactggcgagttcccaggtgactacggctgggacactgctgggctttcggccgacccagaaaccttcgccagaaaccgtgagctcgaagtgatccactccaggtgg

SEQ ID NO: 109984 - DNA, 235 bp, Glycine max
actagaaacagtgtgatgaaaatgaaggtccttgttttcttcgttgctacaattttggtagcatggcaatgccatgcgtacgatatgttccctctccgaatgaacactggctatggtgcccgtactccggaggtgaaatgcgcaagttggaggcttgctgtggaagcacacaacatctttggctttgagaccattcctgaagagtgcgttgaagcaacaaaggaatacatccatg

SEQ ID NO: 109985 - DNA, 278 bp, Glycine max
gccgtagcagcagcggaagctctagcttgggcagcgaatcacaatggcgagaggattgaagaagcatttgaagaggcttaatgccccaaagcattggatgcttgacaaactgggtggtgcatttgctcctaagccctcatctggaccacacaaatccagggaatgcctgccactcatactcattttgcgaaaccggctgaagtatgctctgacataccgtgaagtcattgctattctgatgcagcgacatgtccttgttgatggcaaagtcaggacag

SEQ ID NO: 109986 - DNA, 278 bp, Glycine max
gcaagcagggaaggggagtattattatttgatacgaaatacaaagctcttcaaaacccaaacaacaaccgtactgcacaactccaccactgtgcaatggccgacgaggaacctgttgatcagaagagatatcttgaagagtcttgcaaaccaaaatgtgtaaaaccattactagaataccaggcgtgcattaaaaggatacatggtgatgaatctgggcagaaacactgcactggacaatattttgattattggtcttgtattgacaaatgtgttgca

SEQ ID NO: 109987 - DNA, 275 bp, Glycine max
gcgaagaagaagctcagaggcttcatcgctgagaagagatgcgctcctctaatgctccgtttggcatggcactctgctggaacttacgacgtgagctcgaagaccggtggtcccttcggaaccataaagcacccctccgaactcgctcacggcgctaacaacggtcttgacatcgctgttaggcttttggagccactcaaagcggagtttcctattttgagctacgccgatttctaccagttggctggcgttgttgccgttgaggtcaccggtgg

SEQ ID NO: 109988 - DNA, 273 bp, Glycine max
cgcaaagttgttgagcttcaagaagagcttgatattgatgttcttgttcatggagaaccagagagaaatgatatggttgagtacttcggtgaacaattgtcaggctttgccttcaccgttaatgggtgggtgcaatcctatggttcccgttgcgtgaagccaccgatcatctatggtgatgtgagccgcccaaagccaatgaccgtcttctggtcatctctggctcagagctttaccaagcgcccaatgaagggaatgcttaccggtcctgtt

SEQ ID NO: 109989 - DNA, 270 bp, Glycine max
atacaaccttcctgaccactatgaatgggttacttgtgacataaactctgaggagacgtgtgatgaggtatacaaccttcttgctcataattatgttgaggatgatgagaatatgtttcgatttaactactcaaaggaatttctgcgctgggctctgcaacctccgggttatttcaagagttggcatattggtgtccgtgttaaaagttccaagaagatggttgcctttataacaggtattcctgctagaatccgagttcgtgatgaggt

SEQ ID NO: 109990 - DNA, 278 bp, Glycine max
gcagacttaacaacagcacaaagcgggttactgtctgttcaagctaccatctctctctctctttcttagtgcctccttgcctgaagttaaaatggcccaagaaactttcctattcacatctgaatcagtgaacgaggggcaccctgacaagctctgtgaccagatctccgatgctgtgctcgatgcatgcttggagcaggaccctgacagcaaggttgcctgtgaaacctgcaccaagaccaacatggtgatggttttcggagagatcacaacaaggc

SEQ ID NO: 109991 - DNA, 269 bp, Glycine max
aactgacacagcccatcacacacacatactaagaagaccaattcttctacaatgcatctcctccttctggaaaagaccctcataggtctcttcctcgctgcggtggtcgccttcgccgtctccaccctccgcggccggtaattcaagctcccaccgggcccactccccgtcccaatcttcggcaactggctccaagtcggcgacgacctcaaccaccgggacctcaacgatttgggcaaagaatacggtgacatcttcctcctccgcat

SEQ ID NO: 109992 - DNA, 271 bp, Glycine max
ttcttccctaaggagctacgagagagaaagaagactacgagttgccattattcatggaatggctagaatggcggctctcatggcttccacttacaaggcatatttgggtgttggtcttggccctttagaatttttgactaagtttcgtataccacatcctggaagagttggaggaaggttttttgttgacatcatgatgccttctatgttgagctgggtcttaggtggcaatagcgacaaacttgagggcagaccactaagttgcaggctc

SEQ ID NO: 109993 - DNA, 270 bp, Glycine max
attgagtttaatagtcgtgctggagctgagagaattctccaaacatataatggggctattatgccgaatggggggcagagtttcaggttgaattgggcaacttttagtgccggtgagaggtcgcgtcaagatgattctcctgattacaccatatttgttggtgacttggctgcagatgttactgattatcttcttcaggagacattcagggctcgttacaactcggtgaagggtgcaaaagttgtcattgataggctaactggccgtacc

SEQ ID NO: 109994 - DNA, 276 bp, Glycine max
gagtcagctcgagcggtttagctgagaagtattcaaagacaagcataacaaggaccaattcatgcgatgttctactaggagcatgttatgcacatggagatttaggaaccgggagtagtgtgggagaatatctaaagaacttggagcctgaaaaggaggttggttatgtattgttgtcaaatttgtattgtgcaagtgggaagtggagggaagcagagatggtccggaaggcaatgctggatcaaggggtgaaaaaagtacctggtagtagttgga

SEQ ID NO: 109995 - DNA, 270 bp, Glycine max
tcgagataactagaaacagtgtgatgaaaatgaaggtccttgttttcttcgttgctacaattttggtagcatggcaatgccatgcgtacgatatgttccctctccgaatgaacactggctatgtcgcccgtactccggaggtgaaatgcgcaagttggaggcttgctgtggaagcacacaacatctttggctttgagaccattcctgaagagtgcgttgaagcaacaaaggaatacatccatggcgaacaatatagatcagactccaaaa

SEQ ID NO: 109996 - DNA, 273 bp, Glycine max
ctcgagccgtgttgatcgagataactagaaacagtgtgatgaaaatgaaggtccttgttttcttcgttgctacaattttggtagcatggcaatgccatgcgtacgatatgttccctctccgaatgaacactggctatggtgcccgtactccggaggtgaaatgcgcaagttggaggcttgctgtggaagcacacaacatctttggctttgagaccattcctgaagagtgcgttgaagcaacaaaggaatacatccatggcgaacaatatagat

SEQ ID NO: 109997 - DNA, 272 bp, Glycine max
cccatacctactttcagctcctaagagcacgcatcactgttgcacttcttactcgttctccctctttttttacttcttcttcttcttcgctaaaccccccctttatttttcctatctcactaacatcgatgggagacgagaataagaccaagtcccctgcttccggcgtgtggtccaccatcaagcctttcgtcaatggcggagctccggcatgctcgccacctgcgtcattcaacccatcgatatgatcaaggtgaggattcaacttgggc

SEQ ID NO: 109998 - DNA, 267 bp, Glycine max
ctctgtgtatttccctacctctcccttcaagatgcagatcttcgtcacgaccctcaccggcaagaccatcacccttgaggtggaaagctctgacaccatcgacaacgtcaaggccaagatccaggacaaggaaggaatccccccggaccagcaacgtctcattttcgccggaaagcaacttgaggacggccgtacccttgctgactacaacattcagaaggagagtactcttcacctcgtcctccgtctccgtggtggcatgcagat

SEQ ID NO: 109999 - DNA, 286 bp, Glycine max
ggcatggctatcttcacatttgatcaaccctcagttttcgattcttcgggtgaaataggcgatatcactggattttatatgattgatgaggaaggggtccttcagtcagttgatgtaagtgctaaatttgtcaatgggaagccctcaataattgaagccaagtatgtaatgcggagtccacgggactgggatagattcatgagattcatggagcgatactcaaatgcaaatggtttgcaattcatcaaaaaatgagttaatgtgctaactctgcgcttctattctt

SEQ ID NO: 110000 - DNA, 281 bp, Glycine max
cacagcacaagacttaagtagaaaagggaaggtgagtttgttgggcatagcacctcgttctcgcatttttcgaaacacccagaaggcttcgaggggggaatcgcttgcggcgtagctactaatgagaatgttccacgaaatgggtgatggggtggcggcgtggtggacgaatgatcgcgcgtggcgaaggttcttggagggagagagggagcaaaagtagacgagttcggagagcacgcgggtgtcttgatagagaccagagacgtgaacttgtgcctgaa

SEQ ID NO: 110001 - DNA, 278 bp, Glycine max
cgattggattggcattaggttgatctgaaatacgcaattgacatggcgagcgcgatggtagaggacgcgaacttcgaagatgaccaactagccaatatgaccaccgacgacatcgtcagagcttctcgtcttctcgacaacgagattcgcatcctcaaggaagagttgcagaggaccaatttggaattggaatcgtacaaggacaagatcaaggagaatcaggagaagattaagctcaataagcagttgccctacctcgttggcaacattgttgagat

SEQ ID NO: 110002 - DNA, 271 bp, Glycine max
cgaggagaagcagaaggagcaaaagcaatggcgccgaagaagccgagaaccacgacaaggaaccctgatttggttagggggattggcaagtattcgaggtcgcagatgtaccacaagaggggcatctgggccatcaaggccaaaaacggtggcgttttgccccgccacgatcccaagcccaagcccgaggccccggcccagaagccgcccaagttctaccccgcggacgatgttaagaagcccctcgtcaacaagcacaagcccaaacccg

SEQ ID NO: 110003 - DNA, 265 bp, Glycine max
  unsure (1)..(265): unsure at all n locations
gcgtgtccttgcagcatgctacaaggctttgaatgatcaccacgtccttcttgagggtacctattgaagccaaacatggtcacccccggatccaattctgctaaggtttcccctcaggtggttgcggagacactgttagagcccttcagagaaccgtgcctgctgcagttcctgctatcgttttcttgtctggtgggcagagtgaggaggaggcatccgttaacctcaatgccattaaccaggtcaatgganagaagccatggtc

SEQ ID NO: 110004 - DNA, 269 bp, Glycine max
gcgtgtccttgcagcatgctacaaggctttgaatgatcaccacgtccttcttgagggtaccctattgaagccaaacatggtcacccccggatccaatacttctaaggtttcccctcaggtggttgcggacacactgttgtgagcccttcagagaaccgtgcctgctgcagttcctgctatcgttttcttgtctggtgggcagagtgaggaggaggcatccgttaacctcaatgccattaaccaggtcaatggaaagaagccatggtcat

SEQ ID NO: 110005 - DNA, 248 bp, Glycine max
ggtctgacctcatttcctgattacctggtgttacatatgcggagatttgttatggaggcagattgggtaccaaaaaagcttgctgtgtacattgatgttcctgatatcatagatatcagtcacatgcgcagaaaggtcagcagtctggggaacagctattacctgatggtgttcctgaagaggaagattcaaacacaatttcggccaacgatgaaattgttgcccagctggtttccatgggctttaac

SEQ ID NO: 110006 - DNA, 275 bp, Glycine max
gacaaagtgcatcaactattctcaaaggttccactttacaacaagatttcaaagcaatacgagcttgactttagagataataaaggaaaggcaggaggaggatttagaatccaaagatcagtaaaaaatttccagctgactttagaggagaatgggaggcaaacgatcctgcagctagggagggtggaaaagtcaaaattcgttatggactacagctatcctttgacaggctaccaggcgttttgcatatgtttggcttccatggatgcaaaact

SEQ ID NO: 110007 - DNA, 275 bp, Glycine max
agagagtgaggaattatctttgattcgtgctcaattagttcaaattgagaagcagcagtctagtctgcttgatcttgtacagaaattcatggggagctctgaaaatggaatgcgtactttagagactcgtgtgcatggccttgagttggcattggatgagatctcttatgatttggctgtatcaagtggaaggataactaagtttgatgctcctaagcatacttgttgcatgctgcctggtgctgaatttttaagctccaaattctggaagaaaa

SEQ ID NO: 110008 - DNA, 271 bp, Glycine max
gtcgaaattgatatagaggaagatccagaaatagctgaagcagctggaataatgggtactccatgtgtgcagtattttaaaaacaaggagatgctcaagactgtctcaggagtcaaaatgaagagagaatacagagaattcattgaagcaaacaaataaaaaaaattcgagggtgatacccgaattctgtgattcaattttgttttccattttagccagctgaatagcgctgtcaattttgacaactattccttgaactaaacagcaactt

SEQ ID NO: 110009 - DNA, 264 bp, Glycine max
ggcacaaaccaagctcatcctagtgttttaaaaatggcagcagcctcctccatggctctctcttccccatccttggctgggcaggccgtgaagctgggcccatcagcccccgaagtcgggagggtcagcatgaggaagaccgtcaccaagcaggcctcctccggaagcccatggtacggcccagaccgcgtcaagtacttgggcccattctctggcgagcccccgtcctacctcactggcgagttcccaggtgactacggctgg

SEQ ID NO: 110010 - DNA, 270 bp, Glycine max
gtggatcgctagggactacaaggggctacaagataagatcaatttggtccctattaaccttcaagacaggccagcttggtataaggagaaagtctaccctgaaaataaggtgccatccttggagcacaatggcaaggtgttgggagaaagtcttgatttgatcaaatatgtagatgcaaactttgaagggacacctttgtttcccagtgatcctgccaagaaagagttcggtgagcaattgatatcccatgttgatacattcagcaaaga

SEQ ID NO: 110011 - DNA, 277 bp, Glycine max
caattattgagcattgaaggagtctctctctttttcactcactcactctgcactcaccactgccacacttcaatcgcactaatggctgtcaccttctcagatctacacaccgaagagggcatcaaatccctcgatcaattcctttctgggaaaacctatatatctggggatcagttgacaaaggatgatattaaagtgtatgcagctgttgttgaaaagccaggggacacttttcctaatgctgccaagtggaagatggctgtctcttctcaacttg

SEQ ID NO: 110012 - DNA, 273 bp, Glycine max
gcaggatgtgtcgttgggagcgaacaagttccccgagagacagccgattgggacggcggcgcagagccaagacgacggcaaggactaccaggagccggcgccggcgccgctggttgacccgacggagtttacgtcatggtcgttttacagagcagggatagcagagtttgtggccacttttctgtttctctacatcaccgtcttaaccgttatgggagtcgccggggctaagtctaagtgtagtaccgttgggattcaaggaatcgcttgggc

SEQ ID NO: 110013 - DNA, 281 bp, Glycine max
aactgacgcacaccatcacacacacatactaaggagcctcaattcttctacaatggatctcctccttctggaaaagaccctcataggtctcttcctcgctgcggtggtcgccctcgccgtctccaccctccgcggtcggtaattcaagctcccaccgggcccactccccgtcccaatcttcggcaactggctccaagtcggcgacgacctcaaccaccgcgacctcaccgatttggccaaaaaattcggtgacatcttcctcctccgcatggggagcgcaa

SEQ ID NO: 110014 - DNA, 261 bp, Glycine max
cggggcgatcggagaggaatggctacgaaggcaagaatcgcagcctacaagatctgctggaagctcggttgcttcgactccgacatcctcgccgccatggacgaggccgtctctgacggcgtccacgtcatctcactctccgtcggctcttccggctacgcgcctcagttctaccgcgactcgatcgccgtgggagcgttcgtcgctgccaaacacaacgttctcgtctcgtgctccgccggaaactctggacctggtcct

SEQ ID NO: 110015 - DNA, 264 bp, Glycine max
gcgaaaatgagagagtgcatctcgatccacattggtcaggctgttatccaggtcggaaatgcttgctgggagctctactgcctcgagcacggcatcgggcccgatgggcaaatgccaagtgacaagacagttggcggtggtgatgatgctttcaatactttcttcagcgagactggtgctggaaagcacgtgccacgtgcagtgtttgtagatcttgagcccactgttattgatgaggtgagaagcggtacttaccgccagctt

SEQ ID NO: 110016 - DNA, 266 bp, Glycine max
tggggatcagaggattgccatatatgactacatggagaatggaaacttgcaaaatttgctttatgacttgccacttggagtactacaaaggccagatgattggagcacagatacatgggaagaagaagatgacagtaacgggattcggaatgcaggatcggaaagagtgctcacaacttggagatttcgccataaaatcgcactcgggactgcccgagcattggcatttctgcatcatggatgctcaccaccgatcattcacagag

SEQ ID NO: 110017 - DNA, 266 bp, Glycine max
tgacattgttaatgagggaagatattctttctgaagatgttgctcgcttctacattgctgaaagcattcttgctattcactcaatacatcaacacaactatgtacatagggatattaaaccagataacctgatactagataaaaatggccatttgaagctttcagactttggcttatgtaagcctcttgatgataagtatttcatcaattttactggaaaatgatgatcttaccagtcaagaatccactagtgaaactgaaggata

SEQ ID NO: 110018 - DNA, 267 bp, Glycine max
aatccattgactagaaatcccatattttccccccacattaactcattcaacccctctttctaaaaggcctcaaggatacactccggacttaattacgttattttgttagggtcaccgtttcgagatattctaaacttgtactgaaaaatatggagggaaaagaagaggacgtaagagttggagccaacaggtacggagagaggcagccaatagggaccgctgctcaggctaaagactacagagagccaccgtcggcgcctctcttcg

SEQ ID NO: 110019 - DNA, 274 bp, Glycine max
gacagcttcaatgaaccaagcaagaagtgtcaggcaaaatacatctgctagtggtgctcgtcctaatcctcaagggtcctttcattatggctccatcaatataactgatacttatgtgtttaaggttacatccctggtgccaatcaatggtacaaatcgagctactattaatgggatctcatttctcaagcctgaggttccattccggcttgctgacaagcatcaattaagaggaacatataagcttgattttcccagcaagccaatgaacaga

SEQ ID NO: 110020 - DNA, 269 bp, Glycine max
aagatagtgaatctggacgaccacattgcgctggcctgcgcggggctgaaggccgacgcacgtgtgctcataaacagggcacgtgtggagtgccagagtcacaggctcaccgtggaggatcccgtcacggttgagtacataacgcggtacattgcggggctccagcagaagtacacgcagagcggcggcgtgaggccctttgggctttcgactctgattgtcgggtttgatccctacactcactcgccctccctctaccagacggatcc

SEQ ID NO: 110021 - DNA, 267 bp, Glycine max
ccatgactttcaagcgcaggaatggaggtcgcaacaaacacggccgcggccacgtcaagttcattcgatgctccaactgcggcaaatgctgccctaaggacaaggctatcaagaggtttctggtgaggaacattgttgaacaggctgcagtcagagatgtgcaggaggcttgtgtctacgaacaatacacgcttccgaagctgtatgtgaagatgcagtattgtgtttcctgtgctatccactctcatgttgtgagggttcgatccc

SEQ ID NO: 110022 - DNA, 266 bp, Glycine max
cactgccgtcttggctctctctctctgaacccttcagtgagacacaacacaagtcatagtccattgggcatgcctgtgtatctttgggggttatatagggtttttggctgagcagcaatttgttgttgttgtaatcaatttttgaagaaaagatggggaagacagcagcttccaatcctgctttgcaagtgtctgtttcatttggtagatttgagaatgattccttgtcttgggagaaatggtctgctttctccccaaataagtac

SEQ ID NO: 110023 - DNA, 268 bp, Glycine max
cagagagtgatttcagtgagtgatcggtgttcacttgatctcatcataatcgtcagcgtcaattgaagaagatgccgatcagaaacatcgccgtcggaaggcctgaagaggcgactcaccccgacacgttgaaggcggctttggctgagttcatctcaaccttcatcttcgtgttcgccggctcaggctccggcatcgcctacaacaagctcaccgacaacggcgctgacacccctgccggcctcatctccgactccatcgcccatgc

SEQ ID NO: 110024 - DNA, 265 bp, Glycine max
  unsure (1)..(265): unsure at all n locations
caacactctctcttctcgctcttggcttttcgctcttcactcactctcattcattcatttccacacaacatacgactttgaancgngnggggtaacacgcccttggcgagggnggancccgacctccangacctcatcgagaaggagaagcgccgacaatgccgcggatnagacgctcatcgcctccgagaacttcacctccttcgccgtcatcgaggccctcggcagcgctctcacgaacaaatactccgatggcatgccgggc

SEQ ID NO: 110025 - DNA, 253 bp, Glycine max
tgctgatgagtcaacagggacaattggcaagcgtttggccagcatcagtgtagagaatgttgaatccaacaggcgtgctcttagggagctgcttttcaccgctcccggtgctcgtaaatatctcagtggtgtcatcctctttaaggaaactctctaccagagcacagctgcaggcaagccctttgtggaagtcttgaatgaggctggtgttcttcctggcatcaaggtttacagggcacagtttcgcttgctg

SEQ ID NO: 110026 - DNA, 256 bp, Glycine max
tgcccaagcaccttgatgagaaggtggctgcacttcacctgggcaaacttggcgctaagctgacccagcttagcaagtcccaggctgattacatcagtgtgcctgttgagggtccatacaagcctgctcactacaggtactaagtgattgagatgatcaactgaaaagtgagtgagggtgagacaaaaatcggttttatcaatcggatttgattgtttaattttcctttttttgatttttggtgttagacttttca

SEQ ID NO: 110027 - DNA, 258 bp, Glycine max
gcacgccggtgtacagatcggcaacgcctgttgggagctttactgcctggaacatggcatccagcctgatggtcagatgccctcagacaagaccattggaggtggtgacgacagcttcaacacatttgtcagtgagactggcgccgggacacacgtccccagggccgtctttgttgacttagagcctcctgtagttgatgaggtccgcactggtacataccgccagcttttccaccctgaacagctgatcactggtaa

SEQ ID NO: 110028 - DNA, 261 bp, Glycine max
tcttataatctcagctcatagcattcttcttcttccaacgacaatcagtcgttgtattccaatgcggtcgtacgaagcaaacagcaagaaagtccaccggaggaaaagctccaaggaagcagctcgccaccaaggtagcacgcaagtccgctccggcgactgacggcgtgaagatgcaccaccgattcacgccagggacagtcgctctgtgggagattcgggagtaccagcagatcacggagcttctcatacggtagcttc

SEQ ID NO: 110029 - DNA, 114 bp, Glycine max
ggagtgcgcccttcagcttgtttgcctagtaccattgatgcgggtccaaacaatgagcagctgctgaatgatcaattatacattgggctaaagcaaagacgagcaactgggcag

SEQ ID NO: 110030 - DNA, 256 bp, Glycine max
gttgggctaagcagacaattgaatggatcaattataccatcataacgtccagatcatatgatgtttgaggtatggaacccactaggaatagttggtgtaatcactgctttcaactttccatgcgctgttctaggatggaatgcttgccttgctttagtctgtggtaactgtgttgtgtggaagggtgctccaacaactcctttgataactattgctgtgacagagctagtagctgaagttcttgagaggcacaaat

SEQ ID NO: 110031 - DNA, 253 bp, Glycine max
ctcgagccgcgagcggccgctcggatctagctctaacgaaagagcgagaaagcgaagaactccatggcgtcgtttcttcaatcgtttacggatccgaagaagaactggttcgccgctcagcacatgaaatccctctccaaacgcctccgcaaatatgggctccgatacgacgatttgtacgatccttactacgatctggatgtgaaggaggcgctgaatcggcttccgaaagaggtggtggacgctcgccacg

SEQ ID NO: 110032 - DNA, 257 bp, Glycine max
cgatcagtgcttcacagcattctaatacaactcactgcagcatcaaaatgcatcaagggaactctaagatactggctcagtgcaggtcctggagatttcttgctatcatcagcaggatgtccaacatctgcattctatgcagtagtcattgaccaagatatttcccaatgcaaagagggagttaaagtgattacttccaactcaccaatgaagccttctctatttgccacagccaaaaatgtgaactatcttccaaa

SEQ ID NO: 110033 - DNA, 255 bp, Glycine max
aactcaagtatgctatactaaggtgaaaaaggatggatggcagctggaacatctagtgctgtgttaaacgggtttagatctcacgtcttgtgtggaggaaagaggagccatgcccttcttgctgctaccattggagggaaagttgctgcttctgttagtcctaaaagagttattgtggcagttgctgctgcaccaaagaagtcatggatccccgctgtaaaaggtggtgggagtttcatagacccagaatggctt

SEQ ID NO: 110034 - DNA, 257 bp, Glycine max
ctcgagccgtttgtggatggccctggggctggtacacacatccacgcaggtgccaagaaagttattatcactgctcctgcaaagggtgctgatattccaacttatgttgttggtgtaaatgaaggggactacactcatcagatctctaacattatcagcaacgcttcctgcaccacaaactgtcttgctccctttgtgaagatcctggatgaagagtttggaattgtgaagggaaccatgacaaccacacattccta

SEQ ID NO: 110035 - DNA, 252 bp, Glycine max
gaacactggacaaacaggccgtaacagaagcaaacttaaagcaggctggctaccacacatgggaaaaattaattctcaaggatccacaagatccttccactccaaatgcagtttcatacaaaacagcagcgagagcgaaactgataaggcagggatacaacattgttgggatcattggagaccaatggagcgatctcctcggaggccacagaggcgaaagcaggacctttaagcttcctaatcccctgtact

SEQ ID NO: 110036 - DNA, 253 bp, Glycine max
cttccatttccaattctctgtgtagaagccatgtcaaaggctcctggtctctactctgacattggcaagaaagtatgagatctcctcttcaaggactaccacagtgaccagaagttcaccatcactacctactcacccactggagttgctataacatcctcagggaccaagaaaggtgatctttttgtggctgatgttaacacccagttgaagaacaagaacatcaccactgatatcaaattagacactaatt

SEQ ID NO: 110037 - DNA, 254 bp, Glycine max
caaagttaatgagtcaaaatgtacacatatgaagtgcacttttggtgggatatggaatggtggggggggtgatggacagaaaaacctttttgttgcctcatttttctttgaccgggcagctgaggctggttttgccaatccaaatttacccgttgtgaaggttcgtcccgtggattttgaggctgcagctaagcaagcttgtaaaacaaaacttgaagatgccaaatccacttatcaacgtgttgaggaaggga

SEQ ID NO: 110038 - DNA, 252 bp, Glycine max
cttcgctttagcaaattccaattcccaatccaaaaccctaattacgttcaaagaaccaattgtgatggcaccaaaggcagagaagaagccagcggagaagaagcccgcggaggagaagaagtcgacggtgggagacaaggctccggcggagaagaagccgaaggccggaaagaagcttcctaaggagggaggagccggcggagaaggggggaagaagaagaagaggaacacagaagagcgtggagacataca

SEQ ID NO: 110039 - DNA, 256 bp, Glycine max
ctaagatagctgaaaacgagagagcacaacaacggcaacaggatctgataccgggaactgagtgcgagtcaaccatacctaattcacaatcatatgaccgcaatttcttccctgttaatctcatagattccaataataatcaatattcacgtcaagaccagactgctcttcaacttgtctgatcataagctggcaagcgattttaaattatgcatggcacaacctttctatggtttcgtctatttgaatagctagc

SEQ ID NO: 110040 - DNA, 253 bp, Glycine max
gatgagcataagccttgcctggtttcatcttatgatgattttgaaagggagcggcagtttgaaattgatatcagaagggcaaaaggttatgaagtctcaaaaatgatggaggatggaaattgtcttttcctagctgttgcagatcaggcctatggggactctgaagtgtatgatttggtcagacagatgtgcatagattagatggagctcgagagagatcacttttctcagtttataactgaaggcttcacat

SEQ ID NO: 110041 - DNA, 253 bp, Glycine max
gtttgttgttgttgttggaagccaaaaccctagcagccggcgagaatggcagacgttgcggttgatgtatgggcggcggcggcggcggcggctgcagggcagccaaagaagagaacgttcaagaagttcagcttcaggggggcggatgtggacgcgcttctggacatgtccactgacgaactcgtgaagatgttcagtgctcgcgcacgcagaaggttccagagaggtctcaccagaaagcccatggccttga

SEQ ID NO: 110042 - DNA, 252 bp, Glycine max
tgttactggagcaagcaaagggataggatttgagactgtaaaagagctggcctcaaatggagtcaaggtggtgctcacagcaagagatgagaaaaaaggccatgaagcctttgagagattgaaagagtgtggtttctctgatttggttatttttcaccagcttgatgtcactgaatctgctagtatttcttcactagtagagtttgttaagaccaattttgggaagcttgatatattggtgaacaatgcagg

SEQ ID NO: 110043 - DNA, 250 bp, Glycine max
ctttgttgctgcattagccgctgcaggacttctattgattacttcattggtttcacttgcaatgatgctgcaatcttgtcaaagtagccatgctggaatcattgagcttcagaatataaatgatcagtacaattattgcaaggtttattctctgcatgttaagctcaataacttggaaggacataatttttgctagctctgcaaggacctggctatgaagtatatcaagggaggtcaatatgctagagac

SEQ ID NO: 110044 - DNA, 251 bp, Glycine max
cttagtcccaattttctaaggaaacacaaattttccgatcggctctgcagaggttgagtaccgttgctttctcggtgggctcgcttgggccactgacgaccatgccctcgagagagccttctctcagtacggcgaaatcgttgaaacgaagattatcaacgatcgtgagactggcagatccaggggttctggatttgtgaccttcgcctcggagcagtccatgatagatgcgatcggagcgataaatggac

SEQ ID NO: 110045 - DNA, 252 bp, Glycine max
tgagaactacgaagaaggaaatggcttccttaatgctctcctccccagctgttaccaccgacaaccgtgccggtgccggcatggttgctccattcaccggcctcaaatccatggctggcttccccacgaggaagacgatcaatgacattacctccattgctagcaccggtggcagagtactatgcatgcaggtgcggccaccacttggcaagaagacgttcgagactctttcctacttaccagacctcgatg

SEQ ID NO: 110046 - DNA, 251 bp, Glycine max
cctctttcttcctcttcctcagtagtgcgattttcgattctcttctctgcaactatgcctaaccctaaggtcttcttcgacatgaccatcggcggtcaacctgccggccgcatcgtgatggagctctacgccgacgtgactccgagcaccgccgagaacttccgcgcgctctgcaccggcgagaatggcgccgggcggagcggcaagcccctccactacaaaggctcgtccttccaccgcgtgatcccgaa

SEQ ID NO: 110047 - DNA, 250 bp, Glycine max
gcgacacgtatctacatcaataatcgcagaagcagtttccggtgcatctcatcgtcttccaaaatgaacgacgcagatgtctcgaagcaaatccagcagatggtgcgtttcatccgccaggaagctgaggagcaagccaacgagatctctgtatctgccgaagaggaattcaatatcgagaagctgcagttggttgaagccgacaagaagtagatcaggcaagaatacgaacgcaaagagcgccaagtcg

SEQ ID NO: 110048 - DNA, 252 bp, Glycine max
aatcaattaactgaatgcttagagagagaaagaggagaaggagtagtgataaggtgatcatagagcatattataagagagtgaaaactaatggaggttggcctcaagaaggagaacatggggtctgaggaaactgagttaaggcttggactgcctggaaacggaggcactgaagaagtgctcatcaggaagaggggtttctctgagactgaaactggtcatgaagatgagtctgccaccactgtggatttga

SEQ ID NO: 110049 - DNA, 253 bp, Glycine max
atttgactctcacaaaccttgcatccatccacacatggctggcatgaactctagcgtattggcctgtagctatgccatatctggtgcagcatgctccgagctcaatgggaaggtcacttccgtggcctctgttgcatcctctggctacaagttgccattgatcaaatgtgaggccagagttcccaaagccaaagaatctgaaggaaggagaggtgcccttgttctcttggcagctacccttttcatctctgca

SEQ ID NO: 110050 - DNA, 254 bp, Glycine max
cgacgccgtttgggtcctcttccacctcgccttcttctcccaatgccttccctccgcctgggcccactcggcgatcctcctcccgggtcaactcgcccgtgactcaccgcagagctgccccgcccctgaccccaacctctactacaagccagtcatctcgatcgtcagccatcccggcgacggcgcctccggccgcctcagcaacgccaccggcgcctcctacatcgccgcctcctatgtcaaattcgttgagg

SEQ ID NO: 110051 - DNA, 250 bp, Glycine max
tggagccagagatcttgcttgatggggagtctggtattgatagaacttttgaagtagcccaaaaggtctgggcagaggttttcttctacttttctgagaacaatgtcctttttgagggtattctccttaagcctagcatggttacacctggagccgagtccaaggacaaggccagtcctcagacagttgctgattacaccctcaagctccttcacaggagaattccccctgctgtccctggaattatgtt

SEQ ID NO: 110052 - DNA, 254 bp, Glycine max
cgaaagtcgaaacccgaactcacttccttatcccatcatcgctgcctcgaaaccctgagtcgccagcgcatctccgaaacctagtccagtttgcagcttcttgtgcggtttatcatgggggatagtcagtattcgttttctctcaccacatttagcccttctggcaagcttgttcagattgagcatgccttgacagctgtagtacatggacagacgtctttgggaataaaagctgcaaatggagttgtcattgc

SEQ ID NO: 110053 - DNA, 261 bp, Glycine max
caaaatttagaaacaaaaacatgttggtgaaggtgtacggtccactctatggagcccccaagagggtgctgtctgttctgattgagaaggaaattgagtataaaacagtacatattgatctcttcaagggagagaataaggaacctgagttcctaaagctgcagccatttggatcacttcctgttattcaagatggtgattatactctctatgaatctcgtgcaataatcagatactttgcagagaagtataaagaccaag

SEQ ID NO: 110054 - DNA, 259 bp, Glycine max
ccacgccagctctcccagaaggaagctgacatccagatgatgttggccgccgacgtccacctcggcatcaagaactgcgacttccaaatggaacgttacatcttcaagcgccgcaacgacgggatttacattattaaccttgggaagacgtgggagaagcttcagctagcagctagggttatagttgcaattgagaacccccaggatatcattgttcaatctgcaatgccttatgggcaaagagcggttctgaagtttg

SEQ ID NO: 110055 - DNA, 267 bp, Glycine max
gggatttcatcttttaacgaaggagacccatccactgccccgtcactgaccttgacgggccgcaagaaggagcccgatcagctccaaactgctgatgggtgggccaagttcaccggaggcttcttcttcggaggcatttcgggtgttatttgggcctacttcctcctctacgtcttggaccttcctttcttcacttgatgtagtaagaaattgttggcaaaaaatgagtgataacaagatatggaacttccccaggttggtggtttg

SEQ ID NO: 110056 - DNA, 264 bp, Glycine max
agtttgactattttcgctcctaacgatgaagcgtttaaggcgaaaggcgtacctgatttgagcaagctcacgaacgctgaagtggtttcgctcttacagtatcacgccgccgctaagtatctttcctatgtatctctgaaaacgacgaaggatttaattaacacgttggcctccaacggcgccggaaagttcgatttatccgcttccgtcgccggagattcccttacgctccacaccggagtcgattcatcgaggatagcggag

SEQ ID NO: 110057 - DNA, 265 bp, Glycine max
aagaaggcgtcttcataaacgcctttcttctccgtttccgtttcctcgttcgaattcgctttttgatctgcgaaaatgagagagtgcataccgatccacattggtcaggctggtatccaggtcggaaatgcttgctgggagctctcactgcctcgagcacggcatcgggcccgatgggcaaatgccaagtgacaagacagttggcactggtgatgatgctttcaatacattcttcagcgagactggtgctggaaatcagtgccac

SEQ ID NO: 110058 - DNA, 181 bp, Glycine max
  unsure (1)..(181): unsure at all n locations
ctctttaagtgcagtactcaatggtgttgagggtttggactatatggaaagaattcctcttgccacatctcagaggtttcctcaactgctttcacgcaaaaatggtgaaaaagggannaggagatttgtttctggggatggtgaagagatgacattgattccgggaaccagtgttgaagag

SEQ ID NO: 110059 - DNA, 216 bp, Glycine max
atctctgaccactgtatgaaaaacctccctttataatgtttgcagcaaccaaatccaggtcagagatgcactgctgttaaggttgtcctggtaatggagtccgctgctgatgatttggttgagaaagtgaaggctaaggtggcaaaactaactgttggaccaccagaggatgactgtgatatcaccccggttgtgtcagaatcatccgccaatttc

SEQ ID NO: 110060 - DNA, 263 bp, Glycine max
gcttctccctctgcgcaggaattgggaacattcgacaggtagagtttcttcaatggctcgtaaagttgataagaagaacgacccaaaggcacaggccttgaagactgctaaggcagttaagtatggtgctacctttaagaagaaggcaaagaacatccgaacttctgtcactttccacagaccgaggacattgaatcaggataggaaccccaagtaccctcgcattagcgcgcctccaagaaataagcttgatcattatcaga

SEQ ID NO: 110061 - DNA, 260 bp, Glycine max
gaaattggtagaaaaaagaaagtggcatccaagaaggactctactgaggagggtgaggctgctgctgaagaaactaagaaaagtaaccatgtccagagaaaacttgagaaacgccagaaagatcggaaacttgactcccacattgaagagcaatttggtggaggccgattgttggcctgtatttcttctcgtcctggacaatgtggcagggctgatgggtacattctggaaggtaaggagctggagttttacatgaagaa

SEQ ID NO: 110062 - DNA, 263 bp, Glycine max
cactcataacacaaagcacaaagcaaagctcatcctcgagttaaaaaatggtagcagcttcttccatggcttactcatccccatccttggctggcaaggccgtgaagctgggcccatcagccccagaagtgggaagggtgagcatgaggaagaccgtcaccaagcaggtctcctcaggaagcccatggtacggcccagaccgagtcaagtacttgggcccattctctggcgagcccccgtcctacctaaccggtgagttccca

SEQ ID NO: 110063 - DNA, 262 bp, Glycine max
cttatggtgtatatacatggttaacggatattaaagacacctataaagaaggatatagatttgataagatatgcatcaagaaagaagcgtttgagggagaagagaagttttgtgcaaaatccttgggaacagtaattggttttgccatttcaaagctgggaaagaacattcaagtactttcaagttcctttgtcaataagcaagagcaatacactgtggaaggagtgcagaatcttggagacaaagcagtgatgtgtcatgg

SEQ ID NO: 110064 - DNA, 264 bp, Glycine max
gttatattcagggcgaataaccgaacccactatatatatgaaggcaaagtgccaatccagaaactccatgacacttgttcacaaccgatgcaggtttgctgataagcaaattgtgagggtccaggagacacctgatgagatttcggaaggaggaacacctcacacagttagcttgctgatgcatgacaagttggtggatactgcaaagccaggtgacagagttgaggtgactggtatttatagggctatgagtgtcaggattgg

SEQ ID NO: 110065 - DNA, 263 bp, Glycine max
gggttcttcacttctcttcttcaattcattctagttctggattccgactcgccgcattgactcggtccgggttggcggacactcagttcggtttttcattctctcgcgtatctaatctataggaaaagctaagggcacatcacaatgaaggcattgattctggttggggggtttggaacaaggctgaggccactgacactcagttttcctaagcctcttgttgattttgctaacaaacctatgattctgcatcagatagaggc

SEQ ID NO: 110066 - DNA, 234 bp, Glycine max
attcgagggtccctggacctctaatcctcttattttcgacaactcatacttcatggagttgttgaacggtgagaaagaaggcctccttcagctaccttctgacaaggcacttttgtctgaccctgtgttccgccctcttgttgagaaatatgcatcggacgaagatgccttcttcgctgattacgctggggctcacaaaaagctttctgagcttgggtttgctgaagcctaagc

SEQ ID NO: 110067 - DNA, 255 bp, Glycine max
  unsure (1)..(255): unsure at all n locations
gtttgtataagcatgaaggaggaagatttagagagattggatcttcatttgatggtgaacagtcagtataatgatgagaaacttcgcacagcgttcactgtgacagtggatgctaaacatggtactaccacaggggtgtcagctcatgatagggcaacaacagtcggaatccttgcatccaaagattcacaaccaagtgacttcaatcgcccaggccatattttcccactaaaatnacaggagggtggtgtgctg

SEQ ID NO: 110068 - DNA, 261 bp, Glycine max
caagcatatatgcagttaactgacttggatttggctgaacttgacattaagaaagctcttgagattgaccctaacaacagggatgtcaaattggagtacaggactttgaaggaaaaggtgaaagcgaataatagaaaggaggcgcaattttatggaaatatgatcaacaagatgacaaagattggttcctgatagcaatataccagctaccaagtaccaacggtattgaatccgtgggtactggcatcaaaatcaaaacgt

SEQ ID NO: 110069 - DNA, 256 bp, Glycine max
caagcagattggtgttatcggttggggatctcaggggcctgctcaggctcagattctacgggactctcttgctgaagcaaagtctgatattgtggtcaagattggacttaggaaaggttctcgttcctttgccgaagctcgggcagctgggttttctgaggagaatgggactctagccgacatatgggaaactgtctcgggcagtgatcttgtgatgatgttaatttctgattccgcgcaggctgataactatgag

SEQ ID NO: 110070 - DNA, 126 bp, Glycine max
gccgtagcagcggaagctctagcttgggtagcgaatcacaatggcgagaggattaaagaagcatctgaagaggcttaatgttccaaagcattggatgcttgacaaactgggtggtgcatttgctcc

SEQ ID NO: 110071 - DNA, 263 bp, Glycine max
ggtcacatagaaaagaacttcaggcagaaatttctgacttggtacagcttaagagccacccctcaagaagttaggattgtgaaaatatacattgatacatttcttgaagatcctgcatctcttgcagagcaacttgtggacaccttctcggaatgtttgtccagcaagagaacatcagttgtgccagcggggttctgcatgaagctttggcattgaccagattttgtaggtccagctactagccgcaagcttgccatgcagta

SEQ ID NO: 110072 - DNA, 262 bp, Glycine max
tcagatttgaaaaccacagttcttgcattacaagacctacagctgaatactgatggctgtcctctaactgccgtccgcacgaaatacagacaagacaagtttaaatgtgtagcggctttgtcttcaccaaaactgcttgaaactttgttctgaagacaaagatgatttgacaagccaatgctagggactcctaactgataacaaagaaatcctcattcctaatctaatcttcccttcaacttccattcattattccctgaga

SEQ ID NO: 110073 - DNA, 257 bp, Glycine max
ctctctttctctctcttccaaaacctaattttcattttttctcttcaaacaaattttcaaaatgcgtgagatccttcacatccagggtggccaatgcggcaaccagatcggcgccaagttctgggaggtggtttgcgcggagcacgggatcgaccccactggaaggtacggtggggactcagagcttcagctcgagaggatcaatgtctactacaacgagagccagctgcggccggttcgtgccgcgcgcggttctc

SEQ ID NO: 110074 - DNA, 242 bp, Glycine max
atgaatggaggcaagatataactgctgctggatctggatgcgttttagctttatcagttgagagatatcttgtgagcaatgatcttcttatagagttacatcagcccaaaactgaagaggttaagaaggaactaacagacagggatgtacacgagggctttgacattacacttacaaagcataaggggcagtatgctcttcgaaaattgtatctacgcagtccaaggcttatatgcgtatta

SEQ ID NO: 110075 - DNA, 248 bp, Glycine max
  unsure (1)..(248): unsure at all n locations
caggaatgaagcgattacgatttggaagaggttgggggaagcgattaggggaanttttatggagctggagaatttgattcgccgggatccggcaaagattgcagttcctggtggcggacttcatccgatcnctcgctatgtgatgaactacctccgtgccgcatgtcggtcacggcagancttggagcaggtttttgaagactatggctgaaagagtacncaaagcttgatgatagggttccttcctc

SEQ ID NO: 110076 - DNA, 153 bp, Glycine max
ctcacacacactttctctctctctctctctcacccagatcttgtagcaatggcgagcgctcccactccacgcgaagagttcgtgtacatggcgaactggcggagctggccgagcgctacgaggagatggtggagttcatggagaaggtctccg

SEQ ID NO: 110077 - DNA, 96 bp, Glycine max
ctatggtagagcatacttctctgcaacctcagcacatacttgtactggagatgggaaagccatggttgcacgtgctgggatccctcttgaggattt

SEQ ID NO: 110078 - DNA, 254 bp, Glycine max
gaaaattttatgctcctcactgccattgctagattgaaattactagatgatctagactaataagactttctgtttactgtaacttgtatttgcagacagaggaaaccaaggatgctgataggaatggtccaaaaggaattatcagcgctgtcgggatatccattgttgttggatggggttacatactaggcattaccttagcagtcactgacatcctttaccttttgagtgaagataatgatgctggtgggtat

SEQ ID NO: 110079 - DNA, 133 bp, Glycine max
ctcatccccatccttggctggcaaggccgtgaagctgggcccatcagccccagaagtgggaagggtgagcatgaggaagaccgtcaccaagcaggtctcctcaggaagcccatggtacggcccagggcgagtc

SEQ ID NO: 110080 - DNA, 166 bp, Glycine max
gaattatggaatcctgcttgcacaaaagcaatggctatgtcatttaatccaaacccgtgttctgatgcatggagtttagaatttctgaagcgtaccggattacattgtgatatcatttgtgtcactggatggactgccaccccaatgcaggatgttcaggttacaa

SEQ ID NO: 110081 - DNA, 109 bp, Glycine max
cttgatcagccattaacaagtaatccaaatgtgggtggatttggtcagggggatgcggaaatagtacttcaagatccgttacgtgtccaaggtctcttgttcttcttcg

SEQ ID NO: 110082 - DNA, 176 bp, Glycine max
acattttacatgcaaatgaacttacaagacgtctcaaggaagatggggtagatatttctgcaaattctcttcatccaggagtaattgccaccaatctttcccgtcatatcagtccagtgaacggtctaactaaagctattgcaagactcgtgcttaaaaatgtccagcagggagca

SEQ ID NO: 110083 - DNA, 236 bp, Glycine max
gttgttttcaagtcaactcaatggcacttccctcaggtttagtttccatgttgatagtactttttggtatggttttggtagttggggttgaggcaacggcaagggctttctttgtatttggagactcactggttgacagtggtaacaacaattacttagcgaccattgcacgggctgattcccctccttatggcattgactatccaactcgtagaccaaccggtcgtttctccaat

SEQ ID NO: 110084 - DNA, 254 bp, Glycine max
ctacactggccttttgttctcgtgtcaatttctaaatccaccaccacaccctctcttctattctctattattattatctccacacccttcactctctctcactcttctctcgaatcttccaccgcaatggccacctctgccgagaaactctccgctctcaaatccgccgtcgccggattgaacgaaatcagtgagaatgagaagaacggattcatcagcctcgtcggccgctatctcagtggcgaacgcagcat

SEQ ID NO: 110085 - DNA, 165 bp, Glycine max
cgagataactagaaacagtgtgatgaaaatgaaggtccttgttttcttcgttgctacaattttggtagcatggcaatgccatgcgtacgatatgttccctctccgaatgaacactggctatggtgcccgtactccggaggtgaaatgcgcaagttggaggcttgc

SEQ ID NO: 110086 - DNA, 133 bp, Glycine max
ctgacaccctcccatttgctacaatgggatcaggttcacttgctcgcaatgtctgtatttgagtctaagtacaaggaaagtttgagtagggatgaaggcattaagctagttgttgaggcgatatgtgctggta

SEQ ID NO: 110087 - DNA, 130 bp, Glycine max
aaagtatagagtgaaagaatgggtgagaaaagcaagattttgatcataggaggcaccggctccatcggcaaacatatagtggaagcaagcgcaaaggctggaaatcccacttttgctttggtgagggaat

SEQ ID NO: 110088 - DNA, 94 bp, Glycine max
ggcggtttcatcctaaatcgtccaactctaaccagaagattgctcccagagccaggaaccaaagaatatggtgaacttaccagtaatcatcaaa

SEQ ID NO: 110089 - DNA, 247 bp, Glycine max
attaggaaagcccttgatatgatccgtaggattgctgatgaggatcctgatgagtccactgacaaagaaaagaaagaagatacgtgatctgacaataatgagaagaaaggtcaatattccaagttctggaatgagtttggtaaatccattaaacttggtatcatcgaggatgccaccaacagaaatcgtttggcaaaactgctcagatttgagagcaccaagtctgagggaaattgactctctggat

SEQ ID NO: 110090 - DNA, 196 bp, Glycine max
gtgatctgcagctacatgggtaagggaacggggaatttcggtaagaagaagaacaagacccacaccctctgtgtgaggtgtggccgccgcagcttccacctccagaagagtcgttgctctgcgtgcgcttaccccgctgcgcgcaccagggaatataactggagcgtgaaagccattaggagaaagaccaccggaa

SEQ ID NO: 110091 - DNA, 171 bp, Glycine max
  unsure (1)..(171): unsure at all n locations
gttgcttccaagttccaaacgacggcgccaatgagntgttacatgcggcctccgggtggtactcttgctccgggagacagtttgattgcaacggtgtttaagtttgtggagcaacctgaaaacaattctaagttgtcggatcagaagcacaaggtgaagttcaaaatcatg

SEQ ID NO: 110092 - DNA, 256 bp, Glycine max
aagacaccaatcttctctccacgcccttcttgggtaaccgtctgaagtgcagcaatggcagatggattgcattcgcagcatccatcggtagttcagaagttatctggacagtcttatcttgtgtccaggcttgctcctaatcactccagaaactgttctaccactggtagttacttcaatggaggtttgcagtcttcaggtttggttccagtcacggcacacgcgccggctgagaaaggggtgtctggatttttgt

SEQ ID NO: 110093 - DNA, 253 bp, Glycine max
gatcatttgtggaatggattccccacaatgtgaaatccacagtctgtgacattcccccaaccggcttgaagatggcttcaacattcattggcaactctacctccattcaggagatgttccgtagagtgagtgagcaattcactgctatgttcaggaggaaggccttcttgcattggtataccggggaaggcatggacgagatggagttcactgaggctgagagcaacatgaacgatcttgtgtcagagtatca

SEQ ID NO: 110094 - DNA, 249 bp, Glycine max
ctcgagcgattcggctcagagttcaacgcctgtcatgtatgggaaacagtactacagtttgactgtgtagacaaggacagctgatggagatgaaggtggcaagcaccagctgattgcagcaactgtgaaagatggcataactatacatttgcaaggctcaagctggagacaagagatggtttaagggagcaagaagatttgtggagagcacagcaagttctttcagtgttgcctaagaacttatcagtg

SEQ ID NO: 110095 - DNA, 250 bp, Glycine max
ctagaaacagtgtgatgaaaatgaaggtccttgttttcttcgttgctacaattttggtagcatggcaatgccatgcgtacgatatgttccctctccgaatgaacactggctatggtgcccgtactccggaggtgaaatgcgcaagttggaggcttgctgtggaagcacacaacatctttggctttgagaccattcctgaagagtgcgttgaagcaacaaaggaatacatccatggcgaacaatatagatc

SEQ ID NO: 110096 - DNA, 242 bp, Glycine max
gatgtggtggaattctcgtattttggtgcaccagagccagtttcaaaagagcagctgtacacagagatcgtagatgacttgcgtgggggcgatccatgcattggttcaggatctcaggtggcaagccaagagacatatggaactttgggtgccatcgtgaaaagccaaactggcagtcggcaagttggttttctcacaaatcgtcatgttgcagtcgacctagattatccgaaccaaaagat

SEQ ID NO: 110097 - DNA, 242 bp, Glycine max
tcctaacctaaaccctactcattctccatacctcaacgaagaggttaaagagacggcaacactttgctgtccgccttgaccgagcaatgcttcgtcttggccctcgattttgccctaaagtactctcagtcacaacagacaccgtcgtcgtcgtcgtcgtcatcaatggcaccgaagcagaccaaggctgagaagaagatcgcttacgatgcgaagtgtgcgacctaatggaggagtacggc

SEQ ID NO: 110098 - DNA, 239 bp, Glycine max
attaccactttcttacttacagcacagcacttctgctgacctttcgtcttctctttccctttggatttcatacatagatggattcgagttcgggtcatcaagaattcgattatttgtttaagttgttgatgattggagactctggggttggcaagagtagtcttcttctcagtttcacctccgatgcttttgaagatctctcccccactatcggtgttgattttaaggtcaaatatgtg

SEQ ID NO: 110099 - DNA, 244 bp, Glycine max
gtcagattcgctcgccttgcttcgccacacaacagcaactgcagcaatggctcccaaacgaggtggaaaggctccggctcttgccgctaagaagaagcctgagaaggtttcgaatccgttgttcgagaagcgtccaaagcagttcggaatcggaggggcgttgcctccgaagagagacttgactcggttcgtgaagtggccaaagaatgttcaaattcagaggaagaagaggattctgaagcag

SEQ ID NO: 110100 - DNA, 244 bp, Glycine max
gttcacatgttcatgattttctcactccacagacccgatgttctccccatcaatggccttggcgtcaggaaaggagttcagcttctctacaacctcgaggacttaccccggccctcgcagatggaccagttgtgtgacaagtggaggccttaccggtccgttgcttcgtggtacatgtggagatttgttgaagccaagggaactccttcgagtgcggtggcggtagcgaccggtgctggcttgc

SEQ ID NO: 110101 - DNA, 244 bp, Glycine max
ggaaacagtaccctcaagctgtcatactttatgctgattactatgacgcctaccgcactgtcatgaagaatccaagcaaattcggattcaaagagaccttcaacgtttgctgtggatcgggagaaccaccttacaacttcactgtgtttgccacatgtggcacacctaatgccactgtgtgctcaagcccttctcagtacatcaattgggatggtgttcacctcactgaggccatgtataaagt

SEQ ID NO: 110102 - DNA, 236 bp, Glycine max
aagcagcaactctcaacaagttactaattgggcctcattggtacaagtgtttttaacaaacagcaacagtacagagcatcttgatgcatgtaagtggacaaaatcagaaccacattcctgggaagtgatcttcccaatagaggtatgtggtcccaataatggttttgaaatgtggagttctgagtgggcaaatcaaacttcatggcatttgagtttccttattgacaatcccaaac

SEQ ID NO: 110103 - DNA, 248 bp, Glycine max
ggccgtgtcgcagcaaaaccaaaccacatattaacttgtttgctctaagtcatggctctgatcttgcacgcaaccaaagcaaacaagaatgctttcaagactctgattgcggcagagtacagtggcgtccaagtggaattggcccctaatttcgagatgggtgtctctaatagaactcctgaattccttaaaatgaatcccataggaaaggttcctgtcttggaaacgcccgatggtccagtctttga

SEQ ID NO: 110104 - DNA, 246 bp, Glycine max
gcgcttcacgatgggtgcttacaagtatgtttcggagctatggcgcaagaagcagtctgatgttatgagattcttgcagcgggtgaggtactgggagtaccgccagcaaccttctattgtccgtttgacaaggtctactcgcccagacaaggctcgccgcttgggtttcaaggctaagcagggttatgtgatttaccgtgttcgtgtacgaaggggtggccggaagagaccagttccaaaaggtat

SEQ ID NO: 110105 - DNA, 240 bp, Glycine max
cgcaggtggagcccaaggcccgcggcaccccgaccaccaaaaccttccaaatctaccgctggagcccggagaacccctcaaagcccgagctcaaggactaccagatcaacctaaaggagtgcgggcccatggtcctggacgcgctcatcaagatcaagaacgagatcgacccgagcctcacgttccgccgctcgtgccgcgaggggatctgcggctcctgcgccatgaacatcgacggtt

SEQ ID NO: 110106 - DNA, 233 bp, Glycine max
ctgaattagatgaaccagcagatcaaaactatgtataatagcatgcatcagaacaagctcaagcccttggagttgaagttcgagaggcagtaacaaggatcttctccaatgcttctggctcctactcctcaaacataaacttggctgcggagaattcgtcatggaatgatgagcagcagctccaagacatgtatcttagcagctagtctatagcttctgattctgatgccctg

SEQ ID NO: 110107 - DNA, 245 bp, Glycine max
gggcataccaagaagggaagatatctggaattgatgcagcttctggagctgcagttatggctttaaatatatcacctggggatcatgttctcgacctgtgtgctgctcctggtgccaaactttgtatgattttggaccttcttggtgattcaggctctgtggctggagtggatgttgcaaggcatcgtttggcagcgtgtaggacaatgctgcagaaatatatgattggtggtcggtgccggctt

SEQ ID NO: 110108 - DNA, 90 bp, Glycine max
gaacaagtagttgagaactaagaaggagaagcaaatggcttcctcaatgatctcttccccagctgttaccactgtcaaccgtgccggtgc

SEQ ID NO: 110109 - DNA, 220 bp, Glycine max
gtttgttgtaggaagaggaaagctgagaaatggcaggggacagcaagagcaagattctgttcctcggagggactggtagcaatcggaaaattcatcgtggaagccagcgccaaagctggccacccaactttccttttggtgagggagtccactctctccaaccccggcaaatcacccctcatcgacaatttcaaaggcctcggtgtcaatcttgttttag

SEQ ID NO: 110110 - DNA, 238 bp, Glycine max
actcttcttcgtctcaaacctcttcgttccttcgattcattccatttcttccaaaatggccaaagacccagttcgcgttctcgtcactggagccgcagggcaaatttgatatgctcttgtccctatgattgctagggtagtgatgctgggtcctgaccagcccgttctactccacatgcttgacattcctccagcagcttcatctgtgaatggggttaaaatggaattcccggatgct

SEQ ID NO: 110111 - DNA, 235 bp, Glycine max
ctgggaaacatttctcagagtatgctgcacgcttttatgctgcagaggtcctgttggcacttgaatatcttcacatgcttggagttgtgtatcgagaccttaaacctgaaaacgtactggtccgagatgatggtcacataatgctctcagacttcgatctatctctccgatgtgctgtttcacctacccttattagaaattttgacagtgactcctcaaaacgaggtggtggtgc

SEQ ID NO: 110112 - DNA, 213 bp, Glycine max
ctccaaaaccagctgcagctgctgctcctgccaatgatgagcttgccaagtggtatggtcctgacagaaggatcttcttgcctgagggtctcttggaccgagctgagatcccagagtacttgaccggcgaagtccccggagactatggttatgacccatttggtcttagcaagaagccagacgatttttccaaatatcaggcattggaattga

SEQ ID NO: 110113 - DNA, 233 bp, Glycine max
agagtaccttcttaggaacggatggattccttgcatggaattcgagttagagcacggtttcgtgtaccgtgagcactacaggtcaccaggatactacgatggacgctactggaccatgtggaagctgcctatgcatggttgcactgatgcttctcaggtgttgacggagcttcaagaggctaagactgcatacgccaacggcttcatccgtatcatcggattcgacaacgttc

SEQ ID NO: 110114 - DNA, 233 bp, Glycine max
gtgattttgttcaaggaaaagatctcgcgatggttaaagttaatgtagcatgtgctgctgttggcttgacatcatgttacactccaactccattgttggaatctggtttgcaaaaagacagagggttaattgtggagtagtttggaaggatgtcttacgttgctcataacgttaatcagccccaagagaaagatttgttagagggaaatttttcctttgatattaaatctcgc

SEQ ID NO: 110115 - DNA, 229 bp, Glycine max
gagaaatacaaacagaaaggtctggaaattctggcgttcccatgcaatcagtttggggcacaggagcctggatctaatgaacagatacaagagtttgtttgtactcgcttcaaggctgagtttcccgtttttgacaaggttgatgtgaatggtgacaaggctgctccactgtacaaatatctaaaatcaagcaaaggtggactccttggggatggcatcaaatggaact

SEQ ID NO: 110116 - DNA, 222 bp, Glycine max
tctgatttcactgcaagagcagccagtagcaggtacactagcatgcatcagcacaagctcaaacccttggagttgaagttcgagaggcatgcacaaggatcatctccaatgcttctggctcctactcctcaaacataaacttggctgcggagaattcgtcatggaatgatgagcagcaactccaagacatgtatcttagcagatagtgcatagcttctgatt

SEQ ID NO: 110117 - DNA, 289 bp, Glycine max
cagacttcggctcgagctcgttctcgaaaacctcgacctagaaggttccattcaccccttaacctctctgactcagctccgagttctgagtctcaaaggaaaccgtttctccggtcccgtgccaaacctctccatcctcaccgctctaaaacttctcttcctatctcgcaatgccttctccggcgagtttccggcgaccgtcaagtcgctcttccgcctctaccgactcgatctgtccaacaacatattctccggcgagattccggcgacggtcagccacttgacccac

SEQ ID NO: 110118 - DNA, 271 bp, Glycine max
ctgacactccttcttctccgcttcctcttcgatcatcgcttcagaatgccgccgaagttcgacccctcccagatcgtcgccctcttcgtacgcgtcaccggcggtgaggtcggcgcggcgagttccctcgacccgaagatcggtcccctcggtctctcccccaagaagatcggagaagatatcgccaaggaaaccgccaaggactggaagggcctccgcgtcaccgtcaagctcaccgtgcagaaccgtcaggccaaggtcacggtggtcc

SEQ ID NO: 110119 - DNA, 263 bp, Glycine max
caagtatattgcctcaccccgaaggattaggtccatttttcacaggtcaatggaatctttatgctcaaaaccccgattccaatagtcatatatttggtacccctcaaggagcaggaactgctattctaacacttctcgggggatttcatccgcaaactcaaagtttatagctgaccgatattgcacaccatcatttagcaattgcatttctttttctagttgctggccatatgtatagaaccaacttcgggattggtcacagt

SEQ ID NO: 110120 - DNA, 266 bp, Glycine max
ctcgagccgtcaattttgaggcctttccccacaagctggtgcatcttggagaagttcagcgaaaaagttgtattgacattttcataagatcggatttcttacagcttgggcaactcaggtgcgtcctgcaacaactctgtcggctgatgggtgcccatatttgtgtgctatggtgcatgatagttcagtgtctacgataccaggtgatttggtcattagtgtcaagttgacaaccataagcaatatgtgtgcatatgggctcaatc

SEQ ID NO: 110121 - DNA, 264 bp, Glycine max
ggctaaccaaccctgacactccttcttctccgcttcctcttcgatcatcgcttcagaatgccgccgaagttcgacccctcccagatcgtcgacgtcttcgtacgcgtcaccggcggtgaggtcggcgcggcgagttccctcgccccgaagatcggtcccctcggtctctcccccaagaagatcggagaagatatcgccaaggaaaccgccaaggactggaagggcctccgcgtcaccgtcaagctcaccgtgcagaaccgtcag

SEQ ID NO: 110122 - DNA, 262 bp, Glycine max
cgagccacgtgcaaagcgccgagcaacacaaccaagatgtgaactctctcgggctgatttcatcaaggaagacacatgaggctattgagatcctcaagctcatgtcctccactttcctcattgcactttgccaagccattgacttgaggcatttggaggagaatttgaagaacacggtgaagaacgttgtgagccaagttgctaagcggactctcaccacaggtgtcaatggagagcttcacccttcaaggttttgtgagaa

SEQ ID NO: 110123 - DNA, 255 bp, Glycine max
aacaaagggcaagagacggcgagtttagttttgaaagcgtgcgtgtgcgtgggagggtccgaagaagcacaacgttggagaaagtgattctcgttctgttcttctactcacaagagcaacaacaacaacatcagaatcagaaacagcaatggccaacactaacttggacgatgttccctctctggatctcatgactgagctccttcgtcgcttcaagtgctcttccaaacctgacaagcgtcttattctcattgg

SEQ ID NO: 110124 - DNA, 274 bp, Glycine max
tcggctcgagctcgagcgaatcggctcagggctcgagaagcgcatacagtactccactacgattagctcttccagaagcttccagaaaactctagatggcgcgtacaaagcaaacagcccgtaagtcgaccggcggcaaggctccccggaagcagctggcgactaaggccgccgcaagtctggtccggcgaccggcggattgaagaagccacacaggttcaggccaggaaccttggcctgaagggggatcaggagttaccagagaagaacgggc

SEQ ID NO: 110125 - DNA, 272 bp, Glycine max
ttccattcctattattatggttggtcctggtacaggcctggcacctttcaggggatttttacaggaaagattggccctcaaagaggatgccgttcaacttggtcctgcattactcttctttggatgtaggaatcgacaaatggattttatttatgaggatgagctaaagaattttatggaacaaggtgctctgtcagagttgatagtcacattctcgagagagggacctgaaaacgagtatgttcaacacaagatgatggataaagctgcaa

SEQ ID NO: 110126 - DNA, 270 bp, Glycine max
cattcctcgtcttttgggtcctggtctcaacaaggcaggaaagttccctacacttgttactcaccaggaaactcttgagtcaaaggttaacgagtccaaggccatggttaaatttcaacttaagaaggtgctctgcatgggagtagctgtggggaatgttagtatggaggaaaagcaaatcttccaaaatgttcaactgagtgttaatttccttgtctctttgttgaaaaagaactggcaaaatgtcaggtgcttgtatctgaagagtac

SEQ ID NO: 110127 - DNA, 264 bp, Glycine max
ggaagtccccgaaaccggtgtgagcttcgctgacgttgcgggcgcggaccaagcgagcttagctccaagaggttgatgatttcttgaagaatcccgataagtacaccgcgttgggcgcgaagattccgaaggggtatcttttggtggggccaccgggaaccggaaagacccttctggcgagggcggtggcgggagaagctggggtgccgtttttctcgagcgcggcttcggagttcgtggagcttttcgtgggggttggtgctt

SEQ ID NO: 110128 - DNA, 264 bp, Glycine max
gttgtgcaggtcctagataccatatgcgatgaagggcttcaagcagtggctgagacttgcaaggatttgcgtgacttcgggttttccctgtcaatacccgggaggagatagaaggtcccgtgtctgaggtggggtttgaggcgatttctcgaggttgtaggaaactgcagtcgattctgtttttctgccagaggatgacgaatgctgccgtggtagccatgtcgaacaactgcccggatcttgtggtgtttcggttgtgtataa

SEQ ID NO: 110129 - DNA, 257 bp, Glycine max
aattcacccgctaccttttcccgtgtacgaacgaatccaatccaccaaatcggcggcgacgctccgctctgtctcgaaaccacagatctgctgcggaaccgcgtctccgactatctccgattgatcttccggtaaagtggacccgagatgccggttgccgcttccgccatttacttccacaacctccgcggcgacgttctcatcaaccgcctctatcgcgacgatgtcgggggaaatatggtggatgcttttaggac

SEQ ID NO: 110130 - DNA, 261 bp, Glycine max
agattctctacctcaggccccctaagaacatttactcgtacaacgagcttgaggccttgtaggagaacaagattggcaagaccctcgaggaaatttatgtaccagaggagaaggttctcaaggacatcgaagaggcacctcttccaatcaatgtggtattagcaatcaagcgctcagtgttcgtgaagggtgaccacaccaactttgagattgagacatctttcggggatgatgcttctgagttgtacccggatgtcaact

SEQ ID NO: 110131 - DNA, 263 bp, Glycine max
aacgaccttggggccgttagttctgccatattcggagcaggtgatgttcttggtgtcgctggtgaggatgaaggtgctgaagatgtcgggtgtaaagccatgcatttcggatttcaagctggccttggagcatttttgcatacacgccgagggtagagcggtgctgaacgaactgtagaagaatcttgagctgagcgagttgcacatggagccctccaggataaccctgcacagatatcggtaacacttccagcagctccctc

SEQ ID NO: 110132 - DNA, 255 bp, Glycine max
gtttcttgcaagcctctactatactgcttcaccttctgctctagaaaattcagtgctgaaacatggcttcggctactctctctgtagccaaaccaaggcttcaggcaaatgggaaaggcttctctgaattctctggcctccgtagctcatcaggcttccttcccttttctagaaaatcctcagaggatttccattctgtcattgctctacagacctatgcagttggaagcagtggaggatgcaagaagggtgtga

SEQ ID NO: 110133 - DNA, 249 bp, Glycine max
gcagatcagagggcaacctgttggacaaaaaagtggttgctgctcttcctaaccaggtggtgctgcttggtctacacttaccttttgcatgtgaggggcatatgctatttcactaaatagtggaccagtgtcacgtaatccaacctgtggtttgggaattggcctagatgatcccattctttaccatatacttgaatgctatgattgtgcttagtacttgttaatgataaaacttttatatttctgctc

SEQ ID NO: 110134 - DNA, 256 bp, Glycine max
ggatcaggttgtggattatgatggcaaatcactcgtgaatgctaaaatttcttctgagaatgaacttcatgtggagtcaattgattatggtagtggtttagatcatcaactgcaactgccggtccttccagtgtctgttccttctgaacagcaaatcaattcagggatacctgttggaggttacaacgataataatgtagtaacacgatatccaacccagtcattgattccaaactccagctcccggaatcagttc

SEQ ID NO: 110135 - DNA, 256 bp, Glycine max
aacggattcacttactgtgtggttgctgttgagtctactggacggcagattccaattgctttcctcgaacgaatcaaggaggattttaccaagaagtatgctggaggaaaagctgcaacagcggctgctcatagcctcaacagagagtttggacctaagttgaaggaggagatgcagtactgtgttgatcacccagaggaaattagcaagcttgctaaagtgaaagctcaggtttcagaagtcaaaggagttatga

SEQ ID NO: 110136 - DNA, 253 bp, Glycine max
ggaaaacttgcacagcatttaatcaagtttgtactgcggggataaatgttagagtgattgctggcagattgttggatgtagtttacaattgtgtaaggagacttttgggattggatagtggttcacttagagatgcagcgcttatcttttctgaagatgttgacggttggctgcgcaatatcagctggtgtcaggaacaattcttactggaagcatacatgtctcaagatgatcttattgacttgcgttcctt

SEQ ID NO: 110137 - DNA, 255 bp, Glycine max
gggactacttaatttggatatcactccattcacggacaagataattgctgagtacatttggattggggggacatgaattgatgtgcgcagcaagtcaagaacaatatcacagcctgttgaacatccctctgagctccctaaatggaactatgatggatctagcactggacaggcaccgggtgatgatagtgaagtaatcctatatcctcaagcaattttcaaagatcctttccgtggtggtaacaatattttggt

SEQ ID NO: 110138 - DNA, 254 bp, Glycine max
ctcataacacaaagcacaaggcaaagctcatccttgagttaaaaaatggcagcaacttcttccatggctctctcaaccccatccttggctggcaaggccgtgaagctgggcccatcagtcccagaagtgggaagggtaagcatgtggaagaccgacatcaagcaggtctcctcaggaagcccatggtacgggccagaccgagtcaagtacttgggcccattctgtggagagcccccgtcctagctaaacggtga

SEQ ID NO: 110139 - DNA, 259 bp, Glycine max
gatagctagaagcaataagatgaaaatgaaagtgcttgttttgtttgttgctacagttttggtagcatatgaatgccatggctcagactaccagaagttccctctccaaatgaaaactgggtttggtgggcaatacagcaatgaggtggcatgtgccagttggaggcttggcgtggaagcaaacaacgtagtcaagtggcaaactgttcctgcagcttgcggagagtacatagctgactacgttctaggagaccaatat

SEQ ID NO: 110140 - DNA, 254 bp, Glycine max
gtctacacggctctgcggattcatccttttctgctgcagagcaaagaaccaaccaacacttgtttcttccgccatggccgatcaacctgaatcatcggacgctaagggcaccaagagagatttcagcaccgcgattttggagcgtaagaaggctctgaatcggcttgtggttgatgaggccgtcaacgttgacaactctgtcgtcgctcttcatcctgataccatggagaaacttcaactctttcgtggtgaca

SEQ ID NO: 110141 - DNA, 252 bp, Glycine max
tgaaacgacatacaattccatcatgaaatgttatgttgatattaggaaggatctgtatggaaacatcgtgcttagtggagggtctactatgtttccgggaattgctgatcgcatgagcaaggaaattagtgctcttgcacccagtagcatgaaaatcaaggtggttgcacctcctgagagaaagtacagtgtctggattggtggttctatcttggcatcacttagcaccttccaacagatgtggatctccaa

SEQ ID NO: 110142 - DNA, 251 bp, Glycine max
cttctttccaaatcccaactactactcacactcactgcagatctcaatccatggctaccattgttagcatcaaggcccgccagatctttgacagtcgtggcaatccaaccgtcgaggtggatttgacatgctccgatggtacttttgctagagctgctgttccaagtggtgcatccactgggatttatgaggcccttgaattgagagatggaggatctgactaccttggaaagggtgtatcaaaggctgtt

SEQ ID NO: 110143 - DNA, 255 bp, Glycine max
agacgctgtgtactgctattgctaaatattgcctaccatgccttgttaacatgataagcaatcctgtgaactccactgttcctattgctgctgaagttttcaagaaggcaggaacttatgatgagaagagattgtttggtgttaccacccttgatgttgttagggcaaaaactttctatgctgggaaagccaatgttccagttgctggtgttaatgtacctgttgtgggcggccatgcaggcattactattctgc

SEQ ID NO: 110144 - DNA, 275 bp, Glycine max
agtttagctacctacccatgggaaagattgccctagccaatgtcctcttggtccttctcttgaacttgagcactttgctcaatgttcttgcttgtccctattgcccttacccatctcccaagcctcctccaaaaaagcctcccattgtgtaaccaccagttcacaaactaccaaaaccatgtccaccacccaagtcatcttcaaaacctacccatgtacaaccaccctatgtcccaaaacctccttaatacccgaaaccaccagttcatccacat

SEQ ID NO: 110145 - DNA, 265 bp, Glycine max
tgatgttgaaactcctaaaggttccatgttggatcttaaaatttctcaatctaaaattgcacttcccaagaacacagttggaggaaccattctgcgtagtgatctattggcaaattttttgacagagggcaattttagagcaagtgttgatttgcagcgcactcatcgtattaaaggaatgattaaaatggtggctacagttggtattcctgagaatacaggtatagcattggcctgtgctatgaatagttctcttagggggcgc

SEQ ID NO: 110146 - DNA, 266 bp, Glycine max
aagttagtaagtctgggtggatgactgatgaggaatttgctagagaggtgattgccggtgtaaacccaaatgtgatccgtcgtcttcaagaattcccaccaaagagcacacttgatcccacactctatggtgatcaaaccagtaccataacaaagaacaattggagattaacatgggaggggtcacagtagaagaggcacttagtactcagagattattcatattagattaccaagatgcattcatcccatatttgacgaggataa

SEQ ID NO: 110147 - DNA, 263 bp, Glycine max
gccccaaaagcacttttcctccctctgacttttgctacaactactaccagtacaagcatatagttggaatggctcgattttcattggatgagatatcagacactggtgcctttgtgagatctgcttcaacattcagaaattggatttggagggacccgaattcgctgtttccaccggaatcagggaggtatcatctctatgtatcatatgcttgtccttgggcttccaggtgccttgcttacttgaatatcaaaggacttgac

SEQ ID NO: 110148 - DNA, 135 bp, Glycine max
gaaaaggatgacttgtggacttttgagagtttttagatttgtgtttggtgaagtatatgttcaccgcaatgtacttcagataatgtgaattatcttgtgtatccgaatccaacttaatgttacttgctttttacg

SEQ ID NO: 110149 - DNA, 263 bp, Glycine max
cacaccttcatccttgtccaactatttccctacagttctctgcaacgctcgacagtttaataggacagtcataaatcaaaacttattatatgctatccatgacagccatagaaatgatcttagaccactcaattccactgattttgatgacatgattcacagcggagcttactttgctcaaaagttccagaacgatgatcctgtgcttgatctcattgaccaaaaacttttgggtcgaagtcctagatcaattgttcccggtg

SEQ ID NO: 110150 - DNA, 261 bp, Glycine max
aaagatcaccgtgctattcagataagaaggtcttcataccatgatgtgattagggttaatgagattcagaaggtgttggacatcacaggggtccaaacctacattatcaacagcgcaagggttgttttcttgaatgagaggcctcagccaaggcctggtaaaggtgtcaccaacacttgtgaagtctgcgagcgcagcttcttgattccttccgattctgttctcttggttgcaagattgttgggacttcaaggaacttcc

SEQ ID NO: 110151 - DNA, 260 bp, Glycine max
attcagaggactaaccttggcaatgtggttttgttgctgaaatctcttaaagttgaaaatttacttgattttgatttcatggatccacctccacaggataatattctcaattcgatgtaccagttgtgggtgttgggtgcccttaacaatgtgggggggttaactgatcttgggtggaaaatggttgaatttccactggaccctccgctggccaagatgcttttgatgggtgaacagttagggtgtcttgaggaggtttt

SEQ ID NO: 110152 - DNA, 272 bp, Glycine max
tagctattggtcaaaaagcatcttctgtggctcaagtggtgaataccttacaagaaagaggagcaatggaatacactattgtagtagctgaaacagcggattctccagctacattacaatacctcgccccttatacaggagcagctctggctgaatattttatgtaccgtgaacgtcacactttaatcatttatgacgatctctccaaacaagcacaggcttatcgccaaatgtctcttctattacgaagaccacctggtcgcgaagttatc

SEQ ID NO: 110153 - DNA, 185 bp, Glycine max
gctcgagctcgattcgtgaaattttgataaaccgcgatcacaggtttccgcaccttaaaaccggtaacaagagcaatcgttacttggtttcaataatttctcaatttcttccttatttctttgtgtacgatttcttatgggaaagagaatcactctctgtgctggtcacagacttcgtgaatcat

SEQ ID NO: 110154 - DNA, 267 bp, Glycine max
agactcgaccgattcggctcgagtcaggccttcgaaagagggccactgaccctgaattgtacttcaaagtcaatggcaaactttatcaaaggcttggcaagataggtagtggtggaagcagtgaggtacacaaggtgatttcatcagactgtacaatctatgcacttaaaaggataaaattaaagggtcgtgattatgccactgcatatggcttttgtcaagagatcgagtatctaaataggctgaaaggaaagaataatattatcc

SEQ ID NO: 110155 - DNA, 262 bp, Glycine max
atcaaacttcatggcatttgagtttccttattgacaatcccaaacaatctacagtttttgatattctcttgggaatctctcaagattttgaaattgctggtaatactcttatgccagctttttctgttccacaggctactgccagatcttctgaaaatgcggaatcctctgcatgatctggaatttgtgttttctttcgcttgttcgtttgtttaattcaataaaggaaattaggcatgaccctcttgttgagtatgctctg

SEQ ID NO: 110156 - DNA, 257 bp, Glycine max
gaaaaatgttgagttgtcttaagggcttaccccttgtgtacccatggcacctatcaataaaccttatcacgtgaactccttgatagtagacaaatatttagctttttttttatttgtatttatatgtaattattattcaaggcaacaaggaatggtacttttatatacaatagcattatggagttttgaatctataaaaaaaaaaaaaaaaaaaataaaaaaaaaaaaaaaaaaaaaaaaaaaaaaaaaaggggggg

SEQ ID NO: 110157 - DNA, 260 bp, Glycine max
gccgtaacagaagcaaacttaaagaaggctggctaccacacatgggaaaaattaattctcaaggatccacaagatccttccactccaaatgcagtttcatacaaaacagcagcgagagagaaactgataaggcagggatacaacattgttgggatcattggagaccaatggagcgatctcctcggaggccacagaggcgaaagcaggacctttaagcttcctaatcccctgtactacattcagtagttccttcacctctc

SEQ ID NO: 110158 - DNA, 260 bp, Glycine max
gtgaaaagtccatgataaagaagcgatacatgcacctgacggaggagtttctgaaagagaacccgaacatgtgcgagtacatggcgccatcgctggacgtgagacaagacgtagtggtgatggaggtgccgaagctgggaaaacaagccgcaacgaaagcgattaaggagtggggtcaaccaaagtcaaagatcacacaccttgtgttctgcaccacttcaggcgtggacatgcccggagcagattaccagctcacgaag

SEQ ID NO: 110159 - DNA, 259 bp, Glycine max
gcagatcttcgttaagaccctcaccggcaagactattaccctagaagtcgaaagctccgacaccatcgacaacgtcaaggctaagattcaggacaaggagggaatccccccagaccagcagaggctgatcttcgccgggaagcagctcgaggacggacgcacctctgctgactacaacatccagaaggagtcaactctccacttggtgttgcgtcttcgtggtggtatgcagattttcgtgaagactcttacgggtaag

SEQ ID NO: 110160 - DNA, 253 bp, Glycine max
attggctcaaggcctgaggcagagtgagaagtgtgatgtttacagttttggagtcattcttttggagctggttacagggaggaagcctgtggaaagtccaaccacaaatgaggtagtggttctgtgtgaatatgtaagaggtttgttggagactggctcagcttcagattcctttgatagaaatatacttggctttgctgagaacgaattgattcaggttatgagattggggctaatttgtacttcggaggat

SEQ ID NO: 110161 - DNA, 218 bp, Glycine max
ttattaggttggaaggtcactctcttgctcaagaagacgcttttgtttctagggacattcatctcttacagatatgtagtgggattgatgagaatgctgtgggggcttgttcagagctcgtatttgctccaattgatgaaatgttccctgatgatgctccattggttccttctggtttccgcattatcccattagattcaaaaccaggtgacaaaaag

SEQ ID NO: 110162 - DNA, 257 bp, Glycine max
tgaggctgcatactcttgtgtgaccaaaaagatgagtgaagacgtggagatgaaagatcaggcaacgccttcacacgcgcgttcttcggttcctccatctgcattgcatgatttgaaggaaatagcatcaattattgaaaccggttcgtactcaaaggaagttcgtcgaattgctcgtgcccggcgccttacatttgcattgaggcgtaaattgacagcaccagttctctcatctttcctcgattatgttcttcctc

SEQ ID NO: 110163 - DNA, 253 bp, Glycine max
  unsure (1)..(253): unsure at all n locations
gtctgagagtgtgtgtgacttatggagtccaattcagagttcgacgtgattatcatcggagctggcgtcatgggcagctccaccgcctaccacgccacctaacacatgcaagaaacccttctcctggaacagttcgacttcctccaccactgtggctgctgacacggcgaatcccgcaccatccgcctcagctatcccagccactactacttgagnntagtcatggactcttaccggctctggcaagaggcgc

SEQ ID NO: 110164 - DNA, 256 bp, Glycine max
ttaaaagttattaagagcttttgcttttctttctgcgcgcttttcccaattaagtagttcttccttttctcaaagcaaaaaaaatgttcatcgagagtttcaaggttgagagtcctaacgtgaagtacacagagactgagattcagtccgtgtacaactatgaaaccactgaacttgttcacgagaacaataatggcacttatcagtgggttgtcaagcccaaaactgtcaaatatgaatttaaaaccaacaccca

SEQ ID NO: 110165 - DNA, 256 bp, Glycine max
attcttctataaagaagaccttcatccaggcaaaacaatgaaagtacaattcaccaagcgtccctatgcacaaccttatggtgtatatacatggttaacggatattaaagacacctctaaagaaggatatagttttgaagagatatgcatcaagaaagaagcgtttgagggagaagagaagttttgtgcaaaatccttgggaacagtaattggttttgccatttcaaagctgggaaagaacattcaagtactttca

SEQ ID NO: 110166 - DNA, 262 bp, Glycine max
ggtgcatgtagggatgactgtgtgtaggctcaggtaggattgttttgtggacaagaggttgagaatatttcaagctatgctccttcagaacatccccctagttctctgtttaagggagttgcccgaaatggttctcccccatggcgagatgatgactaagatggccattacatgtttgagcttggagataatttaacttctcgctgtaaatacactttaccatcattaagaagtttacattcaaatgtcatggccgagtttg

SEQ ID NO: 110167 - DNA, 263 bp, Glycine max
caaaattgcaaccttctccatccaataaacctgacacagtgaaccaaacaggctaaaagaacacaaaccctaatcaataaaaaattgtgttgcagaaaaaaaccatggcgggggaagagaccaccgggaagaagagggtggtgacagaatccctaggatggctaacggaatcgtcgataatgccaaagaagcaccgcaccatagctggcgttggcgcatcctcaatcctcgaattgaaggctgaactatacaagtctcaggaa

SEQ ID NO: 110168 - DNA, 260 bp, Glycine max
gtgcgttgaagcaacaaaggaatacatccatggcgaacaatatagatcagactccaaaacagttaaccaacaagcttacttttatgccagagacctcgaagtccatcccaaggacacatttgtgttcagtatagatggcaccgtactctctaatattccatactacaaaaaacatggatatggggtggagaaatttaactcgaccttgtatgatgaatgggttaacaagggcaatgcaccggcactgcccgagactctta

SEQ ID NO: 110169 - DNA, 246 bp, Glycine max
ctttggggtgataatatgggagctctgcaccttgaataggccttgggaaggcgtacctccggagagggtggtttataccgttgctaatgagggtgctcgattggatattcctgatggcccgctaggcaggctgatttcagagtgttgggcggaaccacatgaacggccaagttgtgaggagattctctctcgattggtggacatcgagtactcaatgtgttgatgccagtgttttaatcttgtgta

SEQ ID NO: 110170 - DNA, 253 bp, Glycine max
ctttggggtgataatatgggagctctgcaccttgaataggccttgggaaggcgtacctccggagagggtggtttataccgttgctaatgagggtgctcgattggatattcctgatggcccgctaggcaggctgatttcagagtgttgggcggaaccacatgaacggccaagttgtgaggagattctctctcgattggtggacatcgagtactcaatgtgttgatgccagtgtttttatcttttgtacatagtg

SEQ ID NO: 110171 - DNA, 253 bp, Glycine max
ttcagcaagtgcgttttggaagcagagaccgaaatacttcgagatggcccgtacaaagcaaactgctcgtaagtcaactggaggaaaagctcccaggaagcagcttgcaaccaaggctgcacgtaagtctgcaccaacaactggtggtgtgaagaagcctcatcgttatcgccctggaactgttgctcttcgtgagattaggaaataccagaagagcactgagctcctaatcaggaagcttcctttccagagg

SEQ ID NO: 110172 - DNA, 255 bp, Glycine max
atatgttccctctccgaatgaacactggctatggtgcccgtactccggaggtgaaatgcgcaagttggaggcttgctgtggaagcacacaacatctttggctttgagaccattcctgaagagtgcgttgaagcaacaaaggaatacatccatggcgaacaatatagatcagactccaaaacagttaaccaacaagcttacttttatgccagagacctcgaagtccatcccaaggacacatttgtgttcagtatag

SEQ ID NO: 110173 - DNA, 261 bp, Glycine max
ctcgcactctctctacgcacgcctcaacatcccttctctgctccattcattatgtctccgtcgttggatcttccccccaagggtggcttcagttttgatctatgccgaagaaacgcaatgcttcaaaacaagggcctcaaagccccaacctttctcaaaactggcaccactattgtcggtttagttttccaggaaccggtcattcttggggctgatactagggcaactgaaggacctatagtggctgataaaaactgtgag

SEQ ID NO: 110174 - DNA, 256 bp, Glycine max
ataagccttcctctctgcagagtgcaaagctttctctccccgttgcttcattcattctcaacaacaaaccaatgtttcttagaaaatgagggggggcttgtggcaacttgggcaatcgatcactcgccgtcttgcccatggagataagaaggctgttgctcgtcgatgttttgcctcagaagctgagctgaaaaagacagtgtttcatgacttccatgttgctcatggtgggaagatggttccatttgctgggtgg

SEQ ID NO: 110175 - DNA, 252 bp, Glycine max
ggaaatttggctgatgacaccatcaattttgaggcctttccccacaagctggtgcagtttggagaaattcaggaaaaagttgtattgaaattttcacaagaggaatttcttacagcttggtcaactcaggtgcgtcctgcaacaactctgttggctgatgggtgcccatatttgtatgctatggtgcatgatagttcagtgtctacaataccaggtgattttgtcattggtgtcaagttgacaaccataaac

SEQ ID NO: 110176 - DNA, 250 bp, Glycine max
cttacttaaagatggagggagctaaagtgcattggttctctatcactaattcgctcatggtgatcacttttcttgctggtattgttcttgtgatcttcctgaggacagttagaagggatctgacccgttatgaggagctcgataaggaggctcaagcacagatgaatgaagagttatctggttggaagcttgtagtgggagatgttttccgcactccgacaaatcctgctttgttgtgtgtgatggttgg

SEQ ID NO: 110177 - DNA, 248 bp, Glycine max
taagaaagtagcaaagatgacaggtggtatgtttggtaggaaggggcacaagatataggggacagtggtgttgatgccaaagaatgtgttggacttcaacgccagaacctccgtcggaaatggcagtgcttaggacaccgccaccgatttcttgggcaaaggcttggacgcattaggtcatgcagttgatgctctcactgccttcgctggccatagcatctccttgcagcttatcagtgcgactcaga

SEQ ID NO: 110178 - DNA, 248 bp, Glycine max
gtctcagaggcctaattcatgtgctttggggttcctacagccacatgttttttctaaccagaaatcgacggattgttcaaaagggtgttgatttcaagcagattgacaaagaatgggactgggacaatttcttgattcttcaagcactagttgcctccatggcatgctatatgtttccctttcttcagcatcttcctctctggaatgtaaaaggtcttattgttgctttggttcttcatgtgggagtc

SEQ ID NO: 110179 - DNA, 253 bp, Glycine max
caaaaggttgctgaagggttttttagcaaatgccaaggctctaataaagaaagagggtggggagattcatgtaacacacaaagagggtgatccatacaacaaatgggatctggtgaagaagccagaaaagagagggctggtcttgcaacaagttgtgccattcttcaaggatgattatcctggttatgacaacaagagagcccatggaaaattatctgatgcacctttcccggttggggaagctagtacttac

SEQ ID NO: 110180 - DNA, 250 bp, Glycine max
agaaaacataataatgggttcacaaaattgtatggataggaagcactatgttctggtgcatggggcatgccatggagcttggtgttggtataagctcaagccacgcttggaatctgcaggccataaggtcacagtacttgaccttgcagcttctggaaccaacatgaagaaaattgaagatgttgatactttctcagagtattctgcgcctttgttgcagctaatggccacaattccctcaaatgagaag

SEQ ID NO: 110181 - DNA, 259 bp, Glycine max
agcagagattccgtgagttgcaaaaatgaaaacaattctttctgcagagaccatgaacatcccggacggcgtgagcgtcaaggttaatgccaaggtcatcgaagttgagggcccccgcggaaaattggtgcgagacttcaagcacttgaatctcgattttcagctcatcactgacgaaaacggtaaaaggaagctgaaggtggaggcctggttcggttctcggaaaacatccgccgccattcgcaccgccctgagccag

SEQ ID NO: 110182 - DNA, 257 bp, Glycine max
cttccaattgaaaaacaaattctagtcatttatgcagctgtcaatggattctgtgatcgaatgccattagataaaattcctcaatatgaaagagacattctaacgactattaaaccagaattactacaatcactaaaaggtggactaactagcgaaagaaaaatagaactagaaaaattcttaaaagaaaaaggtggaacttactatatatgatgatgatgaaaaaaattaaacaatatctaatcatcttgtttttt

SEQ ID NO: 110183 - DNA, 250 bp, Glycine max
agtggttcttgtaattcagtgctgctagaagatggaaactagtgaatggcatatcgagcgaagatctagcttcggctctgaatcccccttagcaagagaggcaggaaatgtgcctgaaactgggtcactctctattgtggtgcttggtgcttctggtgatcttgctaagaagaagacatttcctgcacttttccacctatacctgcagataaacttaccaccagatgaagttcatatttttggctatgca

SEQ ID NO: 110184 - DNA, 246 bp, Glycine max
ctcgagccggtagcattcagtgaaacactagctagggtattgggagctctcgttgtttcggagttagggaccttacgcagccatggccactgctacgaatgccgccgccgccccaccacgccagctctcccagaaggaagctgacatccagatgatgttggccgccgacgtccacctcggcaccaagaactgcgacttccaaatggaacgttacatcttcaagcgccgcaacgacgggatttacat

SEQ ID NO: 110185 - DNA, 247 bp, Glycine max
caaaagcagcacaagaacactcatcagatcccagtgatcaattcaatttgcgttcatcactggtaaggcaaacatgaggggcattctttccgtaaggacagccttggttcaacatcatagtgagaaattgggccttggtttcagagtatttagcactcagggtgcttccactgctagtaccccacagccgccaccaccacctcctccgccggagaaaacccattttggcggccttaaggatgaggac

SEQ ID NO: 110186 - DNA, 247 bp, Glycine max
ggcttggccatatgttcagaatgatctgcgtctcagggctgagtatttgcgctttgatctcaacactgtcattgctggaaagcctaaggatgagaagaaatcactcaaggaactcactggcaagctcttccaggatatcagcaatctggatcatgcagcaaaaattaagagcagcccagaagcagagaagtactatgctgctactgtatcttctctgaacgatgtccttgccaaacttggttaatgt

SEQ ID NO: 110187 - DNA, 246 bp, Glycine max
gcagacttaacaacagcacaaagcgggttactgtctgttcaagctaccatctctctctctctttcttagtgcctccttgccagaagttaaaatggcccaagaaactttcctattcacatctgaatcagtgaacgaggggcaccctgacaagctctgtgaccagatctccgatgctgtgctcgatgcatgcttggagcaggaccctgacagcaaggttgcctgtgaaacctgcaccaagaccaacat

SEQ ID NO: 110188 - DNA, 179 bp, Glycine max
atggaatcttctcagctcaaaacttacaatctcacagaaagtgacttggtgaaagaccacttgcgttacttgatgggaggccgatcaaacattcagaatgaggttctctgtcgtttcacctttccagaaagacctggtgctttgatgaaatttttggaccctttcagtccaggttggaa

SEQ ID NO: 110189 - DNA, 271 bp, Glycine max
gtttttacattgctcctgcttttatggacaagcttgttgttcacatcagcaagaacttcatgaccctgcccaacatcaaggttcctctcattcttggtatctggggaggcaaaggtcaaggaaaatccttccaatgcgagcttgtctttgccaagatgggaatcaaccctatcatgatgagtgctggagagttggaaagtggaaatgcaggagagccagcaaaactgatcagacagagataccgtgaagccgcagacatgatcaagaaggg

SEQ ID NO: 110190 - DNA, 267 bp, Glycine max
ccaaattgtatcccaaatccgattgcagtgtgtttgatgcctttggtagagtttatagtggtaagatacagacaggacaggctgtacgtgttctaggagaaggatactcgccggatgatgaggaggacatgactgtaaaagaagtaactaagttgtgggtgtatcaagctcgtgataggatgccagtagctgaggctcctcccggttcttgggttctaattgaaggtgtggatgcttcaatcatgaaaacttctactctttgtaatg

SEQ ID NO: 110191 - DNA, 261 bp, Glycine max
tcctgccagtagtcatatgcttgtctcaaagattaagccatgcatgtgtaagtatgaactaattcagactgtgaaactgcgaatggctcattaaatcagttatagtttgtttgatggtatctactactcggataaccgtagtaattctagagctaatacgtgcaacaaaccccgacttctggaagggatgcatttattagataaaaggtcaacacaggctctgcctgttgctttgatgattcatgataactcgtcggatcg

SEQ ID NO: 110192 - DNA, 285 bp, Glycine max
cgtacgaactcggaattggtcgagctcgagccgttttcagcaacatttcctgttactgtaaggatttcaaggataggtatattcgaaaaccttatgtcatcaaccttatggatgagctaactctgaaaggtattacacaattttatgcattcgtggaagagagacagaaagtccactgtctaaatactcttttttctaagctgcaaataaaccagtctatcatcttctgcaattcagtaaatcgggttgaactccttgccaagaaaatcacagaacttgggtatt

SEQ ID NO: 110193 - DNA, 265 bp, Glycine max
gatcaccatgtccttcttgagggtaccctattgaagccaaacatggtcacccctggatcccaatctgctaaggtttcccctcaggtggttgccgagcacactgtcagagcccttcagagaaccgtgcctgctgcagttcctgctgtcgttttcttgtctggtggccagagtgaggaggaggcatccgtcaacctcaacgccattaaccaggtcaatgggaagaagccatggtcactctctttctcctttggaagggcacttcaac

SEQ ID NO: 110194 - DNA, 258 bp, Glycine max
cttaaagtgactgaggaggagaggtctgaatatctgcgcttgcagtctcaattgaagcatgaagttgatcagtacagacaccagaaagagctacttctgaaggaagctgaagacttaaggcaacagaaagagacttttgaaagagaatgggatgagctagatctgaagagaacagatgttgagaaagagctgaaaagtgtggttcaacagaaagaagaactattaaaactacaacaatatgaagaagaaaagttaaag

SEQ ID NO: 110195 - DNA, 127 bp, Glycine max
ctcttctgaaacctagctttgtttcctcgtctgcagtgagagaccctgagctagttgtacaagaggtacaaagaagcatcaatgcctctagaagaaacttgggttatgtatcatgcggaacaggcaa

SEQ ID NO: 110196 - DNA, 177 bp, Glycine max
gcttccttctggtgcgaagaagattgtgccaagtgggtgcagggcgatgattgggcaggttgcaggtggagggaggactgagaagcctcttctgaaggctggtaatgcttaccataagttcagagtgaagaggaattcatggcctaaggtgcgaggtgtggcgatgaacccagttga

SEQ ID NO: 110197 - DNA, 271 bp, Glycine max
agctcggatatcgctcatctcgagcgaatcggctcagtgttgatcgagataactagcatcagtgtgatgacaaataaggtccttgttttcttagttgctacaattttggtagcatggcaatgccatgcgtacgatatgttccctctccgaatgaacactggctatggtgcccgtactccggaggtgaaatgcgcaagttggaggcttgctgtggaagcacacaacatctttggctttgagaccattcctgaagagtgcgttgaagcaacaa

SEQ ID NO: 110198 - DNA, 265 bp, Glycine max
aaatgctgttctttcaatgtggagatattttgttggagatctcgtctttgaagtttctaagatgacttctccctacattaaatgtacagtctctttcttcatagcatttggaaatttggctgatgacaccatcaattttgaggcctttccccacaagctggtgcattttggagaaattcaggaaaaagttgtattgaaattttcacaagaggaatttcttacagcttggtcaactcaggtgcgtcctgcaacaactctgttggct

SEQ ID NO: 110199 - DNA, 264 bp, Glycine max
gattttactcttttatttctggagataagaataataataatttgatctgttctgttaaaaaattatggtccaatagatccgtgttgctaacccacagtccctccctcacccacgtctctctccgcttcagatcttaaacgtctttcgctgttccaagatgggtgtggctgagaacattcccgatatggaggagggtaccttggagattggaatggaatacagaactgtatctggagttgctggaccattggtcattcttgacaa

SEQ ID NO: 110200 - DNA, 265 bp, Glycine max
atcaaaacctgtggtactactaagctattgcttgcaatcccacccatattgaagttcgctgaaatgctttcccttaatgttaagtctgtgaattacaccaggggaagtttcattttccccagtgctcagccatatccccatcgcaacttttctgaggaagttgctattcttgatggctactttggcaaacttggtgcaggaagcaatgcttatattttgggtggccaagacaaagcacagaactggcatgtctactctgcttctg

SEQ ID NO: 110201 - DNA, 260 bp, Glycine max
ggccactcttcttcttcccacgctcctccttctcatacccttcgccaccctcgtctccgcccgccctcacctcgccggagactttctccgactgccctccgaaaccgataacgatgacaacgtccagggcacccgctgggccgtcctcctcgccggttccaatggctactggaattacagacatcaggctgatgtttgtcacgcctatcaaatactaaggaaaggtggcctgaaagaagaaaatattattgtttttatgt

SEQ ID NO: 110202 - DNA, 264 bp, Glycine max
ctcctaagaagccatacaagtacccatcacctccaccaccagtacaccctccttacactccccacccagtttatcactctcctccaccacctcctaccaacaagccttacatctatgcgtcacctccccctccttaccactattagctagcatagctctatggatatgaagaatatgtgcaacgaataaaagaaagcgatagaaaaggaagaagaagcgcttcgcgatgcacgaaagagaagaattggaagcaaagtttcggcg

SEQ ID NO: 110203 - DNA, 265 bp, Glycine max
atccattcttgctctgtattttgtttttcttttaatttttctttaaatttctcaattgatcaaagatcttcagcaaaccggtcaagtttgtgtagtttggccagatgggaggtgggtttagagtgctacacttagttagaccttttctctcgttcctacctgaagttcagactgctgataggaaagtgccatttagagagaaggtcatatatactgtgatctctctgttcattttccttgtttgcagtcagcttcctctgtatgg

SEQ ID NO: 110204 - DNA, 197 bp, Glycine max
ttcttcagaagattttcctgaaaaggaagatcaagacaaacccaaaaagattgatgccagattgagacaaagaatagatcctcaatacaatgaggttcaggctcagatggaaacaaatttgtttaaattgtctcttgatgatgttgaaactcctaaaggttccatgttggatcttaaaatttctcaatctaaaattg

SEQ ID NO: 110205 - DNA, 184 bp, Glycine max
ggaagacttgctatgtttgccatgcttggttctacttccaagcttatgtcactggagaaggtcctgttgagaaccttgcaaaacatctcagtgacccctttgggcacaacttgctcactgtcatttctggatctgctgagagagctccaactctctaaatcattcatcttcatgtttttctcca

SEQ ID NO: 110206 - DNA, 261 bp, Glycine max
cgctttctttcaagcttcaagcatttatcatcacttctacatatgacaacacctcagaagacttacagcagaagtgcaacacgaaccaagatgccagcgtaatgcagccagatccgatacattgtacgtctccggcagatgctgcggcggtggcgcaacaaggcccgaatgtccgcgaaccgtgcaccaccgtccgatgtgcccgcggggcacgtggcggtgtgcgtgggcagcaacctcaccagattcgtggtgcgcgcc

SEQ ID NO: 110207 - DNA, 254 bp, Glycine max
gctgaagctaggccaagggctttctttgtgtttggagattcacttgttgataatggaaataacaattacttggctaccaccgcatgtgccgatgcccctccttatgggattgattaccctccaagtcatagaccaactggtcgtttctccaatggctacaacattcctgatcttatcagtcagcgacttggtgctgagtctacattgccatacttgagtccagaattaagaggaaataagctccttgttggtgc

SEQ ID NO: 110208 - DNA, 263 bp, Glycine max
ctggataatgaggcgctctacgatatctgcttcaggactctcaagttgaccactcctagctttggtgacttgaatcacttgatctccgcaaccatgagtggtgttacatgctgtcttcgtttccctggtcaactcaactctgatctgaggaaactagccgtgaatctcatccctttccctcgtctgcacttcttcatggttggatttgcgcctctcacctctcgtggctctcagcagtaccgtgcattgacagttccagagct

SEQ ID NO: 110209 - DNA, 260 bp, Glycine max
cgaaaattagggtttgtagtgtagcaggaacaagcagcaatggcgccgaaggtaacacgcaaggttagcagaaaccccgaattgataaggggaattggaaagtactcgaggtcgcagatgtaccacaagaggggcatttgggctatcaaggccaaaaatggtggcgttttacctcgccacgaccctaaacccaaacctgaaacacccgctgaaaaaccacccaaattttaccctgctgatgatatcaagaagccccttgt

SEQ ID NO: 110210 - DNA, 263 bp, Glycine max
gtcatggtctttggagagatcacaaccaaggccaacgtagactatgagaagattgtccgtgacacatgccgcgaaattggattcatctctgatgatgttggtcttgatgctgacaaatgcaaggtgttggtcaacattgagcagcagagccctgatatcgcccagggtgtgcacggtcacttcaccaagcgcccagaggaggttggtgctggtgaccagggtcacatgtttggctatgccactgatgaaacccctgagtacat

SEQ ID NO: 110211 - DNA, 270 bp, Glycine max
aaacagtgtgatgaaaatgaaggtccttgtattcttcgttgctacaattttggtagcatggcaatgccatgcgtacgatatgttccctctccgaatgaacactggctatggtgcccgtactccggaggtgaaatgcgcaagttggaggtttcctgtgaaggcacacaacttctgggttcttagagactatccctgaagagtgcgttgaagcaacaaaggaatacatccatggcgaacaatatagatcagactccagaacagttaaccaac

SEQ ID NO: 110212 - DNA, 158 bp, Glycine max
ccaacacaaatcttagccgccattgatttttcctcttccatttctcttactttctcagcctttttcgattacccatttggttatttcgccctaatggctcttgctccatccaaagtttccaccttttctggtttttctcccaaacccagtgttggggg

SEQ ID NO: 110213 - DNA, 156 bp, Glycine max
aaaacattcttgtggggtaggtactctttggaaatgtctgctgttatttacaaggattgggttttcaccgatcaagcattgcctaatgatcttgtcaagagaggagttgctgttaaggatccatctgctccccatggagttcgacttttgatcgag

SEQ ID NO: 110214 - DNA, 155 bp, Glycine max
aactcatggcaggatggagtgtatggtaccaattgtccaattctaccagggcataacttcacttatgttcttcaagtgaaggatcagataggtagctacttctactacccttcccttgcattccacacggcagccgaacccgatggtggattcaa

SEQ ID NO: 110215 - DNA, 157 bp, Glycine max
cctcatccaccatcactgctcatggctgatgcatggacaaaaccatactccagggaatatgcagccttcccagctccttggctccgtactgcaaagttctggcctaccacaggacgtgttgataatgtgtacggtgacggcaacctcatttgcaccc

SEQ ID NO: 110216 - DNA, 147 bp, Glycine max
aagaagaaaccaggcaatacatcacatggttcaagtgctatcatgggatgggcgtgtggcgcatggaaggaaacgaaatcagggacctaattctccattccatcaaaattggttatcgccattttgattgtgctgctgactacaaaa

SEQ ID NO: 110217 - DNA, 237 bp, Glycine max
tagccgcagcagcctcaggaggagaataaggatgtctcaacaggaagttcgagcacccaaggcacgggtcactgggatttctccccaggaagcgtgctgctcgtcacaggggaaaagtgaaggcattccccaaggatgacccatccaaggcacccaagctcactgcattcttgggttacaaggctggtatgactcacattgttagagaggtcgagaagccaggttcaaagcttcaca

SEQ ID NO: 110218 - DNA, 247 bp, Glycine max
aaaaaaccgaccctctcctttcctcttcaccaaccaatggctcccccaaaggccgagaagaagcccgcggagaaaaagcccgcagagaaggctccggcggagaagaagcccaaggccgagaagaagataatcgaaggaaggaggaagcgagaagaagaggaagagaacaaagaagagcgtggagacctacaagatttacatcttcaaggtgctgaagcaggttcacccggacatcggaatctcaagc

SEQ ID NO: 110219 - DNA, 258 bp, Glycine max
agagcacacacaaaccctcccctcacactctccaaaccctagcggcactacacacgttatctctctctctctctctctctctccctctctccttccccaagatgtcgagcgccgatcccgagcaccgagaagaggaggaggcacccgccgtcggcgacgacgaggacaccggagcacacgtcgctcccatcgtcaagctcgaggaggttgctgtcaccaccggcgaggaggacgaagatgcaatcctagatctcaaat

SEQ ID NO: 110220 - DNA, 252 bp, Glycine max
gtcctgcttattacaagcgtggggattatgttcctggattgaaggtagatggcatggatgctcttgctgtgaaacaagcttgtaaatttgcaaaggagtttgctttgaagaatggtcccattattcttgaaatggacacatacagataccatggccactccatgtctggatcctgagcagcacataccgtacacgtgatgagatttctggtgtgagacaggagcgtgatccaattgagagagtaagaaagct

SEQ ID NO: 110221 - DNA, 252 bp, Glycine max
gttctctctctttcactcgcgtctcgagtttcacagcgaagtcgtaggagggtttcaaaagatggagaacatgcagagcttctggcaattgggcgatgaactccgtggacactcaaaagcatcggtggatcacaaatggttaatggttgcttcgaaattggcggaacagacaagattgaagggggagcgtgtgaacaaccttgatctttcaaagggccccattgaaacaaggtcaagggataaatttgggtt

SEQ ID NO: 110222 - DNA, 253 bp, Glycine max
attggaactgttcagaacatcccagagttcattgaaggtgtcaaagccaggaaacgcaagctctctggttttggacatcgagtgtacaaaaactatgatcccagggcaaaggtcttaagaaaactggcagaggaagtgttttccattgtgggcagggatcctcttattgaggtggcagttgccttggagaaggttgcactatctgatgaatatttcatcaagaggaagctatatccaaatgttgacttctact

SEQ ID NO: 110223 - DNA, 255 bp, Glycine max
ctacggacaagtccgtcgagtcaatgatgctcgattccaacgcctctgatctcgacaaggaggagagacccgaagttttgtccctactaccaccatatgaaggaaaatcagttgtagaacttggagcaggtattggaacattcacagttgaattggccaagaaagctggccagttacttgctgtggatttcattgagagtgctataaagaagaatgaaagcattaatggacaccacaagaatgtcaagttcatgt

SEQ ID NO: 110224 - DNA, 246 bp, Glycine max
gttttgtttatttgaaattaacagtagcaaagatgtttggaatcatcggaggaaacaagggtcacaagataaaggggaacttggtgattatgcgaaagaatgtgttggatatcaacagcattaccagtgttaagggtgtcatcggaaccggcattaacatcattggaggagtcgtcgacaccgttactgctttggcgtccgacatctccatccagctcattagtgccacaaggctgatggacatgg

SEQ ID NO: 110225 - DNA, 249 bp, Glycine max
  unsure (1)..(249): unsure at all n locations
cgattcgttccatttcttccaaaagctccacagcctcagcgcgcgctctcgtcactggagctgcagggcaaattgggtatgctcttgtccctatgattgctaggggagtgatgttgggtcctgaccagcccgtgatcctccacttgcttgacatccttccggcagcaccccctccccctggggtnaaaatggaattggtgggtgctgcattccctcttcttaaaggtgttgttgccacaactgatgtgg

SEQ ID NO: 110226 - DNA, 265 bp, Glycine max
caattcttcgctttaacgagaaaggacacattttcccttacaatggcacgaaccaaacaaactgcgcgcaagtccaccggaggcaaggcacctcggaagcagctcgccacaaaagccgccagaaagtcagctccggcgaccggcggagtgaagaagccgcatcggttccgccctggcacggtggcgctgagggagatccggaagtaccagaagagcacggagctcctgatccggaagctccccttccagcgcctggtgcgcgaga

SEQ ID NO: 110227 - DNA, 275 bp, Glycine max
gtcctacaacagctcaggtgttgtgaagttctagaagttgttagactttcaagggctggatatcctattcgaatgggccatcaagagttttccagaaggtatgggtttctgctttctgaggccaacatatcgcaagatccattgagcatctcggttgctgttttgcaaaaattttatatcccttatgaaatgtaccatgttggctacaccaaattgtatcttcgagcagggcagattgatgcactggagaataagagaaaacaggttttgcaggg

SEQ ID NO: 110228 - DNA, 270 bp, Glycine max
ggcaagcgcttctcctctttgtgttctggctatgcttcttggcaagagttagatcggacgaggattgcgtgtacacggtgtacgttcggacgggttcgatcatcaagggaggcaccgattcagtaattggtctgaagctatacgacaagtccggctacggcatatacatcaccaacctcgaggcatggggcgggttaatggatccgggtcacaactactacgagcggggcaacctcgacatattcagtggtagaggcccttgcttggaag

SEQ ID NO: 110229 - DNA, 263 bp, Glycine max
ctcgagccgctttcacctcttcagcagtcgttacagagactccataacccgaaaatgcatttcaagaggtacgttgagattggaagggttgctcagatcaactatggcaaagagtatgggaggctcgtggttattgtcgatgtcattgaccagaatagggctcttgttgatgctcctgacatggtgaggtcccaagtgaacttcaagaggctatcactcactgacatcaagatcgatattaagaggatccccaagaagaagga

SEQ ID NO: 110230 - DNA, 265 bp, Glycine max
cttacctgctacttactactatagtgtctgattcacaggccagagggcaaagattttgagcacaatggcctcgacacaatgctttttgcaccaccacgccctcaccactccagctagagcttcaacacagcgcctagttgtgagcaccaaaccaaaccacattgtttgcaaggcagcacagaagcaggttactgtccaagagggtgaggacactactactggccttgtctctcgcaggttggccctcactgtgctcattggtgct

SEQ ID NO: 110231 - DNA, 264 bp, Glycine max
ggagggtacgccgtgagttcaaggctaacaagatctccgaggaagagtatgttaagtcaattaaggaggaaattcgcaaagttgttgaacttcaagaagagcttgatattgatgttcttgttcatggagaaccagagagaaatgatatggttgagtacttcggtgagcaattgtcaggctttgccttcactgttaatgggtgggtgcaatcctatggttcccgttgtgtgaagccaccaatcatctatggtgatgtgagccgcc

SEQ ID NO: 110232 - DNA, 262 bp, Glycine max
aagcaatttgctgcagaagaaatctcttctatggtgctcatcaagatgcgtgagattgctgaggcttaccttggctccacggtgaagaatgctgttgtcactgtccctgcttacttcaatgattctcagcgtcaagctaccaaggatgctggagtcattgctggtcttaatgtgatgcgaattatcaatgagcctactgcagctgccattgcttatggtcttgataagaaggccacaagtgttggtgagaagaatgtgttga

SEQ ID NO: 110233 - DNA, 263 bp, Glycine max
cgacatttgcaggagatctcttgacatcgaacgccctacctacaccaacctgaaccgtctcgtttcccaggtgatatcatccctcactgcctctttgaggtttgatggagcactgaatgttgatgtgactgagtttcaaaccaacttggttccttacccaaggatccatttcatgctttcctcgtatgcccctgttatctctgccgagaaagcataccatgagcagctttccgttgctgagatcaccaacagtgccttcgagc

SEQ ID NO: 110234 - DNA, 269 bp, Glycine max
caaggagggatctctctctctctctctttctctcctctcacacccccaaaagcttcttctgttccgtgcaggccactaatgaaaatcttccaccaaatgtaattaatcaacttgccaaggagttgaaaagtcttgatgaatcccctcctgagggcattaaggttgtggtaaatgatgatgatttttcgacaatattttctgacattgaaggcccagctggaactccttatgagaatggagttttccgaatgaagctgttgctgtctcat

SEQ ID NO: 110235 - DNA, 262 bp, Glycine max
gagacagatgatgatggagatggcgaacgaaacgctgtcgttgcggcactcgcggcgttggtgctactcgcggcgagtgtggcggtggatgctcaggagaactcggacgtgaagacgctggtgaagtacaagcacgggaagaagtactgcgacaaaggatgggaatgtaagggctggtcaatttactgttgtaacctcaccattaccgattatttccagacctaccagttcgagaatctgttctccaagcggaactcgccgg

SEQ ID NO: 110236 - DNA, 262 bp, Glycine max
ttctcgagcgaatcggctcgagcgtaggcgctggtacactggattgtgacttccccgcaaacgtggcgctcggaaatggactcaacttctccggcgtttcgctttaccgcggtaacgctttgccggattcttctttgcctttggtttatgcagggaatgtgagtaatggtgctatgaatgggaacttgtgtatcacgggaacgttgtctcctgagaaagttgctgggaagatcgtgttgtgtgaccgtgggttgaccgctag

SEQ ID NO: 110237 - DNA, 259 bp, Glycine max
gtgcggtaggctcatccgagaccggaagcagcaatggggatcgatctcaaggccggaggtaaaagcaaaaaaaccaaaagaacagcacccaagtccaatgatatctatcttaagctcttggtcaagctttatcgcttccttgttcggagaactggcagcaaattcaatgccgttatactcaagagattgttcatgagcaaggttaacaagcccccattgtctttgtcaaggttgattaagtataccaaggggaaggaag

SEQ ID NO: 110238 - DNA, 244 bp, Glycine max
gccggagatcaccaatgccgtgttcgagcccgccagcatgatggccaagtgtgatccaaggcacggcaagtacatggcttgctgcttgatgtaccgtggtgatgttgtccctaaggatgtcaatgctgctgttgccaccatcaagactaagaggactgttcagtttgttgattggtgtccaactggattcaagtgtggtatcaactaccagccaccttctgttgttccttgtggtcaatgcgag

SEQ ID NO: 110239 - DNA, 262 bp, Glycine max
atctaaaccagctcattatatatatattacaacttactatgccaactatgaaacaacttattagaaacacaagacagccaatccgaaacgtcacaaaatccccagctcttcggggatgccctcagcgccgaggaacgtgtaccagggtgtatgtgcgactcgttcagatcatatactaagaagaaaaaaccaatttcattttttcagtattgttgatcggttaagatagtgtgaatgtagttttcccattcagactatctta

SEQ ID NO: 110240 - DNA, 260 bp, Glycine max
ttgctttctgcctggtattacttgtcagccttccccatggaagtattgatcccagcatggctggacttgcagtaacatatggcctgaatttaaatgcacgtctatcacgatggatacttagcttttgcaaacttgaaaataaaatcatatccatcgaaagaatttatcaatacagccaaattcctagtgaagcaccagcaattgttgaagattctcgtcctccatcctcatggcctgagaatgggacaatccaattaatt

SEQ ID NO: 110241 - DNA, 259 bp, Glycine max
attgaatatgatgcgtgtacaattccaaatgattgtggttctttggttgttgccaaggttggaaatcacaatcaaattgttggtttccatgttgctggaagcataggaagactgggatatgcttcattgatactatatgttgagccagttgtgcaagctcaaagtgctgaagtttattttgacttcttccctgtggaggttgatagtcaagagggagttgctcacattggtgaattgtaatctggtgtctatgttccat

SEQ ID NO: 110242 - DNA, 260 bp, Glycine max
gcttttacagaaataataaagaactgcatggctcaagatctttcctggaaggggcctgctaagaagtgggaggaagtgctgctaagcctgggagttcctggcagtgaacctggaagtgatggagaagaaattgctccacaggcaaaggaaaatgtggcaacaccataataatgagaacaaagatgtgagggaatcttagtctcatgaagttcccccagctccttgcttcttattaatattatgttttatccttcttccaa

SEQ ID NO: 110243 - DNA, 258 bp, Glycine max
aaaatttcttccttgccactgccagtgtgtcaccaccatggccaccgtcacaacccaagcctccgccgcgattttccggccatgtgcctcgaaatcgaggtttctgaccggctcttccggtaaactcaaccgggaagtgactatgaggccaatggggtgccctccttctgcctctttcaaggttgaagccaagaagggagagtggttacctggcttggcctccccaacttacctcaatggcactcttcctggtgacaa

SEQ ID NO: 110244 - DNA, 261 bp, Glycine max
ttctcgagccgaatcggctcgagccttctggggctgtgcctggggatactgtcaacagaaagagaggaaggcctagaaaatatgggcccgatggagctgtgtcgttggcattgactccgacaccggctagtcatcctggagccttggcacaaggccagaaacggggcagagggcgcccgcctgggtctgggaagaaacagcagttggcttctcttggtgaattgatgtctggttcagctgggatgggtttcactcctcata

SEQ ID NO: 110245 - DNA, 259 bp, Glycine max
ctctttctaagttttttctacctctttctctctctctctgcctgccatggttctctccaaaaccacctccgaatccgacgtctctgtccactcaaccttcgcttctcgatatgtcagaacttcgcttcccaggtttaagatgccggaggagtcgataccaaaggaggcagcgtatcaaataataaacgatgagttgatgttggatgggaacccaaggttgaacttggcatcatttgtgacaacctggatggagccagag

SEQ ID NO: 110246 - DNA, 258 bp, Glycine max
tgtagtatacgtcctgattcaatagaagatccagaagcacaacttttgctcaaagcttcagaaactatgctcatgaaagcttatgcttttttgaagtacaacaatgcgaccaatttgattgtcaggacccatttggcagaactggtcaatgaagacttttatgatgaaaaatttaattttattggcacaattggaactccagcttttcatcgacaaattgctgcacacttggagaaaatgccattatggcaaaaagca

SEQ ID NO: 110247 - DNA, 261 bp, Glycine max
tatcaggggcatgaactatcttcacgaatgcaaaccagatccggttattcactgtgatttaaagccaaaaaatattttgctggatagtggagggcaattgaagatagctggatttggcactgtgagattttcactaatttcacctgatgaagcacagctggtacagcctgagcctaacattgatctttcaagcttgtatgtggcaccggagatttacaaagatgaagtttttgatagaagtgtggatgcatattcttttgg

SEQ ID NO: 110248 - DNA, 256 bp, Glycine max
aatcccatcaaggccttgcatgacaagtcctgcttttggataaatggcatggccattcaaggaggaatagcacactgatttgttcctactttggaactcgatttgagaagcttcaacctattgaccattgctatgttgtgagagatacaccttttttagttctccatcgaaattgcttactcttagtgtcacatgctcccagtctccaatatgatctcctattttccctagtggaatatctatgagccctactttg

SEQ ID NO: 110249 - DNA, 256 bp, Glycine max
tctcgagccgattcggctcaggttttgtgaaatctaaatcgacatggcgtcacgggacaataagaaggcgtccagcagcagagccggccgaattcgcaccctctccgatctgaaccgtccctccgccgattccgacagcgactccgattgccctcaggagtattacaccggcggcgaaaagagtggaatgcttgtccaggatccttcaaagggaaatgatgtggatgaaattttcaatcaagctaggcaacttggg

SEQ ID NO: 110250 - DNA, 256 bp, Glycine max
cttcgttcgtcttttacatcaggatggagtctcaggtgaagcacgcacttgttgtcaaagtaatgggtcgtactggatccagaggacaggtgacccaggttagagtgaagtttctggatgatcagaaccgtcacatcatgaggaatgttaaaggaccagtgagagaaggagacattctcaccctactcgagtctgaaagggaagctagaaggttgcgctaagagggtctttctttcttgatctttatggtagttag

SEQ ID NO: 110251 - DNA, 167 bp, Glycine max
gcttggaagaaaggctgtttaatggtcaagattgtgatgtctgggaatgcagcagtcaaaaggagtgattgggcctcattggtacaagtgtttttaacaaacagcaacagtacagagcattttgatgcatgtaagtggacaaaatcagaaccacattcctgggaatt

SEQ ID NO: 110252 - DNA, 255 bp, Glycine max
gaatatgatggtgaattgaaacttccaagtcattaccttgtttctccaccagagattgacaggacttctggtgaatatttagtgtataatggtattcggacttttgcttgcagtgagactgttaaatttggccacgtcacattcttctggaatggaaaccgctctgggtattttaatgcagaattggaggaatatgtggaaattcctagtgattctgggattacattcaatgaacaaccattaatgaaagcattg

SEQ ID NO: 110253 - DNA, 258 bp, Glycine max
gagaatggctcccaagggtttaacctttctggctgtgttaatatgcgtttcagcactgtcactgagtccttctgttgcgggggaagggcaaaataatggccttgttatgaacttctacaaggaatcatgccctcaggctgaagacatcatcacagaacaagtcaagcttctctacaagcgccacaagaacactgctttctcctggctcaggaacatcttccatgactgtgctgttcagagttgtgatgcttcactgtt

SEQ ID NO: 110254 - DNA, 260 bp, Glycine max
aaaacccaaagtgcttctctcctctgtctttttctctctcttgctatccttttggctagtggcactgctgcaagtgcaactccaagaagcgcagtgccaagccaccatgtttcaacattcaacagaagcctttttccttccacttttctctttggatttggttcttctgcttaccaggcagaaggagcagcaagtgtagatgggagaggaccaagcatatgggacacctacactagacagcatactgaaaagatttggga

SEQ ID NO: 110255 - DNA, 257 bp, Glycine max
agcaagtagagctctggacttcttctttggttggtattctgatccggttttctatggtgactatccggagagtatgaaatcttcagtaggttctaggctcccaaaattcacaaaagctgaatctgaaggtctaaaaaattccatagattttcttggtgtgaattactacaccacttattatgcggaacatgctgaacctgtcagtgccaaccgaaccttctacacagacatactagtcagtctcagtacggaaagga

SEQ ID NO: 110256 - DNA, 252 bp, Glycine max
gaaaagatcagtctcctggtactaggtctgaaatccctgttgtccaggttgatcctgtttttgagggactggatggtggaattggcagcctggtgaagtggaacccggttgcaaatgttaatggtctagacatatggagcttccttaggaccatggatgttcctgtaaattcattgcattcccaaggatatgtttcgattggctgtgagccgtgcacaaggccagttttaccgggtcaacatgaaagagaag

SEQ ID NO: 110257 - DNA, 255 bp, Glycine max
ctcgagccgcttcattctccaccaacactacaacttttgcaaactagttttgtttttggaacatatcgcattacattacattagattggtggcaaagcaatggcatcgtcactacaagcagcagctactttcatgcaacccaccaagtttttgcagctaaagtctactcaggccatatctaaggcttttggtttggaacctgctggagttaataaggtcacatgctcccttcaggctgatcttaaggacttggct

SEQ ID NO: 110258 - DNA, 253 bp, Glycine max
gtgagttttgtttatttgaaattaacaagtagcaaagatgtttggaatcatcggaggaaacaagggtcacaagataaaggggaacttggtgattatgcgaaagaatgtgttggatatcaacagcattaccagtgttaagggtgtcatcggaaccggcattaacatcattggaggagtcgtcgacaacgttactgctttggcgtcccacatctccatccagctcattagtgccaccaaggctgatggacatggg

SEQ ID NO: 110259 - DNA, 253 bp, Glycine max
gagaaatacaaacagaaaggtctggaaattctggcgttcccatgcaatcagtttggggcacaggagcctggatctaatgaacagatacaagagtttgtttgtactcgcttcaaggctgagtttcccgtttttgacaaggttgatgtgaatggtgacaaggctgctccactgtacaaatatctaaaatcaagcaaaggtggactccttggggatggcatcaaatggaacttcgccaagttccttgttgataaag

SEQ ID NO: 110260 - DNA, 251 bp, Glycine max
gataatgtcttgggataccctgacactggtggccaggttgtttacatcttggatcaagttcgtgctttggagaacgagatgctccatcgcattaagcaacaaggattggacattgtacctcgtattctcattatcacccgtcttctccccgatgcaatcggtactacttgtggccaacgtcttgagaaggtgttcggaaccgagcactcccacattcttcgagttctctttagaactgagaagggaattgt

SEQ ID NO: 110261 - DNA, 249 bp, Glycine max
atttagcttcactgttagggccatccaatcagaaaagccaacctatcaagtgattcaaccaatcaacggtgatcccttcattggaagccttgaaaccccagttacatccagccccttgattgcatggtacttatcgaacctccccgcatacaggaccgcagtgagcccactactaagagggatcgaggtgggcctggcccatggctaccttctggtgggcccattcgtgaaggccgggcctctgaggaa

SEQ ID NO: 110262 - DNA, 256 bp, Glycine max
gttgaaaagaaaccctagcaagtggaacaatggcagacgttgaagtcgatgtggcggcagagcagcagcagggctgccgaagaagagaacgttcaagaagttcagttttcgaggcgtggatctcgatgcacttctcgacatgtccaccgatgaactcgtcaagatgttcagtgcccgcgctcgtagaaggttccagagaggcctcaccagaaagcccatggccttgatcaagaagctccgtaaagcgaaaagggaa

SEQ ID NO: 110263 - DNA, 259 bp, Glycine max
atttctcaaagtggttttcactctgtttcaagacctggattttactttcttagagatgaatcctttcacattggttgatggaaagccttatcctttggatatgagaggcgagctagatgacactgctgctttcaagaacttcaagaagtggggagacattgaatttccgctgccatttggaagggttatgagtgccaccgagtctttcattcatggattagatgaaaagacaagtgcatccttaaaattcacagtgttg

SEQ ID NO: 110264 - DNA, 256 bp, Glycine max
ctcttcttccccaccatctcaccaaccaaacctcactctccctgccatggtcatgggagcctttcgccacttcgaaccggtttccaaatgcagcaccgaaaaccggtttaaccaaaccgtggcctcggacttggacggcaccctcctggtgtcccctagcgcctttccttactacatgctcgtcgccatcgaagccggcagcttcctccgtggccttgtcctccttggatccgtccctttcgtgtacttcacgtac

SEQ ID NO: 110265 - DNA, 257 bp, Glycine max
atgcaattcactctttgcagcttattctgcgtgactcgtttaaagatgctgagcatagaaattctaaggctgttgtggatccccatgtgtcagaacaagagttgcaaggggtggatgaactaagttctgtggccagagagatggttagattgatagaaacagccactgctccaatatttgctgttgatgtcgatggccacgtaaatgggtggaatgcaaaggtttcagaattaacaggactcccagttgaggaggct

SEQ ID NO: 110266 - DNA, 232 bp, Glycine max
ggcacgttttcaaaagctacgccgccggatcggcttccggagttgacaatttcatcagttaccggaaccgcgccaacgtcggcgacgactcgttccagagctacgccgcgaggtcgaagtccggtgccgccacgttcgcgaactacggcatgtcgtttaacgtcggaaacgacagtttcactgagtacggaaagggagcaacggggaaaacctctttcggttttaaatcata

SEQ ID NO: 110267 - DNA, 244 bp, Glycine max
ctgatttaaggaaatgggttcatgacaatgtgagtgctgaagttgctgcatctgtaagaattatctatggaggctctgtaaatggaggaaactgcaaagaattggcagcacagcccgatgttgatggatttttggttggtggtgcatccctcaaggcggaatttgtggacatcataaacgctgctactgtgaagaagaattgaaattcgtagttaggaactgataatgctgcctttcaagctgc

SEQ ID NO: 110268 - DNA, 256 bp, Glycine max
cgacggtcctctcctcaaaaactccgatgcttttctccagtctaatctaaataagtttgtatcacttggaagaccagcctggaaggaagctcgtgctactcttcaaaagcttttatcagcaactgagccaaccttgagggacaatgcggttttgaggcagaaagcacttgtgcctatgtgtggagttgcttctccctgttgctgttggggactacaccgatttctttacgtctctgcatcacactaaaaatcgtgg

SEQ ID NO: 110269 - DNA, 257 bp, Glycine max
tcgagataactagaaacagtgtgatgaaaatgaaggtccttgttttcttcgttgctacaattttggtagcatggcaatgccatgcgtacgatatgttccctctccgaatgaacactggctatggtgcccgtactccggaggtgaaatgcgcaagttggaggcttgctgtggaagcacacaacatctttggctttgagaccattcctgaagagtgcgttgaagcaacaaaggaatacatccatggcgaacaatataga

SEQ ID NO: 110270 - DNA, 255 bp, Glycine max
tgttggctgatgggtgcccatatttgtatgctatggtgcatgatagttcagtgtctacaataccaggtgattttgtcattggtgtcaagttgacaaccataaacaatatgtgtgcatatgggctcaatcctggtatttcaggttctcgtcttttgggcaccattcctcagtccatttcacagcaaactgtttggaatcaaatggcaacagtgagaacaccattgaattttgattctagcaagcagagcttttgtc

SEQ ID NO: 110271 - DNA, 255 bp, Glycine max
gttggtcaacaaattaatgtgacttgtgaagtacagcaattattaggaaataatcgaattagagctgtagctatgagtgcgacagaaggtctaatgagaggaatggaagtgattgacacaggagctgccctaagtgttccagtaggtggagcaactctaggacgaattttcaacgtgcttggagagcccattgataatttaggtcctgtagatactcgcacaacatctcccattcatagatctgcgcctgccttt

SEQ ID NO: 110272 - DNA, 252 bp, Glycine max
ctcttcttcgtctcaaacttcttcgttccttcgattcattccatttcttccaaaatggccaaagacccagttcgcgttctcgtcactggagccgcagggcaaattggatatgctcttgtccctatgattgctaggggagtgatgctgggtcctgaccagcccgtgatcctccacatgcttgacattcctccagcagcagagtcgttgaatggggttaaaatggaattggtggatgctgcattccctcttctt

SEQ ID NO: 110273 - DNA, 199 bp, Glycine max
attaaaattaagaaagaagggaaagtgtacgagaaaactatctctctctatatatagatagataaatgataaaagcctcgagggtccgtcccatccctgaaaatgctatgaggtgttgggaaatggttgaagtagttgaataggaggatcgctatgactatagctcttggtaaatttaccaaagatgaaaatgatttat

SEQ ID NO: 110274 - DNA, 254 bp, Glycine max
gccctagactcactagactacacacttcgcaatgtcggttgttgctcaaacccctgacatcgccggcgagcggcagtccggccaagacgttcgcacccaaaacgttgtggcatgccaagccgttgccaacatcgtcaaaagctctttaggccccgttggcctcgacaagatgctcgtcgacgacattggcgacgtcaccatcaccaacgacggcgccacgattctcaagatgctggaagtggagcatcctgctg

SEQ ID NO: 110275 - DNA, 251 bp, Glycine max
  unsure (1)..(251): unsure at all n locations
ctcattttcaagctgtttggtgtaaagatgggacaagtgcttggttgtgttcaagtgaagcagtcaactgtagccgtcaaggaatgtttcgggaagtacgatgatgttcttcaacctggttgccattttgtgccatggtgtcttggctgcggtgtggctggtgtcctttctacgcgtgtcatgcagctaagtcttcgttgtgaaactaagacaaaggtttgtttgtttcttnctcaaaacccttttatttt

SEQ ID NO: 110276 - DNA, 253 bp, Glycine max
attggaactccagcttttcatcgacaaattgttgcacacttggagaaaatgccattatggcaaaaagcaattttgtgtggaatgggacattgtttgtctcggaaatgcaaagaaacatggtattctgggatgaaggaaaaatttgtacaaatgatgaagagtatctatgaaacagaagttacagattggccagtaccactgaaaatcatttctggaaccattctcaacaattttgggaacaaccttctggaaa

SEQ ID NO: 110277 - DNA, 253 bp, Glycine max
cttcccttctccaacatgccaaacgacagcgttctgagtcttttcttcttcgttaccctcttcacatgccttctctctgctaattcccacgatgaccatattttcctaccgagtcaactccatgacgatgactcagtgagttgcactgctaccgacccaaaccttaactacaagccggtgatcggaatcctgacccaccccgtgcgaggtgcctctggccggctcagcaacgccaccggggtttcttacatcg

SEQ ID NO: 110278 - DNA, 242 bp, Glycine max
ctgactcacacacacactctctctctctctctagtacctcctcctactcctccttcttcttcttcttccctggcatcggatccagatccaaatccagtttaacaaagaaaatgcagtacaagaacctgggccgatcgggactgaaggtgagccagctctcctacggggcgtgggtgagcttcggtaaccagctagacgtgaaggaggccaaggcgctcctacagtgctgccgcgaccacggc

SEQ ID NO: 110279 - DNA, 249 bp, Glycine max
cgagacgtttgctttccaggctgagatcaaccagctcctcagtctcatcatcaacaccttctactccaacaaggaaatcttccttcgtgaactcatcagcaacgcctctgatgctttggacaagattagatttgagagtttgacggacaagagcaagctcgatgctcagccagagttgttcattcatattattcccgacaagactaacaatctcgctgaccattgttgacagtggcattggcatgacca

SEQ ID NO: 110280 - DNA, 249 bp, Glycine max
cgtggaccaacaagaagtgtaagttttcattcaatggccagcgctcagctctcagcaatatcttcgtcgatctctacggcgtcgtttgaagggcttcgaccttcggctgttcagtttgcttccgcgggcagaattagaattggcaatctctcccaaaggtctttccggggcttggttgtcaaagccgccaccgttgttgcccccaaatacaccgcgattaagcctctgggagacagagtgctgataaaa

SEQ ID NO: 110281 - DNA, 243 bp, Glycine max
ctcgagccttgctgacaagcagtgaggacggcactggagaagggacaggtgcacgtggacacacatgtgcagcaacgcattggccatgacgaagaacatgaccgacagtgacatagctaactacgaatacaatatgagagttgaaaataatggacaaaatggtaatagcaataggaagttgttggtggagaatgatgttgagtggccggagtggatttcggcggcggataggaggctacttca

SEQ ID NO: 110282 - DNA, 246 bp, Glycine max
gccagacattcgcttgtgatgttgggaagagccctgcagtggcaggttatggtttctgtgacaagtctttgggagtggaagcaagggtgaaagaccttgttgggaggttgacattgcaagacgaagatagggaacttggtgaactctgctgtggatgtgagtaggcttgggattccaaagtatgaatggtggtccgaagcacttcatggagtgtccaacgttggccccgggacgcgattctccaac

SEQ ID NO: 110283 - DNA, 247 bp, Glycine max
gtaagcactatagaaaaaacgacattcattcatctatggctacccttattgctcccagcaaccactctccccaagaagacgctgaggctctcagaaaggcttttgaaggatgggggactgatgagaaaactgtcatagtaatattgggtcatagaactgtttatcagaggcagcaaatcagaagagtctatgaggaaattttccaggaggatcttgtgaaacgcctagagtctgagatcaaaggaga

SEQ ID NO: 110284 - DNA, 192 bp, Glycine max
cttgaagtcatcagatttccttacatatggaataatatccatagctcaaaccgttttacctacatttcaatctgcatttggtttaaatgccgagtttgataggttttacgacgtgcgtggactctttgaaggtggaattcatctccctacagatgcactcagtaaaattagccccctaccagtgctcaagga

SEQ ID NO: 110285 - DNA, 249 bp, Glycine max
ctgtgacgtgcatcatggcctcgagagcagtgctattgttggctatgtgtgtgcttccggccatggttgtggccattcgcccagcaaagaaccctttttgcgtgaagggtcgcgtctactgtgaaccttgccgtgctggttttgagacctcagcaaccacctacattgccggtgctgagattatgttgcaatgcaagagcagggttagcaacgatgttgtgtacaccaagaaggggtacactgactcaa

SEQ ID NO: 110286 - DNA, 249 bp, Glycine max
  unsure (1)..(249): unsure at all n locations
aatcaatctcctcttctcttccagccatggcctcctatcatncgctctctccgccgccgcgatgtcgcctccgcctccctctatgcttatcgctcgttaacgggcagcaccaagccagcatatgtagctcacaactggtctagtttgtctcgaccattcagttcaaggcctgctggaaacgatgtcattggtattgatttgggtacaaccaattcatgtgtttccgttatggaaggaaagaaccccaaa

SEQ ID NO: 110287 - DNA, 246 bp, Glycine max
tgaaaacccaaagtgcttctctcctctgtctttttctctctcttgctatccttttggctagtggcactgctgcaagtgcaactccaagaagcgcagtgccaagccaccatgtttcaacattcaacagaagcctttttccttccacttttctctttggacttggttcttctgcttaccaggcagaaggagcagcaagtgtagatgggagaggaccaagcatatgggacacctacactagacagcata

SEQ ID NO: 110288 - DNA, 246 bp, Glycine max
tgcagatcttcgtcaagaccctcaccggcaagaccatcacccttgaggtggaaagctctgacaccatcgacaacgtcaaggccaagatccaggacaaggaaggaacccccccggaccagcaacgtctcattttcgccggaaagcaacttgaggacggccgtacccttgctgactacaacattcagaaggagtctactcttcacctcgtcctccgtctccgtggtggcatgcagatcttcgttaaga

SEQ ID NO: 110289 - DNA, 252 bp, Glycine max
caatctctctctctccaatggccaaagacctcgaaacggagattcaaagtgggttgcctcacaaggactaccacgacccaccccccgccccattctacgaccccgccgagctccgaaagtggtcctttttcagagctcatcgccgagttcgtggcaaaccttcctcttcctctacgtcaccatcctcaccgtcatcggctacaaccaccagacagccaccgccgccgagccctgcagcggcgtcggcgtcct

SEQ ID NO: 110290 - DNA, 241 bp, Glycine max
ctcgcactctctctacgcacgcctcaacatcccttctctgctccattcattatgtctccgtcgttggatcttccccccaagggtggcttcagttttgatctatgccgaagaaacgcaatgcttcaaaacaagggcctcaaagccccaacctttctcaaaactggcaccactattgtcggtttagttttccaggatggtgtcattcttggggctgatactagggcaactgaaggacctatag

SEQ ID NO: 110291 - DNA, 239 bp, Glycine max
cgtgacatgctcttcttgctttcacccttggtgtgaagcagatgatctgctgctgtaacaagatggatgccactaccccgaagtactctaaggctaggtatgatgaaattgtgaaggaagtctcttcctacttgaagaaggttgtttacaacccagacaagattccatttgtgcccatctctggtttcgagggtgacaacatgattgagaggtccaccaaccttgactgtaacaaggga

SEQ ID NO: 110292 - DNA, 242 bp, Glycine max
ggcctcaaaagacccactccgattcaaatacttgtccaccttagtgggccaaaagaccgtgtccacggccccaatcgcttcgggccagaccttcaacatcggcaactacgtcgtcagggtcaaattgggaacccctggtcaacttttgttcatggtcctcgacaccagcaccgacgaggccttcgttccatgctcgggctgcacgggctgctccgacaccactttctcgcccaaagcctcca

SEQ ID NO: 110293 - DNA, 186 bp, Glycine max
gtaagggattactcgatccatttccatatcgatcatgatacatataataattcgagcacccatttcaaacgcatatccaattttagcacagcagggttatgaaaatccccgagaagcaaccggtcgtattgtctgtgccaattgccatttagctaataagcccgtggatattgaggttccacacaa

SEQ ID NO: 110294 - DNA, 240 bp, Glycine max
ctaagaaccaaccattgatttggtacaagacaacctttgctgctccatccggcagtgatccagttgcaattgacttcacggggatgggaaaaggtgaggcttgggtgaatgggcaaagcatcggacgatactggcctacatatgtggcttcagatgctggttgcacggactcatgcaattatagaggaccttacagtgcatccaaatgtcgcaggaattgtggaaagccatcacagacac

SEQ ID NO: 110295 - DNA, 185 bp, Glycine max
gaaattttgataaaccgcgatcacaggttgccgcaccttaaaacctgaaacaaaagcaatcgttacttgatttcaagaatttctcaatttcttcctacttctttgtgcacgatttcttaagggaaagaaaatcactctctgtgctggccacagacttcgtgaatcattttcttttccacacaaca

SEQ ID NO: 110296 - DNA, 213 bp, Glycine max
tgacagcctccaaatccaatggcttcagagaagaaactttcgaacccaatgagggagataaaagtgcagaagctcgtcctcaatatctctgttggcgagagtggagatcgtctcaccagagccgccaaggtgttggaacaacttagtggccaaaccccagtttttccaaagcacggtacactgttcgttcctttgggattagaagaaatgaga

SEQ ID NO: 110297 - DNA, 249 bp, Glycine max
gttcaagataatggcttagatggccagggaaccagaattatggtaagaaagatggcggaaagcaggtatcccatggttcgcttatctgaaatacctgctaaacagttggaaaatgataaacctgagaagataaaaattgccataaggcctaggcctaacaaaatcagtttaaatgaagccaatgaagctggaaggaaaagcaatcctcctagaagtgtggaagagagaaaggtggaatatgatcgggca

SEQ ID NO: 110298 - DNA, 241 bp, Glycine max
  unsure (1)..(241): unsure at all n locations
cttaagncgcgacagacagcgagcaggcaggttagttcaaaattgcgctcgcccccttcatacttttcaggctatacgctgtatgtcatctgccccaagcacaaaactgtttattggaggtgtttcatattctactgacgagcaaagcttgagggaagctttttcaaaatatggtgaagttgttgatgctcggataattatggatcgtgaaactggtagatccagaggatttggctttatt

SEQ ID NO: 110299 - DNA, 237 bp, Glycine max
atttacaggaagttcactaatgctttggcagcagctgtgctcgtatctgtgggctggatatgttatgagctttatttcaaatcaaatgatgtatacaacgagcagtggcagaatgcatggatcatcccagccttttggcaagttttgtcttactctctcctgtttgttatctgcattctttgggcaccatctcaaagtgcaacacgatatgcttaccgtgatgatgggaacgatgag

SEQ ID NO: 110300 - DNA, 241 bp, Glycine max
gctatgaagaagagcacgctttgttctagaaggtctggctctggcacttttccgagtcctggaacgcctaattatcttcacgccactgttgctatgcaaaagggttggagttcggagcgagttcctttgcacaccagtgctgcactcaagcaggttggtgcggctctgttgcctttcaacaacggccgaactttgccgtccaaatgggaagatgctgagaggtggattcttagtcctgttt

SEQ ID NO: 110301 - DNA, 234 bp, Glycine max
ctgatcaatcaaggtcttctcaggcaaatgatgttcgcaagcaaatcgttggcagcgctgttccagtacttaaagatgaaaagttttccttgcggatactggtggaccattctattgttgaaagcttgctcaaggtggaaggacggttgtgacatctcgggtttatccaacaaaggcaatctatggagctgctaggttgttcttgttcaacaatgctactgaggccactgtgac

SEQ ID NO: 110302 - DNA, 236 bp, Glycine max
cagaccttaatttttctctcattcgcttcaaatttcaggaaatcaattatggctcaaccctcaacaagaataggccttgctggactggctgttatgggccaaaatctagcactcaatattgctgagaaaggctttcccatttctgtttataaccgaaccacttccaaggttgatgagactgtagaacgagcaaaacaggaaggaaatcttccagtttatggctaccatgaccccga

SEQ ID NO: 110303 - DNA, 234 bp, Glycine max
aataggatggggtcaaatgatgtatggggtgaaggcattggtgtaaatactaatgctgatttcagatcaggatatattatgaatactagcattgctggtcttgaaaaagcggatgcgttcctgttggttggcacccagccacgggtggaagctgccatggttaatgccagaatacgcaaaactgtcagagcaaaccaagccaaagttgggtacattgggcctgccactgatttc

SEQ ID NO: 110304 - DNA, 237 bp, Glycine max
tggccacctctgctattcagcaatcagcattcgcaggtcaaactgctctgaagcagctcaatgagttggtccgcaagaccggtggcgccggcaaaggtcgcaccaacatgcgccgtaccgtcaagagtgctcctcagagcatttggtatggccctgatcgtcccaagtacctgggtccattctcagagcagattccgtcatacctgaccggagaattccccggtgactacggatggg

SEQ ID NO: 110305 - DNA, 238 bp, Glycine max
acttgatagagctgtattgactatgaagaagggtgaggttgcgttgttgaccattgcgcctgattatgctttcggtacatcagagtcccaacaggagttggctgtagttcctcctaactcaaccgtgtattttgaagttgagctagtgtcatttgagaaagagaaggagtcctgggatctgaacactgaagagaacttgaagctgctggtaagaagaagaagagggaatgtcttgttt

SEQ ID NO: 110306 - DNA, 241 bp, Glycine max
ctagttctagatcgcgagcggctcgagcggctcgagaatcaccggagagagagtgagtgcaaagccatcgtcttcttctcagacaagtagtttggtaaaagatggctgatgctgaggatattcaaccccttgtctgtgacaatggaactggaatggtgaaggcaggatttgctggtgatgatgctcctagggctgtgtttcccagtattgttggccgacctcgtcatactggtgttatggt

SEQ ID NO: 110307 - DNA, 242 bp, Glycine max
gttgctcatgaattcatcattgacttgagaggctttaagaatactgctggaattgagcctgaagatgttgcaaagcgcctcatggactacggttttcatgcaccaacaatgtcatggcctgtgcctggcacactcatgattgagcctactgagagtgaaagcaaggccgagttagacaggttctgtgatgctcttatttccattagacaagaaattgctgagattgagaaaggaaaggttga

SEQ ID NO: 110308 - DNA, 266 bp, Glycine max
gcagcacggtttcgtgtaccgtgagcacaacaggtcaccaggatactacgatggacgctactggaccatgtggaagctgcctatgtttggttgcactgatgcttctcaggtgttgaaggagcttcaagaggctaagactgcataccccaacggcttcatccgtatcatcggattcgacaacgttcgccaagtgcagtgcatcagcttcattgcctacaagcccccaggcttctaagtgtgaaaaatttgcaaagcatttgtagccg

SEQ ID NO: 110309 - DNA, 262 bp, Glycine max
aaacagagtctcctgtgtgaagaaaggagggatcaggttcaccatcaatggtcactcttacttcaacttggttctcatcacaaatgttggtggagctggagatgttcattctgtgtccatcaaagggtctagaactgggtggcaaaccatgtctacaaactgggggcagaattggcaaagcaactcctacctgaatggccaaagcctctcttttcaggtcactacaagtgatggcaggactctcactagcaacaacattgtg

SEQ ID NO: 110310 - DNA, 267 bp, Glycine max
aaaccctaactccctaccctattccgctttctctcatccatcatgaaaggaggaaagtccaagaccgaatctaagagagccgatgccaaacttgctgtgaataagaagggcgccgccaccaagactaggaaacccgccggaaaggggaaggcagcgaaagatcctaacaagccaaagaggcctccaagtgctttcttcgttttcatggaggaattcaggaaggtgttcaacaaggaacatcccgacaacaaagcagtgtctgctgtg

SEQ ID NO: 110311 - DNA, 265 bp, Glycine max
atcgaacatgttgagaccccattgtttctactcaatgctgcttatgatgtgtggcaggtccaagccagtttagccccaccttcagctgaccgccttggttcttggaatgaatgcaaatcgaaccatgcaaattgtagctcatctcaaatgcagttccttcaagacttcagaaatcaaatgctgggtgacattaaagacttctcaagctcatctcaaactgggctattcataaattcttgttttgctcattgtcagtctgagagac

SEQ ID NO: 110312 - DNA, 265 bp, Glycine max
aacaaagggcaagagacggcgagtttagttttgaaagcgtgcgtgtgcgtgggagggtccgaagaagcacaacgttggagaaagtgattctcgttctgttcttctactcacaagagcaacaacaacaacatcagaatcagaaacagcaatggccaacactaacttggacgatgttccctctctggatctcatgactgagctccttcgtcgcttcaagtgctcttccaaacctgacaagcgtcttattctcattggcccacctgga

SEQ ID NO: 110313 - DNA, 263 bp, Glycine max
gcagattgaaccagacatgaattcaaggtttcagcttttgagtaccactaccaatggtgattttgttcaaggaaaagatctcgcgatggttaaagttaatgtagcatgtgctgctgttggcttgacatcaagttacactccaactccattgttggaatctggtttgcaaaaagacagagggttaattgtggagtattttggaaggatgtcttacgttgctcataacgttaatcagccccaagagaaagatttgttagagggaa

SEQ ID NO: 110314 - DNA, 266 bp, Glycine max
ctggtttttctgattcttatcattgttactgtttgtgtgacaattgtggggacatactttttgttaaatgctgagaactaccactggcaatggacttctttcttttcagctgcctcaacaactgtttacgtgtatttgtattcagtatactactactatgtgaagacgaagatgtcaggcttcttccaaaccagcttctattttggatacactttgatgttttgtcttggactgggaattctgtgtggagctgtgggttatcttgg

SEQ ID NO: 110315 - DNA, 265 bp, Glycine max
cacaaagtcacaatggaccccctctctctcttctgcaccggagccctcctcgccggcggcctctactggttcgtgtgcgttctgggccccgccgagcagaagggcaaacgcgccaccgatctttccggcggctccatctccgccgagaaagtccaagacaactacaaacagtactggtccttcttccgccgcccaaaggagatcgagaccgccgacaaagtccccgacttcgtcgacaccttctacaatctagtcacagacatct

SEQ ID NO: 110316 - DNA, 268 bp, Glycine max
tgcaagtacacacgacacaatccaaatcaagcatcaccatgttccgccaccgcttcctcctcatactgtacctcgcacaaggccacatacaccccgcattccaactcgctaagagactcgttagtttaggcgcacacgtcactgtttccaccaccgtccacatgaaccgtcgcatcaccaacaaacccaccctccctcacctctcctttctccccttctccgacggctacgacgacggtttcacctcctccgatttctccctcaacgc

SEQ ID NO: 110317 - DNA, 268 bp, Glycine max
ggatgatggacggaaggtgtttgataaaatgcgtgtgcgcaatgtgttcgcgtggaccaccgtgatttctgggcttgttgcctgtgggaaattggacactgccagggagctatttgagcagatgccttccaagaatgttgtttcatggactgcaatgattgatgggtatgtgaaacacaagcagcccattgaagccttcaatctgtttgaaagaatgcagcaggttgataatgtgaggccaaatgagtacactttggtgagcctggtc

SEQ ID NO: 110318 - DNA, 254 bp, Glycine max
attttatccaattgaaattttaaaaatgactgggataaacttaagaattcaattattgaaattgaataagtaaacaatttaattggattggtcgaatggtatcaaaaaaatggagtactaactcccatttcttatttattattgaattaaccgatcaacttgctttgttatcgaacatttctttttgatttcaaaaattttccggaaaaaatttgaatctatttttatatgcgaatcaatcctactacttctgg

SEQ ID NO: 110319 - DNA, 252 bp, Glycine max
gatgtatttaatactgcaaaagtgagagttcaaccttcacaggtgaaaatgcttcctgtcaaaccaaagttgttctcctgggagagctatgatgaagatctatcttctctggccgaaagttcaaggattacagctcctggactcttagaacagctgaacgttactagagataccagtgactatctatggtacataaccagcgttgacataagttcatcagaatcctttcttcgaggcggacaaaaacccagc

SEQ ID NO: 110320 - DNA, 258 bp, Glycine max
ctcgagcgcgcaacaaaaagaaagaatcccaggcgaggagaaagatggaggggaaggcgcaggatgtgtcgttgggagcgaacaagttccccgagagacagccgattgggacggcggcgcagagccaagacgacggcaaggactaccaggagccggcgccggcgccgctggttgacccgacggagtttacgtcatggtcgttttacagagcagggatagcagagtttgtggccacttttctgtttctctacatcaccg

SEQ ID NO: 110321 - DNA, 263 bp, Glycine max
atcgagataactagaaacagtgtgatgaaaatgaaggtccttgttttcttcgttgctacaattttggtagcatggcaatgccatgcgctacgatatgttccctctccgaatgaacactggctatggtgcccgtactccggaggtgaaatgcgcaagttggaggcttgctgtggaagcacacaacatctttggctttgagaccattcctgaagagtgcgttgaagcaacaaaggaatacatccatggcgaacaatatagatcag

SEQ ID NO: 110322 - DNA, 267 bp, Glycine max
gagaattacaactgaaattaaattgctatctgaagatgcttctaagccctctgccacttgcaattatccaagaagctatttccatatataaaaggattgagaagctgcaaacagaactctttcatcctttatcaatcaacttgatgcatactagggagaagattttgaagtcactaatggagctggaacactggacagaagctttagcatattgcaaattgaccataccattctatcaaagagtgtatccagctgttcaccctctgc

SEQ ID NO: 110323 - DNA, 256 bp, Glycine max
  unsure (1)..(256): unsure at all n locations
tccaatgttatcccatttttaagtactttgagaactggtgccaggatgagaacaggcatggagatttcttctctgccctgatgaaggcacagccacaatttctaaatgactggaaggcaaagttgtggtctcgattcttctgtctatcggtttatgttacaatgtatctcaatgattgccaacgtacagctttctatgaaggcattggacttaacacaaaagatttgacatgcatgtcatcatcgngacaaaccgc

SEQ ID NO: 110324 - DNA, 255 bp, Glycine max
gagataactagaaacagtgtgatgaaaatgaaggtccttgttttcttcgttgctacaattttggtagcatggcaatgccatgcgtacgatatgttccctctccgaatgaacactggctatggtgcccgtactccggaggtgaaatgcgcaagttggaggcttgctgtggaagcacacaacatctttggctttgagaccattcctgaagagtgcgttgaagcaacaaaggaatacatccatggcgaacaatataga

SEQ ID NO: 110325 - DNA, 258 bp, Glycine max
aacagagtcctgatattgctcaaggtgtgcacggccacctcacaaagaggcctgaggagattggtgctggtgaccaaggtcatatgttcggctatgccactgacgagactcccgagctcatgcccttgagccatgtccttgccacgaagctcggtgccaagctcaccgaggttcggaagaacgggacatgcccttggctgagacctgatggcaagacccaagtcactgttgagtactacaatgacaagggtgccatgg

SEQ ID NO: 110326 - DNA, 254 bp, Glycine max
attgagtctcaacaacccagttgagtaactaagatggcgcaagtgaggaacaagcaagtgcttctaaaggactatgttaccggttttcccaaagaatccgacatgaatattgtcgaaagtaccataacattgaagcttccacaaggttccaatgacatcttgctcaaaaatttgtatttgtcttgtgatccgtatatgaggaatctcatgaacaggcccgaagccctcccaatagtcgtgcttacatcctggct

SEQ ID NO: 110327 - DNA, 259 bp, Glycine max
gttcatcctttcccaagccagccaagcgagttttcaattacttgcatagatagagcatcatggccatgatgaaacgtgctgcttcctcttcggttcgctcgctgctttcctcatcctccaccttcaccagaaaccttcatgcctcaggtgaaaagaagaaaattgtgggggtgttctacaaagggaatgagtatgctaaattgaaccccaatttcgtggggtgtgttgaaggagcattgggtatacgtgagtggctgga

SEQ ID NO: 110328 - DNA, 258 bp, Glycine max
gtttgttgagatagctagaagcaataagatgaaaatgaaagtgcttgttttgtttgttgctacagttttggtagcatatgaatgccatggctcagactaccagaagttccctctccaaatgaaaactgggtttggtgggcaatacagcaatgaggtggcatgtgccagttggaggcttggcgtggaagcaaacaacgtagtcaagtggcaaactgttcctgcagcttgcggagagtacatagctgactacgttctagg

SEQ ID NO: 110329 - DNA, 259 bp, Glycine max
ggacatgagaggcgaacttgatgacactgctgctttcaagaacttcaagaaatggggaaacattgaatttccattgccatttggaagggttatgagtactacagaggctttcattcatggattagatgaaaagacaagtgcatctttgaaattcacagtattaaacccaatgggccgaatttggacaatggttgctgggggaggtgctagtgttatctatgctgatacggtaggagatcttggttatgctcctgagctt

SEQ ID NO: 110330 - DNA, 253 bp, Glycine max
ggggtcagtggaggctgctgagaggaacaagctggtgtttatggagggtggagtgtacggatttgggttggaggatttgttgagggcttcggcggaggtattgggaaaagggagcatggggacttcttacaaggcgattctggaggacgggaccacggtggttgtgaagaggttgaaggacgtggcggctgcgaagagagagttcgaggcgcgaatggaggttgttgggaacgttaagcacgagaatgtggtt

SEQ ID NO: 110331 - DNA, 255 bp, Glycine max
atgcccatcattcttcagtctgcccttgtttccaatctctacttcatctcccagctgctccaccgtaagtacagcggaaacttcttcgtagatctattgggaaaatggaaggaatctgaatatggaggtggtcagtctgttcctgttggtggcattgcatactatatcactgcaccatccagcttagctgatatggcagccaatcctttccatgctctgttctatcttgtgtttatgctttcagcctgtgccttg

SEQ ID NO: 110332 - DNA, 253 bp, Glycine max
gcaacagccatcatgctcaggaggctcttcgccgtgccaagttcaagttccctggtcgtcaaaagattatagttagcaggaaatggggcttcaccaagtttagccgttctgattatctcaagttcaagtcagagaacagaattgtgcccgatggtgtgaatgcaaagcttcttgggtgccatggaccattggccaatcgtgaacctggaagagcctttttggatactgctactagttcttagtctgtctttta

SEQ ID NO: 110333 - DNA, 255 bp, Glycine max
ctcgagccgctcgagccgcaggcaattagagcattgcacaatcagcatactcttcctggaggtgttggaccaatccaagtgcgatatgctgatggtgaacgggaacgcctcggtgctgttgagtacaaattatttgtgggctctctgaacaaacaggctaccgtaaaggaagttgaggaaattttctcaaaatatggccgggttgaagatgtttatcttatgcgtgatgagaagaaacaaagtcgtggatgtggt

SEQ ID NO: 110334 - DNA, 254 bp, Glycine max
ttcatgaatatgtcaagccttactttagtggttctaaattgaaaagctttctagctggtcataatatcaccattactgatggctttgacaaaactagtgcaactttgcaatttagaaagttagcagattgtgattttctcaagagaaactttaagcagatgtctaatgttttgtgggtggctcctgaggacaaggcgagtttgtggtcacaacttctatatgtgtcgtgtaataatctggagatgcaagaagct

SEQ ID NO: 110335 - DNA, 258 bp, Glycine max; identical to SEQ ID NO: 107698

SEQ ID NO: 110336 - DNA, 249 bp, Glycine max
actagaaacagtgtgatgaaaatgaaggtccttgttttcttcgttgctacaattttggtagcatggcaatgccatgcgtacgatatgttccctctccgaatgaacactggctatggtgcccgtactccggaggtgaaatgcgcaagttggaggcttgctgtggaagcacacaacatctttggctttgagaacattcctgaagagtgcgttgaagcaacaaaggaatacatccatggcgaacaatataga

SEQ ID NO: 110337 - DNA, 249 bp, Glycine max
ctaaaccctactcattctccatacctcaacgaagaggttaaagagacggcaacactttgctgtccgccttgaccgagcagagcttcgtcttggccctcgattttgccctaaagtactctcagtcacaacagacaccgtcgtcgtcgtcgtcgtcatcaatggcaccgaagcagaccaaggctgagaagaagatcgcttacgatgcgaactgtgcgacctaatggaggagtacggccagatcctcgttgt

SEQ ID NO: 110338 - DNA, 250 bp, Glycine max
gctgagtatgcagctttggctaagaaccctgagaaggagtttttgaagactattactggcaagaaggagaccctcattgaccttacaattatagaaatcttgtcaaggcacacatctgatgagttctaccttggggagagagatggtggtgactattggacttctgatgctggtccactagaggccttcaagaggtttggaaagaagcttcaagagattgaacaaaagcttatacagaagaacaaggacg

SEQ ID NO: 110339 - DNA, 247 bp, Glycine max
atcgagccgctccggagtaccaaatcttgattgaacctatatttgcccaatggatacaatctgctcatggtaaaacttcctatgggttcgatatacttttatcttcaacgaacagtccggcgttcaatgcaggacgaagcatatggttgcctggttggttaaacgctgttaatgagaatagtaattctctattcttaacaatagggcctggagacttcttggttcatcatgctattgctcttggttt

SEQ ID NO: 110340 - DNA, 250 bp, Glycine max
gctgaagcaggagctatagtttccttcttcacaaatccagtatggctggtaaagacaagattgcagcttcaaactcctcttcatcagacacgaacatactctggggtttatgatgcatttaggaccataatgagggaagaaggatttagtgcactttacagaggaattgttcctggtctatttctgcaggtctctcatggtgctattcagtttacagcatatgaggagctacgcaaagttattgttgatt

SEQ ID NO: 110341 - DNA, 245 bp, Glycine max
gttcacagcaaaggctcccctcaccatagtatgtgatggttgtttttccaacttgagacgttctctttgcaatcctaaggttgaagtaccctctcattttgttggtctggtcttggagaattgtaatcttccatatgcaaatcatggacacgtcatcttaggtgatccttcccccattttgttttatcccatcagtagcactgagattcgctgtttggttgatgtgcctggccaaaaattacctt

SEQ ID NO: 110342 - DNA, 183 bp, Glycine max
gaaattttgataaaccgcgatcacaggttgccgcaccttaaaaccggaaacacttgcaattgttacttggtttcaagaatttctcaatttcttcctatttctttgtgtacgatttcttaagggaaagaaaatcactctctgtgctggccacagacttcgtgaatcattttcttttccacacaa

SEQ ID NO: 110343 - DNA, 246 bp, Glycine max
gaaagggtgtgagaagagaatggagagtaaagaggaagatgttaacgttggagcaaacaagttctcagaaaggcaaccaattggtacagcagctcagggtggtggtgacaaggactacaaggaggcacccccagctcctttgtttgaacctggtgagctcaaatcatggtccttctacagagctggaattgctgagtttgtggcaactttcttgttcctctacattaccatcttaactgtcatggg

SEQ ID NO: 110344 - DNA, 244 bp, Glycine max
atgatgaagcgtcggttccttttggttctcttggttctctatgtcacagtggagcagagtaagctactccaccacgtagaagccggtggtgggtttgtaaaaacaagaggagtgcagcttatgctgaatgggagtccctactatgctaatggctttaatgcctattggcttatgtaccttgcctctgatccttcccagaggagcaaaatctcatcggtatttcaacaggcttcagatcatggac

SEQ ID NO: 110345 - DNA, 247 bp, Glycine max
tcggctcgagccaagagaaagatttgttagagggaaatttttcctttgatattaaatctcgctctagattggaaaaagtttcctctacaaaagcacaatttgttagtggaaaaaccttcaaatatgatataattggtgctggttcacattcttcagaagattttcctgataatgaagatgctgataaacccaaaaagattgatgccagatttagacaaagaatagatcctcaatacaatgaggttca

SEQ ID NO: 110346 - DNA, 247 bp, Glycine max
taattgcaagaatggcacttcgttgcttggtgatgtccctttctgttctcttcactcttggtcttgcgagagaaagccatgccagagacgaagatttttggcatgctgtttggccaaacactcccattccaagttcattgcgagatcttctaaagcctggccctgcaagtgttgaaatcgatgatcaccctatgcaaattgaagaaacacagtacccgaaaaccttcttctataaagaagaccttca

SEQ ID NO: 110347 - DNA, 244 bp, Glycine max
cggcgactgtggcggtttcggacgtggattcggcgggcgaggacgcggaggtgacaggggccgaggccgacgccgcgaggaagacgagaagtgggtcccagtgacgaaactgggccgcctggtgaacgacggaataatccgaagccttgaacagatctacctccactcgctcccgatcaaggagcaccagatcatcgacacgctcgtgggtcccaccctcaaggacgaggtgatgaacatcacg

SEQ ID NO: 110348 - DNA, 246 bp, Glycine max
accacttcgtatctgattgaagcaccaactgggttctgtctgagattcaacataagaactgatggaatcggatcttggcaagctcttcattgggggaattacctgggacaccgatgacgaacgtctcaaagaatattttgggaaatatggagaggtgatagaggcagtgatcatgagagatcggacaacaggccgtactcgtggtttcggatttgttgtctttgctgatccttctgctgcggagag

SEQ ID NO: 110349 - DNA, 247 bp, Glycine max
catggccagggccaaggtgtttgatatcgacctgcagaaacagttgaggccgtacatggaatccatggttccactccccggaatctatgacccggatttcattgctgccaaccaaggagaccgtgccactaacgtaatcaggggcacaaagaaagaacaagttcaacaaatcatcaaagacattaaggagttcaaagaaagcactaaggttgacaaggtggttgtcctgtggacagccaacacagag

SEQ ID NO: 110350 - DNA, 248 bp, Glycine max
  unsure (1)..(248): unsure at all n locations
atttagggtttttgtgactgtgctccacaaccgagtcgccatggcgtcgcaggagagtatcgaaaagatgcaggcacggcagaattaccggaatttatggcacaccgatctcatgagatccattcaggccgatactccttattgttgcctcgcgttgtggtgtgcaccatgtgtgtcttaccttcctcgcaaacgagctctntatgatgatatgtcaaggtacacatgttgtgctggctaatgccttg

SEQ ID NO: 110351 - DNA, 251 bp, Glycine max
aaattgggcgtgtgggagttgttgaatcgggaagcaaaaaaaatgagaatccatcacatagcatgcctccaagacaattattcctatctgatcgtagacgagagcacgaaggaagccgcggcggtggacccggtcgaaccggagaaggttcttgaagttgccagctcgcacggcctcactctcaaattcgtcctcaccacccaccatcactgggatcatgctggtggaaacgacaagataaagcagctggt

SEQ ID NO: 110352 - DNA, 245 bp, Glycine max
attgacacaatttttgaacattattacctaggcatgaaatattctttgataatttccagggctgtgggacgtcagttattgtaggtgttgcagcatcagggcaggaaatatcaacccgtcctttccagttggtgagtggacgagtctggaaaggaacagcttttggtggcttcaagagcaggtcacaggtgccttggcttgtagacaagtacttgaagaaggaaatcaaggttgatgagtacatt

SEQ ID NO: 110353 - DNA, 246 bp, Glycine max
aaaaaagacaacccagagagcgcgtcttaataaacgctcttctctgaaaacccccatttcttttcttctttcttcttctctttcgcttcttcgatcttcgatcttcgtcgctgaaaatgagagagtgcatttcaatccacatcggccaggccgggattcaggttggaaacgcctgctgggagctttactgcctcgaacacggcattcagcctgatgggcagatgccaagtgacaagaccgttggtg

SEQ ID NO: 110354 - DNA, 246 bp, Glycine max
cagagagtggtttcagtgagtgatcggtgttcacttgatccttcataagtcgtcatcatcatcatcatcatcaccgttgattgaagaagatgccgatcagaaacatcgccatcggaaggcctgaagaggctactcaccccgacacgttgaaggcggggttggctgagttcatctccaccttgatcttcgtgttcgccggttcaggttccggcatcgcctacaacaagctcaccgacaacggcgccg

SEQ ID NO: 110355 - DNA, 244 bp, Glycine max
ttttaggcatttcccttattccctctgatgaatgctctactctactctgactctcacacatcgttttatccgaaagcaagcattatcagaagcagaaagaaagaataagaggttgcagcaacaatggcagccatggctgctcttcagagctcaatggtcggtctctccctctcctccaactctttcttaggccaacgcctttctcccatcaccctcccctctcttctccgggtaagtaacagag

SEQ ID NO: 110356 - DNA, 246 bp, Glycine max
ctttagtaagtgtgcaagcagaagatgcgtataagtattgcacatggacggtgacttatggaactatttctccattgggtagtccccagcaggttattcttatcaatggtcagtttcctgggcctagacttgacttggtgactaatgagaatgtaattctcaaccttatcaacaagctggacgagccatttttactcacttggaacggtattaaacaaaggaagaattcatggcaagatggagttt

SEQ ID NO: 110357 - DNA, 245 bp, Glycine max
cggctcgaggatcgagataactagaaacagtgtgatgaaaatgaaggtccttgtattcttcgacgctacaattttggtagcatggcaatgccatgcgtacgatatgttccctctccgaatgaacactggctatggtgcccgtactccggaggtgaaatgcgcaagttggaggcttgctgaggaagcacacaacatctttggctttgagaccattcctgaagagtgcgttgaagcaacaaaggaat

SEQ ID NO: 110358 - DNA, 245 bp, Glycine max
cactttctatctcatttccaatctcattttcgttcggttcaaacactctcatggcatcagacaagaagattaggatcggcatcaacggatttggaaggattggccgtttggtggccagggttgctcttcagaggaatgacgttgaacttgttgctgtcaacgatcctttcatcaccactgattacatgacatacatgttcaagtacgacaccgttcatgggcagtggaagcattttgatgtgaag

SEQ ID NO: 110359 - DNA, 244 bp, Glycine max
ctgatgaaagcttatgcttttttgaagtacaacaatgcgaccaatttgattgtcaggacccatttggcagaactggtcaatgaagacttttatgatgaaaaatttaattttattggcacaattggaactccagcttttcatcgacaaattgctgcacacttggagaaaatgccattatggcaaaaagcaattttgtgtggaatgggacattgtttgtctcggaaaagcaaagaaacatggtatt

SEQ ID NO: 110360 - DNA, 243 bp, Glycine max
aggcgctcgagggtgccgttaatgatttggagctcatggggaggctcttggatgagagcgatttgcttcagaggagggcgcatcatgtgaacttggatgaggttgatgccaagattagtaagttgatgcctgagcttggttttgctcctgaggattctgataggctggtcgcgtctttcagtggaggctggcagatgaggatgtgtctcggcaagattctacttcaggagcctgatttgttgc

SEQ ID NO: 110361 - DNA, 245 bp, Glycine max
agcgaggaaggaaaacaagaacggcgattccggtcacgattacttggaagacagggtgagttttagcgaagacaagcttatggactctgaaagcaaggctgtgatgatggcgtgggagaatccgttgatggaggctcatgccaaagctgtttgttcgggaggtggccacgtactcaatattgggtttggaatggggctggtggattcggccattcagcgatatgcacctgcttcacacaccattg

SEQ ID NO: 110362 - DNA, 245 bp, Glycine max
tgctcgcagacgtcctggaggatcctgtcttccattgagcagaaggaagaaacaaaagggaacgagttgaatgcgaagcggattaaggagtacagacagaaggttgaattggagctatcgaacatctgtaatgatgttatgagagtgattgatgagcaccttatcccttcggctgcagctggtgaatccactgtgttttactataagatgagaggagattattatcgttatcttgctgaatttaa

SEQ ID NO: 110363 - DNA, 244 bp, Glycine max
cgcggtgctgatggacctggagcccggaaccatggacagcgtgcggaccgggccgtacgggcagatcttccgccccgacaacttcgtgttcgggcagtccggcgccggcaacaactgggctaacgggcactacaccgacggcgccgagctcatcgactccgtcctcgacgtcgtgcgtaaggacgccgagaactgcgactgcctccaggggttccaggtctgccactcgctcggcggcggaacg

SEQ ID NO: 110364 - DNA, 244 bp, Glycine max
agaacaaaatagatcagactccaaaacagttaaccaacaagcttacttttatgccagagacctcgaagtccatcccaaggacacatttgtgttcagtatagatggcaccgtactctctaatattccatactacaaaaaacatggatatggggtggagaaatttaactcgaccttgtatgatgaatgggttaacaagggcaatgcaccggcactgcccgagactcttaagaattacaacaagctg

SEQ ID NO: 110365 - DNA, 244 bp, Glycine max
caaaatttgtaacttcaaaacatactcctctgttctctctgtttctcttcaatcttcctgaaaaaacaaaaacacgaaaaatcatccaccctctcacattctgtctctctctcctttcgactaatatgaggattgaaaaccaagacaacactgtcagagaaatcaagccaaagaacaggagaatcatgggtgctggaggccctgatgatgacgacaataggtggccaccgatggtgaagccact

SEQ ID NO: 110366 - DNA, 244 bp, Glycine max
gctgggcccatcagccccagaagtgggaagggtgagcatgaggaagaccgtcaccaagcaggtctcctcaggaagcccatggcacggcccagaccgagtcaagtacttgggcccattctctggcgagcccccgtcctacctaaccggtgagttcccaggcgactacggctgggacactgctgggctttccgcagacccagaaaccttcgccaagaaccgtgaactcgaagtgatccactccagg

SEQ ID NO: 110367 - DNA, 244 bp, Glycine max
ggatgatgacgatgatgtgcaatggcagacagatacgtcacttgatgctgctcgtcaacgtatccaagaacaattaagtgctgtgacagctgatatggttatgctttctacagatgaaccagagaagaaaaaagaagcaagtaatggaaatgatggttctcagaatggtaactcaatgcactgcaggaccttggttggtgaagtgaaagcaaatttgaagaaaggtgttggagcaaatgaattg

SEQ ID NO: 110368 - DNA, 247 bp, Glycine max
gtcccttcggaaccataaagcacccctccgaactcgctgacggcgctaacaacggtcttgacatcgctgttaggcttttggagccactcaaagcggagtttcctattttgagctacgccgatttctaccagttggctggcgttgttgccgttgaggtcaccggtggacctgaagttcccttccatcctggaagagaggacaaacctgagccaccaccagagggtcgcttgcccgatgccactaaggg

SEQ ID NO: 110369 - DNA, 245 bp, Glycine max
gtagctattatactctctagagtaattgcggaatctgctagaattttctaataatggcgaaagacgttgagcaggtcacatagcaatgtgaatactccgcgaaggactaccatgaccctcctccggcaccgttgatcgacccagatgagctcacaaagtgcgtccttgtacagagccgccatagctgagttcatagcaacactcctttttctttacatcaccgtgttgaccattattggctacaa

SEQ ID NO: 110370 - DNA, 240 bp, Glycine max
gagaaattcaggaaaaagttgtattgaaattttcacaagaggaatttcttacagcttggtcaactcaggtgcgtcctgcaacaactctgttggctgatgggtgcccatatttgtatgctatggtgcatgatagttcagtgtctacaataccaggtgattttgtcattggtgtcaagttgacaaccataaacaatatgtgtgcatatgggctcaatcctggtatttcaggttctcgtcttt

SEQ ID NO: 110371 - DNA, 244 bp, Glycine max
acgcaaattttctcccccaaatcgtagatctacggttaaattggtgtagtgtggtaagatgggaggaggatttagagtgcttcacttagttaggccatttctctcgtttcttcctgaagttcaaactgctgacaggaaagtgccatttagagagaaggtcatatacactgtgatctctcttttcattttcctggtttgtagtcagctccctctatatgggatacactcaacaacaggtgctgat

SEQ ID NO: 110372 - DNA, 239 bp, Glycine max
tgttgatcttcgttttgctacagatgatactgggaagtttaaaggatttggacatgttgagtttgcaacagcagaggctgcccaaaatgctcttgggttgaatggacaacaattgtttaatcgtgaactccggcttgatttagctcgggaaaggggtgcatatacccccaacagcagcaactggaacaactcatcccagaaaagtgaaagaggccagtctcaaacaatatttgtaaggg

SEQ ID NO: 110373 - DNA, 244 bp, Glycine max
ctcgaccgtcataacacaaagcacaaagcaaagctcatacttgagttaaaaaatggcagcagcttcttccatggctctctcatccccatccttggctggcaaggccgtgaagctgggcccatcagccccagaagtgggaagggtgagcatgaggaagaccgtcaccaagcaggtctcctcaggaagcccatggtacggcccagaccgagtcaagtacttgggcccattctctggcgagcccccg

SEQ ID NO: 110374 - DNA, 242 bp, Glycine max
cgaaaacattcttgtggggtaggtactctttggaaatgtctgctgttatttacaaggactgggttttcactgatcaagcattgcctaatgatcttgtcaagagaggagttgcggttaaggatccatctgctccccatggagttcggcttttgattgaggactatccttatgcttctgatgggctagagatatgggatgccatcaagtcctgggtgcatgaatatgtctcattctactacaag

SEQ ID NO: 110375 - DNA, 242 bp, Glycine max
agggccatatgaaaatcatcccccgtattcatattctacagtacttattcattttgaaaataacaatgcctttgctgtcgttgaggagctagaacgggaaattgaaatatctcactggggaagcattcaagtcactgagcgatatagcttggtccatgctggtgctcgacataaaggtgttttttcaagggttgaatatcaaactaaaccaggtggtactggtgtctcttcatttaaacatc

SEQ ID NO: 110376 - DNA, 242 bp, Glycine max
cttcttcgccgtttcagctgaagagccatccgcagtaagtcaatggttaagcataataatgttatccccaatgggcacttccggaaacactggcaaaactatgtgaagacttggtttaatcaaccagcccgaaagaccagaagacggttggctcggcagaagaaggctgtcaagattttccccaggcctactgctggatctctcaggcctattgttcatggccagactctgaaatacaacat

SEQ ID NO: 110377 - DNA, 243 bp, Glycine max
atgaaagattactaaatggtgtcataaggaagaagttgaagatcattcctgagaatgttacgtatgcagtgcagtccttggatgctttcgaaagtctagtacctgattttatgaagccaagaattagtgaggttgatgagctgctggctcttggggtcaacgtgactgtgtacagtgggcaagtggatctcatttgtgcaaccaaggggactgaagcttggcttaaaaaactcgagtggacag

SEQ ID NO: 110378 - DNA, 242 bp, Glycine max
aaaagttattaagagcttttgcttttctttctgcgcgcttttcccaattaagtagttcttccttttctcaaagcaaaaaaaatgttcatcgagagtttcaaggttgagagtcctaacgtgaagtacacagagactgagattcagtccgtgtacaactatgaaaccactgaacttgttcacgagaacaataatggcacttatcagtgggttgtcaagcccaaaactgtcaaatatgaatttaa

SEQ ID NO: 110379 - DNA, 242 bp, Glycine max
cacaaagtcacaatggaccccctctctctcttctgcaccggagccctcctcgccggcggcctctactggttcgtgtgcgttctgggccccgccgagcagaagggcaaacgcgccaccgatctttccggcggctccatctccgccgagaaagtccaagacaactacaaacagtactggtccttcttccgccgcccaaaggagatcgagaccgccgacaaagtccccgacgtcgtcgacacctt

SEQ ID NO: 110380 - DNA, 228 bp, Glycine max
gttggcgttgcagaaatgaaagttgcggttgaaagaaccggtggccttgttgtcctgtctgaaagttttggtcattcagtcttcaaggactcttttaagcgagtttttgaggatggggagcaatctcttggtctttgtttcaatggaaccctagagataaattgctccaaggaaatcaaaattcagggaattattggaccttgcacctcgttggaaaagaaagggcct

SEQ ID NO: 110381 - DNA, 237 bp, Glycine max
atcgactttatttgagtagttttgctctttccttccaaaatgagccggccaatggaggaagatactgcaggtaagaatgaggaagaggagttcaacaccggaccactatctgtactcatgatgagtgttaaaaataatactcaggtactgataaattgtcggaacaacaaaaagcttctgggtcgtgtaagggcttttgacaggcactgcaacatggttcttgaaaatgtcagggag

SEQ ID NO: 110382 - DNA, 242 bp, Glycine max
tgctgacgtgctcgtcaaaaccgccaaaacagtggcctcaccggggcgtggtattttggcgatggatgagtcaaatgcaacctgcgggaagcgtttggcatctattgggttagagaacacagaagctaatcggcaggcataccgtaccctacttgtgacagtacctggtcttggtgaatacatctctggtgccattctctttgaggaaactctctaccaatccactgtcgatggaaggaaga

SEQ ID NO: 110383 - DNA, 240 bp, Glycine max
ctcgaccgcgaatatacattgctcgttgatggatttggcatagatccgcagcaagagattacgttggtgaggcaagttgagtatcaagattctctcgtggaagcagcatggccactaggcagtgccatagaagccatatcatcattacctaaatttgagaaattaatgtatttcatttaagctttaaaacgaggagccatatgtatgtgtggaatgaactccatcactcttaaataaaaa

SEQ ID NO: 110384 - DNA, 244 bp, Glycine max
atggaaggcatagtacacaggacagttgaagtgaatggcataaaaatgcatgttgctgagaaaggtgaaggtcccgtggtcttgttcctccacggcttcccggagctctggtactcctggcgccaccagattctggctctcagcaacctcggctaccgcgccgtggctccagatctccgcggctacggagacaccgaggcaccagcttcaatcagcagctacaccatcctccacttagtttctg

SEQ ID NO: 110385 - DNA, 242 bp, Glycine max
atcgactttatttgagtagttttgctctttccttccaaaatgagccggccaatggacgaagatactgcaggtaagaatgaggaagaggagttcaacaccggaccactatctgtactcatgatgagtgttaaaaataatactcaggtcctgataaattgtcggaacaacaaaaagcttctgggtcgtgtaagggcttttgacaggcactgcaacatggttcttgaaaatgtcagggagatgtg

SEQ ID NO: 110386 - DNA, 236 bp, Glycine max
gttgtaactttttgattcctaaattctctaaaattcgaaattctaatttcgttaggggaaagagattgtttgtgtgtgagtgagtatggctggaaaaggcgagggtcctgctatcggaatcgatttgggaacgacgtactcttgcgtcggcgtgtggcaacacgatcgtgttgaaatcatagccaacgatcagggtaacagaactaccccatcctacgtggcttcaccgacacaga

SEQ ID NO: 110387 - DNA, 242 bp, Glycine max
ctgtctctgtctctcctcctcctgttctcactcagcatcgccgtaaccgttagatcgagcgactacgactacgattgtgtgtacactgcatacgttagaaccggttcggtgttgaagggcggaacggactctaagatcgggctgaagctgtacgacaagtacggctactacatctacattaaaaacctcgaagcatggggcggcttgatgggcaagggctacgactacttcgagcgcggcaa

SEQ ID NO: 110388 - DNA, 239 bp, Glycine max
ctgaggctgaaattcttcatgatgctgtaaaagagaagaagggtagctatgaagagaccattagggtcttgactacaaggagcaggacccaacttgttgcaactttcaaccgctacagagagatccatggcacttccatctctaagaaattggtggatgaaggatctgatgagtttcagagggcattgtacactgccattcgtgccatcaatgatcctattaagtactatgaaaaggtg

SEQ ID NO: 110389 - DNA, 132 bp, Glycine max
gcatctttctctcttctctctccacccaaaccctaactcccgaccctgttcccctctcgtatccgtcatgaaaggaggaaagtccaagaccgaatctaagagagccgatcccaaacttgctgtgaataagaa

SEQ ID NO: 110390 - DNA, 105 bp, Glycine max
agccgtcagattactcaagtatatggattttatgatgaatgccttagaaagtatggtaatgctaatgtttggaagacctttacagaccttttggatttttgccca

SEQ ID NO: 110391 - DNA, 259 bp, Glycine max
ggcctagccagctagcgcttcttctctcgcattccgtggagatctagtgctgccaaacctcgctgaaaattagggtttcgtttcggaggtagacgaagatgttcggaagggcaccgtagaaaagcgacagcaccaggtactacgaaatcctcggcgtttcgaagaacgcttcgccggatgatttaaagaaggcttacaagaaagccgccattaagaaccaccctaacaaaggcggtgatcctgagaatttcaaagagct

SEQ ID NO: 110392 - DNA, 255 bp, Glycine max
caagaccaacaccaacaccaacactagcgtgtttcgtcttcttcgtctttactcttttcttcaacgaagcgaaaaagaaaaggcttgacttgagagaaatagagcttcgaatcgaaactcagaattagaaaaaaacacaaatcacaatcacaatggcaaggtacgaccgagcaatcaccgttttctcccccgacggccacctcttccaggtcgagtatgccctcgaagccgtccgaaagggcaacgccgccgtcg

SEQ ID NO: 110393 - DNA, 124 bp, Glycine max
ttggaatccaaaaatgagagaaatcatcagcattcacataggtcaggccgggatccaggttggcaactcctgctgggaactctactgcctggaacatggcatccagcccgatggcatgatgcca

SEQ ID NO: 110394 - DNA, 124 bp, Glycine max
gtctttgaggtcctctctacttcaggtgatacccacttgggtggtgatgactttgataagagaattgttgattggctggcttctaacttcaagagggatgaaggcatagaccttttgaaagata

SEQ ID NO: 110395 - DNA, 124 bp, Glycine max
gttcccagaacctattgtgttttaaatccacaaaatccttttgtgttaaataggtggatgggaaaactgactttcccccagggcacttcccgaagtgttaagagaatgcctctttctatagggg

SEQ ID NO: 110396 - DNA, 125 bp, Glycine max
ctctttgcttccttggacaggaatgaggctgagatttccccttccaccttgtatgccattgcttgtgttatggaaaatgttcctttcatcaatggaagccctcagaacacctttgtcccaggact

SEQ ID NO: 110397 - DNA, 123 bp, Glycine max
cttcaatgttggtaagtatcgtcgccttaagcatggttctagtcagtctgctgatttctttcgagctgacaatcctgaaggtgtggaggcacgtaatgaggtagcaaagatggcatttgaaga

SEQ ID NO: 110398 - DNA, 125 bp, Glycine max
agacgctgtgtactgctattgctaagtattgcccccatgcccttgttaacatgataagcaatcctgtgaactccactgttcctattgctgctgaagttttcaagaaggcaggaacttatgatgag

SEQ ID NO: 110399 - DNA, 111 bp, Glycine max
cccgtgttctgatgcatggagtttggaatttctgaagcgtaccggatttcattgtgatatcatttgtgtcactggatggactgccaccccaatgcaggatgttcaggttac

SEQ ID NO: 110400 - DNA, 256 bp, Glycine max
gcatttttaatgagatgctcattagatatagctatgaaaaattactgcgccaggctaaagctccaagtatgtttttacaatccttcaaaaattttgtttctttgtgtgtgtatggtgatgataacttaattagtgttcatgaatatgtcaagccttactttagtggttctaaattgaaaagctttctagctggtcataatatcaccattactgatggtattgacaaaactagtgcaacttggcaatttagaaagtg

SEQ ID NO: 110401 - DNA, 109 bp, Glycine max
caaagggataatccaaattggactacggattcaaaggcattggaagctttcaaaaagtttggaaacaaactggcagaaattgagggaaaaatcacacagaggaacaatg

SEQ ID NO: 110402 - DNA, 107 bp, Glycine max
gaccatgagtggggttacctgttgtctgaggtttcctggacaactgaactctgacctcaggaagctggctgtcaatctgattccatttccccgtcttcacttcttta

SEQ ID NO: 110403 - DNA, 108 bp, Glycine max
cagcacttgatcaggttggagttgcagaaatgaaagttgcggttgaaagaaccggtggccttgttgtcctgtctgaaagttttggtcattcagtcttcaaggactctt

SEQ ID NO: 110404 - DNA, 111 bp, Glycine max
  unsure (1)..(111): unsure at all n locations
gcggcgcctncccgtccggnaccggnacggtntctcacagcgcttgtggaggattctaactgcngggcggntnaaacnagaagnataattggtcatcaannagagtatntt

SEQ ID NO: 110405 - DNA, 251 bp, Glycine max
cgaagaatttttctgtggcggcgacgacgaagaggaatgcgacgacgaggcttgggacatgttgactcggagcttctggcaggcgcagactgtgctggacgagaaccgtgcgctgatcgacgaagtgaacagcaaccacgagtcgaagattcctgacaacatggcgaataacgttggcctcattactcagatccacggtaacatctccaaggttcgctctatttactccgatttatctgtaaattccccca

SEQ ID NO: 110406 - DNA, 101 bp, Glycine max
ccgtgatctgctgcttatgagtcatctgcaagatagtgttcaacatatggacatttcaacgcagatactttttaacagagctatgtcacagttgggtttat

SEQ ID NO: 110407 - DNA, 256 bp, Glycine max
gatccatcgatcaattaatttccaatggccgatcagctcaccgacgaacagatctctgagttcaaggaagcctttagcctcttcgacaaggacggcgatggttgtattaccaccaaggaacttgggactgtgatgcggtcgcttgggcagaacccaactgaggctgagctgcaggacatgataaatgaggttgatgctgatgggaatggtaccattgatttcccagaattcctcaatctcatggcgcgcaagatga

SEQ ID NO: 110408 - DNA, 260 bp, Glycine max
caaaatccttttgtgttaaataggtggatgggaaaactgactttcccccagggcacttcccgaagtgttaagagaatgcctctttctatagggggaggagctggtgcaaagaatgctattctcatgaacatgccaaatgctgttctttcaatgtggagatattttgttggagatctcgtctttgaagtttctaagatgacttctccctacattaaatgtacagtctctttcttcatagcatttggaaatttggctgatga

SEQ ID NO: 110409 - DNA, 258 bp, Glycine max
atcaaggttgttgacctgcttgcatcatatcaaagaggaggaaagattgggttgtttggtggtgctggtgtaggcctaactgtgcttattatggaacttattaacaatgttgcattagctcatggtggtttctctgtgtttgctggtgttggagagcgaacccgagagggtaatgacttgtacagatagatgatctgagattggtgtcattaagcttggtgctaagcagagttcaagcaaatgtgctcttgtgtatgg

SEQ ID NO: 110410 - DNA, 256 bp, Glycine max
catggccacctctgctattcagcaatcagcattcgcaggtcaaactgctctgaagcagctcaatgagttggtccgcaagaccggtggcgccggcaaaggtcgcaccaacatgcgccgtaccgtcaagagtgctcctcagagcatttggtatggccctgatcgtcccaagtacctgggtccattctcagagcagattccgtcatacctgaccggagaattccccggtgactacggatgggacactgctggactatca

SEQ ID NO: 110411 - DNA, 258 bp, Glycine max
caaacccaacttcattggttctttctattccaaaactaaggctatggtcgaagagctcttgaaagaatatgacaatgtgtgcaccctcagggttcgcatgccaatttcatctgacttgagcaatccgcgcaatttcatcaccaagatttctcgttataacaaagtagtcaacattccaaacagcatgaccattttggatgaacttctgccgatttcaattgagatggcaaagcgagacttgaggggcatctggaactt

SEQ ID NO: 110412 - DNA, 257 bp, Glycine max
catcatcaaagttttttcctttctctgctctttgccttctctgacacatttggtgccttgtagagcgtgttttggcaggaaggtggtatggcgaaggacgttgaggttgctgagcgtggctccttctctgggaaggactaccaggaccctccaccagcaccactcattgatgctgaggagctcacaaagtggtccttttacagggctctcattgctgaattcattgccactttgctcttcctctacattactgtgct

SEQ ID NO: 110413 - DNA, 232 bp, Glycine max
aacgaagaagccctaactacgcacgcattcgtgagaaaactcaatattcgtcgctcatggcactctcttctcgtctcttttccaaatccaaattgatctatggcagtcaaatacttctacaaaaggagcatgctattccagttcgtgcatttgctaaagagtctgcccctcctgcccttaagggagacgagatgctgaagaacatttttgtggaggtgaagaacaaatttga

SEQ ID NO: 110414 - DNA, 256 bp, Glycine max
cctgaggcttccaaagcaatggcttcccttgcagcattcactgctgctgcttcccttggcatgtcagaaatgcttggaaaccccatcaacttcagtggtgccacaaggccagctccatctgcttctagtcctgcctccttcaagactgtggctcatttctccaaaaagaaggctacaccaacacctccaaaaaaagctgctgctgctgctcctgccaatgatgagcttgccaagtggtatggtcctgacagaagga

SEQ ID NO: 110415 - DNA, 256 bp, Glycine max
ctcgagcgctcgagcgactagaaacagtgtgatgaaaatgaaggtccttgttatcttcgttactacaattttggtagcatggcaatgccatgcgtacgatatgttccctctccgaatgaacactggctatggtgcccgtactccggaggtgaaatgcgcaagttggaggcttgctgtggaagcacacaacatctttggctttgagaccattcctgaagagtgcgttgaagcaacaaaggaatacatccatggcgaa

SEQ ID NO: 110416 - DNA, 260 bp, Glycine max
caaaagacccactccgattcaaatacttgtccaccttagtgggccaaaagaccgtgtccacggccccaatcgcttcgggccagaccttcaacatcggcaactacgtcgtcagggtcaaattgggaacccctggtcaacttttgttcatggtcctcgacaccagcaccgacgaggccttcgttccatgctcgggctgcacgggctgctccgacaccactttctcgcccaaagcctccaccagctatggcccattggactgc

SEQ ID NO: 110417 - DNA, 245 bp, Glycine max
aaagtttgttgtgagctataagctagtttatcgtgaggagaatatgaagttgtttgttttctttgttgctgcagtagttttggtagcatggccatgccatggcgcaggctaccaaaggttccctctccgaatgaaaactggctatggtgagcgttcttcggaggtaaaatgcgcaagttttaggcttgctgtggaagcacacaacatccgagtatttaaaaccattcctgaagactgcgttgaac

SEQ ID NO: 110418 - DNA, 257 bp, Glycine max
tgatcgagataactagaaacagtgtgatgaaaatgaaggtccttgttttcttcgttgactacaattttggtagcatggcaatgccatgcgtacgatatgttccctctccgaatgaacactggctatggtgcccgtactccggaggtgaaatgcgcaagttggaggcttgctgtggatgcacacaacatctttggctttgagaccattcctgaagagtgcgttgaagcaacaaaggaatacatccatggcgaacaata

SEQ ID NO: 110419 - DNA, 255 bp, Glycine max
  unsure (1)..(255): unsure at all n locations
acctcgagtttgatggtcttgccagtcaaagtcttgacaaaacatttgcatgccaagaacttaancctcgaggtcgaatcctcggacaccattgataatgtcaaggccaagatccaggacaaggaatgtatccctccaaatcagcagaggttgatatttgctggtaaacaacttgaggatggaagaacccttgctgattacaacattcagaaggagtctaccttacattggttcttcgtttaagaggtggcatgc

SEQ ID NO: 110420 - DNA, 256 bp, Glycine max
  unsure (1)..(256): unsure at all n locations
cgacctggaggcgataaaatttataatgtctttgacaatcagttgcctgctgccttaaaaaggctgcagtttgataagcagctttcgatggaaaatataaggaaacttattacggaagctgatgggtatcaacctcatctaatagctcctgaacaaggataccgtcgactaattgaatcttctctaactactgtcaggggtccagctgaggcagctgttgatgcggttcattccctattanaagacctggttcaca

SEQ ID NO: 110421 - DNA, 253 bp, Glycine max
gagggggtcacagtgagaaagagaaagagagaattcgtaaaccctaatttcggaaagatcggcgatgactgcctccaaggatcgcgagaacttcgtctacatcgccaaactcgccgagcaggccgagcgttacgaagcagatggtggaatcaatgaagaacgttgcgaatctcgacgttgaactgacggtggatgagcggaatttgcttgctgttgggtacaagaatgtgattggtgctcgcagacgtcctgg

SEQ ID NO: 110422 - DNA, 254 bp, Glycine max
acgccacttctgaatctattgaatcaacaatcatgtcggacgaagagcaccatatcgagtccaaggccgacgccggagcctccaaaacctaccctcagcaagccggtaccatccgcaagaacggctacatcgtcatcaaaggccgcccctgcaaggttgtggaagtttcgacttccaaaactggaaagcacggtcacgctaagtgtcactttgttggaattgatattttcactgccaagaaacttgaggatatt

SEQ ID NO: 110423 - DNA, 250 bp, Glycine max
tgacaattttgatgatagaggtggataataaagctgcagtccttggttatatcggggcaccgctcactctggcatcacatgtgattgaaggtggttcatcaccaaacttctcgcaaataaagagattggctttctcagcatccaagatcctgcactcgttactgcagaagtttacgacatctctggcgagatacattctctaccaagctgacaatggagctcaagctgttcagatctttgattcatgggc

SEQ ID NO: 110424 - DNA, 256 bp, Glycine max
tgttatccccgtgaggagggggtaccagacagcttcgccagaataatcgcgccacgaatagctgtcgccacttccttgctgcacttcacggggattgatgatgttttcacctcctccagaggatccaccaagaccctcggcaacttcgttaaggctacttttgattgcttgatgaaaacctatggattcctgacaccagaattctggaaggagactcgcttctccaaatctccattccaagagtacacagatctac

SEQ ID NO: 110425 - DNA, 99 bp, Glycine max
gaaaaggatgacttgtggacttttgagagtttttagatttgtgtttggtgaagtatatgttattgcaatgtacttcagataatgtgaattatcttgtgt

SEQ ID NO: 110426 - DNA, 245 bp, Glycine max
gcttcttggaaatggaaacaagtcctataagagcattgaaagatgaggataaagggtaccctcctgtgtaccctgttggaccaattgtccaaagtggtgatgatgatgcaaaagggttggacttggagtgtttaacatggtttaacaaacaacaagttggttcagttttgtatgtttcttttgggagtggtggaacactttcgcaagagcaaataactgagcttgcttttggtttggaattgagt

SEQ ID NO: 110427 - DNA, 248 bp, Glycine max
gctaggagtctaggagggttaatgccagtgcctgttactggaattgttgccaagtgaaccatgaacacagcaaagccaattggaagtggagccaaaaccggcacatgagaatctctagcattaaccctgctaggagtctaggagctgctgtcatgtacaaccaacagaaggcctgggatgaccattggatcttttgggttggaccatttattggagcagcaattgcagccttctaccatcaattcata

SEQ ID NO: 110428 - DNA, 252 bp, Glycine max
tagaaacagtgtgatgaaaatgaaggtccttgtcttcttcgttgctacaattttggtagcatggcacagccatgcgttccgatatgttccctctccgaatgaacactggctatggtgcccgtactctcgtagtgctctgcgcaagttggaggcatgctgtggaagcacacaacatctttggctttgagaccattcctgatgagtgcgttcaagcaacaaaggaatacatccatggcgaacaatatagatcag

SEQ ID NO: 110429 - DNA, 252 bp, Glycine max
aacacaaggcagacagcaagcgcatcctagagttttaaaaatggcagcagcctcctccatggctctctctaccccatccttggctggcaaggtcgtgaagctgggcccatcagcccccgaagtcgggagggtcagcatgaggaagaccgtcaccaagcaggcctcctccggaagcccatggtacggcccagaccgcgtcaagtacttgggcccattctctggcgagcccccgtcctacctcactggcgagtt

SEQ ID NO: 110430 - DNA, 254 bp, Glycine max
atgtgaatcccaaattcttgaaaattggagaaaagattgctgcagagagggagctagggcagaaagcctttacaaaaggggcgtatttcttgggaaagatggtgtgggcaaagggatacaaggagttgatagatttattagcaaagcacaaggctgaccttgatggcttcaagttggatgtatttggaaatggagaggatgctaatgaagtacagagtgcagccagaaggttggatttgaatctcaactttcag

SEQ ID NO: 110431 - DNA, 250 bp, Glycine max
gaagaagaccaactcatcatcaaactccatagcctccttggcaacaagtggtctctaattgctggaagattgccgggtaacacggacaatgagataaagaattactggaatactcacataagaaggaagcttctgagcagaggtattgaccctgccactcacaggcctctcaacgatgacaaggtattggaacgctgccctgacttgaaccttgagctaaccattagtcctccccgtcaacctcaatctg

SEQ ID NO: 110432 - DNA, 249 bp, Glycine max
tgttgatcgagataactagaaacaacgtgatgaaaatgaaggtccttgttttcttcgttgctacaattttggtagcatggcaatgccatgcgtacgatatgttccctctccgaatgaacactggctatggtgcccgtactccggaggtgacatgcgcaagttggaggcttgctgtggaagcacacaacatctttggctttgagaccattcctgaagagtgcgttgaagcaacaaaggaatactccatgg

SEQ ID NO: 110433 - DNA, 251 bp, Glycine max
ggggttctttgctcaacaagacccatgaggattggaccagcctctaataaaacccctgccactcagtcccagccaaaagcttcatatctgaattctcaacctaaaggctcacagaatgagaatgatccaaataatacgactatttttgttggcaatttggatcctaatgtaaccgatgatcatctgaggcaagtttacagccagtatggagaattagttcatgtgaagattccagcaggcaagcgatgtgg

SEQ ID NO: 110434 - DNA, 253 bp, Glycine max
  unsure (1)..(253): unsure at all n locations
caagtagttgagaactaagaaggagaagcaaatggcttcctcaatgatctcttccccagctgttatccactgtcaaccgtgccggtgccggcatggttgctccattcactagcctcaagtccatggctagnctccccaccagaaagaccaacaatgacattacctccattgctagcaacggtggaagagtccaatgcatgcaggtgtggccaccacttggcaagaagaagtttgagactctttcctacctgcc

SEQ ID NO: 110435 - DNA, 250 bp, Glycine max
gaaaaatgccattctgttcacttatcctcctgttggatcctttactagtaccggtttggtggtttcctccaaattgcctaggttttctgacatgtacacactcactatagcaagcgcagatccaaaatcaatttctgcaaatgatcacgtacatttcaccaaaagtgtcactcagtggttcactaaggacggagtcttagttgagggcctgttctggaaggatgttgaagctttgatagttcaatatact

SEQ ID NO: 110436 - DNA, 285 bp, Glycine max
cacgcgtattcggctcgagactcctccttctcttctctctctcccttttcttttgtttctttcttcttctacatccactgcacaattgccacatgaatcattagttagggtttattctccaagaaaagcaatgagtgcgtccaggttcatcaagtgtgtcactgtgggtgacggtgccgttggcaagacttgcatgctcatctcctacaccagcaacacttttcctacggactacgtgccaactgtctttgacaatttcagtgcaaatgtagttgtggatggaag

SEQ ID NO: 110437 - DNA, 259 bp, Glycine max
atcgagataactagaaacagtgtgatgaaaatgaaggtccttgttttcttcgttgctacaattttggtagcatggcaatgccatgcgtacgatatgttccctctccgaatgaacactggctatggtgcccgtactccggaggtgaaatgcgcaagttggaggcttgctgtggaagcacacaacatctttggctttgagaccattcctgaagagtgcgttgaagcaacaaaggaatacatccatggcgaacaatatagat

SEQ ID NO: 110438 - DNA, 260 bp, Glycine max
caacgaagaaaacaaggaccttcattttggtagcatggcaatgccatgcgtacgatatgttccctctccgaatgaacactggctatggtgcccgtactccggaggtgaaatgcgcaagttggaggcttgctgtggaagcacacaacatctttggctttgagaccaatcctgaagagtgcgttgaagcaacaaaggaatacatccatggcgaacaatatagatcagactccaaaacagttaaccaacaagcttacttttat

SEQ ID NO: 110439 - DNA, 261 bp, Glycine max
cctggccgcacaggccggcgtccgctacgccatgcagaacccccaatcctacgtcaccgccaacatcgctggcttcgtcaaccttctcgaggctgccaaatccgccaacccccaacccgccattgtctgggcttcgtccagctccgtctacggcctcaacacccaaaaccctttctccgagctccaccgcaccgaccagcccgccagcctctacgccgccaccaagaaggccggcgaggaaatcgcccacacctacaacca

SEQ ID NO: 110440 - DNA, 262 bp, Glycine max
ctcctccttctcttctctctctcccttttcttttgtttctttcttcttctacatccactgcacaattgccacatgaatcattagttagggtttattctccaagaaaagcaatgagtgcgtccaggttcatcaagtgtgtcacttctgggtgacggtgccgttggcaagacttgcatgctcatctcctacaccagcaacacttttcctacggactacgtgccaactgtctttgacaatttcagtgcaaatgtagttgtggatg

SEQ ID NO: 110441 - DNA, 258 bp, Glycine max
ttcaccgcacgaatatcttgttgtttggagcgatccgagaaaaactctgtaaacatgttggtttaccaggacctccttacaggtgatgagcttctctctgactccttccgttacaaggaaattgagaatggaatgctgtgggaagttgaggggaagtgggttgttaaaggagcagttgatgtagacattggtgcaaacccttctgctgatggtggaggagaagatgagggagttgatgatgcagctgttaaggttgtt

SEQ ID NO: 110442 - DNA, 257 bp, Glycine max
cagtttggtataaccttagccgaggtcacgaggagcactagctagtttcacaatttccaaatggctaggggattgaagaagcatctcaagaggctcaatgctcctaagcattggatgcttgacaaactgggtggtgcatttgcgcccaaaccctcatctggaccacacaaatctagggagtgccttcccctcatactcatcctacgaaaccggctaaagtatgctctgacttaccgtgaagtcatcgctattctgat

SEQ ID NO: 110443 - DNA, 255 bp, Glycine max
tctcgagcgctcgagccgctcgagccgcaaacaaagttttagatggtcttgaattagctgaagatacttgattcctatgggaaaatattaaatataaggatcagaaggaattttgcttttattcagtttgaatcccaagaggacgctactagagctttggaggccaccaacctgagcaagtttatggaccgtgttatcactgtggagtatgccattagagatgatgatgacagagacagaaggaatggatacagt

SEQ ID NO: 110444 - DNA, 257 bp, Glycine max
gaccccggcaaggaagagactgatgagggattttaaaagattgcaacaagatcctcctgctggcatcagtggggctccccaagacaataatattatgctttggaatgctgttatctttggaccagatgacaccccttgggatggaggtacgtttaagttgacacttcagtttacagaggattatcctaataaaccacctactgtgcgttttgtttctcgaatgtttcatcctaacatttatgcggatggcagtatat

SEQ ID NO: 110445 - DNA, 257 bp, Glycine max
actcgagcgattcggctcagatcatggcttcctcgtgtgcatcctctgccatttcacctgttgccatctccacaccaagttcccagaagaatggatcactcttgggaagcacaaaagcttcttttcttagtgggaggaaactgaaggtgaacaactttacagcaccagttggagcacgatccagcactacagtttgcgcagttgctgagcctgataggcctctgtggttcccaggcagcacccctcctccatggcta

SEQ ID NO: 110446 - DNA, 255 bp, Glycine max
acagttattggtaaaattggtttgactttttctgtgctgacatttgtggtgttgacaataaggtttgttgttgaaaaagcagttcgtggggactttgctagttggtcttcaaatgatgcattgaagctgctgggtctatttgctattgcggtaaccataatagttgttgcaattcctgaaggattgccatcagctgtgacacttagtcttgcttttgcgatgaaaaagttaatgaaggataaagcacttgtgaga

SEQ ID NO: 110447 - DNA, 255 bp, Glycine max
tcaataatggttttgaaatgtggagttctgagtgggcaaatcaaacttcatggcatttgagtttccttattgacaatcccaaacaatgctacagtttttgatattctcttgggaatctctcaagattttgaaattgctggtaatactcttatgccagctttttctgttccacaggctactgccagatcttctgaaaatgcggaatcctctgcatgatctggaatttgtgttttctttcgcttgttcgtttgttta

SEQ ID NO: 110448 - DNA, 262 bp, Glycine max
accaaggccaacgttgactacgagaagatagtgcgtgacacctgcaggaacatcggcttcgtctcaaatgatgtgggactggatgccgacaactgcaaggtcctcgtcaacattgagcaacagagccctgatattgctcagggtgtacacggccaccttaccaaaaaacctgaagaaattggtgctggtgaccagggtcacatgtttggctatgccactgatgaaacccctgaattgatgccattgagccatgttcttgcaa

SEQ ID NO: 110449 - DNA, 259 bp, Glycine max
  unsure (1)..(259): unsure at all n locations
cccaaaaaaaaaaccctctcttactctctcttccaaaacctaatacacatttntctccttcaaacaaattttcaaaatgactgacatccttcacatccagggtggccaatgcggcaaccagatcggcgccaagttctgggaggtggtttgcgcggagcacgggatcgaccccactggaaggtacggtggggactcagagcttcagctcgagaggatcaatgtctactacaacgaagccagctgcggccggttcgtgccg

SEQ ID NO: 110450 - DNA, 251 bp, Glycine max
gatcgagataactagaaacagtgtgatgaaaatgaaggtccttgttttcttcgttgctacaattttggtagcatggcaatgccatgcgtacgatatgttccctctccgaatgaacactggctatggtgcccgtactccggaggtgaaatgcgcaagttggaggcttgctgtggaagcacacaacatctttggctttgagaccattcctgaagagtgcgttgaagcaacaaaggaatacatccatggcgaac

SEQ ID NO: 110451 - DNA, 254 bp, Glycine max
  unsure (1)..(254): unsure at all n locations
ttgaatacttagacaaggctcttaaggctaaggatccaacaacatctttagcccattattttgatgtgatatcaggaactagtactggtggcctcatgactgctatgttagttgccccaaactcatctaatgccaatagtcctctctttactccctcggaagtcgtgcaattctacaagaactatggcactanaatatttgaacctgagagcttggtatgatcttgacaaatgtcccaaattcaatggagagtt

SEQ ID NO: 110452 - DNA, 255 bp, Glycine max
tggcacgtggcgtctgttgagattatgtatgatcgtgtcacggacagaagcaggggatttgcatttgttacaatggggaatgttgaggatgctaaataggcaattcgaatgtttgatggctcgcaagattggtggtaggactgttaaggtaaacttcccagaggtacccaaaggaggggaaaggttggtaatggggtccaaaatacggaacagttacagaggttttgtagacagccctcacaagatctatgctgg

SEQ ID NO: 110453 - DNA, 252 bp, Glycine max
gaccacttgaagacagctaaggctgtcaaatcaagtgatcaagtgtttaggaagaaagctaaaaagatcaggacatcggtttcatttcacaggccaaggaccttgaagaaggaaaggaaccctaagtaccctcgcattagtgctccacccagaaacaagttggaccattatcagatacttaaatttcctctaactactgagtctgctatgaagaaaattgaggataacaacacgctggtttttattgttgac

SEQ ID NO: 110454 - DNA, 224 bp, Glycine max
ctcagtctctgtgtttgcggctgaggattccgaacgagtgaccttcttcgtttctcgcaaagtttaagtaatcatgggtaaggaaaaggttcacatcaacattgtcgtcattggacatgtcgactctgggaagtcaactaccactggtcacttgatctacaagcctggaggtattgacaagcgtgtgattgagaggttcgagaaggaagctgccgagatgaaca

SEQ ID NO: 110455 - DNA, 254 bp, Glycine max
  unsure (1)..(254): unsure at all n locations
tgaacaccatgcttgatgttgtccacaagttaccaaatatgtgtggtttattttgtaattccaggtcttttcagtaatcatggtccactttactttgtcagtacaanagtcagtttttcaaaaatgggtttggcctgtcatatcgcgaagattcatagtgaggcgtcagtagagataaatgccagagagctaaaagagtacattgaggaaatttattggggttcaaataaacgtgttatgcttcttggacatag

SEQ ID NO: 110456 - DNA, 255 bp, Glycine max
atcgttgagaaataaggggaaaaaatggtgtcgctgaaactgcagaagcggctggccgcaagcgtgctcaagtgtggcagaggaaaggtgtggcttgaccccaatgaagtcaacgaaatctccatggccaattctcggcaaaacatcaggaagttggttaaggatgggtttatcatcaggaagccaaccaagattcactcacgctcgcgtgctcgtaggatgaaggaggcaaagaagaagggccggcactctggt

SEQ ID NO: 110457 - DNA, 246 bp, Glycine max
gtttgacaacttgtacgggtgccgtcactctctccctgatggtctgatgagggctactgatgtgatgattgctggaaaggtggctgttgtggctggatatggtgatgttggcaagggttgtgctgcatcattgaagcaggctggtgctcgtgtcatcgtgactgagattgaccccatttgtgcccttcaggctctcatggaaggccttcaggttctgaccttggaggatgttgtttctgaggctga

SEQ ID NO: 110458 - DNA, 249 bp, Glycine max
tgcagcaggaagaagcaataatggcgccgaagataacacgtaaggttagcagaaaccccgaattgataaggggaatcggaaagtactcgaggtctcaaatgtaccacaagaggggcatttgggctatcaaggccaaaaacggtggcgttttacctcgccacggccctaaacccaaacctgaaactcccgctgaaaaaccacccaaattttaccctgctgacgatgtcaagaaaccccttgtcaacaagc

SEQ ID NO: 110459 - DNA, 250 bp, Glycine max
ggactgccaccccaatgcaggatgttcaggttacaattgaatggtttatatcctctctggaatgtgttcccagaacctattgtgttttaaatccacaaaatccttttgttttaaataggtggatgggtcaactgactttcccccagggcacttcccgaagtgttaagagaatgcctctttctatagacggaggagctggtgcaaagaatgctattctcatgaacatgcccaatgctgttctttcaatgtg

SEQ ID NO: 110460 - DNA, 250 bp, Glycine max
aacaaaattgcgaagaaccctaattgattgattgattgattgattcccatggcgtcccgaagaggtggagtctcactcccagaaagaccaagcaacaactcaggctccgtcctggcgaagatctcgcgctcctccatcgtcacccgcggcaaggaagccgccgtcgacgccgcattcgtcgccaagaagctcctccgcagcaccggcaaggccgcgtggatcgccggcaccaccttcctcgtcctcgtcg

SEQ ID NO: 110461 - DNA, 250 bp, Glycine max
aaagtataaagatggcagagacattcctatttacctcagagtcggtgaacgagggacaccctgacaagctctgcgaccagatctccgatgctgtcctcgacgcttgcctcgagcaggacccagacagcaaagttgcctgcgaaacatgcaccaaaaccaacttggtcatggtcttcggagaaatcacgaccaaggccaacgttgactacgagaagatagtgcgtgacacctgcaggaacatcggcttcgt

SEQ ID NO: 110462 - DNA, 183 bp, Glycine max
ctcagaaagaaaaaatgcgtaacaataatttcactgtctcatcaatgcatggtgacatgacacagaaagaaagagatgctattatgggagaatttcgtgctggaacaacccgtgtactaataacaactgatgtttgggaccgtggtcttgatgtacagcaggtttctctagttatcaatatga

SEQ ID NO: 110463 - DNA, 247 bp, Glycine max
ctaatccctcactcttgttcttcagtctcctcctattatccgccaccgtagccgccgccgaacggatcgacgatgaagacgaccttctgatccgtcaagtggtgccggatgcggaggaccaccacctgctcaacgcggagcaccacttctccgccttcaagacaaagttcggcaagacctacgccacgcaggaggagcacgaccaccgcttccgtatcttcaagaacaacttgctccgcgccaagtc

SEQ ID NO: 110464 - DNA, 243 bp, Glycine max
gcaaagcaagctcagggggcaggtcaagaatgttaagaaattggaagctgaaatagtagctttgaagatttcatatctcaagaaaatcaacaaaggcaccaatgttgtgatcttggactcgtactcggacgtagcaaaaacagttggaagaacgctaaccagccttggctttaagaacacatcgattgttgctgatggattctctgggaacaaagggtggttgcagagtagattaggaacaga

SEQ ID NO: 110465 - DNA, 263 bp, Glycine max
gttgggaaaattgtgaaaggtgacgtggaccagtcagatggtagcttccttgatgatgataaaatagaaagtggatgggttctcacctgtgttgctctacctaggtcagacgttgtcattgaaacacacacagatggagagatcgaattatcgatatatatcataatgtaatctcgtccattgctcttctaatgccatctatctatgtcgtgttttgattttgttagagtgatttggcattggctagttagctagctgaaatc

SEQ ID NO: 110466 - DNA, 260 bp, Glycine max
caactcaggtgcgtcctgcaacaactctgttggctgatgggtgcccatatttgtatgctatggtgcatgatagttcagtgtctacaataccaggtgattttgtcattggtgtcaagttgacaaccataaacaatatgtgtgcatatgggctcaatcctggtatttcaggttctcgtcttttgggcaccattcctcagtccatttcacagcaaactgtttggaatcaaatggcaacagtgagaacaccattgaattttgat

SEQ ID NO: 110467 - DNA, 259 bp, Glycine max
cggctcgagcaggaggatgttgtagctgcttgcaatgattatggaataaaggttactctattccatggtcgtggaggcagtattggtcgtggtggtggcccaacatatcaggctattcagtcccaaccccctggctctgtgatgggaacgcttcggtctactgagcagggagagatggtagaggctaagtttgggttgccacagatagctgttagacaacttgagatatacacaacagctgtactacttgcaacccttc

SEQ ID NO: 110468 - DNA, 257 bp, Glycine max
gattcacttgcttgtatcgtctttcttgttgtgtggtaccttcctgagcttgatccactgcacattgtcccttctgaaccctgaggatggggttggcattctggtgcaagctgatgatgatgttagcatggcccaaagcatcaaagattctagagtattctcaggtggtgtcaaatgcactggatatgaagttgagggatgacttggagagacttaagaaaatcaggaaccatcgaggtttgagacactactggggt

SEQ ID NO: 110469 - DNA, 259 bp, Glycine max
ttcagcctttctctcccactcactcactcacaaataagcaatggcgggaaaaggagggaaggggcttattgcagcgaaaaccaccgttgcgaataaggacaaagacaaggacaagaagagacctatttctcgctcttcccgtgctgagatccagtttcctgtgggacgtacccataggcagctgaaacaaagggtccaagccaatggacgtgttggggcaacagctgcagtgtacttagcctcaattctagagtatctg

SEQ ID NO: 110470 - DNA, 261 bp, Glycine max
ctcactactcacactactcttcctcttccaagccaaagaaggagtttccattagccctttgcaattgatcacacacccacttgaccccttaacaaagcaagaaatcaccctcgtccaagccacagtcctaaagaaataccccacaccacccaaccatgtcttcttccactacgtcggcctcgacgatcccgacaagacccacgtcctaaagtgggcctcctccggcaccaaaaccccaccccaacgcagcgccttcgttgt

SEQ ID NO: 110471 - DNA, 261 bp, Glycine max
atacactcataacactgagcacaaagcatagctcatccttgagttaatacatggtcgcagcttctccatggctctctcatccccatccttggctggcaaggccgtgaagctgggcccatcagccccagaagtgggaagggtgagcatgaggaaacccgtcaccaagcaggtctcctcaggaagcccatggtacggcccagaccgagtcaagtacttgggcccattctctggcgagcccccgtcctacctaaccggtgagtt

SEQ ID NO: 110472 - DNA, 267 bp, Glycine max
cgagcaactacaaaggttgctgtaggagataagatattgaagtagtgctaagtgcctaacacctgcagtgaacaatggcctctgcatcagcatctcttctcaagtcttcacttgttcttgacaagtctgagtgggtgaagggacaaacacttcgccaaccttctgctgcatcagttgtgagatgttaccccaccaccccatcaggcctcaccatcagagctggttcctatgctgatgagctcgttaagaccgcgaaaacagtggctt

SEQ ID NO: 110473 - DNA, 259 bp, Glycine max
tgtgatatcgagcaacggttggctgagcctggccttacttgctatggaagtcagtcaaatggtgacacagggaatgtgggaacgcgactcgatgctgcttcaacttcctcatttcacaaagaatctggctaagaaatgccaggagaacccagggaagagtatagaaactgtgtttgatttattagaaatggaggatgaggagaggcaaaaattgtgtagcatgtacgatttgcagttgttggaaattgcccgattttgt

SEQ ID NO: 110474 - DNA, 255 bp, Glycine max
  unsure (1)..(255): unsure at all n locations
gtaggataacttttttgccagctttgcccatggatggctcatcaccaatggtaaagngtctgcatcatacccaatagacactgttagaagaagaatgatgatgacctctggtgaagctgtcaagtacaagagctccttggatgcattcacacagatcctcaagactgagagtgccaagtccttgttcaagggtgccggtgccaacatcctccgtgccgttgccggtgctggtgtgcttgctgaatatgacaagtt

SEQ ID NO: 110475 - DNA, 252 bp, Glycine max
cggaaatatgaatattactcagattccgcttatatttaatttcagcagtgagaaaagatgggagaatgtagatcaacaaggtatacagatgccacctaatgtaatgcggtagaaattttctaaattgagttgctattgtataataaacaaccaagatgtccaaatctctgcaagtaaaaattgtttactcagtgagcctgttgtctccagagaaaattaacgaagcaaacatttgcaacaacgcccaagtgt

SEQ ID NO: 110476 - DNA, 255 bp, Glycine max
gcaccatctcattcagaaaggaaaaacaacaactcatgcttgaagaccgttttcaagccctcaaaaaagggtgaggactacaccatcttccaagctctcttcagcattgacatgttaattctgttcattgcaacagtttttggtgttggtggaacactaacagcacttgacaatttaggacagattgggaactcattagggtaccccaaaaagagcctcacaacttttgtgtcccttgtgagcatatggaactat

SEQ ID NO: 110477 - DNA, 175 bp, Glycine max
actcgctccgaactaagaaggagaagcaaatggcttcctcaatgatctcttccccagctgttaccactgtcaatcgtgccggtgccggcatggttgctccattcactggcactaagtccatggctggcttccccaccagaaagaccaacaatgcacatttacactccgattgcta

SEQ ID NO: 110478 - DNA, 256 bp, Glycine max
gctattatactctctagagtaattacggaatctgctagaattttctaataatggcgcaagacgttgagcaggtcacagagcaaggtgaatactccgcaaaggactaccatgaccctcctccggcaccgttgatcgacccagatgagctcacaaagtggtccttgtacagagccgccatagctgagttcatagcaacactcctttttctttacatcaccgtgttgaccattattggctacaagagacagagtgacac

SEQ ID NO: 110479 - DNA, 255 bp, Glycine max
gctgcaagaaggctgatgttgacatgaacaaaagagctggtgaactgagtgctgctgagttggatagtgtgatgactgtggttgccaacccccggcaattcaagattccggactggtttttgaacagaaagaaggactacaaggatggcaagtattctcaggtggtgtcaaatgcactggatatgaagttgagggatgacttggagagacttaagaaaatcaggaaccatcgaggtttgagacactactggggtc

SEQ ID NO: 110480 - DNA, 254 bp, Glycine max
atgaaaatgaaggtccttgttttcttcgttgctacaattttggtagcatggcaatgccatgcgtacgatatgttccctctccgaatgaacactggctatggtgcccgtactccggaggtgaaatgcgcaagttggaggcttgctgtggaagcacacaacatcgctggctttgagaccattcctgaagagtgcgttgaagcaacaaaggaatacatccatggcgaacaatatagatcagactccaaaacagttaa

SEQ ID NO: 110481 - DNA, 255 bp, Glycine max
attccttttcttcaccccgtacattcacaactctggacctcttcaaatctaagaccaaagccgctcctgctaagactaaggttacaaagccaaagcaaaaggttgaagatggtatctttggcacttctggaggatttggttttactaagcagaacgagctctttgtgggtcgtgttgctatgcttggttttgcagcatcactgttgggtgaaggaataactgggaaaggaattctagcacaattgaatctggaaa

SEQ ID NO: 110482 - DNA, 255 bp, Glycine max
  unsure (1)..(255): unsure at all n locations
gagttctgaggcgtgagaccttgtacccaagtgccagtgctggcgcgccacggtgccatctttaacttcacctgttccgagatgcgtaatcacgagcagccacaagaggccctttgtgcacctgagaagctggtgaagcaagtggctctggcaacgcagaaggcacaggttccacttgccggcgaaaaagcgctgccacggtacgacgagaacgtnacatgagcagatcataagggcatcacaattggatgttga

SEQ ID NO: 110483 - DNA, 236 bp, Glycine max
  unsure (1)..(236): unsure at all n locations
ccttcagttggaatctcagctggtgatgagatttggacagctcgttacatcttgcacaggatcactgagattgcttaaactgtggtttcctttgaacccaagccaattaagggtgattggaatggttctggtgcccacacaacatacgagccctntnagtggtnctctcnangatgnaacgaggtgttcaaatctcatcaccacctgtgatgccaactgtacgctcgagccgactt

SEQ ID NO: 110484 - DNA, 253 bp, Glycine max
gttaggtataaaattgatggttccaagtttatgaccgcctttttggaccccaaggagcgaaacaataccgagtacaagttggagacttttgctgcagtatacaggaaactttcaggcaaaggtgtcgtgtttgagaatcctactaccgaggcttaggttctatttgttagctttgaatttcttcctgaattacatatggtggatgctggttttgttaagttggctttaattctggattttctttagttactta

SEQ ID NO: 110485 - DNA, 267 bp, Glycine max
acgagccctagccccacatctggtctccctctctcaaaatctcacaactctcgtcgccgaagccgcagcgcaccgcacggaagcacccacggagatgaagaagggagtccatccacagaagcaatggatatcctacgttactcaaacgggtaggttgatgcatgtgatgataacaaagatacaccctgttgggaaagtttaccacttccgggctaagcgtcaaatggccgagagtttaggacagattgctaagtacagacgccgctt

SEQ ID NO: 110486 - DNA, 252 bp, Glycine max
atctttctgagatatttcgaatttcgatactttgatcagatccaaaacactccttcatccatgacgcttggctcttcaggatccagtgtcgtggttccaaggaacttcagattgctggaggagcttgagaagggagaaaaaggaatcggagatggaacagttagctatggaatggatgatggtgacgacatttacatgcgctcttggactggaaccattattggcccctataatactgtacatgaaggaaga

SEQ ID NO: 110487 - DNA, 251 bp, Glycine max
aaagtataaagatggcagagtaattcctatttacctcagagtcggtgaacgagggacaccctgacaagctctgcgaccaaatctccgatgctgtcctcgacgcttgcctcgagcaggacccagacagcaaagttgcctgcgaaacatgcaccaaaaccaagttggtcatggtcttcggagaaatcacgaccaaggccaacgttgactacgagaagatattgggtgacacctgcaggaacatcggcttcgtc

SEQ ID NO: 110488 - DNA, 249 bp, Glycine max
gaacaagtagttgagaactaagaaggagaagcaaatggcttcctcaatgatctcttccccagctgttaccactgtcaaccgtgccggtgccggcatggttgctccattcactggcctcaagtccatggctggcttccccaccagaaagaccaacaatgacattacctccattgctagcaacggtggaagagtgcaatgcatgcaggtgtggccaccagttggcaagaagaagtttgagactctttccta

SEQ ID NO: 110489 - DNA, 249 bp, Glycine max
aatttccctcatggagtttcaaaaacctctatggctattcttgcttctcctcactctcctctcaagctcccaagccaacaaattcaacgttggtggaagcaaagggtgggttccaaacccttccgagagttacaacaattgggctggaagaaaccgattccaaatcaatgacacaatagttttcaagtacaataagggttcggattcggtgttggaagtgaagaaggaagattacgacaagtgcaacaa

SEQ ID NO: 110490 - DNA, 248 bp, Glycine max
actatctgcaacttcctgctaatgctcccaagtgtgctcaccacaacaatcatcatgaaggtttcatgaatttcattcacagggatgaggaggttaattacttcccttcaaggtatgatcctgttcgtcatgcagaatcgttccccatacctcctgctatctgcagtggaaggcgtgaaaagtgtggaattgagaaggagaacaactttaagcagcccggagagagataccgatcttgggcacctgac

SEQ ID NO: 110491 - DNA, 250 bp, Glycine max
  unsure (1)..(250): unsure at all n locations
ccactgcaaaggaacactcaagcttagnnactataactcttttgagggggttctttactgcaggccacacttcgaccaactgttcaaaagaactggtagtcttgacaaaagcttcgaagggacaccaaaaattgctaaaccagaaaaaaccggggaagagaaancngcagcaaccaaagtctcaagtatgtttggtggaatagagataaatgtgccggttgtcaaaaaacagtgtatcccatgaaaaggt

SEQ ID NO: 110492 - DNA, 247 bp, Glycine max
  unsure (1)..(247): unsure at all n locations
tgacacggtgctacctgttctagggctagcagcactgtaacctgaactcacctctcccaaatccgttcccactttcaaaccttttttgtgtccaccaaatcggcgatgccaacgangtcggtggtgccgacgaaccggcgtcgcgcggcgaaccccgcggaggagatggacttcgagacgacggagggcgtgaaggccatcggaagcttcgaggagatggggatcaaggacgatctgccccgcggaa

SEQ ID NO: 110493 - DNA, 226 bp, Glycine max
aaatggacgctgtctcaaagatcaagaagggtcgcggcggaagaaagggcggcggcccaaagaagaagccggtttcaaggtccgtcaaagtcggtctccaattccccgtcggaagaattggccgtgttttgaagaaaggaaggtacgctcagcgtgtcggtaccggtgctcccgtatacttggcgtcagtgttcgaatacctagctgccgaggtgcttgagttggc

SEQ ID NO: 110494 - DNA, 267 bp, Glycine max
caccggcactgcccgagactcttaagaattacaacaagctggtgtctcttggcttcaagattatattacttgtcaggaagaacacttgacaaacaggccgtaacagaagcaaacttaaagaaggctggctaccacacatgggaaaaattaattctcaaggatccacaagatccttccactccaaatgcagtttcatacaaaacagcagcgagagagaaactgataaggcagggatacaacattgttgggatcattggagaccaatgg

SEQ ID NO: 110495 - DNA, 262 bp, Glycine max
tttctttttctttcttctttatctcaattgtttgtggttactgtgcagattaatggggaggttgtttgtggtgaatctggaagggaagatctatagctgcaaacactgccatacccatcttgcgctttacgatgacatctactccaggacattccattgcagacatgggaaagcttatctcttcaataaggttgtgaatgtttctattggcgaaatggaggacagaccgatgatgactgggctacataccgtggctgacatt

SEQ ID NO: 110496 - DNA, 262 bp, Glycine max
gtgaattatggaatcctgcttgcacaaaagcattggctatgtcatttaatccaaacccgtgttctgatgcatggagtttggaatttctgaagcgtaccggatttcattgtgatatcatttgtgtcactggatggactgccaccccaatgcaggatgttcaggttacaattgattggtttatttcctctcaggaatgtgtcccagaacctattgtggtttaaatcacaaaatccttttgtgctaaataggtggatgggaaaac

SEQ ID NO: 110497 - DNA, 208 bp, Glycine max
  unsure (1)..(208): unsure at all n locations
cacttgggtggtgatgactttgataagagaattgttgattggctggcttccaacttcaagagagatgaaggcatagacctgttgaaagacaaacaagctcttcagcgtctcactgagacagccgagaaagcaaagatggagctctcaacnatgactcaaacgtacagtagnttgccagtcagtacgtccacggcntaatgacccaaac

SEQ ID NO: 110498 - DNA, 261 bp, Glycine max
gctaacaatgatgattgatgcggcgattcagatggattgcttggtgagttgtgcactgacatgccctgtattaggtatgacggtccgtcaagtaagaatgtgctaacatttagatgggagaatgcagaggaggaaattcttgggaagaagatgaaggattggttaagatttagtgttgcattttggcatacattccgtggaacaggctctgacccatcttggtcacctaccaaatactggctatgggaagatggtaccaat

SEQ ID NO: 110499 - DNA, 259 bp, Glycine max
  unsure (1)..(259): unsure at all n locations
tggtcatgccatctctgagcaaccgttgttcggttaccctccgctcagcgcgccgcgcagttgaagttcttcttggaggatcctctcaacttcgattcgcttgctgtcgttttcaataagtcaagcagatttgccaggttgcagaacattcagtgtgctattgcgggcaagaatctgtacatgagattccgatgcagcactggtgatgccatggggatgaacatggtgtcaaaaggtgttcanaatgttcttgattttc

SEQ ID NO: 110500 - DNA, 263 bp, Glycine max
tgtacactgttcgttcctttgggattagaagaaatgagaagattgcatgctatgtcactgtcagaggtgacaaggcaatgcaacttttggagagtggtttgaaggtgaaggaatatgaacttctcagaaggaacttcagtgatactggttgcttcgtctttggtattcaggagcatattgatttgggaatcaagtatgatccttcaactggtatttatggaatggatttctttgttgttctggagcgacctggctatcgtgtt

SEQ ID NO: 110501 - DNA, 207 bp, Glycine max
gaaggataacacttttgtgtacatgtgtggactaaaaggaatggaaaagggtattgatgacattatggtgtcattggctgccaaagatggcattgattggactgagtacaagaggcaattgaagaaatcagagcaatggaatgtcgaagtctagttaatttctgttcacttgcaccaatatcatctccgacgttgtgctgcaacaag

SEQ ID NO: 110502 - DNA, 235 bp, Glycine max
  unsure (1)..(235): unsure at all n locations
tgatcgagataactagaaacagtgtgatgaaaatgaaggtccttgttttcttcgttgctacaattttggtagcatggcaatgccatgcgtacgatatgttccctctccgaatgaacactggctatggtgcccgtactccggaggtgaaatgcgcaagttggaggcttgctgtggaagcacacaacatctttggctttgagaccattcctgaagangtgcgttaagcaacaaagga

SEQ ID NO: 110503 - DNA, 260 bp, Glycine max
cttctctctgagaacaacaccccacactcctctctctctcaccgcttccttctcttctcacacctccatggcccacacttcccttccctccgccgatgccggcatggacgctgtccagcgccgtctcatgttcgaagacgaatgcattttggtggatgagaatgaccgtgtggttggtcatgattcaaaatacaattgtcacttgatggaaaagattgaagctgagaatttgctgcatagagctttcagtgtattcctgt

SEQ ID NO: 110504 - DNA, 240 bp, Glycine max
ttaatatagaagagctgaggaaggctgctgaaacacacaaggataacttatctgcacttatggtaacatatccttcaacccacggtgtttatgaggaaggtattgacgaaatttgcaatattattcatgataatggaggccaagtatataatgatggtgccaacatgaatgctcaggtgggactcacaagcccgggttggatatgagcagatgtttgccatctcaatctccacacgacat

SEQ ID NO: 110505 - DNA, 265 bp, Glycine max
aggactgcttagcattcacatgccggcatactatgactctatcatcaagggtgtttcaacagtgatgatctcgtactctagctggaatgggatgaaaatgcatgcaaacaaaaaacttatcactggttacctcaagaacaaattgcatttcaagggttttgtcatatctgattggcagggtattgaccggattacctctcctcctcatgctaactattcatactctgttcaagctggtgtcagatctggaattgatatgattatg

SEQ ID NO: 110506 - DNA, 252 bp, Glycine max
tgaacctattaaaattggagaagttctgactcgtggattaggtacgggcgggaatccacttttgggggaacaagctgcagaggaatcaagagatgctattgctgatgctcttaaaggatcagatttggtgtttataacggctgggatgggtgggggaaccggtctggtgcttccccagttgtagcccaaatatcaaaagaggcaggttacttgactgtaggtgttgtacctatcccttcagttttgaggacg

SEQ ID NO: 110507 - DNA, 264 bp, Glycine max
tctggaggtgtattcctagtcactattcactttcctccggattatcctttcaaacctcccaaggttgcctttaggactaaggtgtttcatccgaacatcaacagcaatggtagcatttgtcttgatatccttaaggagcagtggagccctgcactcaccatctctaaggtactgctttctatctgctcattgctgactgatccaaatcctgatgatccacttgttccggaaatcgctcacatgtacaaaactgaccgggccaag

SEQ ID NO: 110508 - DNA, 264 bp, Glycine max
tagaaacagtgtgatgaaaatgaaggtccttgttttcttcgttgctacaattttggtagcatggcaatgccatgcgtacgatatgttccctctccgaatgaacactggctatggtgcccgtactccggaggtgaaatgcgcaagttggaggcatgctgtggaagcacacaacatctttggctttgagaccattcctgaagagtgcgttgaagcaacaaaggaatacatccatggcgaacaatatagagcagactccaaaacagt

SEQ ID NO: 110509 - DNA, 236 bp, Glycine max
tactgaggaaccgagtttcagctcagcaagcatgggagaggaagaaggcatacttgattgatttggaaacaagagtcaaagacttagagaagaagaactcagagctcaaagaaagactttccactttgcagaatgagaaccaaatgcttagacaagatcattcatgttatcattgtcatcatgataacgttatatatacatgtctctagctcatcactgtcaccatgatgatgcaa

SEQ ID NO: 110510 - DNA, 211 bp, Glycine max
  unsure (1)..(211): unsure at all n locations
gttgattatgcatgcacaccagaagaagtgcagcaacactttcagtcctgtggtactgtaaacagggtcactatcctgacagacaagtttggccagcctaaaggttttgcttatgtggaatttgttgaagctgaggctgttcaagaggctcgtcctgttgaataatcntgaattcantgccgncaanttaaggcttttccgtagaggacca

SEQ ID NO: 110511 - DNA, 263 bp, Glycine max
ttttgtcattggtgtcaagttgacaaccataaacaatatgtgtgcttatgggctcaatcctggtacttcaggttctcgtcttatgggcaccattcctcagtccatttcacagcaaactgtttggaatcaaatggcaacagtgagaacaccattgaattttgaatctagctatccgagcttttgtcaattttctattgaccttctcggtggaggaattttagtggacgaaactggagattggatcacacttatacaaaattctc

SEQ ID NO: 110512 - DNA, 206 bp, Glycine max
aaaatggttctactggataagttacttcctaaactaaaagaacgtgattctagggtccttatattttcacagatgactagtctgctagacatacttgaagattatctcatgtttcgtggataccaatattgtcgcattgatggaaatactggtggagacgatcgagatgcttccattgaggctttcaacaaaccaggaagtgaaaa

SEQ ID NO: 110513 - DNA, 264 bp, Glycine max
attgggcctcattggtacaagtgtttttaacaaacagcaacagtacagagcattttgatgcatgtaagtggacaaaatcagaaccacattcctgggaattgatcttcccaatagaggtatgtggtcccaataatggttttgaaatgtggagttctgagtgggcaaatcaaacttcatggcatttgagtttccttattgacaatcccaaacaatctacagtttttgatattctcttgggaatctctcaagattttgaaattgctg

SEQ ID NO: 110514 - DNA, 260 bp, Glycine max
  unsure (1)..(260): unsure at all n locations
tgcactaccaagaagcttagcggttatatgtatctatccagcagtagattcgggagattcaacattaactatgcctcaatcttgaatagatggtgagaaatattatgagactgcgcaaagagttaaacaaactttacaacgttacaaataacttcaagacattatagctatccttggcttggacgaattacgnaaagaagatcgcttaaccgtagcaagagcacgaaaaattgagcgtttcttatcacaaccttttttcg

SEQ ID NO: 110515 - DNA, 259 bp, Glycine max
cagagagtgatttcagtgagtgatcggtgttcacttgatctcatcataatcgtcagcgtcaattgaagaagatgccgatcagaaacatcgccgtcggaaggcctgaagaggcgactcaccccgacacgttgaaggcggctttggctgagttcatctcaaccttcatcttcgtgttcgccggctcaggctccggcatcgcctacaacaagctcaccgacaacggcgctgccacccctgccggcctcatctcgcctccatc

SEQ ID NO: 110516 - DNA, 240 bp, Glycine max
ggagggggcaaattgagttgggtgttggaaaggcagagcaagaggagtaacataatcaaacatggcggttaggcaaagagccgtgtctgcacttccaactcttctacgcactctccgcaaagaacctttgaagcctcgcaaccacgcacacgtcaatgccttgccctctcttcgacgcgctttctctttgtacgatcagatcaacctcatcgatcaagtccccgaagaccagcgtccgat

SEQ ID NO: 110517 - DNA, 259 bp, Glycine max
cttatcgaaagggatgtaagagacccacgagtgagattggaggaacaccactgaacttaagcgcgtgttcttccattcaggcaagtccacaatcctcgtcatacccgagtcctgtaccatcctaccatgctagcccaacctcttcctcgttcccaagccccacgcgcattgacggaaaccacccttcttcctttctcatcccattcatccgcaacataacttccatccccgccaacctccctcctctcaggatatccaa

SEQ ID NO: 110518 - DNA, 248 bp, Glycine max
atttgatgacaagtactttgccaaggaagctaagaaaaagaaaacaaagggcgaaggcgaattctttgaggcagagaaggaggagaaaaatgtgcttccccaagaaaagaaagatgaccaaaaaaccgtggacactgctttgttaaaggccattgagagtgttccagagctcaagtcttactatggtgctaggttttccttaaggcaggagtgaaccccatgagctagttttctgagtgctaaatatt

SEQ ID NO: 110519 - DNA, 264 bp, Glycine max
atcaaattagttcattctctttgcgcagttccctacctctcctttcaagatgcagatcttcgtcaagaccctcaccggaaagaccatcacccttgaggtggaaagctctgacaccatcgacaacgtcaaggccaagatccaggacaaggaaggaattcccccggatcagcaacgtctcatcttcgccggaaagcagctcgaggacggccgtaccctcgccgactacaacatccagaaggagtcaacccttcaccttgtccttcg

SEQ ID NO: 110520 - DNA, 238 bp, Glycine max
catttactttttaaaataatgtaggacacaagaaagatgttagcttccttaccagcttacctggagcatcccaaaggctacaaattttgagtgctgatcttagcaatccagaaagtttcagtgcatccattgaagggtgcattggagttttccatgttgctaccccagttgactttgaactaaaggaaccggaggaagtagtgacgaaaagatccattgatggcgcactaggaatttt

SEQ ID NO: 110521 - DNA, 246 bp, Glycine max
aggcggtttccgcaattggttttgaaggtttcgagaaaaggttggaaatatcctttttccagccgggactttttgctgaccctgaaggaaggggtctaagggctcttacaaaatcccagttgggtgagattctaacaccagctgcttgcaccattgtttcttcgctcaaaaacgataatgtcgactcctatgttctatctgagtccagcctctttgtttatgcctacaagatcatcatcaaaacct

SEQ ID NO: 110522 - DNA, 245 bp, Glycine max
agcacgcatgggtccagggttccgattccaccccaccgacgaagagctggtggtgttctacctcaagcgcaagatgaccggaaacctctcccgctacgaccacatcgccgtcgttgacgtctacaagctcgagccctgggaccttccctctctgtcgaagctgaagacgaaggacttggagtggtacttcttcagcgcgctggatcgcaagtacggaaacggctccaggaccaaccgcgccaccg

SEQ ID NO: 110523 - DNA, 244 bp, Glycine max
ctttgctatgctgactaccttcaatgaagttgatatgactaatttgatgaagctccgttctgattataaggatgcttttgttgaaaagcatggagtcaaattggggcttatgtctggctttgtcaaagctgctgtcaagccactccaacatcagccgattgtcgctgcagtcattgatggtgatgatattatatacagagattatatagatatcagcatagctgttggtactccaaagggcctt

SEQ ID NO: 110524 - DNA, 240 bp, Glycine max
cccttctggatttccgctcacagttatttgcaatagcatttttaatgagatgctcattagatatagctatgaaaaattactgcgccaggctaaagctccaagtatgtttttacaatccttcaaaaattttgtttctttgtgtgtgtatggtgatgataacttaattagtgttcatgaatatgtcaccccttactttagcggttctaaattgaaaagctttctagctggtcataatatcac

SEQ ID NO: 110525 - DNA, 241 bp, Glycine max
caagaacacagttggaggaaccattctgcgtagtgatctattggcaaattttttgacagagggcaattttagagcaagtgttgatttgcagcgcactcatcgtattaaaggaatgattaaaatggtggctacagttggtattcctgagaatacaggtatagcattggcctgtgctatgaatccctcttttagggggcgcgccagttctgatatttacaccatctgctctcaagactgtgaa

SEQ ID NO: 110526 - DNA, 240 bp, Glycine max
cagaattagggttttccaattcacagagcaacacaacgaaccaacaatggcgcagctcagccgcagtcgcagccgcagcacgggcaagcagcgctggagcaggtgcagtgcttcggtcgcaagaagaccgccgtggccgtgacctactgcaagcgcgggcgcggtctcatcaagatcaacggctgccccattgagctcgtggagccggagatcctccgcttcaaggccttcgagcctatc

SEQ ID NO: 110527 - DNA, 240 bp, Glycine max
catcatcaaagttttttcctttctctgctctttgccttctctgacacatttggtgccttgtagagcgtgttttggcaggaaggtggtatggcgaaggacgttgaggttgctgagcgtggctccttctctgggaaggactaccaggaccctccaccagcaccactcattgatgctgaggagctcacaaagtggtccttttacagggctctcattgctgaattcattgccactttgctcttc

SEQ ID NO: 110528 - DNA, 242 bp, Glycine max
caatcctgaaaatgcagttcgtagtatttttgttgcgcctttcagaggcggaaggcccattcgggtggttacatttccgaataccattgtgcagattgaaccagacatgaattcaaggtttcagcttttgagtaccactaccaatggtgattttgttcaaggaaaagatctcgcgatggttaaagttaatgtagcatgtgctgctgttggcttgacatcaagttacactccaactccattgt

SEQ ID NO: 110529 - DNA, 246 bp, Glycine max
gtgagatagagagagacgcttcgcaaatctcaatcgaatctcagaaaaatgagagaaatcatcagcattcacataggtcaggccgggatccaggtcggaaactcctgctgggaactctactgcctcgaacatggcatccagcccgacggcatgatgccttctgactccaccttcggtgtagcccacgacgccttcaacaccttcttcagcgaaaccggatctggcaagcacgtcccccgtgctgtc

SEQ ID NO: 110530 - DNA, 244 bp, Glycine max
tgttcctgttctgactcttggctcattttctaagagatggatagttcctggatggaggcttggttggtttgttacaaatgatccatctggcacttttagaaatccaaaggtagatgagcgaattaaaaagtactttgatcttttgggaggtcctgccaccttcatccaggcagctctacctcagataattgcgcatactgaagaggttttcttcaagaaaaccattgataatttgaggcatgct

SEQ ID NO: 110531 - DNA, 250 bp, Glycine max
cggaatcaacccatactccacggaatggactggtttggcagatatattactgagtaaaggtaacgactattctgtgttgcgattatgctagttttgatggtttgattaccaagcaagttatgagcaagatggcagaaatgataaacagtctttgtggtggtgatgcaaaattgatgcgtgaaaggacacacctgctgttggcttcttgttcaaggatcgcaatttgttccatagatggatgcagaggtgc

SEQ ID NO: 110532 - DNA, 157 bp, Glycine max
aacaaagaaaaaaaaaaccctagccaacacaaccatcatggccacctctgctattcagcaatcagcattcactggtcaaactgctctgaagcagctcaatgagttcgtccgcaagaccggtggcgccggcaaaggtcgcactaacatgcgccgcacc

SEQ ID NO: 110533 - DNA, 236 bp, Glycine max
caaggcagaaagcaagctcatcctagagttttaaaaatggcagcagcctcctccatggctctctcttccccatccttggctggcaaggccgtgaagctgggcccatcagcccccgaagtcgggagggtcagcatgaggaagaccgtcaccaagcaggcctcctccggaagcccatggtacggccgcaccgcgtcaagtacttgggcccattctctggcgagcccccgtcctacctc

SEQ ID NO: 110534 - DNA, 239 bp, Glycine max
gtagagactatgaatctcttggtaccgatattttgccagagttgcgatgatttgatcagcaaatgggagagtttgttatcttcgtctaatgggtcttgtgagttagatgtgtggccttttgtccaaaacgtgtcaagcgacgttcttgctcgtgcaggctttggaagtagctatcaagaatggaaaaaaatattcgaacttcaaagggaaatgattcagcttacaatgacgctctttat

SEQ ID NO: 110535 - DNA, 155 bp, Glycine max
gataaaccgcgatcacaggttgccgcaccttaaaaccggaaacaaaagcaatcgttacttggtttcaagaatttctcaatttcttcctatttctttgtgtactatttcttatgggaaagaaaatcactctctgtgctggccacagacttcgtgaa

SEQ ID NO: 110536 - DNA, 139 bp, Glycine max
tgatattgatgcgaactctgagaaatgattatgcaaagtatgctcgggaagatgatgatttggaaagtctggagagagatgttagtgaagaatctggctggaaacttgtgcatggtgatgtttttcgactgcctcgcaa

SEQ ID NO: 110537 - DNA, 240 bp, Glycine max
ggggaagggagtgtgaatagtaagaaggtgaagaacttgcagatgaagggagaggtggggggtttcgtggtgtggcagaagaggccagagttgtggtgcctagagcttgtggtttctggctacaagatcagtgccgggagtgatggtaaagtggcatggcggcaaaccccttggcatcattctcatgcttctagaggcccaccaagacctctcagacgtttcttacagggtcttgatcca

SEQ ID NO: 110538 - DNA, 260 bp, Glycine max
ctgagttcggctcgagggcggtttccgaatcggttttgaaggtttcgagaaaaggttggaaatatcctttctccatccgggactttgtgctgaccctgagaggaaggggtctaagggctcttacaaaatcccagttgggtgagattctaacaccagctgcttacaccattgtttctttcctcagcaacgatactgtcgactcctatgttctatctgagtccagcctctttgtctatgcctacaagatcatcatcaaaacc

SEQ ID NO: 110539 - DNA, 238 bp, Glycine max
tccaagaagaaggccttcaccaagtactctaagcagtgtaactgatgagggaaagaaaacattgaggctagtggagaaactgaagaagtatgctactgtggttcgtgttttggctcacactcagatcaggaaaatgaaagggttgaagcagaagaaagcccatatcatggaaattcaggttaatggtggtagtattgcacaaaaggtggactttgcatacagtttctttgagaaacag

SEQ ID NO: 110540 - DNA, 237 bp, Glycine max
gttggtgccgatcatcttgcaagaagtatatgcgccgacactgaagagtagtcctgatgctcctaagcttgcgaaggagaagttggagaagatggggcccatgacgaccaatgagaagatcatgactgccactctgtttctcacggtgggactttgggtatttggaggacttcttaacattgatgctgtatctgctgcaattcttggattatctgtacttcttgtcactggggttgt

SEQ ID NO: 110541 - DNA, 160 bp, Glycine max
ggaggatgcagcaaacaactttgcccgtggccactataccattggaaaggagatcgttgagctttgcttggaccgcatcagaaagcttgctgacaactgcacaggtctccaaggttttctggttttcaatgctgtgggtgggggaactggctctggactt

SEQ ID NO: 110542 - DNA, 158 bp, Glycine max
aggctgtcaacgacgacaactccgtggtcaccatgcatcccgaaaccatggaaaagcttcagcttttccgaggggacactatcctcatcaagggtaagaaacggaaggataccatttgcatagctcttgctgatgagaactgtgaggagccgaagatc

SEQ ID NO: 110543 - DNA, 242 bp, Glycine max
aattgttgtaactttttgattcctaaattctctaaaattcgaaattctaatttcgttaggggaaagagattgtttgtgtgtgagtgagtatggctggaaaaggcgagggtcctgctatcggaatcgatttgggaacgacgtactcttgcgtcggcgtgtggcaacacgatcgtgttgaaatcatagccaacgatcagggtaacaggactaccccatcctacgtggctttcaccgacacagaa

SEQ ID NO: 110544 - DNA, 245 bp, Glycine max
gttttgatgaaccaccttggccttctctatctgatgaggcaaaggattttgttaagagacttctaaataaagatccaaggaaaagaatgactgcagcacaagcattaggtcatccatggattaaaaattataaggatgtaaaagtacccttggatattctagtgttcaagctcatgaagacatacatgcgctcctcttctctacgaaaagaagctttaagggctttgtctaagacattagctatt

SEQ ID NO: 110545 - DNA, 240 bp, Glycine max
aacaagcttacttttatgccagagacctcgaagtccatcccaaggacacatttgtgttcagtatagatggcaccgtactctctaatattccatactacaaaaaacatggatatggggtggagaaatttaactcgaccttgtatgatgaatgggttaacaagggcaatgcaccggcactgcccgagactcttaagaattacaacaagctggtgtctcttggcttcaagattatattcttgt

SEQ ID NO: 110546 - DNA, 155 bp, Glycine max
gataaaccgcgatcacaggttgccgcaccttaaaaccggaaacaatagcaatcgttacttggtttcaagaatttctcaatttcttcctatttctttgtgtacgatttcttaagggatagaaaatcactctctgtgctggccacagacttcgtgaa

SEQ ID NO: 110547 - DNA, 238 bp, Glycine max
atcaaatcttgggaaatttgctgcaactgttgaatatgctcatttgaaggctgatctcatgtcaatttttgatgatcttactcaagatgatcaagattctgtcagattgttggctgtggagggctgtgctgctcttggcaagctgttggagccacaagattgtgttgcacatatactccctgttattgttaacttctcccaggataagtcttggcgcgtgcgttacatggttgcaaat

SEQ ID NO: 110548 - DNA, 237 bp, Glycine max
tgaatatcaatgcacttgcacgacaatcgctcatcaacgcagatggcgttatcgagcgatcatttttgcccggcaaatactctctggagatgtcttcggcagtttacaagagttgggttttcactgatcaagcccttcctgcagatcttatcaagagaggaatggcaattgaggatccctgtgccccccacggccttcgccttgtgatagaggactacccttatgctgttgatggac

SEQ ID NO: 110549 - DNA, 161 bp, Glycine max
tgtgcctacaagtgcaataagcggtgaaggaattcccgatttgttattactattgattcaatggacccaaaaaacaatggttgagaaacttacataccgtgaagaagtgcagtgcactgttttagaggtgaaggtagttgaaggccatggaactactattg

SEQ ID NO: 110550 - DNA, 242 bp, Glycine max
atgaaaacccaaagtgcttctctcctctgtctttttctctctcttgctatccttttggctagtgccactgctgcaagtgcaactccaagaagcgcagtgccaagccaccatgtttcaacattcaacagaagcctttttccttccacttttctctttggttttggttcttctgcttaccaggcagaaggagcagcaagtgtagatgggagaggaccaagcatatgggacacctacactagaca

SEQ ID NO: 110551 - DNA, 243 bp, Glycine max
atttttctcactgtctctccagagaacttgatagagagatggcagctgcaacatctggtgctgtgttaaatgggttgggatcttccttcttgagtggaggaaacaggagccaaacccttctggcctctgctattcgaggcaaagttggtgctgctgttactgttaatcccagaagactcattgtggtagctgctgctgcaccaaagaagtcatggctccctggtgttagaggtggtggcaatc

SEQ ID NO: 110552 - DNA, 242 bp, Glycine max
tgagggtggttccttctctgcaaaggactaccatgatcctcctccagcaccgttgattgatgctgaggaactcacacagtggtccttctacagggctttgattgctgagttcattgccacaatgctcttcctttacatcacagtgctcactgtgattggttacaagagccagagtgatgtaaaggctgggggtgatgtgtgtggtggagttggcattcttggcattgcttgggcctttggtg

SEQ ID NO: 110553 - DNA, 151 bp, Glycine max
gaggagaatgacgatagggaccacaacaagcatccctggtatcaagtctctagcaccggtggtgcttgtggttgaccctatgaggagaatgaccatacctgagatccgtcaacacccatggttccaagctcgacttccacgctacttagct

SEQ ID NO: 110554 - DNA, 244 bp, Glycine max
aacgttaatcagccccaagagaaagatttgttagagggaaatttttcctttgatattaaatctcgctctagattggaaaaagtttcctctacaaaagcacaatttgttagtggaaaaaccttcaaatatgatataattggtgctggttcacattcttcagaagattttcctgaaaaggaagatcaagaaaaacccaaaaagattgatgccagattgagacaaagaatagatcctcaatacaatg

SEQ ID NO: 110555 - DNA, 240 bp, Glycine max
cccatctacttgatttcatgaagatgggaagtttatggtagtagtaataaaaataggatatggaagcttatattacattataagtatggggacagagagattactcatgagcaatgtcagtggataattgacaccaccaatatcttgatgagccagattatatgtctcggtctctggcgcactctggagcgacttgagggtagcgtatgcggtcggagcagtagttgtagatggtgtatt

SEQ ID NO: 110556 - DNA, 242 bp, Glycine max
cgagtacaaggtcaaggacctttcccaggccgacttcggccgcctcgagatcgagctggccgaggttgagatgcccggcctcatggcctgtcggaccgagttcggcccctcccagcccttcaagggggcccgcatcaccggctccctccacatgaccatccagaccgccgttctcattgagaccctcaccgcccttggcgccgaggtccgctggtgctcctgcaacatcttctccacccagg

SEQ ID NO: 110557 - DNA, 256 bp, Glycine max
cgttcaccaatctcagacttcactttcagaagctggtcattaacctcccaaaaatccccaagacttgcttttggaagcaattcattctgctggtttttctggtgacttggcaaatcctcttttagcttcagaatcagctctaaatagactaaatggtacaattctggaggagtatgttgctaaaagatatacagcacctcggatagtacttgcagcatctggtgttgaacatgaggaattgttatctgttgcagaa

SEQ ID NO: 110558 - DNA, 253 bp, Glycine max
ggcgcaagtgaggaacaagcaagtgcttctaaaggactatgttaccggttttcccaaagaatccgacatgaatattgtagaaagtaccataacattgaagcttccacaaggttccaatgatgtcttgctcaaaaatttgtatttgtcttgtgatccgtatatgaggagtctcatgaacaggcccgaagccctcccaatagtcgtgcttacactcctggctctccattaataggatatggtgtgtctaaagtcc

SEQ ID NO: 110559 - DNA, 247 bp, Glycine max
tgctgctgttggcttgacatcaagttacactccaactccattgttggaatctggtttgcaaaaagacagagggttaattgtggagtattttggaaggatgtcttacgttgctcataacgttaatcagccccaagagaaagatttgttagagggaaatttttcctctgatattaaatctcgctctagattggaaaaagtttcctctacaatagcacaatttgttagtggaaaaaccttcaaatatgat

SEQ ID NO: 110560 - DNA, 254 bp, Glycine max
ccaacctctaacctacctctttttcttctctctcaacaacttcaccttcttcctcctcgatcatgtctcacttcaagggcaagtaccatgatgagcttatcgccaatgctgcgtacattggcactcctggaaagggtattcttgctgctgatgagtcaacagggacaattggcaagcgtttggccagcatcagtgtagagaacattgaatccaacaggcgagctcttagggagctgcttttcactgctcctggt

SEQ ID NO: 110561 - DNA, 257 bp, Glycine max
atgaaaacccaaagtgcttctctcctctgtctttttctctctcttgctatccttttggctagtggcactgctgcaagtgcaactccaagaagcgcagtgccaagccaccatgtttcaacattcaacagaagcctttttccttccacttttctctttggaattggttcttctgcttaccaggcattaggagcagcaagtgtagatgggagaggaccaagcatatgggacacctacactagacagcatactgaaaagat

SEQ ID NO: 110562 - DNA, 254 bp, Glycine max
agttagagaaggtgaagaccgagaaaaggaaaacagtggcagttcctgccaataagagaactagagcaagcaacggcaatggaggtccaatgccaccagccaaagctgggcgtttgactaatgcgtatgtatcatctttccctgctgctcctacatttgtcaggtctccatcacacgggcaatacccagctgctcttccaccatacccttccgcaccccacatgtacggcagcagaagtcccccagcaaatcct

SEQ ID NO: 110563 - DNA, 251 bp, Glycine max
gtgatttcagtgagtgatcggtgttcacttgatctcatcataatcgtcagcgtcaattgaagaagatgccgatcagaaacatcgccgtcggaaggcctgaagaggcgactcaccccgacacgttgaaggcggctttggctgagttcatctcaaccttcatcttcgtgttcgccggctcaggctccggcatcgcctacaacaagctcaccgacaacggcgctgccacccctgccggcctcatctccgcctcc

SEQ ID NO: 110564 - DNA, 224 bp, Glycine max
caaaaactcacccccaccacctccaaggtcacctctactgggtaatctgcatcaacttcgtttgttcccacaccgcacactccctactttggctcaaaactatggccctctaatgctacttcattttggtaaggtaccagtgcttgtggtctcatctgctgatgcagcgtgcgatgtgatgaaaactcatgacctgatcttctcagacaggctacaacgtaaga

SEQ ID NO: 110565 - DNA, 246 bp, Glycine max
  unsure (1)..(246): unsure at all n locations
gcagtggctcatcatactgactgtacattcatcagggtgtctggttctgaattagttcagaaatacattggagaaggtncnagaatggtcagggaactttttgttatggccagggaacatgctccatcaattatcttcatggacgaaattgacagtattggatctgctcggatggaatctggaagtggcaatggtgatagtgaggtacagcgtactatgctggaacttctcaatcagttgganggg

SEQ ID NO: 110566 - DNA, 256 bp, Glycine max
cccagctcctcggctccatcgtcgcctccctcctcctggccttcgtcaccgcctccactgttccagcattcggactctccgctggagttggagttggcaacgccttggtgttggagatcgtgatgaccttcggtctggtgtacacggtctacgcaactgccattgaccccaagaagggttttttgggaactattgctcccatcgccattggtttcattgtcggcgctaacattttgttgggtggggccttctctgg

SEQ ID NO: 110567 - DNA, 253 bp, Glycine max
tggagttagggctttacagtgtttctcttccttcttcttcttcttcttcaatctcttcgttgaatcgcgattgttctgtgcgagagaaagaagagagagatcgaaaatggcgttggctttcgacgagttcggaaggccgttcataatcctgaaggagcaggagcaatagagcagactccgaggattagacgctcagaaagccaacatctccgtcggcgaagccgtggctcgcatcctccgaacctccctcggc

SEQ ID NO: 110568 - DNA, 251 bp, Glycine max
aagagtgagttttgtatatttgaaattagcaagtagcaaagatgtttggactcatcggaggaaacaagggtcacaagataaaggggaacttggtgattatgcgaaagaatgtgttggatatcaacagcattaccagtgttaagggtgtcatcggaaccggcattaacatcattggaggagtcgacgacaccgttactgctttggcgtcccacatctccatccagctcattagtgccaccaaggctgatgga

SEQ ID NO: 110569 - DNA, 250 bp, Glycine max
tgttcacctttttatttgatgatttgggtgttccacaagattacaggcatatggatggttttggagttaacacatatacgctgatcaacaaggctgggaaagcagtgtatgtgaaatttcactggaagaccactagtggtataaagtgtctattggaggaagaggccattaaggtgggaggagccaaccacagccatgccactcaagacctccatgattcaattgctgctggtaactatcctgagtggaa

SEQ ID NO: 110570 - DNA, 254 bp, Glycine max
tgcaaagtgtgagagaaagacaatgccgaagtctcaatttcgaaccccatttctggtttctcttccccttttgttattcatcttcaacctcaccccttcgcacgcactctatggagcatcctcacccgtacttcagatcactccctctaacttcacgtccaaggttctgatttcgtctggtgttgttcttgttgaactctttgctccatggtgtggacactgtcaggctctgactcctatatgggagatggcag

SEQ ID NO: 110571 - DNA, 250 bp, Glycine max
aatgattctcagcgtcaagctaccaaagacgctggtgtcattgctggtctaaatgtgatgcgaattatcaatgagcctactgcagctgccattgcatatggtcttgataagaaggccacgagtgttggtgagaagaatgtgttgatttttgaccttggtggtgggacatttgatgtgtctttactcaccattgaggagggtatctttgaggtgaaagccactgctggtgacacccatcttggaggtgaag

SEQ ID NO: 110572 - DNA, 246 bp, Glycine max
gtccaaggtaatgtgcctcaacaatgagaacaaacctgtcactaacagtagggatacacaagaggttatgttggagcctgggctgaaattaattaaaattttcaaggaatataccagcaagacatgcattttggatgattttggcttctatgaggctcgtcagaaaactattttggagaagaaagcaaagcaacaattcccaaagcaggtatgggaagggaaacctgctgatgagaagatgagata

SEQ ID NO: 110573 - DNA, 246 bp, Glycine max
gatgatttcaacgcttatctatctgactttggattggctagacttctggggacttcagagacacatgctacaactggtgtggccggaacattcggttatgttgctcccgaatatgccatgacgtgccgtgtttctgataaggctgatgtgtacagctatggtgtggtgcttctggagttgctctcagacaagaaggcattggacccttcattttcttcttatggaaatggtttcaatcagtggcat

SEQ ID NO: 110574 - DNA, 244 bp, Glycine max
gagataactagaaacagtgtgatgaaaatgaaggtccttgttttcttcgttgctacaattttggtagcatggcaatgccatgcgtacgatatgttccctctccgaatgaacactggctatggtgcccgtactccggaggtgaaatgcgcaagttggaggcttgctgtggaagcacacaacatctttggctttgagaccattcctgaagagtgcgttgaagcaacaaaggaatacatccatggcg

SEQ ID NO: 110575 - DNA, 262 bp, Glycine max
  unsure (1)..(262): unsure at all n locations
atcccacttggacttccacctcacccctttttntcaacgccatgaaaatagatatcagcaattgatgcaaaggtcattttgtttttgtggctctgagaggggagtgattctaaactaaaatancatgggggctggggaagagagtacagctaaatcttctaaagtatcttcggcagcncaggagacaccaacagcacttgcatatcctgactggtcaagctccatgcaggcctattatgctcctggaggcactccacctccc

SEQ ID NO: 110576 - DNA, 252 bp, Glycine max
gttgctagcagaagatatgcacttcttaacagggttcctttactgcctcatgaagaacttctatgcaaagaagcaatgcttcttcgtacatgcttggaacttgaagattctgattttacttcctctgacttgtcttctcataatagcattaagatttcatttgttaacttgatgcgtttccaacattgtgctcgatggttcctaacgaaatcaagggcgagtataagggtctctattcattcccatgccacg

SEQ ID NO: 110577 - DNA, 251 bp, Glycine max
catcaatcttcaagcaacgcacgggaacaagtggaagaaaattgcagcacaagtccctggtcgcactgcgaagaggttagggaagtggtgggaagtgttcaaagagaagcagcaaagggaaaccaaggggaatagctgctctattgatccaatttgcgatagtaagtacgagcatatccttgagagttttgcagagaaactagtgaaagataggccttcaccatcatttgttatggctacttctaacagtt

SEQ ID NO: 110578 - DNA, 251 bp, Glycine max
cctaaaccctactcattctccatacctcaacgaagaggttaaagagacggcaacactttgctgtccgccttgaccgagcagagcttcgtcttggccctcgattttgccctaaagtactctcagtcacaacagacaccgtcgtcgtcgtcgtcgtcatcaatggcaccgaagcagaccaaggctgagaagaagatcgcttacgatgcgaactgtgcgacctaatggaggagtacggccagatcctcgttgtg

SEQ ID NO: 110579 - DNA, 245 bp, Glycine max
gaagcttatcttgtcaatctcgtaaatgtgttacgagaattgtatttgcacagtccagaggaagctcgccaattgagaaggaaagctctttctcgtattgaatggctgcaaaaagctgatgtgcctaccatagcacagattgaagagttccattcgatgcagaggatgatgaatgctcctgattcaaatgataatattgatctactgttgagcatgatttgttgggtttacaaggagcaggtaaa

SEQ ID NO: 110580 - DNA, 251 bp, Glycine max
gaaccgtgaactcgaagtgatccactctaggtgggccatgctcggagccttgggctgcgtcttcccggagttgatgtcccgcaacggggtgaagttcggagaagcgcgtgtggttcaaggccgggtcccagatcttcagcgagggtgggctcgactacttgggcaacccaagcctgatccacgcccagagcatcctcgccatctgggccacacaagttaatcctaatgggtgccgttgaaggttaccgtat

SEQ ID NO: 110581 - DNA, 247 bp, Glycine max
cggccactcttcttcttcccacgctcctccttctcatacccttcgccaccctcgtctccgcccgccctcacctcgccggagactttctccgactgccctccgaaaccgataacgatgacaacgtccagggcacccgctgggccgtcctcctcgccggttccaatggctactggaattacagacatcaggctgatgtttgtcacgcctatcaaatactaaggaaaggtggcctgaaagaagaaaatat

SEQ ID NO: 110582 - DNA, 164 bp, Glycine max
ggagggatcgtccccgtgctattccaaagggttccatgcaaaaagcatgggggggttaggttcagtgtgaatgggagggactacttcgagctagtgttgatcagcaatgtgggtggtgctggatccatccaatctgtgtccattaaaggctcaaaaactggatg

SEQ ID NO: 110583 - DNA, 256 bp, Glycine max
gagacaccgatagatagagagcgcggcataacctaaacctatctttcttctctctctgtgtgtgcgcatcaacggcaaccagaagcagccatggccactgcaaggactgtgaaggatgtttcacctcatgagttcgttaaggcgtactcctctcacctcaagcgatccggcaagatggagctgccagagtggactgatattgtgaaaactgcaagatttaaggagttggctccttatgatcctgactggtactatg

SEQ ID NO: 110584 - DNA, 252 bp, Glycine max
gaaaatgaacgacgcagatgtctcaaagcaaatccagcagatggtgcagttcatccgccagaagctgaggaaaaggccaacgagatctctgtctccgccgaagaggaattcaatatcgagaagctgcagttggtcgaagccgacaagaagaagatcaggcaagaatacgaacgcaaagagcgccaagttgaaattcgctagaagattgagtactcgatgcagctaaatgcttctcggattaaagttcttcaa

SEQ ID NO: 110585 - DNA, 252 bp, Glycine max
atgcatcggaagaacccctagccactctcccggcgtcacgatgcagatcttcgtgaaaaccctaacgggtaaaacgatcacgttggaggtggagtcttcggacaccatcgacaacgtgaaggccaagatccaggacaaggaaggcatccctccggaccagcagcgcctcatcttcgccgggaagcagctggaggacggccgcaccctcgccgactacaacatccagaaggagtccacgcttcacctcgtcct

SEQ ID NO: 110586 - DNA, 246 bp, Glycine max
gtcgaattgaggaattgggagtgatggatttctcttcggtgagggctgcgttggattcgaagtcgtacgacaaggttgcggatgtgtgcgacaacttgatgcttcaggttgcagctgagggcattgcttatcaggacgattggccctacacaattcacctcctctctcacatttatgttcacgacatcaatagtgcgcgctttctttggaagtcaataccttcctcaatcaaagagagccagcctg

SEQ ID NO: 110587 - DNA, 245 bp, Glycine max
gaatcttggagacaaagcagtgatgtgtcataggctaaatttcagaactgcagtattttactgccatgaagtccgtgaaacaacagctttcatggttccattggtggctggtgatggaaccaaaactcaggcacttgctatttgccactcaaatacttctggaatgaatcatcaaatgcttcatcaacttatgggagttgatcctggaactaaccctgtttgccatttccttggaagcaaggcca

SEQ ID NO: 110588 - DNA, 156 bp, Glycine max
tgataaaccgcgatcacaggttgccgcaccttaaaaccggaaacaagagaaatcgttacttgatttcaagaatttctcaatttcttcctacttctttgtgcacgatttcttaagggaaagaaaatcactctctgtgctggccacagacttcgtaaa

SEQ ID NO: 110589 - DNA, 153 bp, Glycine max
gtccaaggtaatgtgcctcaacaatgagaacaaacctgtcactaacagtagggatacacaagaggttatgttggagcctgggctgaaattaataccaattttcaaggaatataccagcaagacatgcattttggatgattttggctccaatga

SEQ ID NO: 110590 - DNA, 247 bp, Glycine max
gaaaaattactgcgccaggctaaagctccaagtatgtttttacaatccttcaaaaattttgtttctttgtgtgtgtatggtgatgataacttaattagtgttcatgaatatgtcaagccttactttagtggttctaaattgaaaagctttctagctggtcataatatcaccattactgatggtattgacaaaactagtgcaactttgcaatttagaaagttagcagattgtgattttctcaagagaa

SEQ ID NO: 110591 - DNA, 251 bp, Glycine max
aaaaccctagagaggacgagagagcgtgcatctttcggcaaccacagaacatgacattcaagcgcaggaatggaggtcgcaacaaacacggccgcggccatgtcaaattcatccgatgctccaactgcggaaaatgctgccccaaggacaaggccatcaagaggtttttggttaggaacattgttgaacaggctgcagtcagagatgtgcaggaagcttgtgtctatgaacaatatacacgtccaaaactc

SEQ ID NO: 110592 - DNA, 248 bp, Glycine max
cttactctagactcttccttttctcttctctgtctaaagggtgccctgagatcacattgaacaatggtgaaggctgtggccgttcttggcagcagtgagggtgtcactggaactattcacttcgttcaggagggaagtggtccaaccaccgtaactggatctcttgctggtcttaagcctggtcttcatggtatccatgtccatgccttgggggacactaccaatggttgcctctcaactggatcaca

SEQ ID NO: 110593 - DNA, 250 bp, Glycine max
gctacttactactatagtgtctgactcacaggctagagggcaaagattttgagcacaatggcctcgacacaatgcttggtgcaccatcacgccctcaccactccagctagagcttcaacacagcgcctagttgtgagcagcgatcctaaccacatcgtttgcaaggcagcacagatgcaggttactgtccacgagggtgaggacacttactactggccttatctctcgcaggattgcactcactgtgctc

SEQ ID NO: 110594 - DNA, 244 bp, Glycine max
gaaaaattactgcgccaggctaaagctccaagtatgtttttacaatccttcaaaaattttgtttctttgtgtgtgtatggtgatgataacttaattagtgttcatgaatatgtcaagccttactttagtggttctaaattgaaaagctttctagctggtcataatatcaccattactgatggtattgacaaaactagtgcaactttgcaatttagaaagttagcagattgtgattttctcaaga

SEQ ID NO: 110595 - DNA, 239 bp, Glycine max
tggagttagggctttacagtgtttctcttccttcttcttcttctacttcttcttcttcgttgaatcgcgattgttctgtgcgagagaaagaagagagagatcgaaaatggcgttggctttcgacgagttcggaaggccgtacataatcctgaaggagcaggagcataacagcagactccgatgattggacgctcagaaagtcaacatcgccgccggcaagccgtggctcgcatcctacg

SEQ ID NO: 110596 - DNA, 252 bp, Glycine max
gaaaaatggtttcgctgaaactgcagaagcggctcgccggagcgtgctcaagtgtggcagaggaaaggtttggcttgaccccaatgaagtcaacgaaatctccatggccaattctcgccaaaacataaggaagctggttaaggatgggtttatcatcaggaagcccaccaagattcactctcgctcacgtgctcgtcgaatgaaggaagccaagaggaaaggacgtcactctggatacggtaagcgtaaggg

SEQ ID NO: 110597 - DNA, 253 bp, Glycine max
gatgaggttgccattcagaacctacagacctacaaagaaaagaaatttgttgatatcagcaaggaggatttggaattaggtgatgaggatgaggtcaaagagagggaaaacaagcaagaatacaacctactctgtgattggataaaacaacaacttggtgacaaggtggccaaagttcaaatctcaaatcgcttgagttcatctccttgtgtgcttgtatcagggaagtttggttggtctgcaaacatggaga

SEQ ID NO: 110598 - DNA, 249 bp, Glycine max
gggggtttaaggccacttctagtgttgtcaaagtgactttccacaaccccggagttcaagaagatccatcttgtggccctcttttggatgccattgctatcagagagttctaccctccaatgcctacaagagttaacttggtaaaaaatcctggctttgaggagggtccattccccattttcaactcaaccaatggtgttttgctcacgcctcaacaacaagatggcttctccccactccctggttgga

SEQ ID NO: 110599 - DNA, 251 bp, Glycine max
cggaatcagaggctccccctaacttctggggccacaccccggaagaagaatactacacctcccaaggcgttcgcaacaccaagtcccacttcgaaacccccaacggcaaaatcttcacccagtccttcctccctctcaacctccaaccccaccaagtcaaagccaccgtctttatgacccacggctacggctccgacaccggctggctcttccagaaaatctgcatcaacttcgccacctggggctacgcg

SEQ ID NO: 110600 - DNA, 250 bp, Glycine max
tcaaaacactcataacacaaagcacaaagcaaagctcatccttgagttaaaaaatggcagcagcttcttccatggctctctcatccccatccttggctggcaaggccgtgaagctgggcccatcagccccagaagtgggaagggtgagcatgaggaagaccgtcaccaagcaggtctcctcaggaagcccatggtacggcccagaccgagtcaagtacttgggcccattctctggcgagcccccgtccta

SEQ ID NO: 110601 - DNA, 248 bp, Glycine max
taaaggaacaactcccgcttgtctgcactcattctcatgacagaatcccatccaaccttgcaacagatgaagcatttttgtattttaatcctcttcttctagcggctttgatggtttggctgttgggaatcaacttatggttttattctcaaggtggagtcaattatgcaaaaatatttgatcttgatcaaaatcatctgactcatagagaaatatggaagtgtgctacatggatgacaattattgtt

SEQ ID NO: 110602 - DNA, 161 bp, Glycine max
atctaagtgagatacacagtagttaggtagcaagcataagtgtctaaccttagaaacatatctgctacatatcgtgtgcattttggaattgtgccactaaaattctattcatctatggctgcctcatcttatgctatgcaatcaatccttgcaaaccctat

SEQ ID NO: 110603 - DNA, 243 bp, Glycine max
ctcaagtccaacctacccctttttcttctcccaccaacttcaccgtcttcttcctcgatcatgtctcacttcaagggcaagtaccatgatgagcttattgtcaatgctgcttacattggcactcctggaaagggtattcttgctgctgatgagtcaacagggacaattggcaagcgtatggctcgcatcagtgtagagaatgttgaatccaacaggcgtgctcttagggagctgcttttcacc

SEQ ID NO: 110604 - DNA, 278 bp, Glycine max
gacctacgcaacaataatctcaccgggaaaatcccgcaaatggggacccttttgaaccagggtcccaccgcgttttctggtaaccctggactgtgcggtttcccattgcagagtgcttgccctgaagcgcaaaagcctgggattttcgctaaccctgaagatggtttccctcagaaccccaatgcgcttcacccggatggaaattatgagagagtgaagcagcacggtggtgggtaagttgctgttcttgttatctccgggctctccgtcgcggttgg

SEQ ID NO: 110605 - DNA, 218 bp, Glycine max
agggacacaaatactgtcatctgggccaattgtcatctgaggttggatggaactactatgataccatcagggaacttgagaagaagaggaaggatagagcacaattgtgttacgagaggaagaagcagcttgccaaattgagggagaaagctgagaaggttgcagagaagaagcttggttcccaaattgaaatccttgctcctgttaagtactaagta

SEQ ID NO: 110606 - DNA, 234 bp, Glycine max
cgagacgagccgtttctaattaatgataggtgtcaagtggaagtgcagtgatgtatgcagtcgaggcatcctaacagaccggtagacttgaaccactcgcatcttgttcctccgctcaacaactataataacatctttctctctccgaacagatcaaactatggccacctcaagcgccaaatcagtccatgatttcaccgttaaagatgccaagggaaatgatattaatcttgg

SEQ ID NO: 110607 - DNA, 270 bp, Glycine max
gaggggatggaactggtgagcgcaaggaatgggataggatctatgattatgatgtctacaatgacttgggcgatccagataagggtgaaaagtatgcacgccccgttcttggaggttctgccttaccttaccctcgcagaggaagaaccggaagaggaaaaactagaaaagatcccaacagtgagaagcccagtgattttgtttaccttccgagagatgaagcatttggtcacttgaagtcatcagattttctcgtttatggaatcaaat

SEQ ID NO: 110608 - DNA, 271 bp, Glycine max
caatatattccattctctctgtgtatttccctacctctcccttcaagatgcagatcttcgtcaagaccctcaccggcaagaccatcacccttgaggtggaaagctctgacaccatcgacaacgtcaaggccaagatccaggacaaggaaggaatccccccggaccagcaacgtctcattttcgccggaaagcaacttgaggacggccgtacccttgctgactacaacattcagaaggagagtactcttcacctcgtcctccgtctccgtgg

SEQ ID NO: 110609 - DNA, 94 bp, Glycine max
tggatacctaggcacccagagacgaggaagggcgtagtaagcgatcaaatcactcggggagttgaaaataagcgtagatccggggattcccgat

SEQ ID NO: 110610 - DNA, 237 bp, Glycine max
tatgcatgcgggattgcccaaatatgtccatgtaacatctgagagacatagaagatgctaaatttaaggaaggggaagaagtgtctctagagtcactgaaggcgaaaggtgtgattaatccatcaggaagagaaaggagacttcctttgaagatcttgggtgaaggagaactgagcaagaagttgacattaaaagcccgcgccttttccacatcagcaaaggagaaacttgagaatg

SEQ ID NO: 110611 - DNA, 282 bp, Glycine max
tgtctttgggtataatggataatgatttcaaggactggccattcattttgaggactattaaatatagttttaccccagatgttataggctccacgggagcacaattgcactcagatacaggatttatcactctacttcaagatgatgaacatgttagtggtcttgagatgatggatgattttggctcatttaaggcagttcctcccataccaggggccttcctttgcattgttggagatgttggacatgtttggagcaatggaaaattttggaatgccagac

SEQ ID NO: 110612 - DNA, 290 bp, Glycine max
tggcatggctatcttcacatttgatcaaccctcagttttcgattcttcgggtgaaataggcgatatcactggattttatatgattgatgaggaaggggtccttcagtcagttgatgtaagtgctaaatttgtcaatgggaagccctcaataattgaagccaagtatgtaatgcggagtccacgggactgggatagattcatgagattcatggagcgatactcaaatgcaaatggtttgcaattcatcaaaaaatgagttaatgtgctaactctgcccttctattcttttg

SEQ ID NO: 110613 - DNA, 166 bp, Glycine max
ggcttccctccctcctttgaagaaacaaattagaagagtgtgttgtgttgtgttgaagtagcaagctagcaaagatgtttggcatcttaggaggcaataaggggcacaagatcaagggtactgtggtgttgatgagcaagaatgtgttggacttcgaggaaatagt

SEQ ID NO: 110614 - DNA, 272 bp, Glycine max
gttgaaaattctgagttgagtgtgacaacacgcctggcttgtggtgctgctgctggaactgttggacaaactgttgcttaccctcttgatgttattcgtcgaagaatgcagatggttggttggaaccacgctgcttctgttctaactggtgatggaagaggcaaagtcccacttgaatacactggaatgattgatgcattcagaaaaactgttcagcacgagggatttggtgcattatacaagggtctggtgcccaactctgtaaaggtggt

SEQ ID NO: 110615 - DNA, 238 bp, Glycine max
agaagaatttggaagagagatgcttgctggtgttaatccatgcctaattgagtgccttcaagtgttccctccaaagagcaagctagatcccacagtgtatggtgatcaaactagtacaataaccaaagaacacttagagatcaaccttggtggactctctgtggaacaggcactgagtggtaacagatcgatcatattagcacaccatgatgcattcatcgcatatgagaggaagatc

SEQ ID NO: 110616 - DNA, 278 bp, Glycine max
agtgatgaaaatgaaggtccttgttttcttcgttgctacaattttggtagcatggcaatgccatgcgtacgatatgttccctctccgaatgaacactggctatggtgcccgtactccggaggtgaaatgcgcaacttggaggcttgctgtggaagcacacaacatctttggctttgagaccattcctgaagagtgcgttgaagcaacaaaggaatacatccatggcgaacaatatagatcagactccaaaacagttaaccaacaagcttacttttatg

SEQ ID NO: 110617 - DNA, 274 bp, Glycine max
caatctgcttcggctttggcttcagagtttgtgtaaccaacttcacctttccttccttccttccttcttccgatttcgaagatggctgaagcagaggatgccgtacgacgccgtaatgcggtcgccgagtatcgaaagaaacttctccagcacaaggaattggactccagagtccgatccgtcagggagaatttgcgagcttcaaagaaagagttcaataaaacagaagatgatttgaagtctcttcaaagtgttgggcagatcattggcgaag

SEQ ID NO: 110618 - DNA, 277 bp, Glycine max
ggtcacatagaaaagaacttcaggcagaaatttctgacttggtacagcttaagagccacccctcaagaagttaggattgtgaaaatatacattgatacatttcttgaagatcctgcatctcttgcagagcaacttgtggacaccttctcggaatgtttgtccagcaagagaacatcagttgtgccagcggggttctgcatgaagctttggcattgaccagattttgtaggtccagctactagccgcaagcttgccatgcagtaattctttagatttt

SEQ ID NO: 110619 - DNA, 281 bp, Glycine max
catgcaattcactctttgcagcttattctgcgtgactcgtttaaagatgctgagcatagaaattctaaggcttgttgtggatccccatgtgtcagaacaagagttgcaaggggtggatgaactaagttctgtggccagagagatggttagattgatagaaacagccactgctccaatatttgctgttgatgtcgatggccacgtaaatgggtggaatgcaaaggtttcagaattaacaggactcccagttgaggaggctatggggaagtcctggttcacga

SEQ ID NO: 110620 - DNA, 269 bp, Glycine max
tctcagtctctgtgtttgcggctgaggattccgaacgagtgaccttcttcgtttctcgcaaagtttaagtaatcatgggtaaggaaaaggttcacatcaacattgtcgtcattggacatgtcgactctgggaagtcaactaccactggtcacttgatctacaagcttggaggtattgacaagcgtgtgattgagaggttcgagaaggaggctgccgagatgaacaagaggtcattcaagtatgcctgggtgctcgacaagctcaaagct

SEQ ID NO: 110621 - DNA, 250 bp, Glycine max
caacaaccttctgtttgtgtcaggtgttcttggccttattcctgagacagggaagttcatctctgataatgttgaagatcagacagagcaggttctaaaaaatatgggagagatcctaaaatctgggggtgccagctattcatcagttgttaagacaactattttgttggctgacttgaaggacttcaagaaagttaatgagatctatgctaaatacttcccttcaccagccccggcagggtcaacgtat

SEQ ID NO: 110622 - DNA, 202 bp, Glycine max
cttgtgacaaaattcctagtgtcttgactacaactgatgagagattggtaggcacagaacatgatggatatgatccttttcttggtggaattcaaaaatatgccactcccatgatgcccctagatgaagaaattctttctaaggttgcacaagacatggttgatgaatggtttgattgtgttgatgaggagaatcccttgga

SEQ ID NO: 110623 - DNA, 272 bp, Glycine max
caagaccttcatcctggcaaaacaatgaatgtacaattcagcaaaagtccctttacacaaccttttacaatattgacatggttaaagggcttgaaaattaaagacattgataaagaaggatatacttttgatgagctatgcatcaagacaaaacctaatggagcagagcacaagttttgtgcaaaatccttggaaacattaatcggttttgcaatttcaaagctgggaaagaacattcaagtactttcaagttcctttgtgaataagcaaga

SEQ ID NO: 110624 - DNA, 290 bp, Glycine max
cacaaggcagaaagcaagctcatcctagagttttaaaaatggcagcagcctcctccatggctctctcttccccatccttggctggcaaggccgtgaagctgggcccatcagcccccgaagtcgggagggtcagcatgaggaagaccgtcaccaagcaggcctcctccggaagcccatggtacggcccacaccgcgtcaagtacttgggcccattctctggcgagcccccgtcctacctcactggcgagttcccaggtgactacggctgggacactgctgggctttcggcc

SEQ ID NO: 110625 - DNA, 268 bp, Glycine max
gatggaactgtgctttgtgttcatggtggcctttctccagacattcgatcaatagatcagataagggtcattgagaggaactgtgaaattcctcatgagggaccattttgtgatctgatgtggagtgatcctgaagatatcgaaacatgggcagtcagtcctcgtggagctggttggctttttggatcccgggtcacttctgagttcaataacataaacaatcttgatctggtttgtcgggcacaccaactcgttcaagaaggtctta

SEQ ID NO: 110626 - DNA, 276 bp, Glycine max
acctgagaacaattacaagaaagattgaggcccttgtggacctttcagtgatagagatattgtcaagacatgcttctgatgagatctaccttgggaagagggacagtgacgattggactgatgaccaaaaggcaattcaagcctttgaaaagtttggaaccaagctgaaggaaattgaggccaaaatcaattcgaggaacaaagattcaagccttagaaaccgtaatggaccggttcagatgccttatactgtgcttcttcctaccagtgaggaag

SEQ ID NO: 110627 - DNA, 195 bp, Glycine max
ggctcgagcacaaactcagggtagggcactgagagagagagagagtgagagagagagagagatacggagggtgggctatcgcggtgcatggtggcgctggtgtcgaccctaatctcacactcgagcgccaagaagaagcgaaacaacttctcacgcgctgtctcaatcttggaatctctgctctaaattctaatc

SEQ ID NO: 110628 - DNA, 129 bp, Glycine max
ctcgtttatggaatcaaatcagtggctcaagacgtcttgcccgtgttgactgatgcgtttgatggcaatcttttgagccttgagtttgataactttgctgaagtgcgcaaactctatgaaggtggagtt

SEQ ID NO: 110629 - DNA, 130 bp, Glycine max
agaagaagcagaagaaaagtgtgagtgcagaaaagaagagtggtgggcgagctcggaagaacgtgtacagaggaatcaggcaaaggccgtggggcaagtgggccgcggaaataagggacccacataaggg

SEQ ID NO: 110630 - DNA, 267 bp, Glycine max
ccgtgaaatgcaaccaggaccggttcgtggtggaggatattgttaaattcggttcgtccttccggttcggtctggaggccggctccaagccggagctccttctggccatgagctgtctttgcaaaggcaaccccgacgcgcttttgatttgcaacggcttcaaggatgcggagtacatttctcttgccctggttgccaacaagcttgcgctcaacaccgtgattgttctggagcaggaagaggaggttgatttgatcgttgaattga

SEQ ID NO: 110631 - DNA, 276 bp, Glycine max
actagaaacagtgtgatgaaaatgaaggtccttgttttcttcgttgctacaattttggtagcatggcaatgccatgcgtacgatatgttccctctccgaatgaacactggctatggtgcccgtactccggaggtgaaatgcgcaagttggaggcttgctgcggaagcacacaacatctttggctttgagaccattcctgaagagtgcgttgaagcaacaaaggaatacatccatggcgaacaatatagatcagactccaaaacagttaaccaacaa

SEQ ID NO: 110632 - DNA, 268 bp, Glycine max
gagaaaaaaaagtgaggctgagattcagttatgttgatgatggctctaccatttcatggataccatgtggaaggaagcttacatgctcctaccctggcatcaaattcttctatggaccagagacttactacggaaatgaggtgtcagttgtagaaatggatggacaatttgacagactagatgaactaatatacgttgagagccacctaagcaacctctctacaaagttctatggagaggttactcaacagatgttgaagcatgctga

SEQ ID NO: 110633 - DNA, 133 bp, Glycine max
cattgtgcttactgtgatggtggctataaacaattagggttcccaactgagctagacttcaaagttcacttttcttggctgttcttccctttccaccgttggtacctctatttctatgagagaatcttgggga

SEQ ID NO: 110634 - DNA, 269 bp, Glycine max
ctcaaacattgtttgttgtaggaagaggaatcttgagaaatggcaggggacagcaagagcaagattctgttcatcggagggactggttacatcggaaaattcatcgtggaagccagcgccaaagctggccacccaactttccttttggtgagggagtccactctctccaaccccgcaaaatcacccctcatcgacaatttcagaggcctcggtgtcaatcttgttttaggagatctatacgatcaccaaagtttggtgagtgctataaa

SEQ ID NO: 110635 - DNA, 175 bp, Glycine max
gcaataatgccaaatggggggcagagtttcaggttgaattgggcaacttttagtgctggtgagaggtcgcgccacgacgattctccagattacaccatatttgttggtgacttggctgaagatgtaactgattaccttcttcaggagacatttagggctcgttataactcggtga

SEQ ID NO: 110636 - DNA, 268 bp, Glycine max
cgatgctgctcgtattctccgtgagataaagctgcttagacttctacgacatcctgatattgttgaaatataacattatgctgcctccgtcaaggaaggactttaaagatatttacgttgtttttgagctcatggagtctgatcttcatcaagtcattaaagccaatgatgacttgacaaaagaacactatcaattttttctttatcaattacttcgagcactgaagtacattcacaccgcaaatgtctatcatcgagatctgaagcc

SEQ ID NO: 110637 - DNA, 275 bp, Glycine max
ctgcatcggaagaaaccctagccactctcccggcgtcacgatgcagatcttcgtgaaaaccctaacgggtaaaacgatcacgttggaggtggagtcttcggacaccatcgacaacgtgaaggccaagatccaggacaaggaaggcatccctccggaccagcagcgcctcatcttcgccgggaagcagctggaggacggccgcaccctcgccgactacaacatccagaaggagtccacgcttcacctcgtcctccgcctccgtggcggcgccaaga

SEQ ID NO: 110638 - DNA, 282 bp, Glycine max
actgtagagaacttcaacaatccaccttagcttccttaaaaagatcactatcaggaatccgttcccaagactccagaaaactagttgatgcaagaacctacctcagtgcagcactcaccaacaaggacacgtgtctagagagcttagattctgcttctggtacccttaagccagttctagtgaattctgtgatcaactcttacaaagatgtcagtgactctctctcaatgctccccaagcctgagaggaaggcttccaaaggacacaagaaccggcgtttgt

SEQ ID NO: 110639 - DNA, 270 bp, Glycine max
gatcgagataactagaaacagtgtgatgaaaatgaaggtccttgttttcttcgttgctacaattttggtagcatggcaatgccatgcgtacgatatgttccctctccgaatgaacactggctatggtgcccgtactccggaggtgaaatgcgcaagttggaggcttgctgtgtaagcacacaacatctttggctttgagaccattcctgaagagtgcgttgaagcaacaaaggaatacatccatggcgaacaatatagatcagactccac

SEQ ID NO: 110640 - DNA, 266 bp, Glycine max
cacacactctcatagctgtagcggcgacactaagatcggagaaagaatggcgaaaacgacgtcgttgcagctctttacactgctcctcttcggaaccctagctctcatccaggcgaagaaatcgaaggaggatttgaaggaggtgacccacaaggtttactttgatgttgagattaatggaaaagaagcaggtcgtattgtaatgggtctttatgggaaggctgttccaaaaactgcagaaaacttccgagcactttgcacagggg

SEQ ID NO: 110641 - DNA, 271 bp, Glycine max
gctgaagcaggagctatagtttccttcttcacaaatccagtatggctggtaaagacaagattgcagcttcaaactcctcttcatcagacacgaccatactctggggtttatgatgcatttaggaccataatgagggaagaaggatttagtgcactttacagaggaattgttcctggtctatttctgcaggtctctcatggtgctattcagtttacagcatatgaggagctacgcaaagttattgttgattttaagagtaagggaagtacag

SEQ ID NO: 110642 - DNA, 270 bp, Glycine max
tgcgtttcggaagcagacacagatggctcgtacgaagcaaaccgctcgtaagtccacaggaggaaaggctcctaggaagcagcttgcaaccaaggctgcacgtaagtctgcaccaactactggtggtgtgaagaagccccaccgttatcgtcctggtaccgttgctcttcgtgagattaggaaataccagaagagtaccgagcttttgatccggaagctccccttccagaggctggttcgtgaaattgctcaggacttcaagactgatct

SEQ ID NO: 110643 - DNA, 276 bp, Glycine max
gagatcgaagagtttttcgcgatggcggaaaagtacgagcgaaaacggttcacagagaagtacaactttgatattgttagagatttgccgttggagggtcgctaccagtgggttcgtttacattgaatgccttcaatgaaagagagagagagagagagagagtttgcattttttagttttagagagagaaatggaggttgatgagtttgtagtgtttagtcatttgagtacactggtaaggaagctaacctgacacgaggtaaaacgaaaacgagc

SEQ ID NO: 110644 - DNA, 279 bp, Glycine max
gcggttcaatttccggtgaaaccaccaccgtctgctacccttccttggtccacgtcgccataaccctcgacgtcgactacctccgcggctcaatcgccgccgtgcactccatcctccacaactccctctgtccggagaacatcttcttccatttcctcgtctccgacaccaacctccaaaccctagttgaatccacgttccctaacttgaagttcaacgtctattacttcgatccgaacatcgtcgctcacttgatctcctcctccgtgcggcaggcgt

SEQ ID NO: 110645 - DNA, 257 bp, Glycine max
gctccgtaccagtttcactgcataaatttgagagaaaactctgcaaacatgttggtttatcaggacctccttacaggtgatgagcttctctcggactccttccgttacaatgaaattgagaatggaatgctgtgggaagttgaggggaagtgggttgtaaagggagcagttgatgttgacattggtgaaaacccttctgctgagggtggagaagatgagggagtcgatgaccgcagctgtaaaggttgttgacattg

SEQ ID NO: 110646 - DNA, 263 bp, Glycine max
cctctatatgatggttccaaatgtctccagatgaaagcaaagcagaattgtattgccaatggaaggcctgatttggggtaccttttctggaggtggaaaccaagtgaatgccatcttccaaggtttgaccctaacacttttctccaactcataagcaacaagcacatagcttttattggagactctctggccaggaaccacctagagtccctcctttgcttttaagccactactgaaaaactacaaggttccacccaattcca

SEQ ID NO: 110647 - DNA, 132 bp, Glycine max
gttaaacaaactttacaacgttacaaagaacttcaagacattatagctatccttggcttggacgaattatccgaagaagatcgcttaaccgtagcaagagcacgaaaaattgagcgtttcttatcacaacct

SEQ ID NO: 110648 - DNA, 110 bp, Glycine max
cggctcgaggagtcatacaaagatagtacattgatcatgcaacttctccgtgacaatctgactttgtggacatcagacatcacggacgatgctggagatgagatcaagga

SEQ ID NO: 110649 - DNA, 256 bp, Glycine max
ctgtttcgtgaagctcagtgcatcaagatctctctctctgtaatcgaaaatgagcaagggaccgggtctctttaccgatatcggcaaaaaatccaaagatcttttgactaaggactacaactccgatcagaaactcaccatttcctcatacagcatctccggagtggccctcacttcaacatctgtacagaaaggaggactctcaactggggatgtggcaccactgtacaagtataagaacactattattgatgta

SEQ ID NO: 110650 - DNA, 189 bp, Glycine max
ttttggaattccaggagcattttacattaaaaattttatgcaatctgaatttttcctcgtgagtgtcactcttgaagacattccaaatcatggaaccattcactttgtttgcaactcatgggtttacaatgcaaaaagttacaaaagggatcgcattttctttgctattaagacatatcttccagatga

SEQ ID NO: 110651 - DNA, 264 bp, Glycine max
cttccagaaggtggtgttttgcttctagagaatgtgaggttctacaaggaggaagagaagaatgatcctgaatttgcaaagaagttggcttctctagctgatctctatgtgaatgatgcatttggcactgcccacagagctcatgcttctacagaaggagttgccaaatacttgaagccctctgttgcaggattcctaatgcagaaggagcttgattatcaattggggctgtgtaaaccccaagagaccattgctgctattgtc

SEQ ID NO: 110652 - DNA, 274 bp, Glycine max
cctctatatgatggttccaaatgtctccagatgaaagcaaagcagaattgtattgccaatggaaggcctgatttggggtaccttttctggaggtggacaccaagtgaatgccatcttccaaggtttgaccctaacacttttctccaactcataagcaacaagcacatagcttttattggagactctctggccaggaaccacctagagtccctcctttgctttttagccactactgaaaaactacaaggattcacccaattccaagaaggttata

SEQ ID NO: 110653 - DNA, 279 bp, Glycine max
tgtgagcgtcactacaacgcaacgcaatggtttacataacttcgtgggatgaattcgtggagcgatcggttcagttgttccgtgccgatcctgattctacgcggtatttgatgaagtaccggcattgtgagggcaagttggtactcaaggtcaccgataatcgacagtgtctgaagtataagacagaccaagcacatgaagccaagaagatggaaaaacttaataatatattctttactttgatggctcggggaccagaagtggatctatcagaagtca

SEQ ID NO: 110654 - DNA, 261 bp, Glycine max
aaaccctcttttttctctctcttgcaaaacctaattttcattacttccctcaaatttcaaaatgcgtgagatccttcacatccacggtggccaatgcggcaaccagatcggcgccaagttctgggaggtggtttgcgcggagcacgggatcgtccctaccggaaggtacggtggggactcggagttgcagctcgagaggatcaatgtctactacaacgaggccatttgcggtcggttcatgccgcgcgcgattctcatgga

SEQ ID NO: 110655 - DNA, 105 bp, Glycine max
gtttcatggtagctatcaacagtacaatagagaggagcgtggttccagaagctactctttcttgatacgcactaagaatccatgcgggaaggtttccacacaaca

SEQ ID NO: 110656 - DNA, 263 bp, Glycine max
cgatcaaacacaaaatggaaaagaatgtggggattctcgccattgacatctacttccctcccgcttgcgttcagcaggaagcattggagactcatgatggtgccagtaaagggaagtataccattggacttggccaagactgcatgtcattctgtaccgaagtagaagatgtcatctcaatgagtttgacagtggttacttctcttcttgagaagtatgggattgatcctaaacaaatcggtcgtctggaagttggaagcgag

SEQ ID NO: 110657 - DNA, 258 bp, Glycine max
atagccactatagtaaacaatcttctctatctaaaatggagtttgttctaaattacctacatgccactgccattggagttctttctctaaccctcttctttttgtttttgtataatcccttcaaatttgcattaggtaaaaaagaggctcccaaagttgcaggtgcatggccaatacttggtcacctaccactattgagtggttcagagacacctgatagggttttgggtgctttggctgataagtatggacccatat

SEQ ID NO: 110658 - DNA, 246 bp, Glycine max
cttccatccctcaacgcccctcagatcttcaatttgattgcttgggtcaacaatttctgtcattctcaatcatggcaactatacttcagtttgaaaataattgtgaagttggagtcttctctaaactcaccaatgcttactgtttggttgcgattggaggttctgaaagcttctacagtgtatttgaagctgagttagcagatgttatccctgtggtcaagacatccattggtggtactcgtatca

SEQ ID NO: 110659 - DNA, 265 bp, Glycine max
ccctccagtgtcagtagcgcctcaagctcctgctcctgctgcaactggggcactgcctgcatctgttactgcacctgtatcttcaccttctccagctccagccccagctcctgcccctatatcttcagcaactgctgtggaagggtctgatatctatgggcaggctgcgtccaatctggttgctggaagcaacttggagggaacaattcagcaaattcttgatatgggtggagggagctgggacagggatactgttgtccgtgct

SEQ ID NO: 110660 - DNA, 280 bp, Glycine max
cgggggaagagatccagcagcaatggtgtacgtcaaggctcagaaatcaaaagcctacttcaagagatatcaagtcaagttcaagagaagaagagagggaaaaaccgattaccgtgccaggattcggttgattaatcaggacaagtacaaatataacactccgaaataccgatttgtggttcgctttagcaacaaggacattgttgcacaaataatatctgctagcattgccggcgatttagttcttgctacagcatattcacatgagctgccacgatat

SEQ ID NO: 110661 - DNA, 254 bp, Glycine max
gcgcttcacgatgggtgcttacaagtatgtttcggagctatggcgcaagaagcagtctgatgttatgagattcttgcagcgggtgaggtgctgggagtaccgccagcaaccttctattgtccgtttgacaaggtctactcgcccagacaaggctcgccgcttgggtttcaaggctaagcagggttatgtgattcagcgtgtccgtgtcagaaggggtggccggaagacaccagttccaaaaggtattgtttatg

SEQ ID NO: 110662 - DNA, 258 bp, Glycine max
gcatttcctcgtttttttcttcccttttctctttctccggcgacgatctcagattccggccactcctctcgccggcgagcccttactcttccctcctccgtcgagccttctccgattcgaatcgttcccagcctcgcaccaccatgaatcccgaatacgattatttgaccaagcttttgctgcttggagattctggtgtacgcaagtcatgtcttctcctgaggtttgctcatgcttcataccttgacagctatatca

SEQ ID NO: 110663 - DNA, 263 bp, Glycine max
aagcactatagtaaaaaaaggacattcattcatctatcgctacccttattgctcccagcaaccactctcctcaagaatctgctgaagctctcagaaaggcttttgaaggatggggaactgatgagaacactgtcatagtaattttggcacatagaactgtgtatcagaggcagcaaatcagaagagtttatgaggaaatttaccaggaggatcttgtgaagcgcctagagtctgagatcaaaggacactttgagaaagccgtg

SEQ ID NO: 110664 - DNA, 265 bp, Glycine max
ggacactactcagattcacactcacatgtgctactccaacttcaatgacatcattcactcaatcatagacatggatgctgatgtgatcaccattgagaactccagatcagatgagaagttactttcggtcttccgtgagggagtgaaatatggtgccggcattggtcctggcgtttatgatattcactcacccaggattcctcccacagaagaaattgctgacaggatcaacaagatgcttgcagttcttgaaagcagcattctc

SEQ ID NO: 110665 - DNA, 263 bp, Glycine max
ctctactctactgcttcaccttctgctctagaaaattcagtggtgatacatggcttcggctactctctctgtagccaaaccagcccttcaggcaaatgggaaaggcttctctgaattctctggcttcggagattcattaaggtttcttccccttttctagaaaatcttcagaggatttccatactgtcattgccttccagacctatgcagttgtaagcagtggaggatacaagaagggtgtgacagaagcaaaactgaaggtt

SEQ ID NO: 110666 - DNA, 260 bp, Glycine max
gggcagggctctcctaagcagttgtcacatgttttccctgggaaacttcccatgactttggtttctaaatttgatactaccaatgaacgaatgagaaacctctattctcgtagaagtgaaccaaacactaacaacaatgctgataaaaaacaatatgaacttgacctaggccgcattttacgtggggatgacaaccggacaatactcatgataaaaaatattcccaataagtatacttcaaagatgcttcttgttgccat

SEQ ID NO: 110667 - DNA, 261 bp, Glycine max
gatggaacagcaggctggctacttggagttgtttgtgatctcaaattatctcatccgccacccattgccacggttccgttgggcacagggaataatctaccatttgcatttggttgggggaagaagaacccagggacggatgaacaggcggtcaagtcatttctagatcaagtaatgaaagctaaggaaatgaaaatagacaactggcacattcttatgcggatgagggctccaaaacaaggtccctgtgatccaatcctc

SEQ ID NO: 110668 - DNA, 265 bp, Glycine max
cgagataactagaaacagtgtgatgaaaatgaaggtccttgttttcttcgttgctacaattttggtagcatggcaatgccatgcgtacgatatgttccctctccgaatgaacactggctatggtgcacgtactccggaggtgaaatgagcaagttggaggcttgctgtggaagcacacaacatctttggctttgagaccattcctgaagagtgcgttgaagcaacaaaggaatacatccatggcgaacaatatagatcagactcc

SEQ ID NO: 110669 - DNA, 274 bp, Glycine max
agaaagcatatggagatagcatgcataaagttttgcatgttggtcctgatacttgctatgtggtctctaaattgctgaaggaggaggaaactgatgcctggggaatagaaccatatgatacagaggatgctgataataattgcaaaacacttatacgtagaggcagtgtgcgtgtgtctgatatcaagtttcctcttccatacaggccaaaatctttctctcttgtaattgtttcagatgctctggattacctgtctcccagatacctcaataa

SEQ ID NO: 110670 - DNA, 248 bp, Glycine max
tttctctttgtcgcaaagagaagagatctgcctccttttttttatcaaatctatctcttcttcaagaatagttgaaaatggggctgtctttcaccaagttgttcagccgactgtttgccaagaaagagatgcgtatactgatggtgggtctcgatgctgcgggtaagaccaccattctgtacaagctcaagtttgaaaaaatggtcaccaccattcccaccattgggtttaatgtggaaactgtggat

SEQ ID NO: 110671 - DNA, 243 bp, Glycine max
agccccactcaaccaccacaccactctctctgctcttcttctacctttcaagtttttaaagtattaagatggcagagacattcctatttacctcagagtcagtgaacgagggacaccctgacaagctctgcgaccaaatctccgatgctgtcttcgacgcttgccttgaacaggacccagacagcaaggttgcctgcgaaacatgcaccaagaccaacttggtcatggtcttcggagagatca

SEQ ID NO: 110672 - DNA, 244 bp, Glycine max
gtggcttcgccctgaattcttgaaagaagcgttcggcgtgaacatgcagatagtgagaaacctacaaggtgagaacgaagaggaggatagtggagccattgtgacagtgaaaggaggtctaagagtcacagctccagccatgaggaagccacagcaagaagaagatgatgatgatgaggaagagcagccacagtgcgtggagacagacaaaggttgccaacgccaaagcaaaaggagcagaaat

SEQ ID NO: 110673 - DNA, 237 bp, Glycine max
cggctcgaggtacatgggagctgcagattcaacaaaagcttctcttaaaaatgagcacgctcagattctgaattcagtgctaagaaggaatgagaatgcgctagtacggaactacgagcatggtacctctgggttcgcagctcgtctatcaaaagaggaggcaaactcaattgctcagaaacctggtgtggtgtctgttttccctgaccccattctgaagctccacactacacgttc

SEQ ID NO: 110674 - DNA, 239 bp, Glycine max
gcttcgcccctgaattcttgaaagaagcgttcggcgtgaacatgcagatagtgagaaacctacaaggtgagaacgaagaggaggatagtggagccattgtgacagtgaaaggaggtctaagagtcacagctccagccatgaggaagccacagcaagaagaagatgatgatgatgaggaagagcagccacagtgcgtggagacagacaaaggttgccaacgccaaagcaaaaggagcaga

SEQ ID NO: 110675 - DNA, 244 bp, Glycine max
caaaaatcaacgcgtgcgcttttcttctctttccttagttttcagattctgaaatcttagtttctgcccgaaactgaaactgaatcgaaattcaatacaatgagttcctcaactacagtgaggaagttgcaggtggtgtcccctgttcctgcggacatagacattgcaaactccgttgaacccgttcatatctcccagattgccaaagacctcaaccttagtcccaatcactatgacctttacg

SEQ ID NO: 110676 - DNA, 243 bp, Glycine max
ttaattattcacacttccttagttctatatggggaagcccttcactctctctctctcttccctttgcttgctactcttgtcgagtgcatgctttgctattagctccagcaagctcaacgagtgccaactcaacaacctcaacgcgttagaacccgaacaccgcgttgagtccgaacgtggtttgattcacacatggcactctcaacaccctgatctgatatgcgccggtgtcactgtttccac

SEQ ID NO: 110677 - DNA, 241 bp, Glycine max
gccgcaagaatctcagcaacgaggacgaagccagaggccccaagaccgtcaccaaaaggtacatcgcttcagagagggtgatttgatcgcagtgcctactggtgttgcatggtggatgtacaacaatgaagacactcctgttgttgccgtttctattattgacaccaacagcttggagaaccagctcgaccagatgcctaggagattctatcttgctgggaaccaagagcaagagtttcta

SEQ ID NO: 110678 - DNA, 241 bp, Glycine max
gccgcaagaatctcagcaacgaggacgaagccagaggccccaagaccgtcaccaaaaggtacatcgcttcagagagggtgatttgatcgcagtgcctactggtgttgcatggtggatgtacaacaatgaagacactcctgttgttgccgtttctattattgacaccaacagcttggagaaccagctcgaccagatgcctaggagatgctatcttgctgggaaccaagagcaagagtttcta

SEQ ID NO: 110679 - DNA, 245 bp, Glycine max
gcaagaatgcaatgttcgtgccacactacaacctgaacgcgaacagcataatatacgcattgaatggacgggcattgatacaagtggtgaattgcaacggtgagagagtgtttgatggagagctgcaagagggacgggtgctgatcgtgccacaaaactttgtggtggctgcaagatcacagagtgacaacttcgagtatgtgtcattcaagaccaatgatacacccatgatcggcactcttgca

SEQ ID NO: 110680 - DNA, 247 bp, Glycine max
gttcgatatcctagtacaccgtattaaagaatttaagatatactatgatgagagcgcggttcccattactgttgctgggagttgttttcctggcgtcagtttctgtctcatttggcattgcgtattgggaaaagcagaaccccagtcacaacaagtgcctccgaagttgcaatagcgagaaagactcctacaggaaccaagcatgccacgctcgttgcaacctccttaaggtggaggaagaagaaga

SEQ ID NO: 110681 - DNA, 247 bp, Glycine max
cttaattattaacacttccttagttcactatggggaagcccttcactctctctctttcttccctttgcttgctactcttgtcgagtgcatgctttgctattagctccagcaagctcaacgagtgccaactcaacaacctcaacgcgttggaacccgaccaccgcgttgagtccgaaggtggtctgattcaaacatggaactctcaacaccctgagctgaaatgcgccggtgtcactgtttccaaact

SEQ ID NO: 110682 - DNA, 263 bp, Glycine max
cggacttcggctcgagtctgactctccatctgtccttgaatataagacccagccctgtgaatccttcttttcagtggctgcttcgctctgagagagcaggcacagcaaaatgagtgccagatccaaaagctgaatgccctcaaaccggataaccgtatagagtcggaaggtgggttcattgagacctggaaccctaacaacaagccattccagtgtgccggtgttgccctctctcgctgcacccttaaccgcaatgcccttcg

SEQ ID NO: 110683 - DNA, 186 bp, Glycine max
cgcataaatgacaagcatgatggtgtgaggatgaggccatcttatgaaataataacaaataaataaattttgtatgataataaaaagtatggcccatgtaccatcccagcgagcctatgtttatatctgagtggcgttgtacctttcaatcgccttaataaaatgtcagtcttcacgttttgtctt

SEQ ID NO: 110684 - DNA, 243 bp, Glycine max
tgaaagtcttccataaccccccataaatgaagagcaccatcttctttgctctctttctcttttgtgccttcaccacctcatacctaccttcagccatcgctgatttcgtgctcgataatgaaggtaaccctcttgaaaatggtggcacatattatatcttgtcagacataacagcatttggtggaataagagcagccccaacgggaaatgaaagatgccctctcactgtggtgcaatctcgca

SEQ ID NO: 110685 - DNA, 242 bp, Glycine max
tgccacgctcgttgcaacctccttaaggtggagacagaagaatgtgaagaaggtgaaattccacgaccacgaccacggacacaacacccggagagggaacctcagcaacccggtgagaaggaggaagacgaagatgagcaaccacgtccaatcccattcccacgcccacaacctcgtcaagaagaagagcacgagcagagagaggaacaggaatggcctcgcaaggaggaaaaacgcggaga

SEQ ID NO: 110686 - DNA, 241 bp, Glycine max
cggctcgagaagaaagtcttccatagccccccaaaaatgaagagcaccatcttctttgctctactttctcttttgtgccttcaccacctcatacctaccttcagccatcgctgatttcgtgctcgataatgaaggtaaccctcttgaaaatggtggcacatattatatcttgtcagacataacagcatttggtggaataagagcagccccaacgggaaatgaaagatgccctctcactgtg

SEQ ID NO: 110687 - DNA, 239 bp, Glycine max
cttaacactttccttagttcaatatggggaagcccttcttcactctctctctttcttccctttgcttgctactcttgtcgagtgcatgctttgctattacctccagcaagttcaacgagtgccaactcaacaacctcaacgcgttggaacccgaccaccgcgttgagtccgaaggtggtcttattgaaacatggaactctcaacaccctgagctgcaatgcgccggtgtcactgtttcc

SEQ ID NO: 110688 - DNA, 241 bp, Glycine max
atatcctattacaccgtattaaagaatttaagatatactatgatgagagcgcggttcccattactgttgctggtagttgttttcctggcatcagtttctgtctcatttggcattgcgtattgggaaaagcagaaccccagtcacaacaagtgcctccgaagttgcaatagcgagaaagactcctacaggacccaagcatgccacgctcgttgcaacctccttaaggtggaggaagaagaat

SEQ ID NO: 110689 - DNA, 242 bp, Glycine max
ctgagacatcactgcctccttctggtctccctggtgttggtctcctacgctgcccggtcggaatcagcgctgggcggctggagccccatcaaggacgtaaacgacagccacgtggcggagatcgccaactacgcgctgagcgagtacgacaagcgttctggggccaagctcacccttatcaaggtcgtcaagggcgagactcaggtcgtttccggcaccaactaccgtctcgtcctcaaagc

SEQ ID NO: 110690 - DNA, 244 bp, Glycine max
ctgtgtgccggcatgcctactgagtgggctattgtggagagagcgggtctacaagctgttaaacttgctgcacgcgatacagtagatggttggtttaatattgagagagtttcccgtgaatacaatgactataagcttgtgttctgtccacagcaagctgaagataacaaatgcgaggatattgggattcagatcgacgatgatggaatcaggcgtttagtgctgtctaagaacaaaccattag

SEQ ID NO: 110691 - DNA, 248 bp, Glycine max
ccttagttcaatatggggaagcccttcactctctctctttcttccctttgcttgctactcttgtcgagtgcatgctttgctattagctccagcaagctcaacgagtgccaactcaacaacctcaacgcgttggaacccgaccaccgcgttgagtccgaaggtggtttgattcaaacatggaactctcaacaccctgagctgaaatgcgccggtgtcactgtttccaaactcaccctcaaccgcaatgg

SEQ ID NO: 110692 - DNA, 251 bp, Glycine max
ggctcgcgcttaattattaacacttccttagttcaatatggggaagcccttcactctctctctttcttccctttgcttgctactcttgtcgagtgcatgctttgctattagctccagcaagctcaacgagtgccaattcaacaacctcaacgcgttggaacccgaccaccgcgttgagtccgaagtggtttgattcagacatggaactctcaacaccctgagctgacatgcgccggtgtcactgtttccaa

SEQ ID NO: 110693 - DNA, 246 bp, Glycine max; identical to SEQ ID NO: 104124

SEQ ID NO: 110694 - DNA, 239 bp, Glycine max
ggctgaagcacaactacgagaccagcatggcaaccctgtcccactcaccgatcaatacggtaatccggttatcttaactgacgagcgcggtaatcccgtccaactcactggtgtcgctaccaccgctaccggcacagcaggttctgggtttgggtcctatggtaccggtgcttacggtggtggtgcaagtgcaaccaccgttgcagatcttttggcaacccaaccaaggagtggcaggg

SEQ ID NO: 110695 - DNA, 239 bp, Glycine max
tacaaaaaaaaaatgatgggtacccttaaggtgtccaacagtagtttatacatattttcgaagttcctagtaatttgtatggtgatgatgatatctttggttgattcaagttattccttgtgtgattttgaggcaatcttcaattttggtgattcgaattcagatacgggtgggtttcatacaagctttcctgcacagcctgctccctatggaatgacttacttcaaaaaaccagtggg

SEQ ID NO: 110696 - DNA, 241 bp, Glycine max
gttcaatatcctagtacaccgtattaaagaatttaagatatactatgatgagagcgcggttcccattactgttgctgggagttgttttcctggcatcagtttctgtctcatttggcattgcgtattgggaaaagcagaaccccagtcacaacaagtgcctccgaagttgcaatagcgagaaagactcctacaggaaccaagcatgccacgctcgttgcaacctccttaaggtggaggaaga

SEQ ID NO: 110697 - DNA, 240 bp, Glycine max
ccaatatattccattctctctgtgtatttccctacctctcccttcaagatgcagatcttcgtcaagaccctcaccggcaagaccatcacccttgaggtggaaagctctgacaccatcgacaacgtcaaggccaagatccaggacaaggaaggaatccccccggaccagcaacgtctcattttcgccggaaagcaacttgaggacggccgtacccttgctgactacaacattcagaaggag

SEQ ID NO: 110698 - DNA, 242 bp, Glycine max
attgtctttgaacactcatcaccatggccaagcttgttctttccctttgtttccttcttttcagtggctgcttcgctctgagagagcaggcacagcaaaatgagtgccagatccaaaagctgaatgccctcaaaccggataaccgtatagagtcggaaggtgggttcattgagacctggaaccctaacaacaagccattccagtgtgccggtgttgccctctctcgctgcacccttaaccgc

SEQ ID NO: 110699 - DNA, 241 bp, Glycine max
cattattaacacttccttagttcaatatggggaagcccttcactctctctctttcttccctttgcttgctactcttgtcgagtgcatgctttgctattagctccagcaagctcaacgagtgccaactcaacaacctcaacgcgttggaacccgaccaccgcgttgagtccgaaggtggtttgattcaaacatggaactctcaacaccctgagctgaaatgcgccggtgtcactgtttccaa

SEQ ID NO: 110700 - DNA, 245 bp, Glycine max
cctttgtttccttcttttcagtggctgcttcgctctgagagagcaggcacagcaaaatgagtgccagatccaaaagctgaatgccctcaaaccggataaccgtatagagtcggaaggtgggttcattgagacctggaaccctaacaacaagccattccagtgtgccggtgttgccctctctcgctgcacccttaaccgcaatgcccttcgtagaccttcctacaccaacggtccccaggaaatct

SEQ ID NO: 110701 - DNA, 245 bp, Glycine max
tcgagcgattcggctcgaggttttttttgttcctcactgacgaagccagagcgatgagtaccaaactttctttagctagtctttttcttttttcttttagccttattttcaaacctagcctttggcaaatgtaaagaaaccgaggtagaagaagaagaccctgagctcgtaacatgcaaacaccaatgccaacagccacagcaatacactgagggtgacaagcgggtatgcttgcaaagatgtga

SEQ ID NO: 110702 - DNA, 244 bp, Glycine max
ctccattggtcctataaacactcatcagtcatcaccatggccaagctagttttttccctttgttttctgcttttcagtggctgctgcttcgctttcagttccagagagcagcctcagcaaaacgagtgccagatccaaaaactcaatgccctcaaaccggataaccgtatagagtcagaaggagggctcattgagacatggaaccctaacaacaagccattccagtgtgccggtgttgccctct

SEQ ID NO: 110703 - DNA, 239 bp, Glycine max
tgggtttccttgtgttgcttcttttctccctcttaggtctctcttctagttccagcatatcaactcatcgttccatattggaccttgacctaaccaagtttaccacacagaaacaggtgtcttcactgttccaactatggaagagtgagcatggacgtgtctaccataaccacgaagaagaggcaaagagacttgagattttcaagaataacttgaactatatcagggacatgaatgca

SEQ ID NO: 110704 - DNA, 238 bp, Glycine max
cttggcacaatccttcaacaccaacgaggacagagctgagaaacttcagtctccagacgacgaaaggaagcagatcgtgacagtggaaggaggtctcagcgttatcagccccaagtggcaagaacaacaagatgaagatgaagatgaagacgaagatgatgaagatgaacaaattccctctcaccctcctcgccgaccaagccatggaaagcgtgaacaagacgaggacgaggacgaa

SEQ ID NO: 110705 - DNA, 231 bp, Glycine max
gttcctcactgaccaagccatggcgatgagaaccaaactttctttagctatctttttcttttttcttttagccttattttcaaacctagcctttggcaaatgtaaagaaaccgaggtagaagaagaagaccctgagctcgtaacatgcaaacaccaatgccaacagccacagcaatacactgagggtgacaagcgggtatgcttgcaaagatgtgacaggtatcatcgtat

SEQ ID NO: 110706 - DNA, 237 bp, Glycine max
ttgaacactcatcaccatggccaagcttgttctttccctttgtacccttcttttcagtggctgcttcgctctgagagagcaggcacagcaaaatgagtgccagatccaaaagctgaatgccctcaaaccggataaccgtatagagtcggaaggtgggttcattgagacctggaaccctaacaacaagccattccagtgtgccggtgttgccctctctcgctgcacccttaaccgcaa

SEQ ID NO: 110707 - DNA, 239 bp, Glycine max
cgcaaacagcataatatacgcattgaatggacgggcattggtacaagtggtgaattgcaatggtgagagagtgtttgatggagagctgcaagagggacaggtgttaattgtgccacaaaactttgcggtggctgcaagatcacagagcgacaacttcgagtatgtttcattcaagaccaatgatagaccctcgatcggcaaccttgcaggtgcaaactcattgttgaacgcattgccgg

SEQ ID NO: 110708 - DNA, 240 bp, Glycine max
cttaattattaacacttccttagttcaatatggggaagcccttcactctctctctttcttccctttgcttgctactcttgtcgagtgcatgctttgctattagctccagcaagctcaacgagtgccaactcaacaacctcaacgcgttggaacccgaccaccgcgttgagtccgaaggtggtttgattcaaacatggaactctcaacaccctgagctgaaatgcgccggtgtcactgttt

SEQ ID NO: 110709 - DNA, 240 bp, Glycine max
gaaacaaagtggtcctgcttcaactgaaattaaatctgctgatgaagctactgctttcattggtgaaaataaagttgctattgttggagttttcccgaaattttctggagaggagtttgacaacttttctgccttagcagagaagttgcgttctgactatgacttcggtcacactctgaatgccaaacaccttccaagaggagagtcatcagtttctggtcccgtagttaggttgttcaa

SEQ ID NO: 110710 - DNA, 197 bp, Glycine max
gcgggaaaagcataaataaaagaagaaattccacaggggtacatagttactatacccgtgattctacacttaacaaagggcatctaagcctttgttaagtgtagaataacgggtatagtaactatgtacccttgtgtaatgagtcactcaagtacctatgcgggaaaagcataaataaaagaagaaattccaataaa

SEQ ID NO: 110711 - DNA, 238 bp, Glycine max
cgttgctagtggtgccgcagaactttgtggtggctgagcaagggggcgaacacggattggactacgtagtgttcaagacacaccacaacgccgtgagcagctacattaaggatgtgtttagggcaatcccttcggaggttctttccaattcttacaaccttggccagagtcaagtgcgtcagctcaagtatcacggaaactccggccctttggtcaacccataaataacaacaagcat

SEQ ID NO: 110712 - DNA, 244 bp, Glycine max
gggtttccttgtgttgcttcttttctccctcttaggtctctcttctagttccagcatatcaactcatcgttccatattggaccttgacctaaccaagtttaccacacagaaacaggtgtcttcactgttccaactatggaagagtgagcatggacgtgtctaccataaccacgaagaagaggcaaagagacttgagattttcaagaataacttgaactatatcagggacatgaatgcaaacaga

SEQ ID NO: 110713 - DNA, 246 bp, Glycine max
attctctccattgtctttgaacactcatcaccatggccaagcttgttctttccctttgtttccttcttttcagtggctgcttcgctctgagagagcaggcacagcaaaatgagtgccagatccaaaagctgaatgccctcaaaccggataaccgtatagagtcggaaggtgggttcattgagacctggaaccctaacaacaagccattccagtgtgccggtgttgccctctctcgctgcaccctta

SEQ ID NO: 110714 - DNA, 208 bp, Glycine max
cacctttgttcactcttcttctcttgcggctagggttttagcgcacttcttctagatttaaggaagatgggtaaggtaaaggttcacatcagtattgtggtcattggccatgtcgactctgggaaatccactaccactggtcacctgatttacaagcttggaggcattgacaagcgtgttattgagaggtttgagaaggaagctgctg

SEQ ID NO: 110715 - DNA, 244 bp, Glycine max
actccccagtataccttaattattatactcagcatggctaagcttgttctttccctttgttttctgcttttcagtggctgctgcttcgctttcagtttcagagagcagccacagcaaaacgagtgccagatccaacgcctcaatgccctcaaaccggataaccgtatagagtcagaaggtggcttcattgagacatggaaccctaacaacaagccattccagtgtgccggtgttgccctctctc

SEQ ID NO: 110716 - DNA, 241 bp, Glycine max
tcttccaccaactcataaaatcctcatatctgttcccaaaagcttgtttgtgagaatggcttcgggtgaaaagaaattcccacctcaacaacaacaaacacagcctgggaaggagcatgctatgaatccagtaccccaattcactagccctgactacaagccttcaaataaacttcaaggaaagatagcattagtgactgggggtgactctgggattggacgagcggtgtgtaacttgttt

SEQ ID NO: 110717 - DNA, 239 bp, Glycine max
cccccaactaacaataattccttcacttgcagaacttagttctctgttgcatcatcatcatcttcattagtgttagccctaaacttcaccttcaaccatgaccacagtgccaccacacagtgtccaagtgcacacaacaacacaccgctacgaagccggcgtcgtcccgccggctcgttttgaggcgccgcgttacgaagccggcatcaaggcgccctcttccatttaccattccgaga

SEQ ID NO: 110718 - DNA, 235 bp, Glycine max
ctttgaccggaaaaacaataactttagaagttgaaagttctgatcccatcgataacgtgaaggcaaagatacaggacaaagaggggattccaccagaccagcagaggcttatctttgctgggaagcagctggaagatggtcgtactcttgctgattataatatccagaaggagtccactctgcatttggtgttgaggcttcgtggaggtatgcagatatttgtgaagactctgac

SEQ ID NO: 110719 - DNA, 236 bp, Glycine max
cagaaaccgaggtagaagaagaagaccctgagctcgtaacatgcaaacaccaatgccaacagccacagcaatacactgagggtgacaagcgggtatgcttgcaaagatgtgacaggtatcatcgtatgaagcaagagcgagagaaacaaatccaagaggaaactcgtgagaagaaagaggaggaaagccgtgaaagggaagaagaacaacaagagcagcatgaggaacaagatgaa

SEQ ID NO: 110720 - DNA, 238 bp, Glycine max
gtcttccatagccccccaaaaatgaagagcaccatcttctttgctctctttctcttttgtgccttcaccacctcatacctaccttcagccatcgctgatttcgtgctcgataatgaaggtaaccctcttgaaaatggtggcacatattatatcttgtcagacataacagcatttggtggaataagagcagccccaacgggaaatgaaagatgccctctcactgtggtgcaatctcgca

SEQ ID NO: 110721 - DNA, 242 bp, Glycine max
ggaagatgaggatgaggcgcagcagcgagcagagcgaagaaagtgaagattctgagttacgaagacataagaataagaacccttttctcttcggctctaacaggtccgaaactctcttcaaaaaccaatatggtcgcattcgcgtcctccagaggttcaaccaacgctccccacaacttcagaatctccgagactaccgcattttggagttcaactccaaacccaacaccctccttctcccc

SEQ ID NO: 110722 - DNA, 230 bp, Glycine max
tccgatttgacgcctggaatggtgttcgtcgtccctcccggtcatcccttcgtcaccatagcttccaataaagagaatctcctcatgatttgcttcgaggttaacgctcgagacaacaagaagtttacatttgcagggaaggacaacattgtgagttctctggacaacgttgctaaggagcttgcctttaactatccttctgagctggtgcacggagtattcgaccgaaa

SEQ ID NO: 110723 - DNA, 242 bp, Glycine max
ttaagaaaagccatttccatagcagcctaagaaaatgaagagcactagcttgttcgctatctttctactttgcgccttcacctcatacctaccttccgccaccgcccaggacgtgctcgacgtggatggcgatccgattcggaacggtttcatatactacgttttgccggcaataagaggaaacggtggcggaatagaacgagccgcactcgggaaagacacttgccctatcactgtagtgc

SEQ ID NO: 110724 - DNA, 243 bp, Glycine max
cactcatcaccatggccaagcttgttctttccctttgtttccttcttttcagtggctgcttcgctctgagagagcaggcacagcaaaatgagtgccagatccaaaagctgaatgccctcaaaccggataaccgtatagagtcggaaggtgggttcattgagacctggaaccctaacaacaagccattccagtgtgccggtgttgccctctctcgctgcacccttaaccgcaatgcccttcgta

SEQ ID NO: 110725 - DNA, 244 bp, Glycine max
atttaagatatactatgatgagagcgcggttcccattactgttgctgggagttgttttcctggcatcagtttctgtctcatttggcattgcgtattgggaaaagcagaaccccagtcacaacaagtgcctccgaagttgcaatagcgagacagactcctacaggaaccaagcatgccacgctcgttgacaactccttaaggtggaggaagaagaagaatgcgaagaaggtcaaagtccacgacc

SEQ ID NO: 110726 - DNA, 239 bp, Glycine max
gacgaagatgaagataaacctcgtcctagtcgaccaagccaaggaaagcgtgaacaagaccaggaccaggacgaggacgaagatgaagatgaagatcaacctcgcaagagccgcgaatggagatcgaaaaagacacaacccagaagacctagacaagaagaaccacgtgaaagaggatgcgagacaagaaacggggttgaggaaaatatctgcaccttgaagcttcacgagaacattgc

SEQ ID NO: 110727 - DNA, 237 bp, Glycine max
tccgatttgaagcctggaatggtgtttgttgtccctcccggtcatcccttcgtcaccatagcttccaataaagagaatctcctcatgatttgcttcgaggttaacgctcgagacaacaagaagtttacatttgcagggaaggacaacattgtgagttctctggacaacgttgctaaggagcttgcctttaactatccttctgagatggtgaacggagtattcgaccgaaaggagagt

SEQ ID NO: 110728 - DNA, 237 bp, Glycine max
cttttgcaaataaagttcagttacccacagcagtgtgaaagaaagaatccttggtgggccatttctaaggatatatctgaaggaccacctgctattaaactctctgggttccatggtactgaactcggttggtttaaaattcagaaagcttccaaatcctgtgactctaatgactacaagcttgtgttctgccagtatgatgagacctggtgtttggatgtcggcatttacgtcgat

SEQ ID NO: 110729 - DNA, 239 bp, Glycine max
cagaaagcaagctcatcctagagttttaaaaatggcagcagcctcctccatggctctctcttccccatccttggctggcaaggccgtgaagctgggcccatcagcccccgaagtcgggagggtcagcatgaggaagaccgtcaccaagcaggcctcctccggaagcccatggtacggcccagaccgcgtcaagtacttgggcccattctctggcgagcccccgtcctacctcactggcg

SEQ ID NO: 110730 - DNA, 239 bp, Glycine max
ctcgagccgtccattgtctttgaacactcatcaccatggccaagcttgttctttccctttgtttccttcttttcagtggctgcttcgctctgagagagcaggcacagcaaaatgagtgccagatccaaaagctgaatgccctcaaaccggataaccgtatagagtcggaaggtgggttcattgagacctggaaccctaacaacaagccattccagtgtgccggtgttaccctctctcgc

SEQ ID NO: 110731 - DNA, 238 bp, Glycine max
atatcctagtacaccgtattaaagaatttaagatatactatgatgagagcgcggttcccattactgttgctgggagttgttttcctggcatcagtttctgtctcatttggcattgcgtattgggaaaagcagaaccccagtcacaacaagtgcctccgaagttgcaatagcgagaaagactcctacaggaaccaagcatgccacgctcgttgcaacctccttaaggtggaggatgaag

SEQ ID NO: 110732 - DNA, 238 bp, Glycine max
ccccatttgtgaaaccatgaagtggccaacatggaagtccaagtccaacaccatggcaatatctgtggtgtttcttcacctgagtttctccatggaggtgttctgtcacccttctcatgcagacacaattgctgcgcttcctggccaaccccacgtaggctttcaacagttctcaggatatgtcacagttgatgacaagaaacaaaagtctctcttttactattttgctgaggcagaa

SEQ ID NO: 110733 - DNA, 242 bp, Glycine max
tctccattgtctttgaacactcatcaccatggccaagcttgttctttccctttgtttccttcttttcagtggctgcttcgctctgagagagcaggcacagcaaaatgagtgccagatccaaaagctgaatgccctcaaaccggataaccgtatagagtcggaaggtgggttcattgagacctggaaccctaacaacaagccattccagtgtgccggtgttgccctctctcgctgcaccctta

SEQ ID NO: 110734 - DNA, 247 bp, Glycine max
cattggtccttaaacactcatcagtcatcaccatggccaagctagttttttccctttgttttctgcttttcagtggctgctgcttcgctttcagttccagagagcagcctcagcaaaacgagtgccagatccaaaaactcaatgccctcaaaccggataaccgtatagagtcagaaggagggctcattgagacatggaaccctaacaacaagccattccagtgtgccggtgttgccctctctcgctg

SEQ ID NO: 110735 - DNA, 252 bp, Glycine max
ctcgagccgttctctccatttgtccttgaatatgatactcagcatggctaagcttgttctttccctttgttttctgcttttcagtggctgctgcttcgctttcagtttcagagagcagccacagcaaaacgagtgccagatccaacgcctcaatgccctcaaaccggataaccgtatagagtcagaaggtggcttcattgagacatggaaccctaacaacaagccattccagtgtgccggtgttgccctctc

SEQ ID NO: 110736 - DNA, 246 bp, Glycine max
cttattaacactttccttagttcaatatggggaagcccttcttcactctctctctttcttccctttgcttgctactcttgtcgagtgcatgctttgctattacctccagcaagttcaacgagtgccaactcaacaacctcaacgcgttggaacccgaccaccgcgttgagtccgaaggtggtcttattgaaacatggaactctcaacaccctgagctgcaatgcgccggtgtcactgtttccaaac

SEQ ID NO: 110737 - DNA, 244 bp, Glycine max
gatggtctgttggtgctactctgggttatgctcaagccgttcctgagaagcgagtgattgcctgcattggtgatggaagttttcaggtgactgcccaagatgtatcgacaatgttacggtgcgggcaaaaaaccatcatctttctgatcaacaatggtggatacaccatcgaggttgaaattcatgatgggccgtacaatgtgattaagaactggaattacactgggttgattgatgcaatcca

SEQ ID NO: 110738 - DNA, 244 bp, Glycine max
tggtacgaaaaatgtcgaagctgatcttcgtgttcctttcgctcattcctcttctctgcacctccttctccccagagagaccctcagatcgacgcgtcctcgttttgctcgatgacttcgccatcaaatcctctcattctctcttcttcaactccctcaaatctcgcggcttcgatctccaattccacctcgcagacgaccccaaaattgcgctccagagatacggccagtacctctacgacgc

SEQ ID NO: 110739 - DNA, 247 bp, Glycine max
tctcaacgcgttggaacccgaccaccgcgttgagtccgaaggtgctttgattcaaacatggaactctcaacaccctgagctgaaatgcgcaggtgtcactgtttccaaactcaccctcaaccgcaatggcctccacttgccatcttactcaccttatccccggatgatcatcatcgcccaagggaaaggagcacttggagttgcaattccaggatgtcctgagacgtttgaggagccacaagaacaa

SEQ ID NO: 110740 - DNA, 244 bp, Glycine max
catttgtccttgaatataatactcagcatggctaagcttgttctttccctttgttttctgcttttcagtggctgctgcttcgctttcagtttcagagagcagccacagcaaaacgagtgccagatccaacgcctcaatgccctcaaaccggataaccgtatagagtcagaaggtggcttcattgagacatggaaccctaacaacaagccattccagtgtgccggtgttgccctctctcgctgca

SEQ ID NO: 110741 - DNA, 239 bp, Glycine max
agtttttagagagagaaaggatgaagatcacggcattgttggtgcttaaatgcacaggtgagggttccgatcccgttattctggcgaacgcttccgacgtcagccacttcggttacttccagcgttccagcgtcaaggagttcatcgtcttcgtcggtcgcaccgtcgcccgtcgcacccctcagggccaacgccaatccgtacaacacgaagagtacaaggtgcacacatacaacaga

SEQ ID NO: 110742 - DNA, 250 bp, Glycine max
agttgtttgagattaccccagagaaaaaccctcagcttcgggacttggatgtcttcctcagtgttgtggatatgaacgagggagctctttttctgccacacttcaattcaaaggccatagtggtactagtgattaatgaaggagaagcaaacattgaacttgttggcattaaagaacaacaacagaggcagcaacaggaagagcaacctttggaagtgcggaaatatagagctgaattgtctgaacaaga

SEQ ID NO: 110743 - DNA, 246 bp, Glycine max
ggaccccgtcgctgccctcaatccaggactcgtctacgatctaacggtggatgattatttaggttttctctgcgcgttaaactactcagcttccgagatcaacacattggccaagagaaaattccagtgcgacgcgggcaagcagtacagtgtgaccgacctcaactacccttcgtttgcggtgttgtttgaatctgggggcgtggttaagcacacgcggactctcacgaacgtggggcccgcgga

SEQ ID NO: 110744 - DNA, 239 bp, Glycine max
attaacactttccttagttcaatatggggaagcccttcttcactctctctctttcttccctttgcttgctactcttgtcgagtgcatgctttgctattacctccagcaagttcaacgagtgccaactcaacaacctcaacgcgttggaacccgaccaccgcgttgagtccgaagtggtcttattgaaacatggaactctcaacaccctgagctgcaatgcgccggtgtcactgtttcca

SEQ ID NO: 110745 - DNA, 239 bp, Glycine max
cctaaaccctactcattctccatacctcaacgaagaggttaaagagacggcaacactttgctgtccgccttgaccgagcagagcttcgtcttggccctcgattttgccctaaagtactctcagtcacaacagacaccgtcgtcgtcgtcgtcgtcatcaatggcaccgaagcagaccaaggctgagaagaagatcgcttacgatgcgaactgtgcgacctaatggaggagtacggccag

SEQ ID NO: 110746 - DNA, 240 bp, Glycine max
caatatcctagtataccttaataaataatttaagatactatgatgagatcacggttcccattactgttgctgggacttgtcttcctggcttcagtttctgtctcatttggcattgcttactgggaaaaagagaaccccaaacacaacaagtgtctccagagttgcaatagcgagagagactcgtacaggaaccaagcatgccacgctcgctgcaacctccttaacgtggagatagaagaa

SEQ ID NO: 110747 - DNA, 245 bp, Glycine max
gttcctcactgacctcaccaaggcgaccagagccaagctttctttagctatcttccttttctttcttttagccttgatttcaaacctagccttgggcaaacttaaagaaaccgaggtcgaagaagatcccgagctcgtaacatgcaaacaccagtgccaacagcaacggcaatacactgagagtgacaagcgaacatgcttgcaacaatgtgacagtatgaagcaagagcgagagaaacaagtcg

SEQ ID NO: 110748 - DNA, 147 bp, Glycine max
atacccccaactaacaataattccttcacttgcagaacttagttctctgttgcatcatcatcatcttcattagtgttagccctaaacttcaccttcaaccatgaccacagtgccaccacacagtgtccaagtgcacacaacaacaca

SEQ ID NO: 110749 - DNA, 252 bp, Glycine max
tctccattgtctttgaacactcatcaccatggccaagcttgttctgtccctttgtttcctatctattcagtggctgcttcgctctgagagagcaggcacagcaaaatgagtgccagatccaaaagctgaatgccctcaaaccggataaccgtatagagtcggaaggtgggttcattgagacctggaaccctaacaacaagccattccagtgtgccggtgttgccctctctcgctgcacccttaaccgcaatg

SEQ ID NO: 110750 - DNA, 246 bp, Glycine max
gctattggtattaatgccgagaacaaccagaggaacttcctcgcaggttcgcaagacaatgtgataagccagatacctagtcaagtgcaggagcttgcattccctgggtctgcacaagctgttgagaagctattaaagaaccaaagagaatcctactttgtggatgctcagcctaagaagaaagaggaggggaataagggaagaaagggtcctttgtcttcaattttgagggctttttactgaata

SEQ ID NO: 110751 - DNA, 236 bp, Glycine max
gaccaagttcacaatcctcctcatctctcttctcttctgcatcgcccacacttgcagcgcctccaaatggcagcaccagcaagatagctgccgcaagcagctccagggggtgaacctcacgccctgcgagaagcacatcatggagaagatccaaggccgcggcgatgacgatgatgatgatgacgacgacaatcacattctcaggaccatgcggggaagaatcaactacataagga

SEQ ID NO: 110752 - DNA, 243 bp, Glycine max
atttttggcatgatatacccgggttgtcctagcacatttgaagagcctcaacaacctcaacaaagaggacaaagcagcagaccacaagaccgtcaccagaagatctataacttcagagagggtgatttgatcgcagtgcctactggtgttgcatggtggatgtacaacaatgaagacactcctgttgttgccgtttctattattgacaccaacagcttggagaaccagctcgaccagatgcct

SEQ ID NO: 110753 - DNA, 242 bp, Glycine max
tataccttaataaataatttaagatactatgatgagagcacggttcccattactgttgctgggacttgttttcctggcttcagtttctgtctcatttggcattgcttactgggaaaaagagaaccccaaacacaacaagtgtctccagagttgcaatagcgagagagactcgtacaggaaccaagcatgccacgctcgttgcaacctccttaaggtggagaaagaagaatgtgaagaaggtg

SEQ ID NO: 110754 - DNA, 244 bp, Glycine max
cttattaacactttccttagttcaatatggggaagcccttcttcactctctctctttcttccctttgcttgctactcttgtcgagtgcatgctttgctattacctccagcaagttcaacgagtgccaactcaacaacctcaacgcgttggaacccgaccaccgcgttgagtccgaagtggtcttattgaaacatggaactctcaacaccctgagctgcaatgcgccggtgtcactgtttaccaa

SEQ ID NO: 110755 - DNA, 241 bp, Glycine max
ttccagttttcatcaacagtggttaccctactcctcacgtgaagtggaacttgtgggttatccacaagctgctgcttacccttgtttatggtttcatactgttcatgtatcattctaggtggagagaaaggttacctgcaaggcctgcttactataagtatgttaccattatgttcatcttgaatgcaattgcgctgtttgcttgtggcattactggaaacggcgctgcttttggtttctg

SEQ ID NO: 110756 - DNA, 243 bp, Glycine max
caagaatttaagatatactatgatgagagcgcggttcccattactgttgctgggagttgttttcctggcatcagtttctgtctcatttggcattgcgtattgggaaaagcagaaccccagtcacaacaagtgcctccgaagttgcaatagcgagaaagactcctacaggaaccaagcatgccacgctcgttgcaacctccttaaggtggaggaagaagaagaatgcgaagaaggtcaaattcc

SEQ ID NO: 110757 - DNA, 241 bp, Glycine max
gcccttcactctctctctttcttccctttgcttgctactcttgtcgagtgcatgctttgctattagctccagcaagctcaacgagtgccaactcaacaacctcaacgcgttggaacccgaccaccgcgttgagtccgaaggtggtttgattcaaacatggaactctcaacaccctgagctgaaatgcgccggtgtcactgtttccaaactcaccctcaaccgcaatggcctccacttgcca

SEQ ID NO: 110758 - DNA, 243 bp, Glycine max
ttgtctttgaacactcatcaccatggccaagcttgttctttccctatgttatccttcttttcagtggctgcattcgtctgagagagcaggcacagcaaaatgagtgccagatccaaaagctgaatgccctcaaaccggataaccgtatagagacggaaggtgggttcattgagacctggaaccctaacaacaagccattccagtgtgccggtgttgccctctctcgctgcacccttaaccgca

SEQ ID NO: 110759 - DNA, 217 bp, Glycine max
tgaagacgaagatgatgaagatgaacaaattccctctcaccctcctcgccgaccaagccatggaaagcgtgaacaagacgaggacgaggacgaagatgaagataaacctcgtcctagtcgaccaagccaaggaaagcgtgaacaagaccaggaccaggacgaggacgaagatgaagatgaagatcaacctcgcaagagccgcgaatggagatcgaaa

SEQ ID NO: 110760 - DNA, 137 bp, Glycine max
ggcgcaacaaattttcatccatagggatataggaccatcgaacatcttgctcggggatgatatgcgggccaaagtgtcagacttcggattggttcggcttgctcgaggaggcaaggcctcatttgagactaggcttg

SEQ ID NO: 110761 - DNA, 259 bp, Glycine max
caacccagcacaaaaatggagacccacaaaaatggagaaccaacaaccggcacctatctccgtgacactgctacatctgctatccaaaacttcgctcccatcaacaaaatccaccaacatctctgcgcgtttcacttttactcatatgacatgagccggcaagtggaggcacaccatttttgcgcgcaccagaacgaggagatgaggcagtgccttatctacgacagccccgagaagaaagccaggctcatagggctgg

SEQ ID NO: 110762 - DNA, 252 bp, Glycine max
gcacgagcagagagaggaacaggaatggcctcgcaaggaggaaaaacgcggagaaaagggaagtgaagaggaagatgaggatgaggatgaggaacaagatgaacgtcaattcccattcccacgcccacctcatcagaaggaagagcgaaagcaagaggaagatgaggatgaggagcagcagcgagagagcgaagaaagtgaagattctgagttacgaagacataagaataagaacccttttctcttcggctc

SEQ ID NO: 110763 - DNA, 250 bp, Glycine max
tctccattgtctttgaacactcatcaccatggccaagcttgttctttccctttgtttccttcttttcagtggctgcttcgctctgagagagcaggcacagcaaaatgagtgccagatccaaaagctgaatgccctcaaaccggataaccgtatagagtcggaaggtgagttcattgagacctggaaccctaacaacaagccattccagtgtgccggtgttgccctctctcgctgcacccttaaccgcaat

SEQ ID NO: 110764 - DNA, 251 bp, Glycine max
ctagataggaagaaactctcaaatctagcactgaagctcaacaatcctacttgcaaggattcagcaggaacattttagaggcctcctacgataccaaattcgaggagataaacaaggttctgtttagtagagaggaagggcagcagcaaggggagcagaggctgcaagagagcgtgattgtggaaatctcgaaggaacagattcgggcactgagcaaacgtgccaaatctagttcaaggaaaaccatttct

SEQ ID NO: 110765 - DNA, 249 bp, Glycine max
ctcgagcgctctccattggtccttaaacactcatcagtcatcaccatggccaagctagttttttccctttgttttctgcttttcagtggctgctgcttcgctttcagttccagagagcagcctcagcaaaacgagtgccagatccaaaaactcaatgccctcaaaccggataaccgtatagagtcagaaggagggctcattgagacatggaaccctaacaacaagccattccagtgtgccggtgttgcc

SEQ ID NO: 110766 - DNA, 79 bp, Glycine max
cagtgagtgagacacaagtgtgagagtactaaataaatgctttggttgtacgaaatcattacactaaataaaataatca

SEQ ID NO: 110767 - DNA, 246 bp, Glycine max
atggttttgaaatgtggagttctgagtgggcaaatcaaacttcatggcatttgagtttccttattgacaatcccaaacagtctacagtttttgatattctcttgggaatctctcaagattttgaaattgctggtaatactcttatgccagctttttctgttccacaagctactgccagatcttctgaaaatgcagaatcctctgcatgatctggaatttgtgttttctttcgcttgttcgtttatt

SEQ ID NO: 110768 - DNA, 248 bp, Glycine max
ttggaacatgcattcagcgtggacaagcagatagcgaaaaacctacaaggagagaacgaaggggaagacaagggagccattgtgacagtgaaaggaggtctgagcgtgataaaaccacccacggacgagcagcaacaaagaccccaggaagaggaagaagaagaagaggatgagaagccacagtgcaagggtaaagacaaacactgccaacgcccccgaggaagccaaagcaaaagcagaagaaatgg

SEQ ID NO: 110769 - DNA, 252 bp, Glycine max
ttcggtctccagatgacgaaaggaagcagatcgtgacagtggagggaggcctcagcgttatcagccccaagtggcaagaacaagaagacgaagacgaagatgaagacgaagaatatgaacaaactccctcttatcctccacgacgaccaagccatggaaagcatgaagatgacgaggacgaggacgaagaagaagatcaacctcgtcctgatcaccctccacagcgaccaagcaggcccgaacaacaagaac

SEQ ID NO: 110770 - DNA, 248 bp, Glycine max
aggtaatggtatttttggcatgatattcccgggttgtcctagcacttatcaagagccgcaagaatctcagcaacgaggacgaagccagaggccccaagaccgtcaccaaaaggtacatcgcttcagagagggtgatttgatcgcagtgcctactggtgttgcatggtggatgtacaacaatgaagacactcctgttgttgccgtttctattattgacaccaacagcttggagaaccagctcgaccaga

SEQ ID NO: 110771 - DNA, 236 bp, Glycine max
gttggcattaaagaacaacaacagaggcagcaacaggaagagcaacctttggaagtgcggaaatatagagctgaattgtctgaacaagatatatttgtaatcccagcaggttatccagttgtggtcaacgctacctcagatctgaatttctttgcttttggtatcaatgccgagaacaaccagaggaacttccttgcaggttcgaaagacaatgtgataagccagatacctagtca

SEQ ID NO: 110772 - DNA, 83 bp, Glycine max
tctctccattgtctttgaacactcatcaccatggccaagcttgttctttccctttgtttccttcttttcagtggctgcttcgc

SEQ ID NO: 110773 - DNA, 257 bp, Glycine max
gtgcagaagagcgtcgcagtcgcaaccctaatcagaagaagcgacttcaagcgagtgacagccaccagccatgggtcgtatgcacagccgcggtaagggtatatcctcttctgctttgccctacaaaaggacacctcctagctggctcaagatctcttcgcaagatgtcgaagaaaatatctgcaagtttgcgaagaaaggtttgaccccgtctcagattggtgtcattctcagagattctcacggtattgctcagg

SEQ ID NO: 110774 - DNA, 252 bp, Glycine max
cttgtctgtgaacactcatcaccatggccaagcttgttctttccctttgtttccttcttttcagtggctgcttcgctctgtgagagcaggcacagcaaaatgagtgccagatccaaaagctgagtggcctcaaaccggataaccgtatagagtcggaaggtgggttcagtgagacctggaaccctgacaacaagccattccagtgtgccggtgttgccctctctcgctgtcaccttaaccgcaatgcgcttc

SEQ ID NO: 110775 - DNA, 250 bp, Glycine max
agaagacagaagcatggtgaagatgtggtgcattctttaaaggtttccttggaggacgtttataatggcacaacaaagaaactatctctttctagaaacatattatgcccaaaatgtaaagggaaaggttcaaaaagtggaactgctggtaggtgttttggatgcaaaggcactggtatgaaaattacaagaaggcagattggactaggcatgattcaacaaatgcaacatgtctgtcctgactgcagag

SEQ ID NO: 110776 - DNA, 256 bp, Glycine max
cgatgacataatcatggtgaagatgtggtgcatgctataaaggtttccttggaggacgtatataatggcacaacaaagaaactatctctttctagaaacatattatgcccaaaatgtaaagggaaaggttcaaaaagtggaactgctgagtaggtgtcatggatgcaaaggcactggtatgctcaattacaagaaggcacattgcgactaggcatgattcaacaaatgcaacatgtctgtcctggctgcagaggat

SEQ ID NO: 110777 - DNA, 248 bp, Glycine max
tctcgagcgattcggctcagaactaacaataattccttcacttgcagaacttagtgctctgttgcatcatcatcatcttcattagtgttagccctaaacttcaccttcaaccatgaccacagtgccaccacacagtgtccaagtgcacacaacaacacaccgctacgaagccggcgtcgtcccgccggctcgttttgaggcgccgcgttacgaagccggcatcaaggcgccctcttccatttaccatt

SEQ ID NO: 110778 - DNA, 244 bp, Glycine max
aaacaaggttctgtttagtagagaggaagggcagcagcaaggggagcagaggctgcaagagagcgtgattgtggaaatctcgaaggaacagattcgggcactgagcaaacgtgccaaatctagttcaaggaaaaccatttcttctgaagataaaccttttaacttgagaagccgcgaccccatctactccaacaagcttggcaagttctttgagatcaccccagagaaaaacccccagcttcgg

SEQ ID NO: 110779 - DNA, 250 bp, Glycine max
gtcactgctctgtttcaccgagtttgggcgtttagatcagaaccaaatcgtgttctcttccattggcaaacatggcaactcaaatgagcaagaagagaaagtttgttgcggacggagtgttctttgccgaactgaacgaggttctgacacgtgaattggcggaggacggttactccggcgtggaagttagggttacgccgatgcgcaccgagatcatcatcagagccaccagaacccaagccgttctagg

SEQ ID NO: 110780 - DNA, 249 bp, Glycine max; identical to SEQ ID NO: 105002

SEQ ID NO: 110781 - DNA, 254 bp, Glycine max
tgggtttccttgtgttgcttcttttctccctcttaggtctctcttctagttccagcatatcaactcatcgttccatattggaccttgacctaaccaagtttaccacacagaaacaggtgtcttcactgttccaactatggaagagtgagcatggacgtgtctaccataaccacgaagaagaggcaaagagacttgagattttcaagaataacttgaactatatcagggacatgaatgcaaacagaaaatcaccc

SEQ ID NO: 110782 - DNA, 127 bp, Glycine max
ggcgcaacaaattttcatccatagggatatagaaccatcgaacatcttgctcggggatgatatgcgggccatagtgtcagacttcggattggttcggcttgctccagaaggaaaggcctcatttgag

SEQ ID NO: 110783 - DNA, 250 bp, Glycine max
gtgctgtttcctccttctccagtggcagggtcaagagggagagggatctcagctgtgaagaagttgtggatgcaaaagagattgatcagagggatcttagctgtgaaggaataataagagccaccgaagaagaagaagacggcgccgccaccagaaagaaacttaggctcaccaaagaacaatctgctttgctagaagaaagcttcaaacaacatagcaccctcaatcctaaacagaagcaagcttgtcg

SEQ ID NO: 110784 - DNA, 246 bp, Glycine max
cgaggacgaagccagaggccccaagaccgtcaccaaaaggtacatcgcttcagagagggtgatttgatcgcagtgcctactggtgttgcatggtggatgtacaacaatgaagacactcctgttgttgccgtttctattattgacaccaacagcttggagaaccagctcgaccagatgcctaggagattctatcttgctgggaaccaagagcaagagtttctaaaatatcagcagcagcagcaagga

SEQ ID NO: 110785 - DNA, 249 bp, Glycine max
gtcttttcttctttttcttcttcttcttcttcgttgaatcgcgattgttctgttgtgcgactgaaagaagagagatcgaaaatggcgttggctttcgacgagttcggaaggcctttcataatcctgaaggaacaggagcagaagagcagacttcgaggtttggacgctcagaaagccaacatctccgccggcaaagccgtcgctcgcatcctccgaacctccctcggccccaaaggcatggacaagatg

SEQ ID NO: 110786 - DNA, 246 bp, Glycine max
caatactattttcttgtcgttgagaagcttcgcgaacgaaagcaaagaaccctagaccgtcacagaaccattccatagccatgtctggtgttggccctctttctcaggattgggaacctgtcgtcctccgcaagaaggctcccaccgccgccgccaagaaggacgagaaagccgtcaacgccgcccgccgctctggcgccgaaatcgaaaccctaaaaaagtataatgctgggacaaacaaagcag

SEQ ID NO: 110787 - DNA, 246 bp, Glycine max
cagcaagaagaagatgatgatgatgaggaagagcagccacagtgcgtggagacagacaaaggttgccaacgccaaagcaaaaggagcagaaatggcattgatgagaccatttgcacaatgagacttcgccaaaacattggtcagaattcatcacctgacatctacaaccctcaagctggtagcatcacaaccgccaccagccttgacttcccagccctctggcttctcaaactcagtgcccagtat

SEQ ID NO: 110788 - DNA, 244 bp, Glycine max
gatatacccgggttgtcctagcacatttgaagagcctcaacaacctcaacaaagaggacaaagcagcagaccacaagaccgtcaccagaagatctataacttcagagagggtgatttgatcgcagtgcctactggtgttgcatggtggatgtacaacaatgaagacactcctgttgttgccgtttctattattgacaccaacagcttggagaaccagctcgaccagatgcctaggagattctat

SEQ ID NO: 110789 - DNA, 248 bp, Glycine max
actcataacacaaagcacaaagcaaagctcatccttgagttaaaaaatggcagcagcttcttccatggctctctcatccccatccttggctggcaaggccgtgaagctgggcccatcagccccagaagtgggaagggtgagcatgaggaagaccgtcaccaagcaggtctcctcaggaagcccatggtacggcccagaccgagtcaagtacttgggcccattctctggcgagcccccgtcctacctaa

SEQ ID NO: 110790 - DNA, 246 bp, Glycine max
tgtctttgaacactcatcaccatggccaagcttgttctttccctttgtttccttcttttcagtggctgcttcgctctgagagagcaggcacagcaaaatgagtgccagatccaaaagctgaatgccctcaaaccggataaccgtatagagtcggaaggtgggttcattgagacctggaaccctaacaacaagccattccagtgtgccggtgttgccctctctcgctgcacccttaaccgcaatgcc

SEQ ID NO: 110791 - DNA, 249 bp, Glycine max
cttcctcagtattgtggatatgaacgagggagctcttcttctaccacacttcaattcaaaggcgatagtgatactggtaattaatgaaggagatgcaaacattgaacttgttggcctaaaagaacaacaacaggagcagcaacaggaagagcaacctttggaagtgcggaaatatagagccgaattgtctgaacaagatatatttgtaatcccagcaggttatccagttgtggtcaacgctacctcaaa

SEQ ID NO: 110792 - DNA, 103 bp, Glycine max
accgtattaaagaatttaagatatactatgatgagagcgcggttcccattactgttgctgggagttgttttcctggcatcagtttctgtctcatttggcattg

SEQ ID NO: 110793 - DNA, 251 bp, Glycine max
attaacacttccttagttcaatatggggaagcccttcactctctctctttcttccctttgcttgctactcttgtcgagtgcatgctttgctattagctccagcaagctcaacgagtgccaactcaacaacctcaacgcgttggaacccgaccaccgcgttgagtccgaaggtggtttgattcaaacatggaactctcaacaccctgagctgaaatgcgccggtgtcactgtttccaaactcaccctcaacc

SEQ ID NO: 110794 - DNA, 247 bp, Glycine max
aaattatcccagaacttgtcatggtttagatcgtgtgtatatttttttcttcttttttttaccttatgcttttccttcggattcagctcagtttatatgaggaaaaaaagtgtgtttgcacttgtgcacgtttttaagttttaacacaatcaatgaacgactttcctttacgttaaaaaaaaaaaaaaaaaaaaaaaaaaaaaaaaaaaaaaaaaacaaaaaaaaaaaaaaagaggggggccccccc

SEQ ID NO: 110795 - DNA, 250 bp, Glycine max
ctccattgtctttgaacactcatcaccatggccaagcttgttctttccctttgtttccttcttttcagtggctgcttcgctctgagagagcaggcacagcaaaatgagtgccagatccaaaagctgaatgccctcaaaccggataaccgtatagagtcggaaggtgggttcattgagacctggaaccctaacaacaagccattccagtgtgccggtgttgccctctctcgctgcacccttaaccgcaatg

SEQ ID NO: 110796 - DNA, 249 bp, Glycine max
tgccacgctcgttgcaacctccttaaggtggagaaagaagaatgtgaagaaggtgaaattccacgaccacgaccacgaccacaacacccggagagggaacctcagcaacccggtgagaaggaggaagacgaagatgagcaaccacgtccaatcccattcccacgcccacaacctcgtcaagaagaagagcacgagcagagagaggaacaggaatggcctcgcaaggaggaaaaacgcggagaaaaggga

SEQ ID NO: 110797 - DNA, 248 bp, Glycine max
gtcgtgtcgcagcaaaaccaagccacccactaacttgtttggtccaagacatggctctgatcctgcatgctaccaaaacaaacaagaatgccttcaagactctgattgcggcagagtacagtggcgtccaagtggaattggcccctaatttcgagatgggtgtctctaacaaaactcctgaatttctcaagatgaatcctattggaaaggttcctgttttggaaacgcccgatggtccagtctatgag

SEQ ID NO: 110798 - DNA, 246 bp, Glycine max
aattcctttatttgtgggatttatttctcacacgataattcattaaattatagaatggatttttacctatgcctagatctcggataaatgaaaattttattgataaaaccttttcaattgtagccaatatcttattacgaataattccgacaacttcgggagaaaaaagggcattcacttattacagagatggtgcgatttgattctatttttttaccgaaatcggtaaaaagtggaaaaaaccca

SEQ ID NO: 110799 - DNA, 246 bp, Glycine max
tcacaatcctcctcatctctcttctcttctgcatcgcccacacttgcagcgcctccaaatggcagcaccagcaagatagctgccgcaagcagctccagggggcgaacctcacgccctgcgagaagcacatcatggagaagatccaaggccgcggcgatgacgatgatgatgatgacgacgacaatcacattctcaggaccatgcggggaagaatcaactacataaggaggaacgaaggaaaagacg

SEQ ID NO: 110800 - DNA, 240 bp, Glycine max
ctcgagcgctgacatttcactggctgattacattggagttgcggcatccaagcgcgccacatatgttcctcacaccgccggaaggtactccgtgaagcggttcaggaaggcgcagtgccccattgttgagaggctcaccaactctctcatgatgcacggtagaaacaatggcaagaaactcttggctgttaggatcatcaagcatgctatggagattattcatttgttgactgaccagaa

SEQ ID NO: 110801 - DNA, 247 bp, Glycine max
gtttgttgttcctcactgacctcaccatggcgaccagagccaagctttctttagctatcttccttttctttcttttagccttgatttcaaacctagccttgggcaaacttaaagaaaccgaggtcgaagaagatcccgagctcgtaacatgcaaacaccagtgccaacagcaacggcaatacactgagagtgacaagcgaacatgcttgcaacaatgtgacagtatgaagcaagagcgagagaaaca

SEQ ID NO: 110802 - DNA, 248 bp, Glycine max
ctcgagcgcgaaaatctcagattaataacactcgccatacccgttaacaagcctggtagatttgagagtttcttcctatctagcactgaagctcaacaatcctacttgcaaggattcagcaagaacattttagaggcctcctacgataccaaattcgaggagataaacaaggttctgtttagtagagaggaagggcagcagcaaggggagcagaggctgcaagagagcgtgattgtggaaatctcgaa

SEQ ID NO: 110803 - DNA, 264 bp, Glycine max
tgttgcaagcagagcacaacatcgattatccaaatgggcgaagaaaggccttggttccggaatcggtggtgaagaaggagaaaaggaacgaggagtgggctttggcgaagaagcaggaactcgatgccgctaagaaaatgaggttcgaaacgcggaagctgatttttaacagagccaaacaatactcaaaggaatacgacgagcagcaaaaggaactgattaggttgaagcgtgaagccaagcttaagggagggttttatgttg

SEQ ID NO: 110804 - DNA, 265 bp, Glycine max
ggctcaaggtcgcagaagcagcagctacaggacagtcaccagaagattcgtcacttcaatgaaggagacgtactcgtgattcctcctggtgttccttactggacctataacactggcgatgaaccagttgttgccatcagtcttcttgacacctctaacttcaataaccagcttgatcaaacccctagggtattttaccttgctgggaacccagatatagagtacccagagaccatgcaacaacaacaacagcagaaaagtcatg

SEQ ID NO: 110805 - DNA, 257 bp, Glycine max
cgggactttcactagccgcagcagcctcaggaggagaataaggatgtctcacaggaagttcgagcacccaaggcacgggtcactgggatttctccccaggaagcgtgctgctcgtcacaggggaaaagtgaaggcattccccaaggatgacccatccaaggcacccaagctcactgcattcttgggttacaaggctggtatgactcacattgttagagaggtcgagaagccaggatcaaagcttcacaagaaggaaa

SEQ ID NO: 110806 - DNA, 255 bp, Glycine max
gtacacgcttccgaaactctatgtgaagatgcagtactgtgtttcctgtgctatccactctcatgttgtgagggttcgatcccgcactgacaggaggaagcgtgaccctccacagcgattcatcaggcgcagggatgatgcacaaaggcccggtcagcctggtcaagcacctcgtcctgctggcacagcagcacctgtccgaacctaaaaacaaatcccaagacaaagccttgatgttatgctgaccaaccatat

SEQ ID NO: 110807 - DNA, 256 bp, Glycine max
acttattaacactttccttagttcaatatggggaagcccttcttcactctctctctttcttccctttgcttgctactcttgtcgagtgcatgctttgctattacctccagcaagttcaacgagtgccaactcaacaacctcaacgcgttggaacccgaccaccgcgttgagtccgaaggtggtcttattgaaacatggaactctcaacaccctgagctgcaatgcgccggtgtcactgtttccaaacgcaccctca

SEQ ID NO: 110808 - DNA, 261 bp, Glycine max
cttaattattaacacttccttagttcaatatggggaagcccttcactctctctctttcttccctttgcttgctactcttgtcgagtgcatgctttgctattagctccagcaagctcaacgagtgccaactcaacaacctcaacgcgttggaacccgaccaccgcgttgagtccgaaggtggtttgattcatacatggaactctcaacaccctgagctgaaatgcgccggtgtcactgtttccaaactcaccctcaaccgca

SEQ ID NO: 110809 - DNA, 256 bp, Glycine max
ggaaatgattggctgaacagctaccttgaagctatacttgacgtgggtcctggcctggacgatgccaagtcctctcttcttctccgagagagaggcaggttcagccctactcgctacttcgtccaagaggttattggcttcgatgagaccgatctctatcgctcttgggttcgggcttcctccaccaggagtccttcggagaggaacaccaggctcgagaacatgtgctggcggatttggaacctcgctcgccaaa

SEQ ID NO: 110810 - DNA, 258 bp, Glycine max
  unsure (1)..(258): unsure at all n locations
gnaaacattctaaaacaaaggacccagttttacattttttttgttcctgagttccaatggctcttcaggctgcttccttggtttctgcttctttttctattgctaaagagggaaagtctggtgtatctctcagggacaccacaatgtttggtgtttcattgtcggatactctcaaatctgacttcagctctccctcatcgacttgcaaaagggaattccaacaaaaatttggcccttgagggttcagtcagtggcaac

SEQ ID NO: 110811 - DNA, 258 bp, Glycine max
gatcaacaagtacttcaagaaagtgaaggaaagcaacaagcggagaccggaagattccaagacgtgcccttatttccaccagctggacgcgctgtacaggcagaagcacaggggcgaagagagccccgcggcggtggaggcgaagcggtagagcgcggtggcgccgttgatggtgcagccggagcagcaatggccacctcagcagcagcagcaggatagggacatcacaatggaagacatggagaacgaagatgatga

SEQ ID NO: 110812 - DNA, 255 bp, Glycine max
ctccattgtctttgaacactcatcaccatggccaagcttgtactttccctttgtttccttcttttcagtggctgcttcgctctgagagagcaggcacagcaaaatgagtgccagatccaaaagctgaatgccctcaaaccggataaccgtatagagtcggaaggtgggttcattgagacctggaaccctaacaacaagccattccagtgtgccggtgttgcactctctcgctgcacccttaaccgcaatgccctt

SEQ ID NO: 110813 - DNA, 257 bp, Glycine max
atcgtattctgtgaagtatagtttttggctcataaatatggactaatatctatcttattcttaacacgtgcctattcttcattaatggcttccatttatttctgtatttttataccacaggctcctctgaagcttatacctgccataaaaggtagccgtgagaaacatgggggttcacaggtgaaattgaatgtgaaatgggccgctgatgtgtatgatccagtgcctacattgttatctcacactgtaagaagcaa

SEQ ID NO: 110814 - DNA, 263 bp, Glycine max
ctctccattgtctttgaacactcatcaccatggccaagcttgttctttccctttgtttccttcttttcagtggctgcttcgctctgagagagcaggcacagcaaaatgagtgccagatccaaaagctgaatgccctcaaaccggataaccgtatagagtcggaaggtgggttcattgagacctggaaccctaacaacaagccattccagtgtgccggtgttgccctctctcgctgcacccttaaccgcaatgcccttcgtaga

SEQ ID NO: 110815 - DNA, 252 bp, Glycine max
agcagaccactcggtaggaattccaacacacagcattataactgcaaatgaatggttggtttagacttgagagagtttctgatgatgaattcaataactataagcttgtgttctgtccacagcaagctgaggatgacaaatgtggggatattgggattagtattgatcatgatgatggaaccaggcgtttggtggtgtctaagaacaaaccgttagtggttcagtttcaaaaacttgataaagaatcactgg

SEQ ID NO: 110816 - DNA, 253 bp, Glycine max
aaccggataaccgtatagagtcggaaggtgggttcattgagacctggaaccctaacaacaagccattccagtgtgccggtgttgccctctctcgctgcacccttaaccgcaatgcccttcgtagaccttcctacaccaacggtccccaggaaatctacatacaacaaggtaatggtatttttggcatgatattcccgggttgtcctagcacttatcaagagccgcaagaatctcagcaacgaggacgaagcca

SEQ ID NO: 110817 - DNA, 255 bp, Glycine max; identical to SEQ ID NO: 102867

SEQ ID NO: 110818 - DNA, 257 bp, Glycine max
gtttgttgttcctcactgacctcaccatggcgaccagagccaagctttctttagctatcttccttttctttcttttagccttgatttcaaacctagccttgggcaaacttaaagaaaccgaggtcgaagaagatcccgagctcgtaacatgcaaacaccagtgccaacagcaacggcaatacactgagagtgacaagcgaacatgcttgcaacaatgtgacagtatgaagcaagagcgagagaaacaagtcgaagag

SEQ ID NO: 110819 - DNA, 257 bp, Glycine max
cttcacttgcagcactgttgcatcatcatcttcattgcaaaaccctaaacttcaccttcaaccatgaccacacaagtaccaccacacagtgtccaagtccacacaacaacacacacctacgaagctggcgtcgtcccccccggagcccgtttcgaaccgccgcgttatgaagccggcgtcaaagcgccctccatttaccattccgagagaggtccaacgacttcccaggtcctcgccgtcctcgccggcctcccggt

SEQ ID NO: 110820 - DNA, 257 bp, Glycine max
atcgagccgctcttcttctaccacacttcaattcaaaggccacagtgatactagtgattaatgaaggagatgcaaacattgaacttgttggcattaaagaacaacaacagaagcagaaacaggaagaggaacctttggaagtgcaaaggtacagagctgaattgtctgaagacgatgtatttgtaattccagcagcttatccatttgtcgtcaacgctacctcaaacctcaatttccttgcttttggtatcaatgct

SEQ ID NO: 110821 - DNA, 257 bp, Glycine max
taattattaacacttccttagttcaatatggggaagcccttcactctctctctttcttccctttgcttgctactcttgtcgagtgcatgctttgctattagctccagcaagctcaacgagtgccaactcaacaacctcaacgcgttggaacccgaccaccgcgttgagtccgaaggtggtttaattcaaacatggaactctcaacaccctgagctgaaatgcgccggtgtcactgtttccaaactcaccctcaaccg

SEQ ID NO: 110822 - DNA, 256 bp, Glycine max
gtcctttaccaccattctagatatcagagaactttgcagctctcttaggtttttaaaaaacaccacgcaaacagcaagatggccacttccgacagtaacatgctactaaattatgttccagtttatgtgatgctcccactcggagttgtcaatgttgacaatgtttttgaagacccagatggccttaaagaacagctcttgcagcttcgagctgcgggtgttgacggggttatggttgatgtgtggtgggggatca

SEQ ID NO: 110823 - DNA, 262 bp, Glycine max
ggcaaacttcactatatatatctctgtccctgcaagagtttgagtcacaaattttccactcttcctcaccgattgctagaatggaatttcgatgctcagtcatctcttttaccattctcttctctcttgctcttgcaggagagagccatgtccatgcatcgctacctgaggaagattattgggaagctgtttggccaaacactcccattcccactgcactgcgagagcttctaaagcctctccctgcaggtgttgaaatcga

SEQ ID NO: 110824 - DNA, 133 bp, Glycine max
attccatagccccccaaaaatgaagagcaccatcttctttgctctctttctcttttgtgccttcaccacctcatacctaccttcagccatcgctgatttcgtgctcgataatgaaggtaaccctcttgaaaat

SEQ ID NO: 110825 - DNA, 250 bp, Glycine max
cgagccgatgagcttcaagagaatgattcagagttcttgcagggtggaaccatgcagtaccagacacgagatagatcttccaaagaacagggcttttttcgaataagccaattcatttgggaccccgcggatccactctttttcctattcaaagatcagccttttgtctctgtgttttcacatcgacaattctttacagatgaagagatgtcaagggaacttcttacttcccaaacagatcttcctacat

SEQ ID NO: 110826 - DNA, 251 bp, Glycine max
ggagttattatcaaataattaattaaattcctcgtggaatcttgttgaagccatgtctacagctggtcaggtcatcaagtgcagagctgcggtggcatgggaagcagggaagccactatcgatagaaaccatagaagtggcaccaccccagaaaggtgaagtgcgtttgaagatcctcttcaactccctttgccgtacagatgtttactggtgggatgctaagggccagactccgctgtttcctcgtatct

SEQ ID NO: 110827 - DNA, 237 bp, Glycine max
gagcggtcttccatagccccccaaaaatgaagagcaccatcttctttgctactcttactcttttgtgccttcaccacctcatacctaccttcagccatcgctgatttcgtgctcgataatgaaggtaaccctcttgaaaatggtggcacatattatatcttgtcagacataacagcatttggtggaataagagcagccccaacgggaaatgaaagatgccctctcactgtggtgcaa

SEQ ID NO: 110828 - DNA, 253 bp, Glycine max
ctcgagccgttcaaacttaattattaacacttccttagttcaatatggggaagcccttcactctctctctttcttccctttgcttgctactcttgtcgagtgcatgctttgctattagctccagcaagctcaacgagtgccaactcaacaacctcaacgcgttggaacccgaccaccgcgttgagtccgaaggtggtttgattcaaacatggaactctcaacaccctgagctgaaatgcgccggtgtcactgt

SEQ ID NO: 110829 - DNA, 256 bp, Glycine max
aactaacaataattccttcacttgcagaacttagttctctgttgcatcatcatcatcttcattagtgttagccctaaacttcaccttcaaccatgaccacagtgccaccacacagtgtccaagtgcacacaacaacacaccgctacgaagccggcgtcgtcccgccggctcgttttgaggcgccgcgttacgaagccggcatcataggcgccctcttccatttaccattccgagagaggtccgacgacctctcagg

SEQ ID NO: 110830 - DNA, 255 bp, Glycine max
ggggctacccgctgagtttaagcatatcaataagcggaggaaaagaaactaacaaggattcccttagtaacggcgagcgaaccgggaaaagcccaccatgaaaatcggtcgccctcggcgtccgaattgtagtctggagaagcgtcctcagtggcggaccgggcccaagtcccctggaagggggcgccagagagggtgagagccccgtcgtgcccggaccctgtcgcaccacgaggcgctgtcggcgagtcgggt

SEQ ID NO: 110831 - DNA, 254 bp, Glycine max
ctaaccccagctcacgttccctattggtgggtgaacaatccaacacttggtgaattctgcttcacaatgataggaagagccgacatcgaaggatcaaaaagcaacgtcgctatgaacgcttggctgccacaagccagttatccctgtggtaacttttctgacacctctagcttcaaattccgaaggactaaaggatcgataggccacgctttcacggttcgtattcgtactggaaatcagaatcaaacgagctt

SEQ ID NO: 110832 - DNA, 256 bp, Glycine max
ggatgaccaagttcacaatcctcctcatctctcttctcttctgcatcgcccacacttgcagcgcctccaaatggcagcaccagcaagatagctgccgcaagcagctccagggggtgaacctcacgccctgcgagaagcacatcatggagaagatccaaggccgcggcgatgacgatgatgatgatgacgacgacaatcacattctcaggaccatgcggggaagaatcaactacataaggaggaacgaaggaaaaga

SEQ ID NO: 110833 - DNA, 252 bp, Glycine max
ctcatctctcttctcttctgcatcgcccacacttgcagcgcctccaaatggcagcaccagcaagatagctgccgcaagcagctccagggggtgaacctcacgccctgcgagaagcacatcatggagaagatccaaggccgcggcgatgacgatgatgatgatgacgacgacaatcacattctcaggaccatgcggggaagaatcaactacataaggaggaacgaaggaaaagacgaagacgaagaagaagaa

SEQ ID NO: 110834 - DNA, 250 bp, Glycine max
  unsure (1)..(250): unsure at all n locations
cttcaaacttaattattaacacttccttagttcaatatggggacgcccttcactctctctctttcttccctttgcttgctactcttgtcgagtgcatgctttgctattagctccagcaagctcaacgagtgccaactcaacaacctcaacgcgttggaacccgaccaccgcgttgagtccgcangtggtttgattcaaacatggaactctcaacaccctgagctgaaatgcgccggtgtcactgtttcca

SEQ ID NO: 110835 - DNA, 255 bp, Glycine max
gatttttcagtactccaccaaggttttgtcagaaaagcttgaatttttcgcctaccctttacaatgatctcttcgttgagacagcctgttgtagggatcagtggttctgatcttcttttgaggcaaagacatgcaactccaattaaggcaaggtcgtttttaccctctttgtcaagagaaaagggtcaaggatctcttgtttcagttcaaaagccactccacattggtgcttctcttggtgttggaaattttgtg

SEQ ID NO: 110836 - DNA, 136 bp, Glycine max
gtcttcttgacacctccaacttcaacaatcagctctgatcaaaaccccagagtattttaccttgctgggaacccagatatagagcacccagagaccgtgcaacaacagcagcagcagaagagtcatggtggacgca

SEQ ID NO: 110837 - DNA, 251 bp, Glycine max
cgggggttgatttggaagaaacccagctaaggtaattcctcgcaacccctaactaaaccttcaaaggatcatcatgggcagtcacaatgctttggctgccactttcggaatattaggtaacatcatttctgtgatggtgtacttggctccggtgccaacgttttaccggatatacaaaaagaaatgcacggacggtttccactcgctgccatacttgttgtcattaatgagttctatgctttggttatact

SEQ ID NO: 110838 - DNA, 251 bp, Glycine max
gccatttccatagcagcctaagaaaatgaagagcactagcttgttcgctatctttctactttgcgccttcacctcatacctaccttccgccaccgcccaggacgtgctcgacgtggatggcgatccgattcggaacggtttcatatactacgttttgccggcaataagaggaaacggtggcggaatagaacgagccgcactcgggaaagacacttgccctatcactgtagtgcaatctcccaatccaaact

SEQ ID NO: 110839 - DNA, 250 bp, Glycine max
gaatggtttccttggttcaagacaaagtaaattcagcacttctgctgccattgaggaagaacccattaaaccatcaatacaagtagaacacacccaactcttaattgatggaaaatttgtagatgctgcttctggtaaaacttttcaaactttagatcctaggacaggtgaagtgattgctcatgttgctgagggtcactctgaagatgttgatcgagcagtttcagctgcacgaaaagcatttgatcat

SEQ ID NO: 110840 - DNA, 128 bp, Glycine max
agactcatcagtcatcaccatggccaagctagttttttccctttgttttctgcttttcagtggctgctgcttcgctttcagttccagagagcagcctcagcaaaacgagtgccagatccaaaaactca

SEQ ID NO: 110841 - DNA, 251 bp, Glycine max
attaagaaaagccatttccatagcagcctaagaaaatgaagagcactagcttgttcgctatctttctactttgcgccttcacctcatacctaccttccgccaccgcccaggacgtgctcgacgtggatggcgatccgattcggaacggtttcatatactacgttttgccggcaataagaggaaacggtggcggaatagaacgagccgcactcgggaaagacacttgccctatcactgtagtgcaatctccc

SEQ ID NO: 110842 - DNA, 130 bp, Glycine max
cggctcgagatatcctagtacaccgtattaaagaatttaagatatactatgatgagagcgcggatcccattactgttgctgggagttgttttcctggcatcagtttctgtctcatttggcattgcgtatt

SEQ ID NO: 110843 - DNA, 254 bp, Glycine max
ggatatcctagtacaccgtattaaagaatttaagatatactatgatgagagcgcggttcccattactgttgctgggagttgttttcctggcatcagtttctgtctcatttggcattgcgtattgggaaaagcagaaccccagtcacaacaagtgcctccgaagttgcaatagcgagaaagactcctacaggaaccaagcatgccacgctcgttgcaacctccttaaggtggaggaagaagaagaatgcgaagaa

SEQ ID NO: 110844 - DNA, 243 bp, Glycine max
gttaataaataatttaagatactatgatgagagcacggttcccattactgttgctgggacttgttttcctggcttcagtttctgtctcatttggcattgcttactgggaaaaagagaaccccaaacacaacaagtgtctccagagttgcaatagcgagagagactcgtacaggaaccaagcatgccacgctcgttgcaacctccttaaggtggagaaagaagaatgtgaagaaggtgaaattc

SEQ ID NO: 110845 - DNA, 254 bp, Glycine max
aagaaaatcattccaatacacatggcttccgaaaggcaagcgttgatgcttattctcttaacaacattcttcttcaccataaagccttcacaggccagtactactggtggcataacaatctactggggccaaaacattgacgacggcaccttgacttccacatgcgacactggaaacttcgagattgtcaacctagctttcctcaatgcgtttggttgcggcataactccatcatggaacttcgctggccactg

SEQ ID NO: 110846 - DNA, 252 bp, Glycine max
tttgagatcaccccagagaaaaacccccagcttcgggacttggatatcttcctcagtattgtggatatgaacgagggagctcttcttctaccacactggaattcaaaggcgatagtgatactggtaattaatgaaggagatgcaaacattgaacttgttggcctaaaagaacaacaacaggagcagcaacagggagagcaacctttggaagtgcggaaatatagagccgaattgtctgaacaagatatattt

SEQ ID NO: 110847 - DNA, 253 bp, Glycine max
ggttgctattggtattaatgccgagaacaaccagaggaacttcactcgcaggttcgcaagacaatgtgataagccagatacctagtcaagtgcaggagcttgcattccctgggtctgcacaagctgttgagaagctattaaagaaccaaagagaatcctactttgtggatgctcagcctaagaagaaagaggaggggaataagggaagaaagggtcctttgtcttcaattttgagggctttttactgaataag

SEQ ID NO: 110848 - DNA, 252 bp, Glycine max
tctctccattgtctttgaacactcatcaccatggccaagcttgttctttccctttgtttccttcttttcagtggctgcttcgctctgagagagcaggcacagcaaaatgagtgccagatccaaaagctgaatgccctcaaaccggataaccgtatagagtcggaaggtgggttcattgagacctggaaccctaacaacaagccattccagtgtgccggtgttgccctctctcgctgcacccttaaccgcaat

SEQ ID NO: 110849 - DNA, 246 bp, Glycine max
aatgaccaagttcacaatcctcctcatctctcttctcttctgcatcgcccacacttgcagcgcctccaaatggcagcaccagcaagatagctgccgcaagcagctccagggggtgaacctcacgccctgcgagaagcacatcatggagaagatccaaggccgcggcgatgacgatgatgatgatgacgacgacaatcacattctcaggaccatgcggggaagaatcaactacataaggaggaacga

SEQ ID NO: 110850 - DNA, 135 bp, Glycine max
tgtccattggtccttaaacactcatcagtcatcaccatggccaagctagttttttccctttgttttctgcttttcagtggctgctgcttcgctttcagttccagagagcagcctcagcaaaacgagtgccagatc

SEQ ID NO: 110851 - DNA, 257 bp, Glycine max
cgcacttcacttggcccatttacctgtcattgcggtcttttactcttctcaataccttattaaaaccctatctcactcactcactcacaccgttccatttctcaacaacttctgctacttcctactccaaccgcacttctgctccgcaattatcatgggcaaggtcaagatcggaatcaacggatttggaagaattggccgtttggtagccagagtggctctgcagagagacgatgttgaactcgttgccgttaacg

SEQ ID NO: 110852 - DNA, 255 bp, Glycine max
gggaaagggaggtaagaacaggaagaggggaaagaacgaggcggacgacgagaagcgagagctggtgttcaaggaggacgggcaggagtacgcgcaggtgctccggatgctgggtaacgggcggtgcgaggcgatgtgcatcgacgggacgaagaggctctgccacatccgcgggaagatgcacaagaaggtgtggatcgccgccggagacatcatcctggttggactcagggactaccaggacgacaaggctga

SEQ ID NO: 110853 - DNA, 257 bp, Glycine max
cagaaagcaagctcatcctagagttttaaaaatggcagcagcctcctccatggctctctcttccccatccttggctggcaaggccgtgaagctgggcccatcagcccccgaagtcgggagggtcagcatgaggaagaccgtcaccaagcaggcctcctccggaagcccatggtacggcccagaccgcgtcaagtacttgggcccattctctggcgagcccccgtcctacctcactggcgagttcccaggtgactacg

SEQ ID NO: 110854 - DNA, 257 bp, Glycine max
ggctcgaggttcaatatcctagtataccttaataaataatttaagatactatgatgagagcacggttcccattactgttgctgggacttgttttcctggcttcagtttctgtctcatttggcattgcttactgggaaaaagagaaccccaaacacaacaagtgtctccagagttgcaatagcgagagagactcgtacaggaaccaagcatgccacgctcgttgcaacctccttaaggtggagaaagaagaatgtgaa

SEQ ID NO: 110855 - DNA, 259 bp, Glycine max
ctcgagccgcgccgctcgatgggaattgcgcttcaaggcgtcacgtagggctaatccgactcacgagggtcaccaacggcacgtgcctttggggggccgaggccccctactgctggtcggcaaacggacggcgggcgcacgcgtcgcttctagcccggattctgacttagaggcgttcagtcataatccaacgcacggtagcttcgcgactgtggcttttcaaccaagcgcgatgaccaattgtgcgaatcaacggttc

SEQ ID NO: 110856 - DNA, 246 bp, Glycine max
aataaataatttaagatactatgatgagagcacggttcccattactgttgctgggacttgttttcctggcttcagtttctgtctcatttggcattgcttactgggaaaaagagaaccccaaacacaacaagtgtctccagagttgcaatagcgagagagactcgtacaggaaccaagcatgccacgctcgttgcaacctccttaaggtggagaaagaagaatgtgaagaaggtgaaattccacgac

SEQ ID NO: 110857 - DNA, 251 bp, Glycine max
tgattattaacacttccttagttcaatatggggaagcccttcactctctctctttcttccctttgcttgctactcttgtcgagtgcatgctttgctattagctccagcaagctcaacgagtgccaactcaacaacctcaacgcgttggaacccgaccaccgcgttgagtccgaaggtggtttgattcaaacatggaactctcaacaccctgagctgaaatgcgccggtgtcactgtttccaaactcaccct

SEQ ID NO: 110858 - DNA, 251 bp, Glycine max
aactaacaataattccttcacttgcagaacttagttctctgttgcatcatcatcatcttcattagtgttagccctaaacttcaccttcaaccatgaccacagtgccaccacacagtgtccaagtgcacacaacaacacaccgctacgaagccggcgtcgtcccgccggctcgttttgaggcgccgcgttacgaagccggcatcaaggcgccctcttccatttaccattccgagagaggtccgacgacctct

SEQ ID NO: 110859 - DNA, 252 bp, Glycine max
ctcgagccgttttttcttctaaaaaaataaaattaagaaattttcatggtaaccattcgtgcagatgaaattagtaaaattatccgtgaacgcattgagcaatataatacggaagtaaaaattgtaaatacgggtaccgtacttcaagtaggcgacggtattgctcgtatttatggtcttgatgaagtaatggcgggtgaattagtggaatttgaagagggtactataggcattgctttgaatttggaatcc

SEQ ID NO: 110860 - DNA, 249 bp, Glycine max
atagttcaatatcctagtataccttaataaataatttaagatactatgatgagagcacggttcccattactgttgctgggacttgttttcctggcttcagtttctgtctcatttggcattgcttactgggaaaaagagaaccccaaacacaacaagtgtctccagagttgcaatagcgagagagactcgtacaggaaccaagcatgccacgctcgttgcaacctccttaaggtggagaaagaagaatgt

SEQ ID NO: 110861 - DNA, 127 bp, Glycine max
gttattaacactttccttagttcaatatggggaagcccttcttcgatctctctctttcttccctttgcttgctactcttgtcgagtgcatgctttgctattacctccagcaagttcaacgagtgcca

SEQ ID NO: 110862 - DNA, 251 bp, Glycine max
ggaagttatgggtttccttgtgttgcttcttttctccctcttaggtctctcttctagttccagcatatcaactcatcgttccatattggaccttgacttaaccaagtttaccacacagaaacaggtgtattcactgttccaactatggaagagtgagcatggacgtgtctaccataaccacgaagaagaggcaaagagacttgagattttcaagaataacttgaactatatcagggacatgaatgcaaaca

SEQ ID NO: 110863 - DNA, 132 bp, Glycine max
gcattggtccttaaacactcatcagtcatcaccatggccaagctagttttttccctttgttttctgcttttcagtggctgctgcttcgctttcagttccagagagcagcctcagcaaaacgagtgccagatc

SEQ ID NO: 110864 - DNA, 261 bp, Glycine max
gtcgaccgatctaaacaaaaaatcaagaacaatggcttatgctaggcttgctcctaaggctgtcttcttgcttgccacttccaccataatgttcccaacgaagatagaagcagcagattgtaatggtgcatgttcacctttcgagatgccaccgtgccgctcacgtgattgtcgttgtgtccctataggactagttgctggtttctgcatacatccaactggactttcatctgttgcgaagatgatcgacgaacatcccaa

SEQ ID NO: 110865 - DNA, 137 bp, Glycine max
ggacgaagaaaatcattccaatacacatggcttcggaaaggcaagcgttgatgcttattctcttaacaacattcttcttcaccataaagccttgacaggccagtactactggtggcataacaatctactggggccaa

SEQ ID NO: 110866 - DNA, 259 bp, Glycine max
gtttttacaacatggctactgcggtaactgctgcagtgtcctttccagccaccaagtccacttctctttcaagcagaacctctatcactgccccagatagaattgtcttcaagaaggtttcgttgcaatacagagatgtttcaaccagtggaagggtagtttcaatcagagcacaagtgaccacagaggcacctgctaaggttgaaaaggaatcaaagaaacaggaggaaggtgtgatcgtgaacaagttcaaacccaa

SEQ ID NO: 110867 - DNA, 256 bp, Glycine max
ctttgaacactcatcaccatggccaagcttgttctttccctttgtttccttcttttcagtggctgcttcgctctgagagagcaggcacagcaaaatgagtgccagatccaaaagctgaatgccctcaaaccggataaccgtatagagtcggaaggtgggttcattgagacctggaaccctaacaacaagccattccagtgtgccggtgttgccctctctcgctgcgaccttaaccgcaatgcccttcgtagagctt

SEQ ID NO: 110868 - DNA, 258 bp, Glycine max
gcattgtctttgaacactcatcaccatggccaagcttgttctttccctttgtttccttcttttcagtggctgcttcgctctgagagagcaggcacagcaaaatgagtgccagatccaaaagctgaatgccctcaaaccggataaccgtatagagtcggaaggtgggttcattgagacctggaaccctaacaacaagccattccagtgtgccggtgttgccctctctcgctgcacccttaaccgcaatgcccttcgtag

SEQ ID NO: 110869 - DNA, 251 bp, Glycine max
attgtctttgaacactcatcaccatggccaagcttgttctttccctttgtttccttcttttcagtggctgcttcgctctgagagagcaggcacagcaaaatgagtgccagatccaaaagctgaatgccctcaaaccggataaccgtatagagtcggaaggtgggttcattgagacctggaaccctaacaacaagccattccagtgtgccggtgttgccctctctcgctgcacccttaaccgcaatgccctt

SEQ ID NO: 110870 - DNA, 249 bp, Glycine max
gtctttgaacactcatcaccatggccaagcttgttctttccctttgtttccttcttttcagtggctgcttcgctctgagagagcaggcacagcaaaatgagtgccagatccaaaagctgaatgccctcaaaccggataaccgtatagagtcggaaggtgggttcattgagacctggaaccctaacaacaagccattccagtgtgccggtgttgccctctctcgctgcacccttaaccgcaatgcccttc

SEQ ID NO: 110871 - DNA, 251 bp, Glycine max
ggagttcaatatcctagtacaccgtattaaagaatttaagatatactatgatgagagcgcggttcccattactgttgctgggagttgttttcctggcatcagtttctgtctcatttggcattgcgtattgggaaaagcagaaccccagtcacaacaagtgcctccgaagttgcaatagcgagaaagactcctacaggaaccaagcatgccacgctcgttgcaacctccttaaggtggaggaagaagaagaa

SEQ ID NO: 110872 - DNA, 251 bp, Glycine max
cttccaccaagttatgggtacccttgtgttgcttcttttctccctcttaggtctctcttctagttccagcatatcaactcatcgttccatattggaccttgacctaaccaagtttaccacacagaaacaggtgtcttcactgttccaactatggaagagtgagcatggacgtgtctaccataaccacgaagaagaggcaaagagacttgagattttcaagaataacttgaactatatcagggacatgaatg

SEQ ID NO: 110873 - DNA, 244 bp, Glycine max
cacgtgtgggacactcttggatgttgagctagtcctcaggttggttaagaggtttatgagtttggaccgtgatggtgctgctttggttaaggtggccaagttggttgattgctacctcgctgaggctgctgtggatgccaatttgaccttgtctgagttcattgcacttgctggagctcttccaagtcattcgagagccacggatgatggcttgtaccgagccattgacacgtatctaaaagca

SEQ ID NO: 110874 - DNA, 247 bp, Glycine max
tatcctagtataccttaataaataatttaagatactatgatgagagcacggttcccattactgttgctgggacttgttttcctggcttcagtttctgtctcatttggcattgcttactgggaaaaagagaaccccaaacacaacaagtgtctccagagttgcaatagcgagagagactcgtacaggaaccaagcatgccacgctcgttgcaacctccttaaggtggagaaagaagaatgtgaagaag

SEQ ID NO: 110875 - DNA, 255 bp, Glycine max
gggggaaatgatactacaagccactaggcatgggtctagcaaaggaaacaataatgggaggtggaggccgtgtggccaaagttgaaattcagcagaagaagcctctctcaagggttccaaacacaaagccaccgttcactgttggccaactcaagaaagccattccaccgcactgctttcagcgttccctcctcacttcattgtcctatgttgtttatgacctttcattggctttcattttctacattgccacca

SEQ ID NO: 110876 - DNA, 268 bp, Glycine max
cttttctccctcttaggtctctcttctagttccagcatatcaactcatcgttccatattggaccttgacctaaccaagtttaccacacagaaacaggtgtcttcactgttccaactatggaagagtgagcatggacgtgtctaccataaccacgaagaagaggcaaagagacttgagattttcaagaataacttgaactatatcagggacatgaatgcaaacagaaaatcaccccattctcatcgtttaggattgaacaagtttgctg

SEQ ID NO: 110877 - DNA, 270 bp, Glycine max
ctcgaagttacataccggattacagcatcaaactcttcttcttcgatttccattgggaacgttactttttcttctactttctcttcattttcttcgcgcttcgatcttcagtcccaggacgttaacctctagcccacgagaagtacatcatggacaagatccaaggccgcggcgatgacgatgatgatgatgacgacgacaatcacattctcaggaccatgcggggaagaatcaactacataaggaggaacgatggaaaagacgaagacg

SEQ ID NO: 110878 - DNA, 259 bp, Glycine max
cattggtccttaaacactcatcagtcatcaccatggccaagctagttttttccctttgttttctgcttttcagtggctgctgcttcgctttcagttccagagagcagcctcagcaaaacgagtgccagatccaaaaactcaatgccctcataccggataaccgtatagagtcagaaggagggctcattggagacatggaaccctaacaacaagccattccagtgtgccggtgttgcactctctcgctgcatcctcaacc

SEQ ID NO: 110879 - DNA, 263 bp, Glycine max
cttttgcttcactctacgcagatcgcagcaaaccagagattgcactccgacgatgcctcccgtcgctcctcgatccggcgatgccatattcgccaacgtcgaacgcgtcaatgcggagctgtttactttgacgtatggcgcaattgtgcgtcaattgctcacggatctggaagaggttgaggaggttaacgagcagcttgatcaaatgggttacaatattggaatccgattgattgatgagtttttagctaagtctaatgtct

SEQ ID NO: 110880 - DNA, 263 bp, Glycine max
aaaattcttccaccaagttatgggttcccttgtgttgcttcttttctccctcttaggtctctcttctagttccagcatatcaactcatcgttccatattggaccttgacctaaccaagtttaccacacagaaacaggtgtcttcactgttccaactatggaagagtgagcatggacgtgtctaccataaccacgaagaagaggcaaagagacttgagattttcaagaataacttgaactatatcagggacatgaatgcaaaca

SEQ ID NO: 110881 - DNA, 262 bp, Glycine max
gaatcgcccaacttcttctagaaggttgcttcctgagaaaggcaccccagaatatgaagaaatggtgaaaagtcatcaaaaggcttatttgagaactattacatcaaagtttcaaactctagttgacctttcagtgatagagatcttgtcaaggcatgcttctgatgaggtctaccttggccaaagggacaacccacattggacctctgactcaaaagcattacaagcctttcaaaaatttggaaacaagctcaaagaaatt

SEQ ID NO: 110882 - DNA, 169 bp, Glycine max
atctatctagcactcaagctcaacagtcctacttgcaagggttcagcaagaatattctagaggcctcatacgacaccaaattcgaggagatagacaaggttctgtttggtagagaagaggggcagcaacaaggggatgagatgctgcaacagagtgtgattgtggaaat

SEQ ID NO: 110883 - DNA, 260 bp, Glycine max
ataaaattcttccaccaagttatgggtttccttgtgttgcttcttttctccctcttaggtctctcttctagttccagcatatcaactcatcgttccatattggaccttgacctaaccaagtttaccacacagaaacaggtgtcttcactgttccaactatggaagagtgagcatggacgtgtctaccataaccacgaagaagaggcaaagagacttgagattttcaagaataacttgaactatatcagggacatgaatgc

SEQ ID NO: 110884 - DNA, 256 bp, Glycine max
cttaattattaacacttccttagttcaatatggggaagcccttcactctctctctttcttccctttgcttgctactcttgtcgagtgcatgctttgctattagctccagcaagctcaacgagtgccaactcaacaacctcaacgcgttggaacccgaccaccgcgttgagtccgaaggtggtttgattcaaacatggaactctcaacaccctgagctgaaatgcgccggtgtcactgtttccaaactcaccctcaa

SEQ ID NO: 110885 - DNA, 265 bp, Glycine max
aattattaacacttccttagttcaatatggggaagcccttcactctctctctttcttccctttgcttgctactcttgtcgagtgcatgcttctctattagctccagcaagctcaacgagtgccaactcaacaacctcaacgcgttggaacccgaccaccgcgttgagtccgaaggtggtttgattcaaacatggaactctcaacaccctgagctgaaatgcgccggtgtcactgtttccaaactcaccctcaaccgcaatggcct

SEQ ID NO: 110886 - DNA, 263 bp, Glycine max
atgaggatgaggagcagcagcgagagagcgaagaaagtgaagattctgagttacgaagacataagaataagaacccttttctcttcggctctaacaggttcgaaactctcttcaaaaaccaatatggtcgcattcgcgtcctccagaggttcaaccaacgctccccacaacttcagaatctccgagactaccgcattttggagttcaactccaaacccaacaccctccttctccccaaccatgctgacgctgattacctcatc

SEQ ID NO: 110887 - DNA, 280 bp, Glycine max
  unsure (1)..(280): unsure at all n locations
taacactttccttagtgcaatatggggaagcccttcttcactctctctgctttcttgcccttgtgctatgctcactgcttcgtggcgagtggcatcgctattggctgattgactctaccatgcaangttgcatgcggagatcgccaactcgcagcaactctcatacgcgttgtgaacccgatccacgcgcgttggagtccgaagggggtcttattgaaacatggaactctcaacaccctgagctgcaatgcgccggtgtcactgtttccaaacgcaccct

SEQ ID NO: 110888 - DNA, 266 bp, Glycine max
ctcgagcgtctctccattgtctttgaacactcatcaccatagccaagcttgttcttaccctttgtttccttcttttcagtggctgcttcgctctgagagagcaggcacagcaaaatgagtgccagatccaaaagctgaatgccctcaaaccggataaccgtatagagtcggaaggtgggttcattgagacctggaaccctaacaacaagccattccagtgtgccggtgttgccctctctcgctgcacccttaaccgcaatgccctt

SEQ ID NO: 110889 - DNA, 260 bp, Glycine max
gccttcaattaaggaagttattgctaatgggataagtgtgaatgtgacgctgatattctctcttgcaagatatgacgctgtaatagatgcttacttggatggtcttgaggcatctgggttaaatgacctctctagagttacaagtgttgcctctttctttgtcagtagagtggacactctcattgacaaggcccttgagaaaattggcaccccagaggctcttaatctacgtgggaaggcagcagtagcccaagcagcat

SEQ ID NO: 110890 - DNA, 262 bp, Glycine max
ttcatgattccataattgaatcaattacatactggatccaagctaaaggaatgttatggtaaaacttcgtttgaaacgatgtggtaaaaagcaacgtgcgacttgaaagacatgattagattagctgtggattcttacatccgccattttttctagtatatagaaatgaacatgctcttgactcgacatcgtttgttctgttccactagaacttattgttttggggacgggaaagcagttgatgatgtaagttgatgatgta

SEQ ID NO: 110891 - DNA, 263 bp, Glycine max
agaaagtcttccatagccccccaaaaatgaagagcaccatcttctttgctctctttctcttttgtgccttcaccacctcatacctaccttcagccatcgctgatttcgtgctcgataatgaaggtaaccctcttgaaaatggtggcacatattatatcttgtcagacataacagcatttggtggaataagagcagccccaacgggaaatgaaagatgccctctcactgtggtgcaatctcgcaatgagctcgacaaagggatt

SEQ ID NO: 110892 - DNA, 255 bp, Glycine max
gaagtgaaaagggttcttattcttatgtcttcaactctaaaaggttccaaactctcttcaaaaaccagaatgcggtagtctcggagattctgaagctgttgggagcgtttgttgaacctctggaggacaacgacgaccgagactcttacaaccttcaatctggcgatgccctaagagtccctgcaggaaccacatactatgtggttaaccctgacaacgacgagaatctcagaatgataacactcgccatacccg

SEQ ID NO: 110893 - DNA, 260 bp, Glycine max
attaacacttccttagttcaatatggggaagcccttcactctctctctttcttccctttgcttgctactcttgtcgagtgcatgctttgctattagctccagcaagctcaacgagtgccaactcaacaacctcaacgcgttggaacccgaccaccgcgttgagtccgacaggtggtttgattcaaacatggaactctcaacaccctgagctgaaatgcgccggtgtcactgtttccaaactcagcctcaaccgcaatggc

SEQ ID NO: 110894 - DNA, 257 bp, Glycine max
aacttattaacactttccttagttcaatatggggaagcccttcttcactctctctctttcttccctttgcttgctactcttgtcgagtgcatgctttgctattacctccagcaagttcaacgagtgccaactcaacaacctcaacgcgttggaacccgaccaccgcgttgagtccgaaggtggtcttattgaaacatggaactctcaacaccctgagctgcaatgcgccggtgtcactgtttccaaacgcaccctca

SEQ ID NO: 110895 - DNA, 255 bp, Glycine max
aatatcctagtataccttaataaataatttaagatactatgatgagagcacggttcccattactgttgctgggacttgttttcctggcttcagtttctgtctcatttggcattgcttactgggaaaaagagaaccccaaacacaacaagtgtctccagagttgcaatagcgagagagactcgtacaggaaccaagcatgccacgctcgttgcaacctccttaaggtggagacagaagaatgtgaagaaggtgaaa

SEQ ID NO: 110896 - DNA, 261 bp, Glycine max
ctcgagccgattcggctcgagttgtctttgaacactcatcaacatggccaagcttgtgctttccctttgtttccttcctttcagtggctgcttcgctctgagagagcaggcacagcaaaatgagtgccagatccaaaagctgaatgccctcaaaccggataaccgtatagagtcggaaggtaggttcattgagacctggaaccctaacaacaagccattccagtgtgccggtgttgccctctctcgctgcacccttaaccg

SEQ ID NO: 110897 - DNA, 234 bp, Glycine max
cattcagctcgagtcaatatcctagtataccttaatatatagtttaagatactatgatgagagcacggttcccattactgttgctgggacttgttttcctggcttcagtttctgtctcatttggcattgcttactgggaaaaagagaaccccaaacacaacaagtgtctccagagttgcaatagcgagagagactcgtacaggaaccaagcatgccacgctcgttgcaacctcc

SEQ ID NO: 110898 - DNA, 256 bp, Glycine max
  unsure (1)..(256): unsure at all n locations
caaaataagcagagaacgggtgcgtgcgttggcccccaccaagaaaagctcttggcggccattcggcggcgaatccaaggctcaattcaatattttcagccagcgtcccactttctccaacggatatggccgtttaactgaagttcgtnctaatgatgaaacgagttggcttcaaagactcaacctcatgcttacctttaccaacatcacccagagctctatgagtactattcactacaactcacatgcaacgaag

SEQ ID NO: 110899 - DNA, 79 bp, Glycine max
ccttttctcttcggctctaacaggttcgagactctcttcaaaaaccaatatggtcgcattcgcgtcctccagaggttca

SEQ ID NO: 110900 - DNA, 260 bp, Glycine max
tcttgtaaagacgaagaaacaggagtaattaactgtgacacgttcactaaaaaaaaatccttttgtagcgaatcatttattaagaaaaataaataaacttaacacaaaagcggaaaaagatataataataacttggtccagagcatctaccattatacctacaatgattggccataccattgctatccacaacggaaaagagcatttacctatttatataacagatcgtatggtaggccataaattaggagaattttcac

SEQ ID NO: 110901 - DNA, 258 bp, Glycine max
atcctagtacaccgtattaaagaatttaagatatactatgatgagagcgcggttcccattactgttgctgggagttgttttcctggcatcagtttctgtctcatttggcattgcgtattgggaaaagcagaaccccagtcacaacaagtgcctccgaagttgcaatagcgagaaagactcctacaggaaccaagcatgccacgctcgttgcaacctccttaaggtggaggaagaagaagaatgcgaagaaggtcaaat

SEQ ID NO: 110902 - DNA, 260 bp, Glycine max
gaataattaagaaaagccatttccatagcagcctaagaaaatgaagagcactagcttgttcgctatctttctactttgcgccttcacctcatacctaccttccgccaccgcccaggacgtgctcgacgtggatggcgatccgattcggaacggtttcatatactacgttttgccggcaataagaggaaacggtggcggaatagaacgagccgcactcgggaaagacacttgccctatcactgtagtgcaatctcccaatc

SEQ ID NO: 110903 - DNA, 247 bp, Glycine max
cttaggtggaaccaggaagctgaaaggagagttgtggcttagagccctttttgcatgtgctaccacacttttgtccttttgggcactagttagtgtgcgtagcataaataagaacgaataaaacaacaaaggctttgctgccctttgttaagtataaaataacgggtaatgtaattgtacccttgtgtaatgagtcactcaagtacctatgcgggaaaatcataaattaaaagagaaatttcaatga

SEQ ID NO: 110904 - DNA, 262 bp, Glycine max
cacgcccacctcatcagaaggaagagcgaaagccagaggaagatgaggatgaggagcagcagcgagagagcgaagaaagtgaagattctgagttacgaagacataagaataagaacccttttctcttcggctctaacaggttcgaaactctcttcaaaaaccaatatggtcgcattcgcgtcctccagaggttcaaacaacgctccccaaaaatttaggatctccgagactaacgcatttttggagtccaatccaaacccac

SEQ ID NO: 110905 - DNA, 259 bp, Glycine max
atcctagtataccttaataaataatttaagatactatgatgagagcacggttcccattactgttgctgggacttgttttcctggcttcagtttctgtctcatttggcattgcttactgggaaaaagagaaccccaaacacaacaagtgtctccagagttgcaatagcgagagagactcgtacaggaaccaagcatgccacgctcgttgcaacctccttaaggtggagaaagaagaatgtgaagaaggtgaaattccacg

SEQ ID NO: 110906 - DNA, 257 bp, Glycine max
  unsure (1)..(257): unsure at all n locations
aaaccatttacttcccccccaccgaaactagccgtaggttgacctccttccaccccgaaatcgaagaacttctttacagctctgtggagaatgaagaacacatatgcgtgctgaaggaccgcagcaagccncattatcttcaccatggcaaggttggaccgtgtgaagaacatcacaggactcgtggagtggtacggtaagaacgcgaantgagggagttggtgaaccttgtggttgttgccggagacaggaggaag

SEQ ID NO: 110907 - DNA, 258 bp, Glycine max
taattattaacacttccttagttcaatatggggaagcccttcactctctctctttcttccctttgcttgctactcttgtcgagtgcatgctttgctattagctccagcaagctcaacgagtgccaactcaacaacctcaacgcgttggaacccgaccaccgcgttgagtccgaagtggtttgattcaaacatggaactctcaacaccctgagctgaaatgcgccggtgtcactgtttccaaactcaccctcaaccgca

SEQ ID NO: 110908 - DNA, 256 bp, Glycine max
aagatgaccagaagcttctgttgtatcttcagcagaaaatctcttcaggtgaagatttgagtgatcttgctgtggaatattcactatgcccatccaaagaagaaggagacatgcttgggtgggtcagaaaggggcacaatggttcctgaatttgaagaggctgcatttactgcacctttaaaccaagttgtaaggtgcaaaacgaaatttggatggcacctgctgcaggttttatctgacagggaagaatcaattc

SEQ ID NO: 110909 - DNA, 253 bp, Glycine max
gaaagatttgttggagggaaatttttcctttgatattaaatctcgctctagattggaaaaagtttcctctacaaaagcacaatttactagtggaaaaaccttcaaatatgatataattggtgctggttcacattcttcagaaaattttcctgaaaaggaagatcaagaaaaacccaaaaagattgatgccagattgagacaaagaatagatcctcaatacaatgaggttcaggctcagatggaaacaaatttg

SEQ ID NO: 110910 - DNA, 254 bp, Glycine max
gccatgactgatatggacagtaccaatatctatgcctacatttccatcattgctctaattgtctgtataccacctgccgtaattttggaagggcctacactgttgaagcacggcttcaatgatgccattgctaaagtaggtttggtcaagttcgtctcagatctcttctgggttggtatgttttaccatctctacaaccaggtggctaccaacacactggagagagtggctcctctcactcatgcagttgggaa

SEQ ID NO: 110911 - DNA, 252 bp, Glycine max
cacgcccacctcatcagaaggaagagcgaaagcaagaggaagatgaggatgaggagcagcagcgagagagcgaagaaagtgaagattctgagttacgaagacataagaataagaacccttttctcttcggctctaacaggttcgaaactctcttcaaaaaccaatatggtcgcattcgcgtcctccagaggttcaaccaacgctccccacaacttcagaatctccgagactaccgcattttggagttcaact

SEQ ID NO: 110912 - DNA, 259 bp, Glycine max
aattaagaaaagccatttccatagcagcctaagacaatgaagagcactagcttgttcgctatctttctactttgcgccttcacctcatacctaccttccgccaccgcccaggacgtgctcgacgtggatggcgatccgattcggaacggtttcatatactacgttttgccggcaataagaggaaacggtggcggaatagaacgagccgcactcgggaaagacacttgccctatcactgtagtgcaatctcccaatccaa

SEQ ID NO: 110913 - DNA, 232 bp, Glycine max
cactttccttagttcaatatggggaagcccttcttcactctctctctttcttccctttgcttgctactcttgtcgagtgcatgctttgctattacctccagcaagttcaacgagtgccaactcaacaacctcaacgcgttggaacccgaccaccgcgttgagtccgaaggtggtcttattgaaacatggaactctcaacaccctgagctgcaatgcgcggtgtcatgtttcc

SEQ ID NO: 110914 - DNA, 263 bp, Glycine max; identical to SEQ ID NO: 110814

SEQ ID NO: 110915 - DNA, 257 bp, Glycine max
ctcgagccggttttttttgttcctcactgaccaagccatggcgatgagaaccaaactttctttagctatctttttcttttttctgttagccttattttcaaacctagcctttggcaaatgtaaagaaaccgaggtagaagaagaagaccctgagctcgtaacatgcaaacaccaatgccaacagccacagcaatacactgagggtgacaagcgggtatgcttgcaaagatgtgacaggtatcatcgtatgaagcaag

SEQ ID NO: 110916 - DNA, 259 bp, Glycine max; identical to SEQ ID NO: 104329

SEQ ID NO: 110917 - DNA, 257 bp, Glycine max
aaatgaccaagttcacaatcctcctcatctctcttctcttctgcatcgcccacacttgcagcgcctccaaatggcagcaccagcaagatagctgccgcaagcagctccagggggtgaacctcacgccctgcgagaagcacatcatggagaagatccaaggccgcggcgatgacgatgatgatgatgacgacgacaatcacattctcaggaccatgcggggaagaatcaactacataagggggaacgaaggaacagac

SEQ ID NO: 110918 - DNA, 250 bp, Glycine max
ccgggacgtggcggctgacggcaacgttagggagtccggagacgtcggcgggggccccggaaagagttatcttttctgtttaacagcctgcccaccctggaaacggctcagccgaggtagggtccagcggctggaagagcaccgcacgtcgcgtggtgtccggtgcgcccccggcggcccttgaaaatccggaggaccgagtgcctcccacgcccggtcgtactcataaccgcatcaggtctccaaggtg

SEQ ID NO: 110919 - DNA, 252 bp, Glycine max
ctcgagccgcgcctcacgagggtcaccaacggcacgtgcctttcgggggccgaggctccatactgatggttggcaaacggacggcgggcgcacgcgtcgcttgtagcccggattctgactgagacgcgttcagtcataatccaacggacggtagcttcgcgccactggcttatcaagcaagcgcgatgacgaattgtgcgaatcaacggttcctctcgtactaggttgaattagtattgcgacactgtcatc

SEQ ID NO: 110920 - DNA, 251 bp, Glycine max
gttcactatcctagtataccttaataaataatttaagatactatgatgagagcacggttcccattactgtacctgggacttgttttcctggcttcagtttctgtctcatttggcattgcttactgggaaaaagagaaccccaaacacaacaagtgtctccagagttgcaatagcgagagagactcgtacaggaaccaagcatgccacgctcgttgcaacctccttaaggtggagaaagaagaatgtgaaga

SEQ ID NO: 110921 - DNA, 252 bp, Glycine max
aaagaatttaagatatactatgatgagagcgcggttcccattactgttgctgggagttgttttcctggcatcagtttctgtctcatttggcattgcgtattgggaaaagcagaaccccagtcacaacaagtgcctccgaagttgcaatagcgagaaagactcctacaggaaccaagcatgccacgctcgttgcaacctccttaaggtggaggaagaagaagaatgcgaagaaggtcaaattccacgaccacg

SEQ ID NO: 110922 - DNA, 256 bp, Glycine max
caatatcctagtataccttaataaataatttaagatactatgatgagagcacggttcccattactgttgctgggacttgttttcctggcttcagtttctgtctcatttggcattgcttactgggaaaaagagaaccccaaacacaacaagtgtctccagagttgcaatagcgagagagactcgtacaggaaccaagcatgccacgctcgttgcaacctccttaaggtggagaaagaagaatgtgaagaaggtgaaa

SEQ ID NO: 110923 - DNA, 203 bp, Glycine max
ttaacactttccttagttcaatatggggaagcccttcttcactctctctctttcttccctttgcttgctactcttgtcgagtgcatgctttgctattacctccagcaagttcaacgagtgccaactcaacaacctcaacgcgttggaacccgaccaccgcgttgagtccgaagtggtcttattgaaacatggaactctcaaca

SEQ ID NO: 110924 - DNA, 246 bp, Glycine max
aaacactcatcagtcatcaccatggccaagctagttttttccctttgttttctgcttttcagtggctgctgcttcgctttcagttccagagagcagcgtcagcaatacgagtgccagatccaaaaactcaatgccctcaaaccggataaccgtatagagtcagaaggatggctcattgagacatggaaccctaccaagacgccattccagtgtgccggtgttgcactctctcggtgcaccctcaac

SEQ ID NO: 110925 - DNA, 251 bp, Glycine max
ctcgagcggaagaatgtgaagaaggtgaaattccacgaccacgacgacgaccacaacacccggtgagggaaccacagcaacccggtgagaaggaggaagacgaagatgagcaaccacgtccaatcccattcccacgcccacaacctcgtcaagaagaagagcacgagcagagagaggaacaggtatggcctcgcaaggaggacaaacgcgcagaaaagggcagtgaagaggaagatgaggatgaggatgag

SEQ ID NO: 110926 - DNA, 121 bp, Glycine max
agttcacaatcctcctcatctctcttctcttctgcatcgcccacacttgcagcgcctccaaatggcagcaccagcaagatagctgccgcaagcagctccagggggtgaacctcacgccctg

SEQ ID NO: 110927 - DNA, 254 bp, Glycine max
gcaacaacaacaagcaccatctaaggaaacaaaggcacagagtgatgaatcagttaaagacagcagcactgaagggcttccaatggaggatagtccctatgtgaaatacaaggatttggaggattataagcgtcagggttatggtacacaaggtcatcaagaaccaaagacaggtcgtggagctggagccactgaagcacccactctctctggtgctgcagtttcatctgatgcataagtcgctgccactgatg

SEQ ID NO: 110928 - DNA, 254 bp, Glycine max
  unsure (1)..(254): unsure at all n locations
gtatcattggtcttgaatgacacacccatgatcggcactcttgcaggggcaaactcattgttgaacgcattaccagaggacgtgattcagcacactttcaacctaaaaagccagcaggccaggcagataaagaacaacaaccctttcaagttcctggtagcacatacaaagtgggctctatgncacagctctcttctgagactcctgaggtggaaccaggaacttgacagagagctgtggcttagagccctttt

SEQ ID NO: 110929 - DNA, 263 bp, Glycine max
cttttgcttcactctacgcagatcgcagcaaaccagagattgcactccgacgatgcctcccgtcgctcctcgatccggcgatgccatattcgccaacgtcgaacgcgtcaatgcggactgtttactttgacgtatggcgcaattgtgcgtcaattgctcacggatctggaagaggttgaggaggttaacgagcagcttgatcaaatgggttacaatattggaatccgattgattgatgagtttttagctaagtctaatgtctc

SEQ ID NO: 110930 - DNA, 252 bp, Glycine max
gttcaatatcctagtataccttaataaataatttaagatactatgatgagagcacggttcccatgactgttgctggtacttgtgttcctggcttcagtttctgtctcatttggcattgcttactgggaaaaagagaaccccaaacacaagaagtgtctccagagttgcaatagcgagagagactcgtacaggaagcaagcatgccacgctcgttgcaacctccttaaggtggagaaagaagaatgtgaagaa

SEQ ID NO: 110931 - DNA, 251 bp, Glycine max
gttcaatatcctagtataccttaataaataatttaagatactatgatgagagcacggttcccattactgttgctgggacttgttttcctggcttcagtttctgtctcatttggcattgcttactgggaaaaagagaaccccaaacacaacaagtgtctccagagttgcaatagcgagagagactcgtacaggaaccaagcatgccacgctcgttgcaacctccttaaggtggagaaagaagaatgtgaaga

SEQ ID NO: 110932 - DNA, 254 bp, Glycine max
ctcatcaaaaggaagaggaaaagcacgaatggcaacacaagcaggaaaagcaccaaggaaaggaaagtgaagaagaagaagaagaccaagacgaggatgaggagcaagacaaagagagccaagaaagtgaaggttctgagtctcaaagagaaccacgaagacataagaataagaacccttttcacttcaactctaaaaggttccaaactctcttcaaaaaccaatatggccacgttcgcgtcctccagaggttc

SEQ ID NO: 110933 - DNA, 250 bp, Glycine max
gaaaaagttagggtttgtaactttgtcttttgcttgcgaatctgaatcgaataataatcaatcaatcatcatgtcgtcggcgaagaagatcacactgaagagttcggacggcgaggctttcgaggtggacgaggcggtggcgctggagtctcagacgataaagcacatgatcgaggacgactgcgccgacagcggcatccctctgccgaacgtgacgagcaagatcctggcgaaggtgatcgagtactgc

SEQ ID NO: 110934 - DNA, 254 bp, Glycine max
cttattaacactttccttagttcaatatggggaagcccttcttcactctctctctttcttccctttgcttgctactcttgtcgagtgcatgctttgctattacctccagcaagttcaacgagtgccaactcaacaacctcaacgcgttggaacccgaccaccgcgttgagtccgaaggtggtcttattgaaacatggaactctcaacaccctgagctgcaatgcgccggtgtcactgtttccaaacgcaccctc

SEQ ID NO: 110935 - DNA, 254 bp, Glycine max
aaacgaagaaaatcattccaatacacatggcttccgaaaggcaagcgttgatgcttattctcttaacaacattcttctgcaccataaagccttcacaggccagtactactggtggcataacaatctactgggcgccaaaacattgacgacggcaccttgacttccacatgcgacactggaaacttcgagattgtcaacctagctttcctcaatgcgtgtggctgcggcataactccatcatggcacttcgctgg

SEQ ID NO: 110936 - DNA, 249 bp, Glycine max
atcctagtataccttaataaataatttaagatactatgatgagagcacggttcccattactgttgctgggacttgttttcctggcttcagtttctgtctcatttggcattgcttactgggaaaaagagaaccccaaacacaacaagtgtctccagagttgcaatagcgagagagactcgtacaggaaccaagcatgccacgctcgttgcaacctccttaaggtggagaaagaagtgtgtgaagaaggtg

SEQ ID NO: 110937 - DNA, 281 bp, Glycine max
gtccttaacgcctctaaacgtcttcccccactcactgttccccttcacgatgccctaggcaaggtcttggcccaagatgttcgcgcccccgatcctctccctccctacccggcctccgtcaaggacggttacgccgtcgtctccgccgaggccccggcgagtatcccgtcgttgccgaatcgagagctggagatgacgctctcggcctcactctctcccctggaactgtcgcttacgtcacaaccggaggaccgatacctgatggtgctgatgcagttgtt

SEQ ID NO: 110938 - DNA, 276 bp, Glycine max
tcggcttcagcatgttgaattgagtggacttcagggagtaacagatgcagggtttcttccattgctggagagctctgaggctggtctggttaaagttaatctaaatggctgtgtaaatctttcagacagagtagttttgtccatggtcaactcacatggatggactctcgaggtgctaagccttgatggttgtaaagagttggtgatgctagcttgatggcaattgcaggcagttgcccattgcttgctgatctcgatgtttccaggtgtgcaatc

SEQ ID NO: 110939 - DNA, 277 bp, Glycine max
gtcgagggcctccaagtctttgttgatggaagatggtactctgtcgctcctaaagaagatgctttcgttgtcaatattggcgacacatttatggctctatcgaatgggatgttcaagagttgcttgcatagagcagttgtaaacacaaaattgtgagaaaatcacttgctttcttcctatgtccaaatagagacaaagtggtcacccctccaaaagatctaatcagctacgaaaattcaagaacatacccagatttcacatggccaagccttcttga

SEQ ID NO: 110940 - DNA, 276 bp, Glycine max
tagtgagaaacctacaaggtgagaacgaagaggaggatagtggagccattgtgacagtgaaaggaggtctaagagtcacagctccagccatgaggaagccacagcaagaagaagatgatgatgatgaggaagagcagccacagtgcgtggagacagacaaaggttgccaacgccaaagcaaaaggagcagaaatggcattgatgagaccatttgcacaatgagacttcgccaaaacattggtcagaattcatcacctgacatctacaaccctcaag

SEQ ID NO: 110941 - DNA, 271 bp, Glycine max
agataatcattccaatacacatggcttccgaaaggcaagcgttgatgcttattctcttaacaacattcttcttcaccataaagccttcacaggccagtactactggtggcataacaatctactggggccaaaacattgacgacggcaccttgacttccacatgcgacactggaaacttcgagattgtcaacctagctttcctcaatgcgtttggttgcggcataactccatcatggaacttcgctggccactgtggggactggaacccttg

SEQ ID NO: 110942 - DNA, 270 bp, Glycine max
gcaaaggattctacccgccgctcgatgggaattgcgcttcaaggcgtctcgtagggctaatccgcctcacgagggtcaccaacggcacgtgcctttggggggccgaggccccctactgctggtcggcaaacggacggcggggcacgcgtcgcttctagcccggattctgacttagaggcgttcagtcataatccaacgcacggtagcttcgcgccactggctagtcaaccaagcgcgatgaccaattgtgcgaatcaacggttcctctcg

SEQ ID NO: 110943 - DNA, 270 bp, Glycine max
taaaattcttccaccaagttatgggtttccttgtgttgcttcttttctccctcttaggtctctcttctagttccagcatatcaactcatcgttccatattggaccttgacctaaccaagtttaccacacagaaacaggtgtcttcactgttccaactatggaagagtgagcatggacgtgtctaccataaccacgaagaagaggcaaagagacttgagattttcaagaataacttgaactatatcagggacatgaatgcaaacagaaaat

SEQ ID NO: 110944 - DNA, 263 bp, Glycine max
  unsure (1)..(263): unsure at all n locations
gtagaatttgcaagagtaatgcttgctggtgtaaatcaaacttgattcttgtcttaagagttcctccacgaggcagctagatagccaagtctatggtgatcatactagtcaaataaaccaagaacacctagagcccaatttagaagggctcactgtagatgaggcaattcaaaacaagagattgttcctactagatcatcatgacccaatcatgccatatttgaggcggatanatgcaactccaacaaagcttnatgctacag

SEQ ID NO: 110945 - DNA, 265 bp, Glycine max
ttcttttttcccgcagtcatgggcaaggtcaagatcggaatcaacggatttggaagaattggccgtttggtggccagggtggctctgcagagagacgatgttgaactcgttgccgttaacgatcctttcattaccaccgatacatgacatacatgtttaaatacgacagtgttcacgggcactggaagcatcacgatgtcaccgttaaggatgagaagacccttctcttcggtgacaagccagtcactgtttttggacacaggaa

SEQ ID NO: 110946 - DNA, 263 bp, Glycine max
aacattctctccattgtctttgaacactcatcaccatggccaagcttgttctttccctttgtttccttcctttcagtggctgcttcgctctgagagagcaggcacagcaaaatgagtgccagatccaaaagctgaatgcctcaaaccggataaccgtatagagtcggaaggtgggttcattgagacctggaaccctaacaacaagccattccagtgtgccggtgttgcccactctcgctgcaaccttaacgcaatgccttcgt

SEQ ID NO: 110947 - DNA, 264 bp, Glycine max
  unsure (1)..(264): unsure at all n locations
ctctcttaaggtagccaaatgcctcgtcatctaattagtgacgcgcatgaatggattaacgagattcccactgtccctgtctactatccagcgaaaccacagccaagggaacgggcttggcggaatcagcggggaaagagaccctgttgagcttgactctagtccgactttgtgaaatgacttgagaggtgtaggataagtgggagctggaaacagcgnaagtgaaataccactacttttaacgttattttacttattccgtga

SEQ ID NO: 110948 - DNA, 267 bp, Glycine max
aattagggttttccaattcacagagcaacacaacgaaccaacaatggcgcagctcagccgcagtcgcagccgcagcacgggcaagcagcgctggagcaggtgcagtgcttcggtcgcaagaagaccgccgtggccgtgactactgcaagcgcgggcgcggtctcatcaagatcaacggctgccccattgagctcgtggagccggagatcctccgcttcaaggccttcgagcctatcctcctgttgggtaagagccgcttcgccggcg

SEQ ID NO: 110949 - DNA, 267 bp, Glycine max
gaagcatccactttgtttgcaattcgtggatttacaatgccaaactcttcaaaagtgaccgcattttctttgccaaccagacatatcttccaagtgagacaccagctccactagtcaaatatagagaagaagagttgcatatttaagaggagatggaactggagaacgcaaagagtgggaaaggatctatgattatgatgtctacaatgatttaggtgatccggataaaggtgaaaatcatgcccgtcctgttcttggaggaaatga

SEQ ID NO: 110950 - DNA, 257 bp, Glycine max
attgtctttgaacactcatcaccatggccaagcttgttctttccctttgtttccttcttttcagtggctgcttcgctctgagagagcaggcacagcaaaatgagtgccagatccaaaagctgaatgccctcaaaccggataccgtatagagtcggaaggtgggttcattgagacctggaaccctaacaacaagccattccagtgtgccggtgttgccctctctcgctgcaccccttaaccgcaatgccttcgtagac

SEQ ID NO: 110951 - DNA, 277 bp, Glycine max
gtagaacgctgctgccgaaacccttccggaaccctaaggtaagtgagtaatcagtggttgagaatggtagagaaggcgaagggtagaaaggaggaggtggttacacgtgagtacaccattaacctccacaagcgcctccatggctgcacatttaagaagaaagctcctaaagctattaaggagataaggaaatttgcccaaaaggccatggggaccaatgatgtgagggtggatgtgaagttgaacaagtttgtctggagccagggaatcaggagtg

SEQ ID NO: 110952 - DNA, 270 bp, Glycine max
cccaaaaccctaggtagagagctcttcctcactctcattcgcaatggccgcagcagcacgtcctctcgtcaccgtgcaggccctcgacagtgacatggccaccgacgcctccgccaccgtccctatccctgacgtcatgaagtcctccatccgcccggacatcgtcaacttcgtacactccaacatctccaagaacagccgacaaccctatgcagtcagccgccgcgctggccaccagacttccgccgagtcctggggaaccggtcgtgc

SEQ ID NO: 110953 - DNA, 266 bp, Glycine max
gcctcgctctgtttctgtctctgtgtttgcggctgaggattccgaacgagcgaccttcttcgtttctcgcaaagtttaagtcatcatgggtaaggaaaagactcacatcaacattgtcgtcattggacatgtcgactctggaagtcaactaccactggtcatttgatctacaagcttggaggtattgacaagcgtgtgattgagaggttcgagaaggaggctgctgagatgaacaagaggtcattcaagtatgcctgggtgcttga

SEQ ID NO: 110954 - DNA, 270 bp, Glycine max
taacacttccttagttcaatatggggaagcccttcactctctctctttcttccctttgcttgctactcttgtcgagtgcatgctttgctattagctccagcaagctcaacgagtgccaactcaacaacctcaacgcgttggaacccgaccaccgcgttgagtccgaaggtggtttgattcaaacatggaactctcaacaccctgagctgaaatgcgccggtgtcactgtttccaaactcaccctcaaccgcaatggcctccacttgccat

SEQ ID NO: 110955 - DNA, 271 bp, Glycine max
cagacagaggaactactcagcttagcttgagtattttcaagaggggatcaaagggaagaagaagggaaggactcaaacttgcacacgcaacctttggttcctttaccaacactcaccatggtggcagattctaagtccaattccgacctctccttcggaaaaatctttgccagcagtgctttctctgcatgtttcgctgaggtgtgtactattcctttggatactgccaaagtgaggcttcagcttcaaaagcaagctgtagctggtgatg

SEQ ID NO: 110956 - DNA, 264 bp, Glycine max
gccatttatgacatctgcaggcgttcactggacattgagaggccaacctacaccaaccttaatcgtttagtttctcaggtgatatcatcactgactgcttccctgaggtttgatggagccttgaatgttgatgtcaatgaattccagaccaaccttgtgccataccccaggattcattttatgctttcatcttatgctcctgtaatttcagccgagaaggctcaccatgagcagctatcagttggtgaaatcaccaacagtgca

SEQ ID NO: 110957 - DNA, 263 bp, Glycine max
ataggatccatctgccccacatggacttcgacttctgatagaggactacccttatgctgttgatgggctagagatatgggctgcaattaagacatgggtccaagaatatgtgtccttgtactatgcaagagatgatgatgtcaaacctgattctgaactccaacagtggtggaaagaagctgtagagaaaggtcatggtgatctgaaagacaagccatggtggcctaagttgcaaacaattgaagagcttgttgaaatttgca

SEQ ID NO: 110958 - DNA, 233 bp, Glycine max
cttctaaaaaaataaaattaagaaattttcatggtaaccattcgtgcagatgaaattagtaaaattatccgtgaacgcattgagcaatataatacggaagtacaaattgtaaatacgggtacgtacttcaataggcgacggtattgctcgtatttatggtcttgatgaagtaatggcgggtgaattagtggaatttgaagagggtactataggcattgctttgaatttggaat

SEQ ID NO: 110959 - DNA, 253 bp, Glycine max
actctaagcctccactgcatccacatccaccttatgtcccaaaaccaccagttgttaaaccaccctatgtcccgaagccaccagttgtgaaccctccctatgtcccaaaaccaccagttgtgccagttacaccaccatatgttccaaaaccaccaattgtgaaccctccttatgtcccaaaaccacctgttgtcccagttagaccaccatatatcccaaaaccaccagttgtgccagttacaccaccttatgt

SEQ ID NO: 110960 - DNA, 266 bp, Glycine max
tgcatccaaaatgccaggtcttaccatcggagacactattcctgatcttcaagttgaaactaaccaaggcaaaatcaagcttcatcagttctgtgctgatggctggaccatccttttctctcacccaggtgatttcacccggtttgtaccactgagcttggtaagatggctcagtatgctaaggagttttatcaacgaggagtgaagctcttaggtttatcttgtgatgatgagcaatcccacaatgagtggatcaaagacattga

SEQ ID NO: 110961 - DNA, 266 bp, Glycine max
taaaattcttccaccaagttatgggtttccttgtgttgcttcttttctccctcttaggtctctcttctagttccagcatatcaactcatcgttccatattggaccttgacctaaccaagtttaccacacagaaacaggtgtttcactgttccaactatggaagagtgagcatggacgtgtctaccataaccacgaagaagaggcaaagagacttgagattttcaagaataacttgaactatatcagggacatgaatgcaaacagaa

SEQ ID NO: 110962 - DNA, 267 bp, Glycine max
agtttgcatttccgggatgtcctgagacgtttgagaagccacaacagcaatcaagcagaagaggctcaaggtcgcagcagcaactacaagacagtcaccagaagattcgtcacttcaatgaaggagacgtactagtgatcctcctggtgttccttactggacctataacactggcgatgaaccagttgttgccatcagtcttcttgacacctccaacttcaacaatcagcttgatcaaaaccccagagtattttaccttgctgggaa

SEQ ID NO: 110963 - DNA, 277 bp, Glycine max
gggccatacttggaaacttacactgaggatgttgctcatgagcttgccaaagagttgcaaggcaagccagatctgattgtcggaaactacagtgatggaaacattgttgcctctttgttggcacataaattaggagtcactcagtgtaccattgctcatgcacttgagaagaccaaataccccgaatccgacatttactggaaaaaattggaagagagataccacttctcttgccaattcacagctgatctatttgccatgaaccacacagatttca

SEQ ID NO: 110964 - DNA, 274 bp, Glycine max
attgcaatcaaattagttcattctctttgcgcagttccctacctctcctttcaagatgcagatcttcgtcaagaccctcaccggaaagaccatcacccttgaggtggaaagctctgacaccatcgacaacgtcaaggccaagatcaggacaaggaaggaattcccccggatcagcaacgtctcatcttcgccggaaagcagctcgaggacggccgtaccctcgccgactacaacatccagaaggagtcaacccttcacctggtccttcgtctcc

SEQ ID NO: 110965 - DNA, 258 bp, Glycine max
cttaattattaacacttccttagttcaatatggggaagcccttcactctctctctttcttccctttgcttgctactcttgtcgagtgcatgctttgctattagctccagcaagctcaacgagtgccaactcaacaacctcaacgcgttggaacccgaccaccgcgttgagtccgaaggtggttgattcaacatggaatctcaacacctgagctgaatgcgcggtgtcatgtttccaactcacctcaacgcatgggctc

SEQ ID NO: 110966 - DNA, 266 bp, Glycine max
gcaaagcaatggctacttcaaagttgaaaacccagaatgtggttgtatctctctccctaaccttaaccttggtactggtgctactgaccagcaaggcaaactcagcggaaactgtttctttcagctggaacaagttcgtgccgaagcaaccaaacatgatcctccaaggagacgctattgtgacctcctcgggaaagttacaactcaataaggttgacgaaaacggcaccccaaaaccctcgtctcttggtcgcgccctctactcc

SEQ ID NO: 110967 - DNA, 268 bp, Glycine max
cgactccttccactcacctccctccgccacctctccatcgccgcctcgcgtcgcctcctctcctctgcactccccgtcgctccccgcccctatccgcccctcaccgcccgcttcgccgtcgtccggtgcctctgcaaccgcccggagactcggcgtactcgcccctgaacacgggaaagcccacctccatcttgtcgtcgatcacggagcgccctccgacggacatggcgcccctgttcccgggctgcgactaccatcactggctcgt

SEQ ID NO: 110968 - DNA, 267 bp, Glycine max
gtcctattcaggaagtgcatggagcccgtggagaagtgtttgcgggatgctaagatggacaagagcaccgtccatgatgttgttcttgtcggtggttctactaggattcccaaggttcaacagttgttgcaggacttctcaacggaaaggagctttgcaagagcattaacccagatgaagctgttgcctatggtgcagcagtgcaggctgccattctcagtggcgagggtaatgagaaagtgcaggatcttctgttgttggatgtta

SEQ ID NO: 110969 - DNA, 267 bp, Glycine max
aagccagatacctagtcaagtgcaggagcttgcattccctgggtctgcacaagctgttgagaagctattaaagaaccaaagagaatcctactttgtggatgctcagcctaagaagaaagaggaggggaataagggaagaagggtcctttgtcttcaattttgagggctttttactgaataagtatgtactaaaatgtatgctgtaatagctcatagtgagcgaggaaagtatcgggctatgtaactatgactagagcttcaactatg

SEQ ID NO: 110970 - DNA, 265 bp, Glycine max
tgagacgtttgaggagccacaagaacaatcaaacagaagaggctcaaggtcgcagaagcagcagctacaggacagtcaccagaagattcgtcacttcaatgaaggagacgtactcgtgattcctcctggtgttccttactggacctataacactggcgatgaaccagttgttgccatcagtcttcttgacacctctaacttcaataaccagcttgatcaaacccctagggtattttaccttgctgggaacccagatatagagtac

SEQ ID NO: 110971 - DNA, 264 bp, Glycine max
ctccattgtctttgaacactcatcaccatggccaagcttgttctttccctttgtttccttcttttcagtggctgcttcgctctgagagagcaggcacagcaaaatgagtgccagatccaaaagctgaatgccctcaaccggataaccgtatagagtcggaaggtgggttcattgagacctggaaccctaacaacaagccattccagtgtgccggtgatgccctctctcgctgcacccttaaccgcaatgcccttcgtagacctt

SEQ ID NO: 110972 - DNA, 263 bp, Glycine max
gaaccacttactatttggttaaccctcacgaccaccagaatctcaaaataatcaaacttgccatacccgtcaacaaacctggcagatatgatgatttcttcttatctagcactcaagcccaacagtcctacttgcaagcttcagccataatattctagagacctccttccatagcgaattcgaggagataaacagggttttgtttggagaggaagaggagcagaggcagcaagagggagtgatcgtggaactctcaaaggaac

SEQ ID NO: 110973 - DNA, 261 bp, Glycine max
tctccattgtctttgaacactcatcaccatggccaagcttgttctttccctttgtttccttcttttcagtggctgcttcgctctgagagagcaggcacagcaaaatgagtgccagatccaaaagctgaatgccctcaaccggataaccgtatagagtcggaaggtgggttcattgagacctggaaccctaacaacaagccattccagtgtgccggtgttgccctctctcgctgcacccttaaccgcaatgcccttcgtaga

SEQ ID NO: 110974 - DNA, 264 bp, Glycine max
gaacaaactccctcttatcctccacgacgaccaagccatggaaagcatgaagatgacgaggacgaggacgaagaagaagatcaacctcgtcctgatcaccctccacagcgaccaagcaggcccgaacaacaagaaccagtggaagaggatgtcagactagaaatggggttgaggaaaatatttgcaccatgaagcttcacgagaacattgctcgcccttcacgtgctgacttctacaacccaaaagctggtcgcattagcaccc

SEQ ID NO: 110975 - DNA, 261 bp, Glycine max
caacaccagtaggcactgcgatcaaatcaccctctctgaagcgatgtacaacaatgaagacactcctgttgttgccgtttctattattgacaccaacagcttggagaaccagctcgaccagatgcctaggagattctacttgctgggaaccaagagcaagagtttctaaaatatcagcagcagcagcaaggaggttcccaaagccagaaaggaaagcaacaagaagaagaaaacgaaggaagcaacatattgagtggcttc

SEQ ID NO: 110976 - DNA, 264 bp, Glycine max
aacttattaacactttccttagttcaatatggggaagcccttcttcactctctctctttcttccctttgcttgctactcttgtcgagtgcatgctttgctattacctccagcaagttcaacgagtgccaactcaacaactcaacgcgttggaacccgaccaccgcgttgagtccgaaggtggtcttattgaaacatggaactctcaacaccctgagctgcaatgcgccggtgtcactgtttccaaacgcaccctcaaccgcaac

SEQ ID NO: 110977 - DNA, 273 bp, Glycine max
attccttcacttgcagcactgttgcatcatcatcttcattgcaaaaccctaaacttcaccttcaaccatgaccacacaagtaccaccacacagtgtccaagtccacacaacaacacaccgctacgaagctggcgtcgtccccccggagcccgtttcgaaccgccgcgttatgaagccggcgtcaaagcgccctccatttaccattccgagagaggtccaacgacttcccaggtcctcgccgtcctcgccggcctcccggtcggtggcatcctg

SEQ ID NO: 110978 - DNA, 266 bp, Glycine max
gttcaatatcctagtataccttaataaataatttaagatactatgatgagagcacggttcccattactgttgctgggacttgttttcctggcttcagtttctgtctcatttggcattgcttactgggaaaaagagaacccaaacacaacaagtgtctccagagttgcaatagcgagagagactcgtacaggaaccaagcatgccacgctcgttgcaacctccttaaggtggagaaagaagaatgtgaagaaggtgaaattccacga

SEQ ID NO: 110979 - DNA, 264 bp, Glycine max
cagagatgacgacccgattcaagaagaaccgcaagaagcgcggccacgtgagcgccggtcatggccgtatcggaaagcaccgtaagcaccccggcggccggggaaacgccggtggcatgcatcaccacaggttcttttcgacaagtaccatccgggcttcttcgggaaggtgggaatgaggtacttccataagcttcgcaataaattctactcccccatcgtcaacgtcgaaaagctatggtctctcataccccaagacgcgaa

SEQ ID NO: 110980 - DNA, 265 bp, Glycine max
gttcaatatcctagtataccttaataaataatttaagatactatgatgagagcacggttcccattactgttgctgggacttgttttcctggcttcagtttctgtctcatttggcattgcttactgggaaaaagagaacccaaacacaacaagtgtctccagagttgcaatagcgagagagactcgtacaggaaccaagcatgccacgctcgttgcaacctccttaaggtggagaaagaagaatgtgaagaaggtgaaattccacg

SEQ ID NO: 110981 - DNA, 265 bp, Glycine max
atcctagtataccttaataaataatttaagatactatgatgagagcacggttcccattactgttgctgggacttgttttcctggcttcagtttctgtctcatttggcattgcttactgggaaaaagagaaccccaaacacaacaagtgtctccagagttgcaatagcgagagagactcgtacaggaaccaagcatgccacgctcgttgcaacctccttaaggtggagaaagaagaatgtgaagaaggtgaaattccacgaccacg

SEQ ID NO: 110982 - DNA, 120 bp, Glycine max
tcaatatcctagtataccttaataaataatttaagatactatgatgagagcacggttcccattactgttgctgggacttgttttcctggcttcagtttctgtctcatttggcattgctta

SEQ ID NO: 110983 - DNA, 263 bp, Glycine max
gctttgctattacctccagcaagttcaacgagtgccaactcaacaacctcaacgcgttggaacccgaccaccgcgttgagtccgaaggtggtcttattgaaacatggaactctcaacaccctgagctgcaatgcgcggtgtcactgtttccaaacgcaccctcaaccgcaacggcctccactatgccatcttactcaccttatccccaaatgatcattgtcgttcaagggaagggagcaattggatttgcatttccgggatgt

SEQ ID NO: 110984 - DNA, 261 bp, Glycine max
cggctcgagattggtccttaaacactcatcagtcatcaccatggccaagctagttttttccctatgttttctgcttttcagtggctgctgcttcgctttcagttccagagagcagcctcagcaaaacgagtgccaatccaaaaactcaatgccctcaaaccggataaccgtatagagtcagaaggagggctcattgagacatggaaccctaacaacaagccattccagtgtgccggtgttgccctctctcgctgcaccctc

SEQ ID NO: 110985 - DNA, 259 bp, Glycine max
actccttcaaacttattaacactttccttagttcaatatggggaagcccttcttcactctctctctttcttccctttgcttgctactcttgtcgagtgcatgctttgctattacctccagcaagttcaacgagtgcaactcaacaacctcaacgcgttggaacccgaccaccgcgttgagtccgaaggtggtcttattgaaacatggaactctcaacaccctgagctgcaatgcgccggtgtcactgtttccaaacgca

SEQ ID NO: 110986 - DNA, 266 bp, Glycine max
ggggaagagatccagcagcaatggtgtacgtcaaggctcagaaatcaaaagcctacttcaagagatatcaagtcaagttcaagagaagaagagagggaaaaaccgattaccgtgccaggattcggttgattaatcaggcaagaacaaatataacactccgaaataccgatttgtggttcgctttagcaacaaggacattgttgcacaaataatatctgctagcattgccggcgatttagttcttgctacagcatattcacatgagc

SEQ ID NO: 110987 - DNA, 275 bp, Glycine max
gattaataaccatgaaaaggcttatttgagaacaattacatcaaagttgccgactctcattagcctttcagtgatagagatcttgtcgacacatgcttctgatgaggtctaccttggccagagggacaacccacattggaccctgattcaaaagcattacaagcctttcaaaagtttggaaacaagctcaaggaaattgaggaaaaacttgtgaggaggaacaatgatccgagtctgcagggcaatcgactttggccggttcaactgccatacac

SEQ ID NO: 110988 - DNA, 263 bp, Glycine max
ctcatcaccatggccaagcttgttctttccctttgtttccttcttttcagtggctgcttcgctctgagagagcaggcacagcaaaatgagtgccagatccaaaagctgaatgcccttcgtagaccttcctacaccacggtccccaggaaatctacatacaacaaggtaatggtatttttggcatgatattcccgggttgtcctagcacttatcaagagccgcaagaatctcagcaacgaggacgaagccagaggccccaagac

SEQ ID NO: 110989 - DNA, 263 bp, Glycine max
atatcctagtataccttaataaataatttaagatactatgatgagagcacggttcccattactgttgctgggacttgttttcctggcttcagtttctgtctcatttggcattgcttactgggaaaaagagaacccaaacacaacaagtgtctccagagttgcaatagcgagagagactcgtacaggaaccaagcatgccacgctcgttgcaacctccttaaggtggagaaagaagaatgtgaagaaggtgaaattccacgacc

SEQ ID NO: 110990 - DNA, 257 bp, Glycine max
gtcaacgggcgagtaaacccgtaaggcgcaaggaagctgattggtgggatccccctgtaggttgcaccgccgaccgaccctgatcttctgtgaagggttcgagtgagagcatacctgtcgggacccgaaagatgtgaactatgcctgagcggggcgaagccagaggaaactctggtggaggcccgcagcgatactgacgtgcaaatcgttcgtctgacttgggtataggggcgcacgactaatcgaaccgtctagta

SEQ ID NO: 110991 - DNA, 261 bp, Glycine max
gtgagactgaggttgggtttggaaggcaagggcttgtgttgtcacaatccaagagagaagtaatggcgaacatagacatcgaagggatcttgaagcagcagcagccttatgatgggcgcgttccgaagacgaagtagtgtgtactttgggccctgcttctcgatccgtagaaatgaccgagaagcttctgagggcagggatgaacgttgctcgtttcaatttctctcatggcacccacgactatcaccaggaaaccctcaa

SEQ ID NO: 110992 - DNA, 120 bp, Glycine max
acgagtgccaactcaacaacctcaacgcgttggaacccgaccaccgcgttgagtccgaaggtggtcttattgaaacatggaactctcaacaccctgagctgcaatgcgccggtgtcactg

SEQ ID NO: 110993 - DNA, 260 bp, Glycine max
ctccattgtctttgaacactcatcaccatggccaagcttgttctatcccttggtttccttctaatcagtggctgcttcgctctgagagagcaggcacagcacaatgagtgccagatccaaaagctgaatgccctcaaccggataaccgtatagagtcggaaggtgggttcattgagacctggaaccctaagaacaagcgattccagtgtgccggtgttgccctctctcgctgcattcttaagcgctatgcgcttcgtaga

SEQ ID NO: 110994 - DNA, 268 bp, Glycine max
gatgataacttgattagtgttcatgaatatgtcaagccttactttagtggttctaaattgaaaagctttctagctggtcataatatcaccattactgatggtattgacaaaactagtgcaactttgcagtttagaaagtagcagattgtgactttctcaagagaaactttaagcagatgtcgaatgtcttgtgggtggctcctgaggacaaggcgagtttatggtcacaacttcattatgtttcgtgtaacaatctggaaatgcaaga

SEQ ID NO: 110995 - DNA, 263 bp, Glycine max
ctccattggtccttaaacactcatcagtcatcaccatggccaagctagttttttccctttgttttctgcttttcagtggctgctgcttcgctttcagttccagagagcagcctcagcaaaacgagtgccagatccaaaactcaatgccctcaaaccggataaccgtatagagtcagaaggagggctcattgagacatggaaccctaacaacaagccattccagtgtgccggtgttgccctctctcgctgcaccctcaaccgca

SEQ ID NO: 110996 - DNA, 262 bp, Glycine max
ctcgagccgtgaaattttgataaaccgcgatcacaggttgccgcaccttaaaaccggaaacaaaagcaatcgttacttgatttcaagaatctctcaatttctttctacttctttgtgtacgatttcttaagggaagaaaatcactctctgtgctggccacagacttcgtgaatcattttcttttccacttttagtttatttgctgaacactctcctatttgatataggacttcgtgtcagatttaaacttcttctgtctctt

SEQ ID NO: 110997 - DNA, 259 bp, Glycine max
aagcgtttggccagcatcagtgtagagaacattgaatccaacaggcgagctcttagggagctgcttttcactgctcctggtgttcttcaatatctcagtggtgtcatcctctttgaggaaaccctctaccagagacagctgcaggcaagccctttgtgaatgtcttgaaggaagctggtgtgcttcctggcatcaaggttgacaagggcacagtcgagcttgctggaactaatggagaaaccaccactcagggtctaga

SEQ ID NO: 110998 - DNA, 263 bp, Glycine max
cagcaggacggtggtcatggaagtcgaaatccgctaaggagtgtgtaacaactcacctgccgaatcaactagccccgaaaatggatggcgctaaagcgcgcgacctatacccggccgtcggggcaaggaccaagcccgatgagtaggagggcgcggcggtcgctgcaaaacccagggcgcgagcccgggcggagcggtcgtcggtgcagatcttggtggtagtagcaaatattcaaatgagaactttgaaggccgaagagggg

SEQ ID NO: 110999 - DNA, 259 bp, Glycine max
caggagtatataatctgagcgatgtcagatctcgaggctcccttgcgccctaagaggaagaaggtttgggtggactattttgttcagtttcgatggatccttgttatttttgtggtccttctcatctccttcacatttatttccttacataccttggggatgtaagatccgagtggaagtcctataagacgcgtcagaaggaacatgatgagaatgtgaagaaggttatcaaacgtctcaaacagaggaatccatcaaa

SEQ ID NO: 111000 - DNA, 230 bp, Glycine max
cttttggttctaaggatgttgatgtgacggaatggaaaggggacattctggcagtgggtgttacggagaaagatttggctagagatgcaaactcgaagtttgagaatgtgattttgagaaagatcgactcaagttgggtggtttattagctgaagcctcttctgaagaggatttctctggcaaagttggtcagtcaatgttcttagaattacaggacttggatcaaagag

SEQ ID NO: 111001 - DNA, 259 bp, Glycine max
acttattaacactttccttagttcaatatggggaagcccttcttcactctctctctttcttccctttgcttgctactcttgtcgagtgcatgctttgctattacctccagcaagttcaacgagtgccaactcacaacctcaacgcgttggaacccgaccaccgcgttgagtccgaaggtggtcttattgaaacatggaactctcaacaccctgagctgcaatgcgccggtgtcactgtttccaaacgcaccctcaaccg

SEQ ID NO: 111002 - DNA, 261 bp, Glycine max
cactttccttagttcaatatggggaagcccttcttcactctctctctttcttccctttgcttgctactcttgtcgagtgcatgctttgctattacctccagcaagttcaacgagtgccaactcaacaacctcacgcgttggaacccgaccaccgcgttgagtccgaaggtggtcttattgaaacatggaactctcaacaccctgagctgcaatgcgccggtgtcactgtttccaaacgcaccctcaaccgcaacggcctca

SEQ ID NO: 111003 - DNA, 258 bp, Glycine max
tgaacactcatcaccatggccaagcttgttctttccctttgtttccttcttttcagtggctgcttcgctctgagagagcaggcacagcaaaatgagtgccagatccaaaagctgaatgccctcaaaccggataacgtatagagtcggaaggtgggttcattgagacctggaaccctaacaacaagccattccagtgtgccggtgttgccctctctcgctgcacccttaaccgcaatgcccttcgtagaccttcctaca

SEQ ID NO: 111004 - DNA, 256 bp, Glycine max
gaagaggatgagaagccacagtgcaagggtaaagacaaacactgccaacgcccccgaggaagccaaagcaaaagcagaagaaatggcattgacgagaccatatgcaccatgagacttcgccacaacattggccagcttcatcacctgacatctacaaccctcaagccggtagcgtcacaaccgccaccagccttgacttcccagccctctcgtggctcagactcagtgctgagtttggatctctccgcaagaatgc

SEQ ID NO: 111005 - DNA, 251 bp, Glycine max
agtacaccgtattaaagaatttaagatatactatgatgagagcgcggttcccattactgttgctgggagttgttttcctggcatcagtttctgtctcatttggcattgcgtattgggaaaagcagaccccagtcacaacaagtgcctccgaagttgcaatagcgagaaagactcctacaggaaccaagcatgccacgctcgttgcaacctccttaaggtggaggaagaagaagaatgcgaagaaggtcaaa

SEQ ID NO: 111006 - DNA, 286 bp, Glycine max
ctccattgtctttgaacactcatcaccatggccaagcttgttctttccctttgtttccttcttttcagtggctgcttcgctctgagagagcaggcacagcaaaatgagtgccagatccaaaagctgaatgccctcaaaccggataaccgtatagagtcggaaggtgggttcattgagacctggaaccctaacaacaagccattccagtgtgccggtgttgccctctctcgctgcacccttaaccgcaatgcccttcgtagaccttcctacaccaacggtccccagg

SEQ ID NO: 111007 - DNA, 239 bp, Glycine max
gttcaatatcctagtataccttaataaataatttaagatactatgatgagagcacggttcccattactgttgctgggacttgttttcctggcttcagtctctgtctcatttggcattgcttactgggaaaaagagaaccccaaacacaacaagtgtctccagagttgcaatagcgagagagactcgtacaagaaccaaacatgctcagctcggtgcaaactccttaaggttgaagaagg

SEQ ID NO: 111008 - DNA, 245 bp, Glycine max
cacgcatctgtcttatggcgcggagttttctcgtgccgtggagcagaagcaggtggctcagcaggaggccgagaggtcgaagtttgtggtgatgaaggccgagcaggagaggcgggcggcgattattagggcggagggagagagtgacgcggcgaactgatttcggatgccactgcgtccggcggggatggggctgattgacttcagaaggattgaggcgtcaaggaaggtcgctgcaaggttgg

SEQ ID NO: 111009 - DNA, 277 bp, Glycine max
cgcctcacaacagcagctgcagcagcaatggctcccaaacgaggtggaaaggctccggctcttgccgctaagaagaagcctgagaaggtcacgaatccgttgttcgagaagcgtccgaagcagttcggaatcggaggggcgttgcctccgaagagagacttgactaggttcgtgaagtggccaaagaatgttcaaattcagaggaagaagaggattctgaagcagaggttgaaggttcccccagctttgaaccagtttaccaatatacttgacaaaa

SEQ ID NO: 111010 - DNA, 278 bp, Glycine max
gattgttcacccaccaataggaagagccgacatcgaaggatcaaaaagcaacgtcgctatgaacgcttggctgccacaagccagttatccctgtggtaacttttctgacacctctagcttcaaattccgaaggactaaaggatcgataggccacgctttcacggttcgtattcgtactggaaatcagaatcaaacgagcttttacccttttgttccacacgagatttctgttctcgttgagctcatcttaggacacctgcgttatcttttaacagatg

SEQ ID NO: 111011 - DNA, 280 bp, Glycine max
atcatttctccatttccattttctctctcacttttcaagaatcgtaagctatgggaaagtcttacccaactgtgagtgctgattaccagaaggccgttgagaaggcgaagaagaagctcagaggcttcatcgctgagaagagatgcgctcctctaatgctccgtttggcatggcactctgctggaacctttgacaagggcacgaagaccggtggacccttcggaaccatcaagcaccctgccgaactggctcacagcgctaacaacggtcttgacatcgc

SEQ ID NO: 111012 - DNA, 277 bp, Glycine max
attcactgtcaccagggatacctctggtgaggttcttggcaggggtactaagatcactctcttcctcaaggaggatcagctagagtaccttgaggagcgccggttgaaggatttgattaagaagcattctgagttcattagctacccaatttctctttgggttgagaagactaccgagaaggagatttctgacgatgaggatgaggaagagaagcaggatgaggagggtaaggtggaggatgttgatgaagagaaggagaaggaagaaaaaaagaaa

SEQ ID NO: 111013 - DNA, 261 bp, Glycine max
caaagaacaaccagaggaatttccttgccaggttcgaaagacattgtgataagccagttacttattcaagtgcaggagcttgcgttccctggggtctgcaaaaggatattgagaacctaattaaagagcaaaagtgagtccaactttgtggatgctcagcctcagcagaaagaggaggggaacaagggaagaaagggtcctttgtcttcaattttgagggctttttactgaataagtatgtagtactaaaatgtatgctgt

SEQ ID NO: 111014 - DNA, 276 bp, Glycine max
cttaattattaacacttccttagttcaatatggggaagcccttcactctctctctttcttccctttgcttgctactcttgtcgagtgcatgctttgctattagctccagcaagctcaacgagtgccaactcaacaacctcaacgcgttggaacccgaccaccgcgttgagtccgaaggtggtttgattcaaacatggaactctcaacaccctgagctgaaatgcgccggtgtcactgtttccaaactcaccctcaaccgcaatggcctccacttgc

SEQ ID NO: 111015 - DNA, 277 bp, Glycine max
ctcgagccgtgggtttgaagaacaacatggtggtgctaaaggtgtgtttggtgctacttatccttgtggggggtactactagtgccaacttgaggctgagtaagcttggcctgctcatgaaaagtgatcatcatcaacactcaaatgatgatgagtcttcaaaaccatgctgtgatcaatgcgcatgcacaaagtcaaaccctcctcaatgccgctgttcagatatgaggctgaattcgtgccattcagcttgcaaatcttgtatttgcgcattatc

SEQ ID NO: 111016 - DNA, 279 bp, Glycine max; identical to SEQ ID NO: 108135

SEQ ID NO: 111017 - DNA, 279 bp, Glycine max
taccgcattttggagttcaactccaaacccaacaccctccttctccccaaccatgctgacgctgattacctcatcgttatccttaacgggactgacattctttccttggtgaacaacgacgacagagactcctacagacttcaatctggtgatgccctgagagtcccctcaggaaccacatactatgtggtcaaccctgacaacaacgaaaatctcagattaataacactcgccatacccgttaacaagcctggtagatttgagagtttcttcctatct

SEQ ID NO: 111018 - DNA, 253 bp, Glycine max
cttaattattaacacttccttagttcaatatggggaagcccttcactctctctctttcttccctttgcttgctactcttgtcgagtgcatgctttgctattagctccagcaagctcaacgagtgccaactcaacaacctcaacgcgttggaacccgaccaccgcgttgagtccgaaagtggtttgattccaacatggaaattctaacaaccttagctggaattcggcgggggcaatggttccaaactcaacct

SEQ ID NO: 111019 - DNA, 265 bp, Glycine max
gtgagaaaagaaggaagaagaagaagaagagatggcaaatgaactacccgtcaaagcttttggttgggctgcttcagacacttctggcacccttgccccttttcatttctccagaagggaaaatggcgtcgatgacgtcactctcaagattctcttctgcggggtttgccactctgatctccaaactctcaaaaacgactggggttcaacaacttaccctgtcgttcctgggcatgaaattgttggtgttgtgacagaggttgga

SEQ ID NO: 111020 - DNA, 274 bp, Glycine max
tgaaggtaaccctcttgaaaatggtggcacatattatatcttgtcagacataacagcatttggtggaataagagcagccccaacgggaaatgaaagatgccctctcactgtggtgcaatctcgcaatgagctcgacaaagggattggaacaatcatctcgtccccatatcgaatccgttttatcgccgaaggcatcctttgagccttaagttcgattcatttgcagttataatgctgtgtgttggaattcctaccgagtggtctgttgtggagg

SEQ ID NO: 111021 - DNA, 276 bp, Glycine max
gtgcgagtcaacgggcgagtaaacccgtaaggcgcaaggaagctgattggtgggatccccctgtgggttgcaccgccgaccgaccctgatcttctgtgaagggttcgagtgagagcatacctgtcgggacccgaaagatggtgaactatgcctgagcggggcgaagccagaggaaactctggtggaggcccgcagcgatactgacgtgcaaatcgttcgtctgacttgggtataggggcgaaagactaatcgaaccgtctagtagctggttccctc

SEQ ID NO: 111022 - DNA, 278 bp, Glycine max
tttagctttctcttccttcataatttctcacctttcaaatctccattcagcttcattttctgcatagaaaaaacccttttctggagaaagaatatagtcttcagctggacaaggatcattcatcttgaaagaagagtttgtgtgtgacaatctttatagttctaaggagggtgcaagagagaactgaatttgctgtgatggcaactcgtagatatgcttttggaagagctgatgaggccactcatccagactccatgagggccactttggctgaattt

SEQ ID NO: 111023 - DNA, 261 bp, Glycine max
atcagaagacaggttcaaaccggagcaaaaaaacttgttacgatggtttcttccgacaaggatccacgagaggaagtccttcaagcatggtacatggatgatagtgatgaagatcaaagactcccccaacaacaaagaccccagggagtttgtctcgttggacaacttgctgaatttggagtcctaagtgggaatttagatgttgataaccatgaaaatgttccagagctaaaaaagattcgtgaagagcgtggctacacc

SEQ ID NO: 111024 - DNA, 272 bp, Glycine max
caatatcctagtacaccgtattaaagaatttaaggtttactatggtgaagagccgcggttccaataactgtttgctgggaattagtttccctggaatcaattcctgtctcattgggaatggcgttttgggaaaagaagatccccagtaacaacaagtgcctccgaagttgcaatagcgagaaagactcctacaggaaccaagcatgccacgctcgttgcaacctccttaaggtggaggaagaagaagaatgcgaagagggtcaaattccacg

SEQ ID NO: 111025 - DNA, 277 bp, Glycine max
cggctcgagtagacacgtaatcaaaaccatgcagatacgaacctgccactccatcaccacccaaacccttccacaacttccgtgttcttctagaaaagcccaccaccgccaccttcttccgccgttaaacgctgcggtttccgcggcgccgttcaaagcccggaaggcccactcaatgcctccagaaaagaaagaaattttcaagtccttggagggatgggcctcggagtgggtcctaccgctgctgaagcccgtggagcaatgctggcagccacaa

SEQ ID NO: 111026 - DNA, 274 bp, Glycine max
aaaattcttccaccaagttatgggtttccttgtgttgcttcttttctccctcttaggtctctcttctagttccagcatatcaactcatcgttccatattggaccttgacctaaccaagtttaccacacagaaacaggtgtcttcactgttccaactatggaagagtgagcatggacgtgtctaccataaccacgaagaagaggcaaagagacttgagattttcaagaataacttgaactatatcagggacatgaatgcaaacagaaaatcaccc

SEQ ID NO: 111027 - DNA, 281 bp, Glycine max
gaagaagtgccctgatgccattccagaccctaaggcggtgcagtacgtgagaaacgaccgtggcactcccatgattctagacaacaactactacagaaacatattagacagcaagggtctcttgatagtggatcaccaactagccaatgacaagaggaccaagccttatgtgaagaaaatggccaagagccaagactatttcttcaaggagttctctagagccattaccttgctctcagagaacaaccctctcactggcacaaagggtgaggtcagaaagc

SEQ ID NO: 111028 - DNA, 175 bp, Glycine max
cttaattattaacacttccttagttcaatatggggaagcccttcactctctctctttcttccctttgcttgctactcttgtcgagtgcatgctttgctattagctccagcaagctcaacgagtgccaactcaacaacctcaacgcgttggaacccgacaccgcgttgagtccgaa

SEQ ID NO: 111029 - DNA, 274 bp, Glycine max
gattaatacttcgttaccaactttgggagcaggagagtctgcattcaatattcattttgaatgggacggaagcatgggaatccccggtgcgttttacataaagaactacatgcaagttgagttcttcctcaagagtttgactcttgaagcaatttcaaaccaaggaaccatccgctttgtttgcaactcatgggtttataacactaaactttacaaaagcgtgcgcattttctttgccaaccatacatatgtacctagtgagacaccagcacca

SEQ ID NO: 111030 - DNA, 274 bp, Glycine max
gcaaaggattctacccgccgctcgatgggaattgcgcttcaaggcgtctcgtagggctaatccgcctcacgagggtcaccaacggcacgtgcctttggggggccgaggccccctactgctggtcggcaaacggacggcgggcgcacgcgtcgcttctagcccggattctgacttagaggcgttcagtcataatccaacgcacggtagcttcgcgccactggcttttcaaacaagcgcgatgaccaattgtgcgaatcaacggttcctctcgtac

SEQ ID NO: 111031 - DNA, 275 bp, Glycine max
attaacacttccttagttcaatatggggaagcccttcactctctctctttcttccctttgcttgctactcttgtcgagtgcatgctttgctattagctccagcaagctcaacgagtgccaactcaacaacctcaacgcgttggaacccgaccaccgcgttgagtccgaaggtggtttgattcaaacatggaactctcaacaccctgagctgaaatgcgccggtgtcactgtttccaaactcaccctcaaccgcaatggcctccacttgccatctt

SEQ ID NO: 111032 - DNA, 268 bp, Glycine max
ctagaaggttgcttcctgagaaaggcaccccagaatatgaagaaatgattaataaccatgaaaaggcttatttgagaacaattacatcaaagttgccgactctcattagcctttcagtgatagagatcttgtcgacacatgcttctgatgaggtctaccttggccagagggacaacccacattggacctctgattcaaaagcattacaagcctttcaaaagtttggaaacaagctcaaggaaattgaggaaaacttgtgaggaggaac

SEQ ID NO: 111033 - DNA, 220 bp, Glycine max
gagagcacggttcccattactgttgctgggacttgttttcctggtttcagtttctgtctcattgggcattgcttactgggaaaaagggaaccccaaacacaaaaggtgtctccaagatgtgaaatagcgagagagactcgtaagggaccaaggcatgcaacgctcgttgcaacctcttaaggtggagaaagaagaatgtgaagaaggtgaaattccagga

SEQ ID NO: 111034 - DNA, 249 bp, Glycine max
ctcgagccgattaacacttccttagttcaatatggggaagccttaactctctatcttccttccctttgcttgcaactcttttcgagtgcatgctttgctattggctccagcagactaccgagtgccaattcaacagcttcaacgcgttggaccccgaccaccgcgttgagtccgaagtggtttgatccaaacatggaactctcaacaccctgagctgaaatgcgcgggggtcactgttccaaaactcac

SEQ ID NO: 111035 - DNA, 274 bp, Glycine max
aaataatttaagatactatgatgagagcacggttcccattactgttgctgggacttgttttcctggcttcagtttctgtctcatttggcattgcttactgggaaaaagagaaccccaaacacaacaagtgtctccagagttgcaatagcgagagagactcgtacaggaaccaagcatgccacgctcgttgcaacctccttaaggtggagaaagaagaatgtgaagaaggtgaaattccacgaccacgaccacgaccacaacacccggagaggga

SEQ ID NO: 111036 - DNA, 278 bp, Glycine max
gagcgatcttcgatcttcgtcgctgaaaatgagagagtgcatttcaatccacatcggccaggccgggattcaggttggaaacgcctgctgggagctttactgcctcgaacacggcattcagcctgatgggcagatgccaagtgacaagaccgttggtggaggtgatgatgctttcaacaccttcttcagtgaaactggggcaggaaagcacgtgccccgcgcgatttttgtagatcttgagcccactgtgattgatgaggttaggactgggacatacc

SEQ ID NO: 111037 - DNA, 275 bp, Glycine max
gttcaatatcctagtacaccgtattaaagaatttaagatatactatgatgagagcgcggttcccattactgttgctgggagttgttttcctggcatcagtttctgtctcatttggcattgcgtattgggaaaagcagaaccccagtcacaacaagtgcctccgaagttgcaatagcgagaaagactcctacaggaaccaagcatgccacgctcgttgcaacctccttaaggtggaggaagaagaagaatgcgaagaaggtcaaattccacgacca

SEQ ID NO: 111038 - DNA, 267 bp, Glycine max
atcaaaacgaggcctgactgaacgttttgaattgtttgttaataagcatgaactttgcaatgcatatactgaattgaatgaccctgtagtacaacgacaaagatttgcagaacaactcaaggatcgacaatcaggtgatgatgaagcaatggccttcgatgaaacattttgtacggctctagagtatggtttgccacctactggtggttggggtttgggaattgatcgtttgaccatgttactgacagactcacagaatattaagga

SEQ ID NO: 111039 - DNA, 274 bp, Glycine max
tacggactgaacaagagggtggaagcagtaggcaatgtgaggaagctcactaaactagacatgaaacttaatgactctcttccacaaatcactgtcgacccagataactacactgttacagcagatggcgaggttctcaccagttttgcaaccacctttgttcccctttctcgaaattacttcctcttttaagtactagctcccataaataaagcttaaaaattatctctcttctaaggttttaatgtgtagcactacccttataaatttttta

SEQ ID NO: 111040 - DNA, 254 bp, Glycine max
aattattaacacttccttagttcaatatggggaagcccttcactctctctctttcttccctttgcgtgctactcttgtcgagtgcatgctttgctattagctccagcaagctcaacgagtgccaactcaacaacctcaacgcgttggaactcgatcaccgcgttgagtccgaaggtggtttgattcaaacatggaactctcaaaaccctgagctgaaatgcgccggtgtcacggtttccaaactcaccctcaac

SEQ ID NO: 111041 - DNA, 271 bp, Glycine max
caacagtgacagcaacaaccgcaaccgcatgatgagtaattctgatattagagggagcattaatgtgttgttgtgatgtggtttatatggggaaattaaataaatgatgtatgtacctcttgcctatgtaggtttgtgtgttttgttttgttgtctagctttggttattaagtagtagggacgttcgttcgtgtctcaaaaaaaggggtactaccactctgtagtgtatatggatgctggaaatcaatgtgttttgtatttgttcacttcc

SEQ ID NO: 111042 - DNA, 233 bp, Glycine max
gctggttgccacactacaccgatatttccaccaaacccgtttgcgttgttgtttgcgaataaatggcaactaagaggagcgtgggaacgttaaaggagggtgatttgacggggaagagggtattcgtgaggttcgatctaaacgtgcctttggatgacaaccttaccatcaccgatgacactaaagtccgtcttgctgttcccaccatcaggtacttgactggttatggtgct

SEQ ID NO: 111043 - DNA, 256 bp, Glycine max
attgtctttgaacactcatcaccatggccaagcttgttctttccctttgtttccttcttttcagtggctgcttcgctctgagagagcaggcacagcaaaatgagtgccaagatccaaaagctgaatgcctccaacccggataaccgtatagagtcggaaggtgggtcaattgagactgggaaccctaacaacaagccattccagtgtgccggtgttgcctctctcgtgcacccttaaccgcaatgccttcgtagac

SEQ ID NO: 111044 - DNA, 101 bp, Glycine max
ccattgtctttgaacactcatcaccatggccaagcttgttctttcacttttgtttcttcttttcaattggtgcttcgctcttgaaaaacaaggaacagcaa

SEQ ID NO: 111045 - DNA, 269 bp, Glycine max
cgaggacaaggaaaggttagagttgtgaactgccaagggaatgcagtgttcgacggtgagcttaggaggggacaattgctggtggtaccacagaacttcgtggtggcggacaagccggagaacaaggattcgaatacatagtattcaagacacaccacaacgcagtcactagctacttgaaggatgtgtttagggcaattccctcagaggttcttgcccattcttacaaccttcgacagagtcaagtgtctgagcttaagtatgaagga

SEQ ID NO: 111046 - DNA, 271 bp, Glycine max
gcccttcactctctctctttcttccctttgcttgctactcttgtcgagtgcatgctttgctattagctccagcaagctcaacgagtgccaactcaacaacctcaacgcgttggaacccgaccaccgcgttgagtccgaaggtggtttgattcaaacatggaactctcaacaccctgagctgaaatgcgccggtgtcactgtttccaaactcaccctcaaccgcaatggcctccacttgccatcttactcaccttatccccggatgatcatc

SEQ ID NO: 111047 - DNA, 272 bp, Glycine max
tctgaccaatgttttggcgaagtctcattgtgcagaattcatcacctgacatctacaaccctcaagctggtagcatcacaaccgccaccagccttgacttcccagccctctggcttctcaaactcagtgcccagtatggatcactccgcaagaatgctatgttcgtgccacactacaccctgaacgcgaacagcataatatacgcattgaatgggcgggcattggtacaagtggtgaattgcaatggtgagagagtgtttgatggagagctg

SEQ ID NO: 111048 - DNA, 266 bp, Glycine max
ggagataagattgcagtagtgctaagtgctaacacctgcagtgaacaatggcctctgcatcagcatctctgctcaagtcttcacttgttcttgacaagtctgagtgggtgaagggacaaacccttcgccaaccttctgcatcagttgtgagatgcaaccccaccaccccatcaggcctcaccatcagagctggttcctatgctgatgagctcgttaagaccgcgaaaacagtggcttcaccagggaggggtattttggccatggat

SEQ ID NO: 111049 - DNA, 241 bp, Glycine max
ctttccttagttcaatatggggaagcccttcttcactctctctctgtcttccctttgcttgctactcttgtcgagtgcatgctttgctattacctccagcaagttcaacgagtgccaactcaacaacctcaacgcgttggaacccgaccaccgcgttgagtccgaaagtgggtctaattgaacctggaactctcaacaacctgagctggaatgcgccggtggcaatggttccaaacggaac

SEQ ID NO: 111050 - DNA, 263 bp, Glycine max
cgcaactgaaaaggaaaaccctaagagatgaagagaactcctatcttgttccctctcttctttcttctttgtgccttcacctcatatctaccttcagccaccgctgatgatgatcatgtgtacgacactgacggcgataagcttcaatacggtgtcaattatttcgtgttgccaatgataagaggaaatggcggtggaatacaagtagcaaaagcaggaaacgaaacttgccctctgactgtggtgcatctgggaacgagctc

SEQ ID NO: 111051 - DNA, 271 bp, Glycine max
ggtccttaaacactcatcagtcatcaccatggccaagctagttttttccctttgttttctgcttttcagtggctgctgcttcgctttcagttccagagagcagcctcagcaaaacgagtgccagatccaaaaactcaatgccctcaaaccggataaccgtatagagtcagaaggagggctcattgagacatggaaccctaacaacaagccattccagtgtgccggtgttgccctctctcgctgcaccctcaaccgcaacgcccttcgtaga

SEQ ID NO: 111052 - DNA, 271 bp, Glycine max
tgaacactcatcaccatggccaagcttgttctttccctttgtttccttcttttcagtggctgcttcgctctgagagagcaggcacagcaaaatgagtgccagatccaaaagctgaatgccctcaaaccggataaccgtatagagtcggaaggtgggttcattgagacctggaaccctaacaacaagccattccagtgtgccggtgttgccctctctcgctgcacccttaaccgcaatgcccttcgtagaccttcctacaccaacggtcccc

SEQ ID NO: 111053 - DNA, 271 bp, Glycine max
attctctccattgtctttgaacactcatcaccatggccaagcttgttctttccctttgtttccttcttttcagtggctgcttcgctctgagagagcaggcacagcaaaatgagtgccagatccaaaagctgaatgccctcaaaccggataaccgtatagagtcggaaggtgggttcattgagacctggaaccctaacaacaagccattccagtgtgccggtgttgccctctctcgctgcacccttaaccgcaatgcccttcgtagaccttc

SEQ ID NO: 111054 - DNA, 273 bp, Glycine max
caacaagccattccagtgtgacggtgttccgctctctcgctgcaccctcaaccgcaacgaccttcgtagagcttcctacaccaacggtccccaggaaatctatatcgaacaatgtaagggtatttctggcatgatatacccgggttgtcctagcacatttgaagactctcagcaacctcaacaatgaggacaaagcagcagatcacaagaccgtcagcagaagatctatagcttcagagagggtgatttgatcgcagtgcctactggtgttgc

SEQ ID NO: 111055 - DNA, 135 bp, Glycine max
atcctagtacaccgtattaaagaatttaagatatactatgatgagagcgcggttcccattactgttgctgggagttgttttcctggcatcagtttctggctcattgggaattgcgtattgggaaaagccaaaccc

SEQ ID NO: 111056 - DNA, 261 bp, Glycine max
attgtctttgaacactcatcaccatggccaagcttgttctttccctttgtttccttcttttcagtggctgcttcgctctgagagagcaggcacagcaaaatgagtgccagatccaaaagctgaatgccctcaaaccggataaccgtatagagtcggaaggtgggttcattgagacctggaaccctaacaacaagccattccagtgtgccggtgttgcctctctcgctgcacccttaaccgcaatgccttcgtagaccttct

SEQ ID NO: 111057 - DNA, 172 bp, Glycine max
aagagcagccacagtgcgtggagacagacaaaggttgccaacgccaaagcaaaaggagcagaaatggcattgatgagaccatttgcacaatgagacttcgccaaaacattggtcagaattcatcacctgacatctacaaccctcaagctggtagcatcacaaccgccaccag

SEQ ID NO: 111058 - DNA, 271 bp, Glycine max
taaaattcttccaccaagttatgggtttccttgtgttgcttcttttctccctcttaggtctctcttctagttccagcatatcaactcatcgttccatattggaccttgacctaaccaagtttaccacacagaaacaggtgtcttcactgttccaactatggaagagtgagcatggacgtgtctaccataaccacgaagaagaggcaaagagacttgagattttcaagaataacttgaactatatcagggacatgaatgcaaacagaaaatc

SEQ ID NO: 111059 - DNA, 263 bp, Glycine max
cctgtacctccctctggaattgatactgtccaaccatctggctgggattaaactagtgttttttgatgctatgattttgccccgtccctcaattttagtttacctgtctttctttgaagtaaaatatggatttttttttgtagcaaaggaacttgtttttctattttgttatgagtggcagaaatattattattaacatggtatattcgggtaagattttattatgttttgatgcagtcatgattcatgtgtttggtaatatg

SEQ ID NO: 111060 - DNA, 270 bp, Glycine max
  unsure (1)..(270): unsure at all n locations
tagtagtgttggtgggttgcaaagatgcttgggggtcttctccataggggtcataagataaaagggacagtggtgttgatgcgcaagaatgtgttggacgtgaatagcgtaaccagcgttgggggaattattggtcaaggtctcgacttagttggctcaacactcgatactcttactgccttcttgggccgatccgtgtctctccagcttattagtgctaccanagctgatgccaacggaaaagggaaacttggaaaggctactttttgg

SEQ ID NO: 111061 - DNA, 248 bp, Glycine max
agagaatataggaatataagaactaagatggattggatcggagcgtaccgcggaggccagagaagcagggactggtgcgacccttcatcaccattcactgatttgtgggaccctcgtcgtgtcggtgacgctgatgatatcacctcctctctcgcccatgctcacgttgactggcgtgagactgataaagctcatatcttccgtgctgatcttccaagggtgaagaaagaagatctgaaggtgcaagt

SEQ ID NO: 111062 - DNA, 235 bp, Glycine max
aattattaacacttccttagttcaatatggggaagcccttcactctctctctttcttccctttgcttgctactcttgtcgagtgcatgctttgctattagctccagcaagctcaacgagtgccaactcaacaacctcaacgcgttggaacccgaccaccgcgttgagtccgaaggtggttgattcaaacatggaactctcaacaccctgagctgaaatgcgccggtgtcactgtt

SEQ ID NO: 111063 - DNA, 263 bp, Glycine max
cttaattattaacacttccttagttcaatatggggaagcccttcactctctctctttcttccctttgcttgctactcttgtcgagtgcatgctctgctattagctccagcaagctcaacgagtgccaactcaacaacctcaacgcgttggaacccgaccaccgcgttgagtccgaaggtggtttgattcaaacatggaactctcaacaccctgagctgaaatgcgccggtgtcactgtttccaaactcaccctcaaccgcaat

SEQ ID NO: 111064 - DNA, 270 bp, Glycine max
aagcaaagcaatggctacttcaaagttgaaaacccagaatgtggttgtatctctctccctaaccttaaccttggtactggtgctactgaccagcaaggcaaactcagcggaaactgtttctttcagctggaacaagttcgtgccgaagcaaccaaacatgatcctccaaggagacgctattgtgacctcctcgggaaagttacaactcaataaggttgacgaaaacggcaccccaaaaccctcgtctcttggtcgcgccctctactccac

SEQ ID NO: 111065 - DNA, 273 bp, Glycine max
ctttccttagttcaatatggggaagcccttcttcactctctctcttacttccctttgcttgctactcttgtcgagtgcatgctttgctattacctccagcaagttcaacgagtgccaactcaacaacctcaacgcgttggaacccgaccaccgcgttgagtccgaaggtggtcttattgaaacatggaactctcaacaccctgagctgcaatgcgccggtgtcactgtttccaaacgcaccctcaaccgcaacggcctccacttgccatctta

SEQ ID NO: 111066 - DNA, 265 bp, Glycine max
cacaaataatttatattttcttaaagaacaaaatgtttgttatgcttaatatctttaatgtggactgtatttgtattcactccgtcctttattcaggtagttttttctcggcgaaatggcccgaagcctacgctttcttgaatccaattgtggatatcatgccagtaataaccttactcttttgacttttagcttttggttggcaagctgctgtaagttttcggatgtatcgggtaattgagtaatgtcttaaaaaaaaattaag

SEQ ID NO: 111067 - DNA, 183 bp, Glycine max
gcaaagcaatggctacttcaaagttgaaaacccagaatgtggttgtatctctctccctaaccttaaccttggtactggtgctactgaccagcaaggcaaactcagcggaaactgtttctttcagctggaacaagttcgtgccgaagcaaccaaacatgatcctccaaggagacgctattgtga

SEQ ID NO: 111068 - DNA, 269 bp, Glycine max
tcctagtacaccgtattaaagaatttaagatatactatgatgagagcgcggttcccattactgttgctgggagttgttttcctggcatcagtttctgtctcatttggcattgcgtattgggaaaagcagaaccccagtcacaacaagtgcctccgaagttgcaatagcgagaaagactcctacaggaaccaagcatgccacgctcgttgcaacctccttaaggtggaggaagaagaagaatgcgaagaaggtcaaattccacgaccacg

SEQ ID NO: 111069 - DNA, 268 bp, Glycine max
aattattaacacttccttagttcaatatggggaagcccttcactctctctctttcttccctttgcttgctactcttgtcgagtgcatgctttgctattagctccagcaagctcaacgagtgccaactcaacaacctcaacgcgttggaacccgaccaccgcgttgagtccgaaggtggtttgattcaaacatggaactctcaacaccctgagctgaaatgcgccggtgtcactgtttccaaactcaccctcaaccgcaatggcctcca

SEQ ID NO: 111070 - DNA, 251 bp, Glycine max
gcaaaatgaccaagttcacaatcctcctcatctctcttctcttctgcatcgcccacactatctacgcctccaaatggcagcaccagcaagatagctgccgcaagcagctccagggggtgaacctcacgccctgcgagaagcacatcatggagaagatccaaggccgcggcgatgacgatgatgatgatgacgacgacaatcacattctcaggaccatgcggggaagaatcaactacataaggaggaacgaa

SEQ ID NO: 111071 - DNA, 251 bp, Glycine max
aattattaacacttccttagttcaatatggggaagcccttcactctctctctttcttccctttgcttgctactcttgtcgagtgcatgctttgctattagctccagcaagctcaacgagtgccaactcaacaacctcaacgcgttggaacccgaccaccgcgttgagtccgaaggtggtttgattcaacaacggaactctcaacaccctgagctgaaatgcgccggtgtcactgtttccaaactcaccctc

SEQ ID NO: 111072 - DNA, 249 bp, Glycine max
tcctagtacaccgtattaaagaatttaagatatactatgatgagagcgcggttcccattactgttgctgggagttgttttcctggcatcagtttctgtctcatttggcattgcgtattgggaaaagcagaaccccagtcacaacaagtgcctccgaagttgcaatagcgagaaagactcctacaggaaccaagcatgccacgctcgttgcaacctccttaaggtggaggaagaagaagaatgcgaagaa

SEQ ID NO: 111073 - DNA, 249 bp, Glycine max
cttccatagccccccaaaaatgaagagcaccatcttctttgctctctttctcttttgtgccttcaccacctcatacctaccttcagccatcgctgatttcgtgctcgataatgaaggtaaccctcttgaaaatggtggcacatattatatcttgtcagacataacagcatttggtggaataagagcagccccaacgggaaatgaaagatgccctctcactgtggtgcaatctcgcaatgagctcgacaa

SEQ ID NO: 111074 - DNA, 248 bp, Glycine max
aaaagatttgactattttggttttggtttatcaaatgaagttcaccatgctgatgttgtagctttgacaaagctatcatgcttggtgctgccccatgagcactcagcattgctgcagccaaagtctatttggagtgcagaaaaatctcatgatacatgctcacttgtggagcatatattgcatttggaccctatagaggtagacatcttccgaggaatcactcctccagatgctccaacatttgggaa

SEQ ID NO: 111075 - DNA, 247 bp, Glycine max
ctatcttgctgggaaccaagagcaagagtttctaaaatatcagcagcagcagcaaggaggttcccaaagccagaaaggaaagcaacaagaagaagaaaacgaaggaagcaacatattgagtggcttcgcccctgaattcttgaaagaagcgttcggcgtgaacatgcagatagtgagaaacctacaaggtgagaacgaagaggaggatagtggagccattgtgacagtgaaaggaggtctaagagtc

SEQ ID NO: 111076 - DNA, 246 bp, Glycine max
taaccatatactaatatttgcttgtattgatagcccctccgttcccaagagtataaaactgcatcgaataatacaagccactaggcatgggtctagcaaaggaaacaacaatgggaggtagaggtcgtgtggccaaagtggaagttcaagggaagaagcctctctcaagggttccaaacacaaagccaccattcactgttggccaactcaagaaagcaattccaccacactgctttcagcgctccc

SEQ ID NO: 111077 - DNA, 244 bp, Glycine max
acagcatttggtggaataagagcagccccaacgggaaatgaaagatgccctctcactgtggtgcaatctcgcaatgagctcgacaaagggattggaacaatcatctcgtccccatatcgaatccgttttatcgccgaaggccatcctttgagccttaagttcgattcatttgcagtataatgctgtgtgttggaattcctaccgagtggtctgttgtggaggatctaccagaaggacctgctgt

SEQ ID NO: 111078 - DNA, 233 bp, Glycine max
  unsure (1)..(233): unsure at all n locations
cagaaatgcaactatggagcgcctgaggacaatgtggcaacaaaggaagccttggtattggagttaagcagtcaacaagaatacttgaggctgaaagcacgttatgaagctctacaacgttctcaaaggaaccttatgggagaagatcttggccctctaagcagcaagagcttgaatcacttganaggcagctagattcgtctttgaagcaaatcagatcaataaggacccaa

SEQ ID NO: 111079 - DNA, 243 bp, Glycine max
ctattattacttcatacttctcgatggatgagagtaaaacagttcacatagctgtagttcccagcgcaggcttcagccacctgatcccaatcctcgagttctccaagcgcttagtgaacctccaccctcacttgcatgtcacatgcataatccccacacatggtccacccccaagtgcctcaaaatccatccttgaaacccttccctcccaaaacatcacctccactttcctccccccagttg

SEQ ID NO: 111080 - DNA, 245 bp, Glycine max
taaaattcttccaccaagttatgggtttccttgtgttgcttcttttctccctcttaggtctctcttctagttccagcatatcaactcatcgttccatattggaccttgacctaaccaagtttaccacacagaaacaggtgtcttcactgttccaactatggaagagtgagcatggacgtgtctaccataaccacgaagaagaggcaaagagacttgagattttcaagaataacttgaactatatc

SEQ ID NO: 111081 - DNA, 249 bp, Glycine max
ctccattgtctttgaacactcatcaccatggccaagcttgttctttccctttgtttccttcttttcagtggctgcttcgctctgagagagcaggcacagcaaaatgagtgccagatccaaaagctgaatgccctcaaaccggataaccgtatagagtcggaaggtgggttcattgagacctggaactctaacaacaagccattccagtgtgccggtgttgccctctctcgctgcacccttaaccgcaat

SEQ ID NO: 111082 - DNA, 248 bp, Glycine max
gtctttgaacactcatcaccatggccaagcttgttctttccctttgtttccttcttttcagtggctgcttcgctctgagagagcaggcacagcaaaatgagtgccagatccaaaagctgaatgccctcaaaccggataaccgtatagagtcggaaggtgggttcattgagacctggaaccctaacaacaagccattccagtgtgccggtgttgccctctctcgctgcacccttaaccgcaatgccctt

SEQ ID NO: 111083 - DNA, 247 bp, Glycine max
gcattgatgagaccatttgcacaatgagacttcgccaaaacattggtcagaattcatcacctgacatctacaaccctcaagctggtagcatcacaaccgccaccagccttgacttcccagccctctggcttctcaaactcagtgcccagtatggatcactccgcaagaatgctatgttcgtgccacactacaccctgaacgcgaacagcataatatacgcattgaatgggcgggcattggtacaagt

SEQ ID NO: 111084 - DNA, 244 bp, Glycine max
accctaacgcgtgcagagcagagagagacgcagccatggggcgaagacccgcgaggtgttataggcaaattaagaacaaaccataccccaagtcacggttttgccgtggtgttcctgatcccaagatcaggatttacgatgttggtatgaagaagaagggtgttgatgagtttcctttctgtgtccatctggttagttgggagaaggaaaacgtttctagtgaggccctggaagctgctcgtat

SEQ ID NO: 111085 - DNA, 242 bp, Glycine max
gcccttcttcactctctctctttcttccctttgcttgctactcttgtcgagtgcatgctttgctattacctccagcaagttcaacgagtgccaactcaacaacctcaacgcgttggaacccgaccaccgcgttgagtccgaaggtggtcttattgaaacatggaactctcaacacctgagctgcaatgcgccggtgtcactgtttccaaacgcaccctcaaccgcaacggcctccacttgcc

SEQ ID NO: 111086 - DNA, 188 bp, Glycine max
ggaaaaggaaagaggcatggggtgtgccagctccaagctggaagatctccccgcagtggccctgtgccgggagcggtgtggtttcctggacgaagcaattcaccagcgctatgcactcgccgccgctcacatcgcttacataaattctctcaagtcaattggtcactccttacaccttttcattcagc

SEQ ID NO: 111087 - DNA, 239 bp, Glycine max
ctttgatgaagttcatggactctattcaggcggaattaagctgccaacagatataatcagcaagattagtccactacccgtgcttaaggaaatcttccgaactgatggtgaacaggcccttaagtttcctcctcctaaagtaattcaagtgagtaagtctgcatggatgactgatgaagaatttgcaagagaaatgcttgctggtgtaaatccaaacttgattcgttgtcgtaaggagt

SEQ ID NO: 111088 - DNA, 241 bp, Glycine max
attggacctctgattcaaaagcattacaagcctttcaaaagtttggaaacaagctcaaggaaattgaggaaaaacttgtgaggaggaacaatgatccgagtctgcagggcaatcgacttggcccggttcaactgccatacactttgctttatcctagcagtgaggaagggttaacttttaggggaattccaaatagcatctctatctaagggagcctgtggtttactctaattactctata

SEQ ID NO: 111089 - DNA, 244 bp, Glycine max
aatgtgataagccagatacctagtcaagtgcaggagcttgcattccctgggtctgcacaagctgttgagaagctattaaagaaccaaagagaatcctactttgtggatgctcagcctaagaagaaagaggaggggaataagggaagaaagggtcctttgtcttcaattttgagggtttttactgaataagtatgtactaaaatgtatgctgtaatagctcatagtgagcgaggaaagtatcggg

SEQ ID NO: 111090 - DNA, 243 bp, Glycine max
gaacaacaaccctttcaagttcctggttccacctcaggagtctcagaagagagctgtggcttagagccctttttgtatgtgctaccccacttttgtctttttggcaatagtgctagcaaccaataaataataataataataatgaataagaaaacaaaggctttagcttgccttttgttcactgtaaaataataatgtaagtactctctataatgagtcacgaaacttttgcgggaataaaag

SEQ ID NO: 111091 - DNA, 251 bp, Glycine max
ggtgaacaacgacgaccgagactcttacaaccttcaatctggcgatgccctaagagtccctgcaggaaccacatactatgtggttaaccctgacaacgacgagaatctcagaatgataacactcgccatacccgttaacaaacccggtagatttgagagtttcttcctatctagcactcaagctcaacagtcctacttgcaagggttcagcaagaatattctagaggcctcatacgacaccaaattcgagg

SEQ ID NO: 111092 - DNA, 250 bp, Glycine max
aacaattccttcacttgcagcactgttgcatcatcatcttcattgcaaaaccctaattctcaccttcaaccatgaccacacaagtaccaccacacagtgtccaagtccacacaacaacacaccgctacgaagctggcgtcgtcccccccggagcccgtttcgaaccgccgcgttatgaagccggcgtcaaagcgccctccatttaccattccgagagaggtccaacgacttcccaggtcctcgccgtcct

SEQ ID NO: 111093 - DNA, 246 bp, Glycine max
ctacgatagcgtagactcttcccagttctgttgtgtgagtctgtgagtctttcttagctgatatggcggttgatcgctcccttacgaggtgctgtagcctcgtactgtggtcgtggatgttgctgaggatgatgatggcgcagggtgcagccgcgagggccaaccggaaggagtgggactcggtcataaagttaccggctgaaccggtcgatgctgactcggatcatgaagtgggaacacgatggg

SEQ ID NO: 111094 - DNA, 245 bp, Glycine max
gaagaaaatcattccaatacacatggcttccgaaaggcaagcgttgatgcttattctcttaacaacattcttcttcaccataaagccttcacaggccagtactactggtggcataacaatctactggggccaaaacattgacgacggcaccttgacttccacatgcgacactggaaacttcgagattgtcaacctagctttcctcaatgcgtttggttgcggcataactccatcatggaacttcg

SEQ ID NO: 111095 - DNA, 242 bp, Glycine max
caaagcaatggctacttcaaagttgaaaacccagaatgtggttgtatctctctccctaaccttaaccttggtactggtgctactgaccagcaaggcaaactcagcggaaactgtttctttcagctggaacaagttcgtgccgaagcaaccaaacatgatcctccaaggagacgctattgtgacctcctcgggaaagttacaactcaataaggttgacgaaaacggcaccccaaaaccctcgt

SEQ ID NO: 111096 - DNA, 240 bp, Glycine max
gagggagggagccgtagcagcggaagctctagcttgggtagcgaatcacaatggcgagaggattaaagaagcatctgaagaggcttaatgccccaaagcattggatgcttgacaaactgggtggtgcatttgctcctaagccctcatctggaccacacaaatcgagggaatgctgccactcatactcattttgcgaaaccggctgaagtatgctctaacataccgtgaagtcattgctat

SEQ ID NO: 111097 - DNA, 239 bp, Glycine max
tgattactggaacttcccaggctgattgtgctgtccttatcattgattccacaactggtggttttgaagctggtatttccaaagatggacagactcgcgagcatgctctacttgccttcacccttggtgtcaagcaaatgatctgttgctgtaacaagatggatgccactacccaaagtactctaaggccaggtatgaagaaattgtgaaggaagtttcttcctacttgaagaaggtag

SEQ ID NO: 111098 - DNA, 241 bp, Glycine max
acttattaacactttccttagttcaatatggggaagcccttcttcactctctctctttcttccctttgcttgctactcttgtcgagtgcatgctttgctattacctccagcaagttcaacgagtgccaactcaacaacctcaacgcgttggaacccgaccaccgcgttgagtccgaaggtggtcttattgaaacatggaactctcaacaccctgagctgcaatgcgccggtgtcactgttt

SEQ ID NO: 111099 - DNA, 238 bp, Glycine max
ttctctccattgtctttgaacactcatcaccatggccaagcttgttctttccctttgtttccttcttttcagtggctgcttcgctctgagagagcaggcacagcaaaatgagtgccagatccaaaagctgaatgccctcaaaccggataaccgtatagagtcggaaggtgggttcattgagacctggaaccctaacaacaagccattccagtgtgccggtgttgccctctctcgctgc

SEQ ID NO: 111100 - DNA, 241 bp, Glycine max
gtcgcattcgcgtcctccagaggttcaaccaacgctccccacaactttagaatctccgagactaccgcattttggagttcaactccaaacccaacaccctccttctccccaaccatgctgacgctgattacctcatcgttatccttaacgggactgccattctttccttggtgaacaacgacgacagagactcctacagacttcaatctggtgatgccctgagagtcccctcaggaaccac

SEQ ID NO: 111101 - DNA, 241 bp, Glycine max
ttgctttagccatcactaacactcagtctctgaattgcggctgagggtttcgagtaacgtttttttttctgagtttaagatatcatgggtaaagagaaggttcacattaacattgtggtcattggccatgttgactctgggaagtcaaccaccactggccacttgatttacaagcttggaggtattgacaagcgtgttattgagaggtttgagaaagaagctgctgagatgaacaagaggt

SEQ ID NO: 111102 - DNA, 241 bp, Glycine max
attgtctttgaacactcatcaccatggccaagcttgttctttccctttgtttccttcttttcagtggctgcttcgctctgagagagcaggcacagcaaaatgagtgccagatccaaaagctgaatgccctcaaaccggataaccgtatagagtcggaaggtgggttcattgagacctggaaccctaacaacaagccattccagtgtgccggtgttgccctctctcgctgcacccttaaccg

SEQ ID NO: 111103 - DNA, 246 bp, Glycine max
ctggtagcatcacaaccgccaccagccttgacttcccagccctctggcttctcaaactcagtgcccagtatggatcactccgcaagaatgctatgttcgtgccacactacaccctgaacgcgaacagcataatatacgcattgaatgggcgggcattggtacaagtggtgaattgcaatggagacagagtgtttgatggagagctgcaagagggaggggtgctgatcgttccacaaaactttgcgg

SEQ ID NO: 111104 - DNA, 244 bp, Glycine max
atcatacatagtagtgttggtgggttgcaaagatgcttgggggtcttctccataggggtcataagataaaagggacagtggtgttgatgcgcaagaatgtgttggacgtgaatagcgtaaccagcgttgggggaattattggtcaaggtctcgacttagttggctcaacactcgatactcttactgccttcttgggccgatccgtgtctctccagcttattagtgctaccaaagctgatgccaa

SEQ ID NO: 111105 - DNA, 243 bp, Glycine max
cattggtccttaaacactcatcagtcatcaccatggccaagctagttttttccctttgttttctgcttttcagtggctgctgcttcgctttcagttccagagagcagcctcagcaaaacgagtgccagatccaaaaactcaatgccctcaaaccggataaccgtatagagtcagaggagggctcattgagacatggaaccctaacaacaagccattccagtgtgccggtgttgccctctctcg

SEQ ID NO: 111106 - DNA, 241 bp, Glycine max
cttaattattaacacttccttagttcaatatggggaagcccttcactctctctctttcttccctttgcttgctactcttgtcgagtgcatgctttgctattagctccagcaagctcaacgagtgccaactcaacaacctcaacgcgttggaacccgaccaccgcgttgagtccgaaggtggtttgattcaaacatggaactctcaacaccctgagctgaaatgcgccggtgtcactgtttc

SEQ ID NO: 111107 - DNA, 240 bp, Glycine max
gacatatcttccaagtgagacaccagctccactagtcaaatatagagaagaagagttgcataatttaagaggagatggaactggagaacgcaaagagtgggaaaggatctatgattatgatgtctacaatgatttaggtgatccggataaaggtgaaaatcatgcccgtcctgttcttggaggaaatgacacctttccttatcctcgtagggggagaactggtagaaaaccaacaaggaa

SEQ ID NO: 111108 - DNA, 240 bp, Glycine max
ctagcacaatttacaatctcaatggctggaatttgctgtggtgttgttggagaaggtgacactccggctccactcgagcccactcctcgcccctccaggcgccggagtttggacatcttacctttaaaatatatcgccgacatgcccatgccgccgccggagggtttacggaagcgtcccaagctcaacctcagggactgcgataacgcaattgaaaattgcgacgaatccactggacac

SEQ ID NO: 111109 - DNA, 239 bp, Glycine max
cttaaacactcatcagtcatcaccatggccaagctagttttttccctttgttttctgcttttcagtggctgctgcttcgctttcagttccagagagcagcctcagcaaaacgagtgccagatccaaaaactcaatgccctcaaaccggataaccgtatagagtcagaaggagggctcattgagacatggaaccctaacaacaagccattccagtgtgccggtgttgccctctctcgctg

SEQ ID NO: 111110 - DNA, 239 bp, Glycine max
ctcacggatgcagccaaagtgagagctggaagttacagcggaggaatgaaacgccgtctcagtgttgcaattgcccttattggtgaccctaagttagtcattctggatgaaccgactactggtatggatccaataacaagaaggcatgtgtgggacataattgaaaatgcaaagagagggcgtgccattgttcttacaacgcactctatggaagaagctgacattctaagtgaccgtat

SEQ ID NO: 111111 - DNA, 102 bp, Glycine max
ccaacaaggtagtggtattcttggcatgatattcccgggttgtcctagcacatttgaagagcctcagcaacaaggacaaagcagcaggtgccaagaccgtca

SEQ ID NO: 111112 - DNA, 243 bp, Glycine max
cttgggagaagaggtcgagtttcacagcagcaatggtgtacgtcaaggctcagaaatcaaaagcctacttcaagagatatcaagtcaagttcaagagaagaagagagggaaaaaccgattaccgtgccaggattcggttgattaatcaggacaagaacaaatataacactccgaaataccgatttgttgttcgctttagcaacaaggacattgttgcacaaataatatctgctagcattgctg

SEQ ID NO: 111113 - DNA, 246 bp, Glycine max
cggctcgagcttcttcactctctctctttcttccctttgcttgctactcttgtcgagtgcatgctttgctattacctccagcaagttcaacgagtgccaactcaacaacctcaacgcgttggaacccgaccaccgcgttgagtccgaaggtggtcttattgaaacatggaactctcaacaccctgagctgcaatgcgccggtgtcactgtttccaaacgcatcctcaaccgcaacggcctccactt

SEQ ID NO: 111114 - DNA, 248 bp, Glycine max
gttcaacgagtgccaactcaacaacctcaacgcgttggaacccgaccaccgcgttgagtccgaaggtggtcttattgaaacatggaactctcaacaccctgagctgcaatgcgccggtgtcactgtttccaaacgcaccctacaaccgcaacggcctccacttgccatcttactcacttatccccaaatgatcattgtcgttcaagggaagggagcaattggatttgcatttccgggatgtcctgaga

SEQ ID NO: 111115 - DNA, 246 bp, Glycine max
actagttcaatatcctagtataccttaataaataatttaagatactatgatgagagcacggttcccattactgttgctgggacttgttttcctggcttcagtttctgtctcatttggcattgcttactgggaaaaagagaaccccaaacacaacaagtgtctccagagttgcaatagcgagagagactcgtacaggaaccaagcatgccacgctcgttgcaacctccttaaggtggagaaagaaga

SEQ ID NO: 111116 - DNA, 243 bp, Glycine max
ttaattattaacacttccttagttcaatatggggaagcccttcactctctctctttcttccctttgcttgctactcttgtcgagtgcatgctttgctattagctccagcaagctcaacgagtgccaactcaacaacctcaacgcgttggaacccgaccaccgcgttgagtccgaaggtggtttgattcaaacatggaactctcaacaccctgagctgaaatgcgccggtgtcactgtttccaa

SEQ ID NO: 111117 - DNA, 242 bp, Glycine max
ctggaattgcattgaataagaactttgtgaagcttgtttcttggtacgacaacgagtggggatacagctcacgtgtcattgacctgcttgtattcgttgccaagaagtctttttaaggtggtgtactgcaaagttgcttgtctacacattatgtgcttgtctagttgcgatttagtgtcttgctcgtgcaaaaaatgagaggtctgaataaatcggtttctggaaccagtggatttaccttg

SEQ ID NO: 111118 - DNA, 240 bp, Glycine max
cttaattattaacacttccttagttcaatatggggaagcccttcactctctctctttcttccctttgcttgctactcttgtcgagtgcatgctttgctattagctccagcaagctcaacgagtgccaactcaacaacctcaacgcgttggaacccgaccaccgcgttgagtcgaaggtggtttgattcaaacatggaactctcaacaccctgagctgaaatgcgccggtgtcactgtttc

SEQ ID NO: 111119 - DNA, 242 bp, Glycine max
agagagaaagaactgacctcagcggcggcggcggcggcaacagaagaacaaccaccaccacacacaatgggtcgcgtgagaacaaaaacggtgaagaaatcctcccgccaggtgattgagcgttactactcgcgcatgaccctcgacttccacacaaacaaaaagcttctcgaagaagtggccatcatcccttccaagaggctgcggaacaagatcgcgggtttctccacgcatctcatgaa

SEQ ID NO: 111120 - DNA, 237 bp, Glycine max
ggtgttgaaagttctatttggctgctagcaaaggcttatgtagttgtgaatgactcgtgctatcatcaacttgtcagccattggttaaacactcatgcagttgttgagccattcatcatagcaacaaacaggcatctcagtgttgttcaccctatttataaactccttcaccctcactatcgtgacaccatgaacataaatggccttgctcggttatcactggtcaacgacggtggc

SEQ ID NO: 111121 - DNA, 238 bp, Glycine max
ataggttctctcaatgttccacgttctgcttcttcccgttcatcctttgtgggaagaaaaagcgttccacgcagcctttccttctctgcatcacaactttgtggagacaagattcccacagattcagttttattggcaccaaaaataggtcgcagtccagttatcgttactcctaaagcagtttctgattcccaaaactcacaaacgtgccttgatcccgatgctagcagaagtgtgc

SEQ ID NO: 111122 - DNA, 239 bp, Glycine max
tctcgagccgattcggctcgagagcgaagaaagtgaagattctgagctacgaagacataagactaagaacccttttctcttaggctctaacaggttcgaaactctcttcaaaaaccaatatggtcgcattcgcgtcctccagaggttcaaccaacgctccccacaacttcagaatctccgagactaccgcattttggagttcaactccaaacccaacaccctccttctccccaaccatg

SEQ ID NO: 111123 - DNA, 222 bp, Glycine max
gaattcccaacagtatctctatctgaagaggtttgtggttccttaagttttgtggctttgaataaaagatagaagagaaggaatctgaatttcttcatccaacctgcacatggtaatctagtgtgtttgagtgctttcatgtttggctttaataaaataaaagcagttgttttgtaaaatgttcagaatcaataaaagcatttactgctttgctttgtgcgc

SEQ ID NO: 111124 - DNA, 240 bp, Glycine max
tgataaaccgcgatcacaggttgccgcaccttaaaaccggaaacaaaagcaatcgttacttgatttcaagaatctctcaatttctttctacttctttgtgtacgatttcttaagggaaagaaaatcactctctgtgctggccacagacttcgtgaatcattttcttttccactttagtttatttgctgaacactctcctatttgatataggacttcgtgtcagatttaaacttcttctgt

SEQ ID NO: 111125 - DNA, 245 bp, Glycine max
ggtacatagaatttcaaagaaatgcagaacttgacccagagaaaaggttgtacccaggtggcaggttctttgatcctctgggtttggccaacgaccctgaagaaaaggccagacttcaacttgctgagatcaagcattctcgcttagccatggtggtcttcctcatctttgcaattcaagctgctgtaacaggaaaaggccctatcagttttcttgctaccttcaacaagtgacatcatatcata

SEQ ID NO: 111126 - DNA, 242 bp, Glycine max
cggctcgagtctccattgtctttgaacactcatcaccatggccaagcttgttctttccctttgtttccttcttttcagtggctgcttcgctctgagagagcaggcacagcaaaatgagtgccagatccaaaagctgaatgccctcaaaccggataaccgtatagagtcggaagtgggttcattgagacctggaaccctaacaacaagccattccagtgtgccggtgttgccctctctcgctg

SEQ ID NO: 111127 - DNA, 243 bp, Glycine max
taaaattcttccaccaagttatgggtttccttgtgttgcttcttttctccctcttaggtctctcttctagttccagcatatcaactcatcgttccatattggaccttgacctaaccaagtttaccacacagaaacaggtgtcttcactgttccaactatggaagagtgagcatggacgtgtctaccataaccacgaagaagaggcaaagagacttgagattttcaagaataacttgaactata

SEQ ID NO: 111128 - DNA, 242 bp, Glycine max
tcagatcatcgccgtgcaacaaatgtcagtgccagactggattctcaacaaaagaagctcaaccttccaatcctgccaaccaccactattggatccttccctcagactgtagaactgaggagggtacgccgtgaattcaaggctaacaagatctccgaggaagagtatgtagagtcaattaaggaggaaattcgcaaagttgttgagcttcaagaagagcttgatattgatgttcttgttca

SEQ ID NO: 111129 - DNA, 239 bp, Glycine max
tctctccattggtccttaaacactcatcagtcatcaccatggccaagctagttttttccctttgttttctgcttttcagtggctgctgcttcgctttcagttccagagagcagcctcagcaaaacgagtgccagatccaaaaactcaatgccctcaaaccggataaccgtatagagtcagaaggagggctcattgagacatggaaccctaacaacaagccattccagtgtgccggtgtt

SEQ ID NO: 111130 - DNA, 117 bp, Glycine max
ggagcacttggagttgcaattccaggatgtcctgagacgtttgaggcgccacaagaacaatcaaacagaagaggctcaaggtcgcagaagcagcagctacaggacagtcaccagaag

SEQ ID NO: 111131 - DNA, 235 bp, Glycine max
gaacaatcaaacagaagaggctcaaggtcgcagaagcagcagctacaggacagtcaccagaagattcgtcacttcaatgaaggagacgtactcgtgattcctcctggtgttccttactggacctataacactggcgatgaaccagttgttgccatcagtcttcttgacactctaacttcaataaccagcttgatcaaacccctagggtattttaccttgctgggaacccagatat

SEQ ID NO: 111132 - DNA, 237 bp, Glycine max
ctcgagccggaccaagccatggaaagcgtgaacaagacgaggacgaggacgaagatgaagataaacctcgtcctagtcgaccaagccaaggaaagcgtgaacaagaccaggaccaggacgaggacgaagatgaagatgaagatcaacctcgcaagagccgcgaatggagatcgaaaaagacacaacccagaagacctagacaagaagaaccacgtgaaagaggatgcgagacaagaa

SEQ ID NO: 111133 - DNA, 238 bp, Glycine max
gaacacccacgcccacaccaacctcatcaaaaggaagaggaaaagcacgaatggcaacacaagcaggaaaagcaccaaggaaaggaaagtgaagaagaagaagaagaccaagacgaggatgaggagcaagacaaagagagccaagaaagtgaaggttctgagtctcaaagagaaccacgaagacataagaataagaacccttttcacttcaactctaaaaggttccaaactctcttca

SEQ ID NO: 111134 - DNA, 239 bp, Glycine max
ctcagcatggctaagcttgttctttccctttgttttctgcttttcagtggctgctgcttcgctttcagtttcagagagcagccacagcaaaacgagtgccagatccaacgcctcaatgccctcaaaccggataaccgtatagagtcagaaggtggcttcattgagacatggaaccctaacaacaagccattccagtgtgccggtgttgccctctctcgctgcaccctcaaccgcaacgc

SEQ ID NO: 111135 - DNA, 239 bp, Glycine max
cttgtgttgcttcttttctccctcttaggtctctcttctagttccagcatatcaactcatcgttccatattggaccttgacctaaccaagtttaccacacagaaacaggtgtcttcactgttccaactatggaagagtgagcatggacgtgtctaccataaccacgaagaagaggcaaagagacttgagattttcaagaataacttgaactatatcagggacatgaatgcaaacagaaa

SEQ ID NO: 111136 - DNA, 236 bp, Glycine max
ggtcgaggtccaacagttacagacccgaatactgagaaacaaggcgaagtattttatgttccaagagatgaaaatttaggtcacttgaagtctaaggatgctcttgagattggaacaaaatctttatctcaaattgtccagccggcgttcgaatctgcgttcgatttgaaatcacgccaattgagtttcatagcttccaagatgtgcatgacttgtatgaaggtggaattaagctt

SEQ ID NO: 111137 - DNA, 265 bp, Glycine max
ctaaaataatttatattttcttaaagaacaaaatgtttgttatgcttaatatctttaatttggtctgtatttgtattcactccgtcctttattcaagtagttttttctcggcgaaattgcccgaagcctacgctttcttgaatccaattgtggatattatgccagtaatacccttactcttttttcttttagcttttgtttggcaagctgctgtaagttttcgatgatatctgtaatttgagtaatgtcttaaaaaaaaattaag

SEQ ID NO: 111138 - DNA, 291 bp, Glycine max
gcgtacgtacgctcgcacagcgactcgagcaacaacttctgctacttcctactccaaccgcacttctgctccgcaattatcatgggcaaggtcaagatcggaatcaacggatttggaagaattggccgtttggtagccagagtggctctgcagagagacgatgttgaactcgttgccgttaacgaccctttcatcaccaccgattacatgacatacatgtttaaatacgacagtgttcatggacactggaagcatcacgatgtcaccgttaaggacgagaagaccttctct

SEQ ID NO: 111139 - DNA, 255 bp, Glycine max
gtcttgcagaactataatggcacgatgatgcccaatacagatcaggcattccgtctgaattgggccacattcagtgcgggggaaaggcgttcttccgatgctacttctgatctctctatatttgtgggggacttggccattgatgttactgatgctatgctgcaagagacttttgctggccgatattcatctattaagggagcaaaagttgtcattgattctaataccggccgctcaaaaggctatggttttgtt

SEQ ID NO: 111140 - DNA, 256 bp, Glycine max
ctcgcaagcaaaaagaaagaatcccaggcgaggagaaagatggaggggaaggagcaggatgtgtcgttgggagcgaacaagttccccgagagacagccgattgggacggcggcgcagagccaagacgacggcaaggactaccaggagccggcgccggcgccgctggttgacccgacggagtttacgtcatggtcgttttacagagcagggatagcagagtttgtggccacttttctgtttctctacatcacgtctt

SEQ ID NO: 111141 - DNA, 255 bp, Glycine max
ctcatcaccatggccaagcttgttctttccctttgtttccttcttttcagtggctgcttcgctctgagagagcaggcacagcaaaatgagtgccagatccaaaagctgaatgccctcaaaccggataaccgtatagagtcggaaggtgggttcattgagacctggaaccctaacaacaagccacaccagtgtgccggtgttgccctctctcgctgcacccttaaccgcaatgcccttcgtagaccttcctacacc

SEQ ID NO: 111142 - DNA, 258 bp, Glycine max
gatctatgtgactcgaggacaaggaaaggttagagttgtgaactgccaagggaatgcagtgttcgacggtgagcttaggaggggacaattgctggtggtaccacagaacttcgtggtggcggagaagccggagaacaaggattcgaatacatagtattcaagacacaccacaacgcagtcactagctacttgaaggatgtgtttagggcaattccctcagaggttcttgcccattcttacaaccttcgacagagtcaa

SEQ ID NO: 111143 - DNA, 264 bp, Glycine max
gtagcaaagcaatggctacttcaaagttgaaaacccagaatgtggttgtatctctctccctaaccttaaccttggtactggtgctactgaccagcaaggcaaactcagcggaaactgtttctttcagctggaacaagttcgtgccgaagcaaccaaacatgatcctccaaggagacgctattgtgacctcctcgggaaagttacaactcaataaggttgacgaaaacggcaccccaaaaccctcgtctcttggtcgcgccctct

SEQ ID NO: 111144 - DNA, 264 bp, Glycine max
cttaattattaacacttccttagttcaatatggggaagcccttcactctctctctttcttccctttgcttgctactcttgtcgagtgcatgctttgctattagctccagcaagctcaacgagtgccaactcaacaacctcaacgcgttggaacccgaccaccgcgttgagtccgaaggtggtttgattcaaacatggaactctcaacaccctgagctgaaatgcgccggtgtcactgtttccaaactcaccctcaaccgcaatg

SEQ ID NO: 111145 - DNA, 118 bp, Glycine max
ctatattttgtgtaataataaaactatggcctatgtatttaccaccctccgacccagcctatgttaatatctgagtggcgttgtacctttgaatcgccttaataaaatgtcagtcttc

SEQ ID NO: 111146 - DNA, 264 bp, Glycine max
gtaagagaagaagatgggtttgaagaacaacatggtggtgctaaaggtgtgtttggtgctacttttccttgtggggggtactactagtgccaacttgaggctgagtaagcttggcctgctcatgaaaagtgatcatcatcaacactcaaatgatgatgagtcttcaaaaccatgctgtgatcaatgcgcatgcacaaagtcaaaccctcctcaatgccgctgttcagatatgaggctgaattcgtgccattgcacttgcaaatc

SEQ ID NO: 111147 - DNA, 254 bp, Glycine max
ctcaatatgagcaggatgctgattttgttcatataaagatgttgcgtaataatacctttgttactgtaacagattctaaaggaaatataaaactcagtggctctgccggtccattgaaagacctgaaatcagggcaaaagctttctaggtatgctgccgaggcaaccgcggaagttgttggccgaaaggctaggggcttgggattgaaatctgttgtcatgaaagtgaatggatttacacattttaggagaaaa

SEQ ID NO: 111148 - DNA, 214 bp, Glycine max
tgaggccaggcaagccccactcaaccaccacacctctcctcgttcacgctacccctttctgctcttcttctacctttcaagttttaaaagtataaagatggcagagacattcctatttacctcagagtcggtgaacgagggacaccctgacaagctctgcgaccaaatctccgatgctgtcctcgacgcttgcctcaagcaggacccagacagc

SEQ ID NO: 111149 - DNA, 272 bp, Glycine max
ttcggctcgaggagagagagagggagtcagagaaaccctaggtaagaagaaaagatgccggctggtcatggtttgagatcccgcaccagagattccttctctcgtcctttcaggaagaagggaaccatcgccctcaccacatacctgagaacctaccacgtcggcgactatgttgacgtcaaggttaacggtgccgttcacaagggaatgccccacaaattctaccatggccgcaccggacgcgtctggaatgtcaccaaacgtgctgttgg

SEQ ID NO: 111150 - DNA, 258 bp, Glycine max
ggccaagcttgttctttccctttgtttccttcttttcagtggctgcttcgctctgagagagcaggcacagcaaaatgagtgccagatccaaaagctgaatgccctcaaaccggataaccgtatagagtcggaaggtgggttcattgagacctggaaccctaacaacaagccattccagtgtgccggtgttgccctctctcgctgcacccttaaccgcaatgcccttcgtagaccttcctacaccaacggtccccagga

SEQ ID NO: 111151 - DNA, 252 bp, Glycine max
ctcgagccgccaaaaatgaagagcaccatcttctttgctctctttctcttttgtgccttcactcacctcatacctaccttcagccatcgctgatttcgtgctcgataatgaaggtaaccctcttgaaaatggtggcacatattatatcttgtcagacataacagcatttggtggaataagagcagccccaacgggaaatgaaagatgccctctcactgtggtgcaatctcgcaatgagctcgacaaagggat

SEQ ID NO: 111152 - DNA, 260 bp, Glycine max
gttcaatatcctagtataccttaataaataatttaagatactatgatgagagcacggttcccattactgttgctgggacttgttttcctggcttcagtttctgtctcatttggcattgcttactgggaaaaagagaaccccaaacacaacaagtgtctccagagttgcaatagcgagagagactcgtacaggaaccaagcatgccacgctcgttgcaacctccttaaggtggagaaagaagaatgtgaagaaggtgaaat

SEQ ID NO: 111153 - DNA, 261 bp, Glycine max
ctcgagccgattcggctcgaggtctttgaacactcatcaccatggccaagcttgttctttacctttgtttccttcttttcacgtggctgcttcgctctgagagagcaggcacagcaaaatgagtgccagatccaaaagctgaatgccctcaaaccggataaccgtatagagtcggaaggtgggttcattgagacctggaaccctaacaacaagccattccagtgtgccggtgttgccctctctcgctgcacccttaaccgc

SEQ ID NO: 111154 - DNA, 260 bp, Glycine max
  unsure (1)..(260): unsure at all n locations
gtctttgaacactcatcaccatggccaagcttgttctttccctttgtttccttcttttcagtggctgcttcgctctgagagagcaggcacagcaaaatgagtgccagatccaaaagctgaatgccctcaaaccggataaccgtatagagtcggaaggtgggttcattgagacctggaaccctaacaacaagccattccagtgtgccggtgttgccctctctcgctgcaccctntaacgcaatgcccttcgtagaccttct

SEQ ID NO: 111155 - DNA, 258 bp, Glycine max
ctatatcctagtataccttaataaataatttaagatactatgatgagagcacggttcccattactgttgctgggacttgttttcctggcttcagtttctgtctcatttggcattgcttactgggaaaaagagaaccccaaacacaacaagtgtctccagagttgcaatagcgagagagactcgtacaggaaccaagcatgccacgctcgttgcaacctccttaaggtggagaaagaagatgtgaagaatgtgaaattc

SEQ ID NO: 111156 - DNA, 262 bp, Glycine max
tgctcgagccgctcgagccgctcgagccgtttgatcgcagtgcctactggtgttgcatggtgagtgtacaagcctgaagacactcctgttgttgccgtttctattattgacaccaacagcttggagaaccagctcgaccagatgcctaggagattctatcttgctgggaaccaagagcaagagtttctaaaatatcagcagcagcagcaaggaggttcccaaagccagaaaggaaagcaacaagaagaagataacgaaggaa

SEQ ID NO: 111157 - DNA, 262 bp, Glycine max
attctctccattgtctttgaacactcatcaccatggccaagcttgttctttccctttgtttccttcttttcagtggctgcttcgctctgagagagcaggcacagcaaaatgagtgccagatccaaaagctgaatgccctcaaaccggataaccgtatagagtcggaaggtgggttcattgagacctggaaccctaacaacaagccattccagtgtgccggtgttgccctctctcgctgcacccttaaccgcaatgcccttcg

SEQ ID NO: 111158 - DNA, 261 bp, Glycine max; identical to SEQ ID NO: 103663

SEQ ID NO: 111159 - DNA, 133 bp, Glycine max
acaagcttggcaagttctttgagatcaccccagagaaaaacccccagcttcgggacttggatatcttcctcagtattgtggatatgaacgagggagctcttcttctaccacactccaattcaaaggcgatagt

SEQ ID NO: 111160 - DNA, 261 bp, Glycine max; identical to SEQ ID NO: 103663

SEQ ID NO: 111161 - DNA, 247 bp, Glycine max
ataacacggaggaaagggaagtgaagaggaacaagatgaacgtgaacacccacgcccacaccaacctcatcaaaaggaagaggaaaagcacgaatggcaacacaagcaggaaaagcaccaaggaaaggaaagtgaagaagaagaagaagaccaagacgaggatgaggagcaagacaaagagagccaagaaagtgaaggttctgagtctcaaagagaaccacgaagacataagaataagaaccttttc

SEQ ID NO: 111162 - DNA, 254 bp, Glycine max
caagttattatcaaataattaattaaattcctcgtggaatcttgttgaagccatgtctacagctggtcaggtcatcaagtgcagagctgcggtggcatgggaagcagggaagccactatcgatagaaaccatagaagtggcaccaccccagaaaggtgaagtgcgtttgaagatcctcttcaactccctttgccgtacagatgtttactggtgggatgctaagggccagactccgctgtttcctcgtatcttag

SEQ ID NO: 111163 - DNA, 253 bp, Glycine max
gggaaattagggttagggttgcagcgtcctccatcagcacccgtatataaatacccttttcccccccacttgttctaccgtaatccttacgctctctcactcacaaacgcacactgaattcaaaaacatcgaaagagagaggcatggccgagcaaaccttcatcatgatcaagccagatggcgttcaaagaggccttattggcgagattattagcagatttgagaggaagggtttttacttgaaagggttgaa

SEQ ID NO: 111164 - DNA, 255 bp, Glycine max
ctaaatgaccaagttcacaatcctcctcatctctcttctcttctgcatcgcccacacttgcagcgcctccaaatggcagcaccagcaagatagctgccgcaagcagctccagggggtgaacctcacgccctgcgagaagcacatcatggagaagatccaaggccgcggcgatgacgatgatgatgatgacgaggacaatcacattctcaggaccatgcggggaagaatcaactacataaggaggaacgacggaaa

SEQ ID NO: 111165 - DNA, 256 bp, Glycine max
caacacattaacctttctcattccccatctcctcaccttattcagccactgctaatttctagggttccgaaatggacgctggcggtaagatcaagaagggcgccggatgaagaaagggcggcggccctaagaagaagccggtttcaaggtccgtcaaggccggtctccaattccccgtcggaagaattggccgttatttgaagaaaggaaggtacgcccagcgtgtcggtaccggtgctcccgtttacttggccgc

SEQ ID NO: 111166 - DNA, 260 bp, Glycine max
ctaaccttgctctatactacacagtacacacactagaagaataatggcttccatcctccactactttttagccctctctctttcttgctcttttcttttcttcttatccgactcagtcacccctacaaaaccaataaaccttgttgttctacccgttcaaaatgatggttccacagggctccattgggccaacctccaaaaaagaacccctctaatgcaagtaccagtcctggtggacctcaatggaaatcacttgtggg

SEQ ID NO: 111167 - DNA, 259 bp, Glycine max
ggaaatatagagctgaattgtctgaacaagatatatttgtaatcccagcaggttatccagttgtggtcaacgctacctcagatctgaatttctttgcttttggtatcaatgccgagaacaaccagaggaacttccttgcaggttcgaaagacaatgtgataagccagatacctagtcaagtgcaggagcttgcgttccctgggtctgcaaaagatattgagaacctaataaagagccaaagtgagtcctactttgtgga

SEQ ID NO: 111168 - DNA, 231 bp, Glycine max
tattaacacttccttagttcaatatggggaagcccttcactctctctctttcttccctttgcttgctactcttgtcgagtgcatgctttgctattagctccagcaagctcaacgagtgccaactcaacaacctcaacgcgttggaacccgaccaacgggttgagtccgaaagtgggttgattccaacatggaactctcaacaccctgagctgaaatgcgccggtgtcactg

SEQ ID NO: 111169 - DNA, 263 bp, Glycine max
cgctcgagccgaatcggctcgagcggctcgagaagaaagtcttccaactccccccaaaaatgacgagcaccatcttctttgcactctttctcttttgtgccttcaccacctcatacctaccttcagccatcgctgatttcgtgctcgataatgaaggtaaccctcttgaaaatggtggcacatattatatcttgtcagacataacagcatttggtggaataagagcagccccaacgggaaatgaaagatgccctctcactgtg

SEQ ID NO: 111170 - DNA, 255 bp, Glycine max
ggtgcagtggcaccactggtaactgatatcccattatcgtcagtcgaggaagaaggcggtgagggaagaaaccagccagcctgggagaagtggtcaaatgatggcacagaaagacaggtagccaagcttatggaagaaaatgtgggtgctgccatgcagtttcttcaatcaaaagcactctgcatcatgcccgtctcactagcttcagcaatataccagtcacaaccctcaggcacttctagtatagttaagcct

SEQ ID NO: 111171 - DNA, 252 bp, Glycine max
ataatgaccaagttcacaatcctcctcatctctcttctcttctgcatcgcccacacttgcagcgcctccaaatggcagcaccagcaagatagctgccgcaagcagctccagggggtgaacctcacgccctgcgagaagcacatcatggagaagatccaaggccgcggcgatgacgatgatgatgatgacgacgacaatcacattctcaggaccatgcggggaagaatcaactacataaggaggaacgacgga

SEQ ID NO: 111172 - DNA, 252 bp, Glycine max
gcaacaacaacaacagcagaaaagtcatggtggacgcaagcaggggcaacaccagcaggaggaagaggaagaaggtggcagcgtgctcagtggcttcagcaaacacttcttggcacaatccttcaacaccaacgaggacatagctgagaaacttcagtctccagacgacgaaaggaagcagatcgtgacagtggaaggaggtctcagcgttatcagccccaagtggcaagaacaacaagatgaagatgaaga

SEQ ID NO: 111173 - DNA, 257 bp, Glycine max
atcgtttctccaatttaatcaccattgtacaacccaattcccttcgtcgttttcgattaagagagcaatggcacgtaccaagcaaaccgctcgcaagtccaccggaggaaaggctccgaggaagcaattggcaaccaaagccgctcgcaagtcagccccggcgaccggcggagtgaagaagccccaccgcttcaggccaggaacggtggctctgagggagattcgaaagtaccagaagagcaccgaacttctgatcc

SEQ ID NO: 111174 - DNA, 255 bp, Glycine max
ctcgagccgaatcggctgagcgcattgaatggacgggcattgatacaagtggtgaattgcaccggtgagagagtgtttgatggagagctgcaagagggacgggtgctgatcgtgccacaaaactttgtggtggctgcaagatcacagagtgacaacttcgagtatgtgtcattcaagaccaatgatacacccatgatcggcactcttgcaggggcaaactcattgttgaacgcattaccagaggaagtgattcag

SEQ ID NO: 111175 - DNA, 246 bp, Glycine max
caagttattatcaaataattaattaaattcctcgtggaatcttgttgaagccatgtctacagctggtcaggtcatcaagtgcagagctgcggtggcatgggaagcagggaagccactatcgatagaaaccatagaagtggcaccaccccagaaaggtgaagtgcgtttgaagatcctcttcaactccctttgccgtacagatgtttactggtgggatgctaagggccagatccgctgtttcctcgt

SEQ ID NO: 111176 - DNA, 250 bp, Glycine max
cgtgggaggagtttgtaacatggctgctctaccaacggcggacttagtgacgcaaatgcaacacatgtagcaagttgtgatgtgagggtgttgcatccagtgttcaaggtttacggtggggccactgcgttctccggccccgttgtcaccgtgaaggtgtttgaagacaacgtgttggtgagggagcttcttgagacgaaaggcgaagcccgagtattggttgttgatggaggagtaagcttcatgtgtg

SEQ ID NO: 111177 - DNA, 245 bp, Glycine max
cggctcgagctcgtggagacgtcatcatcgcgattgtggatggcagcgcgcgcccttggcgtgcctcggcacctgcgcgctcctggcgtcggcctgtgggctccccattcggcccgtcttgtaacacggaccaaggagtctgacatgtgtgcgagtcaacgggcgagtaaacccgtaaggcgcaaggaagctgattggtgggatcccctgtgggttgcaccgccgaccgaccctgatcttctgtg

SEQ ID NO: 111178 - DNA, 257 bp, Glycine max
ctccattggtccttaaacactcatcagtcatcaccatggccaagctagttttttccctttgttttctgcttttcagtggctgctgcttcgctttcagttccagagagcagcctcagcaaaacgagtgccagatccaaaaactcaatgccctcaaaccggataaccgtatagagtcagaaggagggctcattgagacatggaaccctaacaacaagccattccagtgtgccggtagttgcctctctcgctagcacctc

SEQ ID NO: 111179 - DNA, 256 bp, Glycine max
aattcttccaccaagttatgggtttccttgcgttgcttcttttctccctcttaggtctctcttctagttccagcatatcaactcatcgttccatattggaccttgacctaaccaagtttaccacacagaaacaggtgtcttcactgttccaactatggaagagtgagcatggacgtgtctaccataaccacgaagaagaggcaaagagacttgagattttcaagaataacttgaactatatcagggacatgaatgc

SEQ ID NO: 111180 - DNA, 83 bp, Glycine max
ctcaaggtcgcagaagcagcagctacaggacagtcaccagaagattcgtcacttcaatgaaggagacgtactcgtgattcctc

SEQ ID NO: 111181 - DNA, 248 bp, Glycine max
cacttattaacactttccttagttcaatatggggaagcccttcttcactctctctctttcttccctttgcttgctactcttgtcgagtgcatgctttgctattacctcccgcaagttcaacgagtgccaactcaacaacctcaacgcgttggaacccgaccaccgcgttgagtccgaaggtggtcttattgaaacatggaactctcaacaccctgagctgcaatgcgccggtgtcactgtttccaaac

SEQ ID NO: 111182 - DNA, 257 bp, Glycine max
cttaattattaacacttccttagttcaatatggggaagcccttcactctctctctttcttccctttgcttgctactcttgtcgagtgcatgctttgctattagctccagcaagctcaacgagtgccaactcaacaacctcaacgcgttggaacccgaccaccgcgttgagtccgaaggtggtttgattcaaacatggaactctcaacaccctgagctgaaatgcgccggtgtcactgtttccaaactcaccctcaac

SEQ ID NO: 111183 - DNA, 249 bp, Glycine max
cttattaacactttccttagttcaatatggggaagcccttcttcactctctctctttcttccctttgcttgctactcttgtcgagtgcatgctttgctattacctccagcaagttcaacgagtgccaactcaacaacctcaacgcgttggaacccgaccaccgcgttgagtccgaaggtggtcttattgaaacatggaactctcaacaccctgagctgcaatgcgccggtgtcactgtttccaaacgca

SEQ ID NO: 111184 - DNA, 251 bp, Glycine max
agaaagtgaaggttctgagtctcaaagagaaccacgaagacataagaataagaacccttttcacttcaactctaaaaggttccaaactctcttcaaaaaccaatatggccacgttcgcgtcctccagaggttcaacaaacgctcccaacagcttcagaatctccgagactaccgcattttggagttcaactccaaacccaacacccttcttctcccccaccatgctgacgctgattacctcatcgttatcc

SEQ ID NO: 111185 - DNA, 251 bp, Glycine max
ctccattgtctttgaacactcatcaccatggccaagcttgttctatccctttgtttccttcttttcagtggctgcttcgctctgagagagcaggcacagcaaaatgagtgccagatccaaaagctgaatgccctcaaaccggataaccgtatagagtcggaaggtgggttcattgagacctggaaccctaacaacaagccattccagtgtgccggtgttgccctctctcgctgcacccttaaccgcaatgc

SEQ ID NO: 111186 - DNA, 251 bp, Glycine max
ataaaattcttccaccaagttatgggtttccttgtgttgcttcttttctccctcttaggtctctcttctagttccagcatatcaactcatcgttccatattggaccttgacctaaccaagtttaccacacagaaacaggtgtcttcactgttccaactatggaagagtgagcatgctcgtgtctaccataaccacgaagaagaggcaaagagacttgagattttcaagaataacttgaactatatcaggga

SEQ ID NO: 111187 - DNA, 252 bp, Glycine max
ataaagatgagtttgaagaacaacatggtggtgctaaaggtgtgtttgttgcttcttttccttgtgggggttacagctgcacgcatggaactgagcttcttcaaaagtgatcagtcatcaagttatgatgatgatgagtattcaaaaccatgctgtgatctctgcatgtgcacacgctcaatgcctcctcaatgcagctgtgaagatattgcgctgaattcatgccactcagattgtaagagctgtatgtgc

SEQ ID NO: 111188 - DNA, 255 bp, Glycine max
ggattgaacaagtttgctgacatcactcctcaagagttcagcaaaaagtacttgcaagctcccaaggatgtgtcgcagcaaatcaaaatggccaacaagaaaatgaagaaggaacaatattcttgtgaccatccacctgcatcatgggattggaggaaaaaaggtgtcatcacccaagtaaagtaccaagggggctgtggaagcggttgggcgttttctgccacgggagccatagaagcagcacatgcaatagca

SEQ ID NO: 111189 - DNA, 252 bp, Glycine max
agagaactcctatcttgttccctctcttctttcttctttgtgccttcacctcatatctaccttcagccaccgctgatgatgatcatgtgtacgacactgacggcgataagcttcaatacggtgtcaattatttcgtgttgccagtgataagaggaaatggcggtggaatacaagtagcaaaagcaggaaacgaaacttgccctctgactgtggtgcaatctggcaacgagctctctgaggggttaccgataa

SEQ ID NO: 111190 - DNA, 256 bp, Glycine max
cattctttctctcttctctctctgtccgaagatggcttcacgcaggttcgtatcttctctgattcgatcctcccttcgtagatctcaatcgaaaccctcgatttccgcatccgcatcgaggctcacgtcatccaaccgtgcctctccgcacggttacttgctgaaccgcgtcgccgaatacgctaccgcggcggcggctgctaccgctcctccctctgctccgcctccgggcaagaaggatgttagcggcggcggg

SEQ ID NO: 111191 - DNA, 250 bp, Glycine max
gttcctggttccacctcaggagtctcagaagagagctgtggcttagagccctttttgtatgtgctaccccacttttgtctttttggcaatagtgctagcaaccaataaataataataataataatgaataagaaaacaaaggctttagcttgccttttgttcactgtaaaataataatgtaagtactctctataatgagtcacgaaacttttgcgggaataaaaggagaaattccaatgagttttctgtc

SEQ ID NO: 111192 - DNA, 262 bp, Glycine max
ctcgagccgcaattccttcacttgcagcactgttgcatcatcatcttcattgcaaaaccctaaacttcaccttcaaccatgaccacacaagtaccaccacacagtgtccaagtccacacaacaacacaccgctacgaagctggcgtcgtcccccccggagcccgtttcgaaccgccgcgttatgaagccggcgtcaaagcgccctccatttaccattccgagagaggtccaacgacttcccaagtcctcgccgtcctcgccg

SEQ ID NO: 111193 - DNA, 262 bp, Glycine max
cattcagctcgagttcatatcctagtacaccgtattaaagaatttaagatatactatgatgagagcgcggttcccattactgttgctgggagttgttttcctggcatcagtttctgtctcatttggcattgcgtattgggaaaagcagaaccccagtcacaacaagtgcctccgaagttgcaatagcgagaaagactcctacaggaaccaagcatgccacgctcgttgcaacctccttaaggtggaggaagaagaagaatgc

SEQ ID NO: 111194 - DNA, 251 bp, Glycine max
cgtacgtatgctcgggtttctgctctgcggctactcggctcgctcgcgtgtactttcttgcgaaacagaagggcgaaggggcacacacaacttttttgtttttttgtagagcgagagagacaaaaaatgttggggatcttcagcagttccgtggtgtcgccgccggaggagctggtggctgccggcagcagtacgccgtcgccgaatacgacggcggtattcaccgctgaagcggttcgtagatgtcattg

SEQ ID NO: 111195 - DNA, 229 bp, Glycine max
ctccattgtctttgaacactcatcaccatggccaagcttgttctttccctttgtttccttcttttcagtggctgcttcgctctgagagagcaggcacagcaacatgagtgccagatccaaaagctgaatgccctcaaaccggataaccgtatagagtcggcaggtgggttcactgagacctcgaaccctaacaacaagctcattccagtgtgccggtgttgccctctct

SEQ ID NO: 111196 - DNA, 246 bp, Glycine max
tttgaacactcatcaccatggccaagcttgttctttccctttgtttccttcttttcagtggctgcttcgctctgagagagcaggcacagcaaaatgagtgccagatccaaaagctgaatgccctcaaaccggataaccgtatagagtcggaaggtgggttcattgagacctggaaccctaacaacaagccattccagtgtgccggtgttgccctctctcgctgcacccttaaccgcaatgcccttc

SEQ ID NO: 111197 - DNA, 249 bp, Glycine max
atttgtccttgaatataatactcagcatggctaagcttgttctttccctttgttttctgcttttcagtggctgctgcttcgctttcagtttcagagagcagccacagcaaaacgagtgccagatccaacgcctcaatgccctcaaaccggataaccgtatagagtcagaaggtggcttcattgagacatggaaccctaacaacaagccattccagtgtgccggtgttgccctctctcgctgcaccctca

SEQ ID NO: 111198 - DNA, 250 bp, Glycine max
gaatattctagaggcctcatacgacaccaaattcgaggagataaacaaggttctgtttggtagagaggaggggcagcaacaaggggaggagaggctgcaagagagtgtgattgtggaaatctcaaagaaacaaattcgggaactgagcaaacatgccaaatctagttcaaggaaaaccatttcttctgaagataaacctttcaacttgagaagccgcgaccccatctattccaacaagcttggcaagttg

SEQ ID NO: 111199 - DNA, 249 bp, Glycine max
ctcactagcttagtttctatatatgcgttatttgtctctgagtactttttctctcttgtgcattacctttgtggtcatggcagcctccgtggatcccctagtggttggtcgcgtgatcggcgatgtggtagacatgttcattccttcagtcaacatgtccgtttactttgggtcgaagcacgtcacaaatggctgtgacatcaagccatccattgccatcagccctcctaagctcaccctcaccggcaa

SEQ ID NO: 111200 - DNA, 249 bp, Glycine max
ctcgagccgctctccattggtccttaaacactcatcagtcatcaccatggccaagctagttatttccctttgttttctgcttttcagtggctgctgcttcgctttcagttccagagagcagcctcagcaaaacgagtgccagatccaaaaactcaatgccctcaaaccggataaccgtatagagtcagaaggagggctcattgagacatggaaccctaacaacaagccattccagtgtgccggtgttgc

SEQ ID NO: 111201 - DNA, 248 bp, Glycine max
catcgtatgaagcaagagcgagagaaacaaatccaagaggaaactcgtgagaagaaagaggaggaaagccgtgaaagggaagaagaacaacaagagcagcatgaggaacaagatgaaaatccctacatttttgaggaagataaggattttgagaccagagtcgaaactgaaggtggcagaattcgggttctcaagaagttcactgaaaaatccaagcttcttcagggcattgagaattccgtttggcc

SEQ ID NO: 111202 - DNA, 249 bp, Glycine max
taacacctcaaattctgtgattcgggtaatggccaccagtggaggcgatgagggccagaacaaccctgccctcgacccggatttggatgctccggatgacccggatcacgagttcgctgagttcgggtcgggttgcttctggggtgctgagttggcctttcagcgagttgtgggtgtggtgaagactgaggttggttacactcagggtcacactccggatccgaattacaaactggtttgcaccggaac

SEQ ID NO: 111203 - DNA, 253 bp, Glycine max
ccaagcttacaattctcctcatcgctcttctcttcatcgcccacacctgctgcgcctccaaatggcaacagcaccagcaagagagctgccgcgagcagctcaaggggatcaacctcaacccctgtgagcacatcatggagaagatccaagctggccgccgcggcgaggacggcagcgacgaagatcacattctcatcaggaccatgccgggaagaatcaactacatcaggaagaaggaaggaaaagaagaaga

SEQ ID NO: 111204 - DNA, 254 bp, Glycine max
cttcaattgcctgcctgtggcagcccgtgttgatgaaaagattttgtgtatgcatggaggactttctcccgacttaaataatttggatcagattagaaatttacagcggcccacagatgttcctgatacaggtttgctttgtgatctcctttggtctgacccgagcagagatgttcaaggatggggaatgaatgacagaggagtttcatttacatttggtgctgataaggtctcagagtttcttcagaaacatg

SEQ ID NO: 111205 - DNA, 259 bp, Glycine max
ctccattggtccttaaacactcatcagtcatcaccatggccaagctagttttttccctttgttttctgcttttcagtggctgctgcttcgctttcagttccagagagcagcctcagcaaaacgagtgccagatccaaaaactcaatgccctcaaaccggataaccgtatagagtcagaaggcgggctcattgagacatggaaccctaacaacaagccattccagtgtgccggtgttgccctctctcgctgcaccctcaa

SEQ ID NO: 111206 - DNA, 257 bp, Glycine max
aagagttagagtggtgaactgccaagggaatgcagtgttcgacggtgagctaaggaggggacaattgctagtggtgccgcagaactttgtggtggctgagcaagggggagaacaaggattggaatacgtagtgttcaagacacaccacaacgccgtgagcagctacattaaggatgtgtttagggcaatcccttcggaggttctttccaattcttacaaccttggccagagtcaagtgcgtcactcaagtatcaagg

SEQ ID NO: 111207 - DNA, 259 bp, Glycine max
gatacatagtagtgttggtgggttgcaaagatgcttgggggtcttctccataggggtcataagataaaagggacagtggtgttgatgcgcaagaatgtgttggacgtgaatagcgtaaccagcgttgggggaattattggtcaaggtctcgacttagttggctcgacactcgatactcttactgccttcttgggccgatccgtgtctctccagcttattagtgctaccaaagctgatgccaacggaaaagggaaacttg

SEQ ID NO: 111208 - DNA, 262 bp, Glycine max
ttaacacttccttagttcaatatggggaagcccttcactctctctctttcttccctttgcttgctactcttgtcgagtgcatgctttgctattagctccagcaagctcaacgagtgccaactcaacaacctcaacgcgttggaacccgaccaccgcgttgagtccgaacgtggtttgattcaaacatggaactctcaacaccctgagctgaaatgcgccggtgtcactgtttccaaactcaccctcaaccgcaatggcctcc

SEQ ID NO: 111209 - DNA, 259 bp, Glycine max
gattttcgcccagaacatggtcagagcggcggagatcaggcgctggaccccaccgccgtccacggcgtcacgcagttctccgatctcaccgaggacgagtttgagaagctctacactggcgtcaatggcggcttcccgtcatcgaataatgccgccggcggtattgcgccgccgttggaggtggacgggctgccggagaattttgattggagagagaaaggagctgtcaccgaagttaagttaccaggtagatgtggat

SEQ ID NO: 111210 - DNA, 260 bp, Glycine max
cggcgtcaaagcgccctccatttaccattccgagagaggtccaacgacttcccaggtcctcgccgtcctcgccggcctcccggtcggtggcatcctgctcctcctggcgggattgaccctggcaggaaccctcaccggactggcagttgccacgccgctcttcgtcctcttcagcccggtgctggttccagccacggtcgccatcggcctggccgtggccgggttcctgacgtcgggggccttcgggctcacggcgctgt

SEQ ID NO: 111211 - DNA, 259 bp, Glycine max
caatatcctagtataccttaataaataatttaagatactatgatgagagcacggttcccattactgttgctgggacttgttttcctggcttcagtttctgtctcatttggcattgcttactgggaaaaagagaaccccaaacacaacaagtgtctccagagttgcaatagcgagagagactcgtacaggaaccaagcatgccacgctcgttgcaacctccttaaggtggagacagaagaatgtgaagcaggtgacattc

SEQ ID NO: 111212 - DNA, 257 bp, Glycine max
ctttgaacactcatcaccatggccaagcttgttctttccctatgtttccttcttttcagtggctgcttcgctctgagagagcaggcacagcaaaatgagtgccagatgcaaaagctgaatgccctcaaaccggataaccgtatagagtcggaaggtgggttcattgagacctggaaccctaacaacaagccattccagtgtgccggtgttgccctctctcgctgcacccttaaccgcaatgcccttcgtagaccttc

SEQ ID NO: 111213 - DNA, 255 bp, Glycine max
aataattccttcacttgcagaacttagttctctgttgcatcatcatcatcttcattagtgttagccctaaacttcaccttcaaccatgaccacagtgccaccacacagtgtccaagtgcacacaacaacacacccctacgacgccggcgtcgtcccgccggctcgttttgcggcgccgcgttacgaagccggcatcaaggcgccctcttccatttaccattccgagagaggtccgacgacctctcaggttctcgc

SEQ ID NO: 111214 - DNA, 260 bp, Glycine max
cgctatgtaactatgactagagcttcaactatgaataaagaggaggggaataagggaagaaagggtcctttgtcttcaattttgagggctttttactgaataagtatgtactaaaatgtatgctgtaatagctcatagtgagcgaggaaagtatcgggctatgtaactatgactagagcttcaactatgaataaataaatcgacagcatatgatgctttcgttttatgtccacatagttgaagctctagtcatagtcact

SEQ ID NO: 111215 - DNA, 262 bp, Glycine max
attggcaaattttttgacagagggcaattttagagcaagtgttgatttgcagcgcactcatcgtattaaaggaatgattaaaatggtggccacagttggtattcctgagaatacaggtatagcattggcctgtgctatgaatagttcttttagggggcgtgccagttctgatatttacaccatctgctctcaagactgtgaattatggaatcctgcttgcacaaaagcaatgactatgtcatttaatccaaacccgtgttct

SEQ ID NO: 111216 - DNA, 107 bp, Glycine max
ctgaagcaaagcaatggctacttcaaagttgaaaacccagaatgtggttgtatctctctccctaaccttaaccttggtactggtgctactgaccagcaaggcaaact

SEQ ID NO: 111217 - DNA, 255 bp, Glycine max
cttcttctcttcttcttcaagattgcgacgacgatccaagtgctagacactcgttgcgatggaacttgtagctgaatccgagcgaactctgtacccatacgtgactggatcctctgtagtcgctatcaaatacaaagatgggattctaatggccgctgacatgggaggttcgtatggatctaccctgcggtataagagtgttgagcgtatcaagcctattggaaagcattctcttcttggtgctagcggggagat

SEQ ID NO: 111218 - DNA, 258 bp, Glycine max
agcaaatcaaaatggccaacaagaaaatgaagaaggaacaatattcttgtgaccatccacctgcatcatgggattggaggaaaaaaggtgtcatcacccaagtaaagtaccaagggggctgtggaagcggttgggcgttttctgccacgggagccatagaagcagcacatgcaatagcaacaggagaccttgttagcctttctgaacaagaactcgtagactgtgtggaagaaagcgaaggttgttacaatggatggc

SEQ ID NO: 111219 - DNA, 254 bp, Glycine max
gcaatgttctcgtgaagcttcaaggtgcagacttctacaaccctaaagctggtcgcattagtaccctcaacagcctcaccctcccagccctccgccaattccaactcagtgcccaatatgttgtcctctacaagaatggaatttactctccacattggaatctgaatgcaaacagtgtgatctatgtgactcgaggacaaggcacggttagagttgtgaactgccacgggcatgcagtgttcgacggtgagctt

SEQ ID NO: 111220 - DNA, 253 bp, Glycine max
aattccttcacttgcagcactgttgcatcatcatcttcattgcaaaaccctaaacttcaccttcaaccatgaccacacaagtaccaccacacagtgtccaagtccacacaacaacacacgacctacgaagctggcgtcgtcccccccggagcccgtttcgaaccgccgcgttatgaagccggcgtcaaagcgccctccatttaccattccgagagaggtccaacgacttcccaggtcctcgccgtcctcgccg

SEQ ID NO: 111221 - DNA, 257 bp, Glycine max
attgtctttgaacactcatcaccatggccaagcttgttctttccctttgtttccttcttttcagtggctgcttcgctctgagagagcaggcacagcaaaatgagtgccagatccaaaagctgaatgccctcaaaccggataaccgtatagagtcggaaggtgggttcattgtcacctggaaccctaacaacaagccattccagtgtgccggtgttgccctctctcgctgcacccttaaccgcaatgcccttcgtaga

SEQ ID NO: 111222 - DNA, 264 bp, Glycine max
tcttattaacactttccttagttcaatatggggcagcccttcttcactctctctctttcttccctttgcttgctactcttgtcgcgtgcatgctttgctattacctccagcaagttcaacgagtgccaactcaacaacctcaacgcgttggaacccgaccaccgcgttgagtccgacaggtggtcttattgacacatggcactctcaacaccctgagctgcaatgcgccggtgtcactgtttccaaacgcaccctcaaccgcaa

SEQ ID NO: 111223 - DNA, 258 bp, Glycine max
tgaacactcatcaccatggccaagcttgttctttccctttgtttccttcttttcagtggctgcttcgctctgagagagcaggcacagcaaaatgagtgccagatccaaaagctgaatgccctcaaaccggataaccgtatagagtcggaaggtgggttcattgagacctggaaccctaacaagaagccattccagtgtgccggtgttgccctctctcgctgcacgcttaaccgcaatgcccgtcgtagaccttcctac

SEQ ID NO: 111224 - DNA, 222 bp, Glycine max
ggagaatgaaaatgatggccattcctattcttctgctgggagtagaactgttaaggaacctagagttgtagttcaaaccacaagtgaaattgacatacttgatgatggatataggtggcggaaatatggcacgaacgtagttacaggcaatccaaacccaaggtatttccatcttttagattttaatagaagagtttaactgtgatgtactattggactagt

SEQ ID NO: 111225 - DNA, 257 bp, Glycine max
ctctgtttctgtctctgtgtttgcggctgaggattccgaacgagcgaccttcttcgtttctcgcaaagtttaagtcatcatgggtaaggaaaagactcacatcaacattgtcgtcattggacatgtcgactctgggaagtcaactaccactggtcatttgatctacaagcttggaggtattgacaagcgtgtgattgagaggttcgagaaggaggctgctgagatgaacaagaggtcattcaagtatgcctgggtgc

SEQ ID NO: 111226 - DNA, 259 bp, Glycine max
ggcttatctttctctcttctctctccccgcccaaaccctaactccctaccctattccgctttctctcatccatcatgaaaggaggaaagtccaagaccgaatctaagagagccgatgccaaacttgctgtgaatacgaagggcgccgccaccaagactaggaaacccgccggaaaggggaaggcagcgaaagatcctaacaagccaaagaggcctccaagtgctttcttcgttttcatggaggaattcaggaaggtgtt

SEQ ID NO: 111227 - DNA, 257 bp, Glycine max
gtttaggattgaacaagtttgctgacatcactcctcaagagttcagcaaaaagtacttgcaagctcccaaggatgtgtcgcagcaaatcaaaatggccaacaagaaaatgaagaaggaacaatattcttgtgaccatccacctgcatcatgggattggaggacaaaaggtgtcatcacccaagtaaagtaccaagggggctgtggaagcggttgggcgttttctgccacgggagccatagcagcagcacatgcaata

SEQ ID NO: 111228 - DNA, 252 bp, Glycine max
ctaagttatgggtttccttgtgttgcttcttttctccctcttaggtctctcttctagttccagcatatcaactcatcgttccatattggaccttgacctaaccaagtttaccacacagaaacaggtgtcttcactgttccaactatggaagagtgagcatggacgtgtctaccataaccacgaagacgcggcaaagagacttgagattttcaagaatacacttgaactatatcagggacatgactgcaaaca

SEQ ID NO: 111229 - DNA, 259 bp, Glycine max
caaacttaattattaacacttccttagttcaatatggggaagcccttcactctctctctttcttccctttgcttgctactcttgtcgcgtgcatgctttgctattagctccagcaagctcaacgcgtgccaactcaacaacctcaacgcgttggaacccgaccaccgcgttgcgtccgacggtggtttgattcacacatggaactctcaacaccctgcgctgaaatgcgccggtgtcactgtttccaaactcaccctca

SEQ ID NO: 111230 - DNA, 257 bp, Glycine max
ctgcctcccagatgacaaaactttgccatttgatgaagcaatacagtttcttgagcaatgtgagaaggataaggagcgtgttctggttcattgcatgtcaggaaagagtaggtctccagctattgtgattgcatacttgatgaagtccaaaggatggagacttgtacacagttatcagtgggtaaaggcacggagaccttctgttgaattaactcaaggtgtgtaccagcagctgcaggagtttgaggacaagattt

SEQ ID NO: 111231 - DNA, 254 bp, Glycine max
ctcgagccgaatcggctcgaggttaaaaggtttatcttcagaaggcgcgaccccatctagtccaacaagcttggcaagagctttgagatcaccccagagaaaaacccccagcttcgggacttggatatcttcctcagtattgtggatatgaacgagggagctcttcttctaccacactgcaattcaaaggcgatagtgatactggtaattaatgaaggagatgcaaacattgaacttgttggcctaaaagaaca

SEQ ID NO: 111232 - DNA, 252 bp, Glycine max
gcacaaagagaagcattagcactaggagcagcaacaactagtctcagctgaaatggcctcttcagtgatggcatctgtggccctcaaacctgcccctttcactgttgagaagtcctcagtgcgaggccttccctctctctcaaggaactcttcttcattcagagttgtgagcagtggcacgaagatcacgactgacaaaccttatggacttaatggtgagctggctttgcgggatggaactgatgcatctgg

SEQ ID NO: 111233 - DNA, 241 bp, Glycine max
cagatccaaaagctgaatgccctcaaaccggataaccgtatagagtcggaaggtgggttcattgagacctggaaccctaacaacaagccattccagtgtgccggtgttgccctctctcgctgcacccttaaccgcaatgcccttcgtagaccttcctacaccaacggtccccaggaaatctacatacaacaaggtaatggtatttttggcatgatattcccgggttgtcctagcacttatc

SEQ ID NO: 111234 - DNA, 248 bp, Glycine max
agggtttggactttggaaaggcttattctccgctctcgtctgaaacctgaaaccctttgttcttcgtcggcggaagcatgtcatcgtcatcatcaagcaacgcctacgacgtgccatgggtagaaaagtaccgtcccagcaaggtcgccgacatcgtcggcaacgaggacgccgtctccaggctccaagtcatcgctcgcgacggcaacatgcccaatctcattttatccggtcctctcggaaccggc

SEQ ID NO: 111235 - DNA, 198 bp, Glycine max
ctcgagccgctcagctcaggagtgtatactctgagcgatgtcagatcttgaggctccctatgcgccctaagcggacgacggtttgggtggactatttcgttcagtttcgatggatccttgttatttttgcggtccttcccatctccttcaccatttatttccttacataccttggggctgtacgatctgagtggcagt

SEQ ID NO: 111236 - DNA, 206 bp, Glycine max
agaagattcgtcacttcaatgaaggagacgtactagtgattcctcctggtgttccttactggacctataacactggcgatgaaccagttgttgccatcagtcttcttgacacctccaacttcaacaatcagcttgatcaaaaccccagagtattttaccttgctgggaacccagatatagagcacccagagaccatgcaacaacag

SEQ ID NO: 111237 - DNA, 249 bp, Glycine max
agataaatggagttaagaacgtagaggtggacttgagcaatcaggttgtgaggattctcggttcaacaccggtgaagactatgactgaagctttggagcagactggtagaaaagcccggttaattggacaaggcgtgccggaagacttcttaatatctgctgctgtttccgaattcaaaggtccagatatttttggtgttgttcgcctggctcaagtaaatctggcactggctacgattgaagccaact

SEQ ID NO: 111238 - DNA, 254 bp, Glycine max
caatatcctagtataccttaataaataatttaagatactatgatgagagcacggttcccattactgttgctgggacttgttttcctggcttcagtttctgtctcatttggcattgcttactgggataaagagaaccccaaacacaacaagtgtctccagagttgcaatagcgagagagactcgtacaggaaccaagcatgccacgctcgttgcaacctccttaaggtggagatagacagctgtgaagaaggtga

SEQ ID NO: 111239 - DNA, 250 bp, Glycine max
cttccaccaagttatgggtttccttgtgttgcttctttctccctcttaggtctctcttctagttccagcatatcaactcatcgttccatattggaccttgacctaaccaagtttaccacacagaaacaggtgtcttcactgttccaactatggacgagtgagcatggacgtgtctaccataaccacgaagccgcggcaacgagacttgagattttcccgaataccttgaactatatcagggacatgaatg

SEQ ID NO: 111240 - DNA, 256 bp, Glycine max
gaattgtatgtaaaaaataaaaatggagaagaaagagaagcgggcctgagaagcgaaaagaaggcctgggcttagttgataagcataactgggtgaggaagaaagaaagagagtgaagaagatggcgtcgagcggagcgataccgttttggagggcggcggggatgacgtacataacatactcaaacatatgcgcgaatctgctcaggaattgcctcaaggaaccctacaaggccgaatccctctctcgtgagaag

SEQ ID NO: 111241 - DNA, 255 bp, Glycine max
cgaggaatggttaaggctggatttgctggagatgatgccccacgtgctgtgtttcccagcattgtaggtcgtcctcgtcacactggtgtgatggttggcatgggccaaaaagatgcatatgttggtgatgaggcacaatctaagaggggtattttgactctcaagtaccccattgaacatggaattgtgagcaattgggatgatatggaaaagatttggcatcataccttctataatgagcttcgtgttgcccca

SEQ ID NO: 111242 - DNA, 254 bp, Glycine max
agacttattaacactttccttagttcaatatggggaagcccttcttcactctctctctttcttccctttgcttgctactcttgtcgagtgcatgctttgctattacctccagcaagttcaacgagtgccaactcaacaacctcaacgcgttggaacccgaccaccgcgttgagtccgaaggtggtcttattgaaacatggaactctcaacaccctgagctgcaatgcgccggtgtcactgtttccaaacgcacc

SEQ ID NO: 111243 - DNA, 252 bp, Glycine max
atcaaacttcatggcatttgagtttccttattgacaatcccaaacagtctacagtttttgatattctcttgggaatttctcaagattttgaaattgctggtaatactcttatgccagctttttctgttccacaggctactgccagatcttctgaaaatgcggaatcctctgcatgctctggaatttgtgttttctttcgcttgttcgtttgtttaattcaataaaggaaattcggcatgaccctcttgttga

SEQ ID NO: 111244 - DNA, 250 bp, Glycine max
cagaaaggtatatttgatcagggatatggcaactcgaagatatgagtttggaaggatgaatgaggctagccacccagactccatcagagctgccttggctgaattcctctccacttgcatctttgtctttgctggagaaggctctgcccttgctttgcgacaaatttacaaggaaccagggtcatcagcgggtgcgctagtggtaattgcactagctcatgcatttgctctatttgctgctatttctgct

SEQ ID NO: 111245 - DNA, 255 bp, Glycine max
cggctcgagcggtcgacctaattattaacacttccttcgttcactctggggcagcccttcactctctcgctttcttccctttgcttgctactcttgtcgagtgcatgctttgctattagctccagcaagctcaacgagtgccaactcaacaacctcaacgcgttggaacccgaccaccgcgttgagtccgacagtggtttgattcacacatggaactctcaacaccctgagctgacatgcgccggtgtcactgtt

SEQ ID NO: 111246 - DNA, 256 bp, Glycine max
gttcaatatcctagtataccttaataaataatttaagatactatgatgagagcacggttcccattactgttgctgggacttgttttcctggcttcagtttctgtctcatttggcattgcttactgggaaaaagagaaccccaaacacaacaagtgtctccagagttgcaatagcgagagagactcgtacaggaaccaagcatgccacgctcgttgcaacctccttaaggtggagcacgcagaatgtgaagaaggtg

SEQ ID NO: 111247 - DNA, 255 bp, Glycine max
gaagcaaagcaatggctacttcaaagttgaaaacccagaatgtggttgtatctctctccctaaccttaaccttggtactggtgctactgaccagcaaggcaaactcagcggaaactgtttctttcagctggaacaagttcgtgccgaagcaaccaaacatgatcctccaaggagacgctattgtgacctcctcgggaaagttacaactcaataaggttgacgaaaacggcaccccaaaaccctcgtctcttggtc

SEQ ID NO: 111248 - DNA, 251 bp, Glycine max
gtggatatgaacgagggagctcttcttctaccacactgcaattcaaaggcgatagtgatactggtaattaatgaaggagatgcaaacattgaacttgttggcctaaacgaacaacaacaggagcagcaacaggaagcgcaacctttggaagtgcggaaatatagagccgaattgtctgaacaagatatatttgtaatcccagcaggttatccagttgtggtcaacgctacctcaaatctgaatttctttgc

SEQ ID NO: 111249 - DNA, 231 bp, Glycine max
caacatgcctttttgtgaagtaaaaaaactaccctcgatccatgcctcaaaagggttgataataagtacaaaaaatcaatgaattcatgataaaacccttctgcgtttttttattataaatttttttgtcaataaagggatcaaggggttgggggatcacatggtaaagttcttttgttggtacattggaggattagacacatgactattgctttccaattcgctgttttt

SEQ ID NO: 111250 - DNA, 253 bp, Glycine max
tggaagcccttcactctctctctttcttccctttgcttgctactcttgtcgagtgcatgctttgctattcgctccagcaagctcaacgcgtgccaactcaacaacctcaacgcgttggaacccgaccaccgcgttgcgtccgacggtggtttgcttcaaacatggcactctcaacaccctgagctgaaatgcgccggtgtcactgtttccaaactcaccctcacccgcaatggcctccacttgccatcttact

SEQ ID NO: 111251 - DNA, 246 bp, Glycine max
gacacttccttagttcaatatggggcagcccttcactctctctctttcttccctttgcttgctactcttgtcgagtgcatgctctgctattagctccagcaagctcaacgagtgccaacgcaacaacctcaacgcgttggaacccgaccaccgcgttgagtccgaaggtggtttgattcaaacatggaactctcaacaccctgagctgaaatgcgccggtgtcactgtttccaaaactcacctcaa

SEQ ID NO: 111252 - DNA, 253 bp, Glycine max
gggttttagaacatggtgggattgccactgatgatgattatccttacagagctaaagagggtagatgcaaagccaataagatacaagacaaggttacaattgacggatatgaaactctaataatgtcagatgagagtacagaatcagagacagagcaagcgttcttaagcgccatccttgagcaaccaattagtgtctccattgatgcaaaagcattttcatttatacaccgggggaatttatgatggagaaa

SEQ ID NO: 111253 - DNA, 236 bp, Glycine max
attttacagaaatcacatggaagacgtgattaagttttttgaaactcaccataaggataaatacaaagtttatcatctttgttctgagcggttgtatgctgcatcattgtttgaggggccggtggctagcttcccatttgatgaccacaattgcccaccaattcaactgattatatcattctgtcaaagtgcttactcatggttgaacgccgacattgcgcatgttgtggttgtcc

SEQ ID NO: 111254 - DNA, 250 bp, Glycine max
gtatgcatctaagtttggagttgatgcaggataaatgatggaaaggctctggggtgaaaacttctttgatccagccacaaagcaatggtccagcaagaatactggttctgctacctgcaagcgtgggtttgttcagttctgttacgcgcccatcaagcagattattaacacttgtatgaatgatcagccggataagctgtggcctatgctgcacaagcttggggtcaccatgaacatctgaggcgacgga

SEQ ID NO: 111255 - DNA, 249 bp, Glycine max
ccttaataaataatttaagatactatgatgagagcacggttcccattactgttgctgggacttgttttcctggcttcagtttctgtctcatttggcattgcttactgggaaaaagagaaccccaaacacaacaagtgtctccagagttgcaatagcgcgagagactcgtacaggaaccaagcatgccacgctcgttgcaacctccttaaggtggcgaacgacgaatgtgaagacggtgaaattccacga

SEQ ID NO: 111256 - DNA, 251 bp, Glycine max
gcccttcactctctctctttcttccctttgcttgctactcttgtcgagtgcatgctttgctattagctccagcaagctcaacgagtgccaactcaacaacctcaacgcgttggaacccgaccaccgcgttgagtccgaaggtggtttgattcaaacatggaactctcaacaccctgagctgaaatgcgccggtgtcactgtttccaaactcaccctcaaccgcaatggcctccacttgccatcttactcac

SEQ ID NO: 111257 - DNA, 86 bp, Glycine max
ggccccccaaaaatgaagagcaccatcttctttgctctctttctcttttgtgccttcaccacctcatacctaccttcagccatcgc

SEQ ID NO: 111258 - DNA, 255 bp, Glycine max
ctaacaattccttcacttgcagcactgttgcatcatcatcttcattgcaaaaccctaaacttcaccttcaaccatgaccacacaagtaccaccacacagtgtccaagtccacacaacaacacacacctacgaagctggcgtcgtcccccccggcgcccgtttcgaaccgccgcgttatgaagccggcgtcaaagcgccctccatttcaccttccgagagcgggtccaacgacttcccaggtcctcgccgtcctcg

SEQ ID NO: 111259 - DNA, 196 bp, Glycine max
gccgaggccccctactgctggtcggcaaacggacggcgggcgcacgcgtcgcttctagcccggattctgacttagaggcgttcagtcataatccaacgcacggtagcttcgcgccactggcttttcaaccaagcgcgatgcccaattgtgcgaatcaacggttcctctcgtactaggttgacttactattgcgaca

SEQ ID NO: 111260 - DNA, 220 bp, Glycine max
agccccccaaaaatgaagagcaccatcttctttgctctctttctcttttgtgccttcaccacctcatacctaccttcagccatcgctgatttcgtgctcgataatgacggtaaccctcttgaaaatggtggcacatattatatcttgtcagacataacagcatttggtggaataagagcagccccaacgggaaatgaaagatgccctctcactgtggtgc

SEQ ID NO: 111261 - DNA, 249 bp, Glycine max
gcaagccccactcaaccaccacaccactctctctgctcttcttctacctttcaagtttttaaagtattaagatggcagagacattcctatttacctcagagtcagtgaacgagggacaccctgacaagctctgcgaccaaatctccgatgctgtcctcgacgcttgccttgaacaggacccagacagcaaggttgcctgcgaaacatgcaccaagaccaacttggtcatggtcttcggagagatcacca

SEQ ID NO: 111262 - DNA, 248 bp, Glycine max
tgggaacatccatacacaggtaactgagccgcttttgcaagaacttttctcgggtactggcccagttgaaggttgtaagcttatcagaaaggataagtcatcctatggattcattcattactttgatcgcagatctgctgctcttgccatattatctctcaatggaaggcatctatttgggcagcctatcaaagttaattgggcatatgctagtggtcagagagcggatacgtcaggtcactacaata

SEQ ID NO: 111263 - DNA, 241 bp, Glycine max
cttaattattaacacttccttagttcaatatggggaagcccttcactctctctctttcttccctttgcttgctactcttgtcgagtgcatgctttgctattagctccagcacgctcaacgagtgccaactcaacaacctcaacgcgttggaccccgaccaccgcgttgagtccgacggtggtttgattcacacatggcactctcaacaccctgcgctgaactgcgccggtgtcactgtttc

SEQ ID NO: 111264 - DNA, 250 bp, Glycine max
ggcgcgtttcatttgatcagatcataacaatggtgtccgaaggcactctcctgggcatgggtaaccctctcctcgacatctccgccgtcgtcgatgaagacttcttaaaaaaatatgatatcacctcgaacaatgcgattcttgcggaggacaagcacaagcctatgtatcaagaattggctgagaaatataatgtggagtacattgctggaggtgccactcagaattcaatcaaggttgctcaatggat

SEQ ID NO: 111265 - DNA, 250 bp, Glycine max
agagctctgacacaattgacaatgtgaaggccaagatccaagacaaggagggtattcctccagaccagcaaaggttgatttttgctgggaagcagcttgaagatggacgcacgctggcagactacaacattcaaaaggcgtctacccttcaccttgtccttcgtctgaggggcggtatgcagatctttgtgaagactttgacacgaaaaactatcaccttggcggttgaacattcagacacaattgataa

SEQ ID NO: 111266 - DNA, 252 bp, Glycine max
ctcgagccgcgctgattacctcatcgttatccttaacgggactgccattcttaccttggagtacaacgacgaccgagactcttacaaccttcaatctggcgatgccctaagagtccctgcaggaaccacatactatgtggttaaccctgacaacgacgagaatctcagaatgataacactcgccatacccgttaacaaacccggtagatttgagagtttcttcctatctagcactcaagctcaacagtccta

SEQ ID NO: 111267 - DNA, 254 bp, Glycine max
tctctccattgtctttgaacactcatcaccatggccaagcttgttctttccctttgtttccttcttttcagtggctgcttcgctctgagagagcaggcacagcaaaatgagtgccagatccaaaagctgaatgccctcaaaccggataaccgtatagagtcggaaggtgggttcattgagacctggaaccctaacaacaagccattccagtgtgccggtgttgccctctctcgctgcacccttaaccgcaatgc

SEQ ID NO: 111268 - DNA, 244 bp, Glycine max
atgccacgtcactggcaagtttgatacaaaaaacattgaactaattgtgccaacctatccggctgctgccctactgctattcaacaatgctgataggttgagctattcagagattttgactcagctgaacttgggccatgaagatgttgttagattgctccattcactgtcatgtgcaaaatataagatacttatcacggagccaaacaataaaggtatatctcaaaatgacatctttgagttc

SEQ ID NO: 111269 - DNA, 251 bp, Glycine max
cgaagaagaagatcaacctcgtcctgatcaccctccacagcgaccaagcaggcccgaacaacaagaaccacgtggaagaggatgtcagactagaaatggggttgaggaaaatatttgcaccatgaagcttcacgagaacattgctcgcccttcacgtgctgacttctacaacccaaaagctggtcgcattagcaccctcaacagtctcaccctcccagccctccgccaattcggactcagtgcccaatatg

SEQ ID NO: 111270 - DNA, 245 bp, Glycine max
taaaattcttccaccaagttatgggcacacttgtgttgcttcttttctccctcttaggtctctcttctagttccagcatatcaactcatcgttccatattggaccttgacctaaccaagtttaccacacagaaacaggtgtcttcactgttccaactatggaagagtgagcatggacgtgtctaccataaccacgaagaagcggcaaagagcacttgagattttcaagaataacttgaactatat

SEQ ID NO: 111271 - DNA, 250 bp, Glycine max
cggaaagccttatcttttctgtttaacagcctgcccaccctggaaacggctcagccggaggtagggtccagcggctggaagagcaccgcacgtcgcgtggtgtccggtgcgcccccggcggcccttgaaaatccggaggaccgagtgcctcccacgcccggtcgtactcataaccgcatcaggtctccaaggtgaacagcctctggtcgatggaacaatgtaggcaagggcagtcggcaaactggatccg

SEQ ID NO: 111272 - DNA, 85 bp, Glycine max
attctctccattggtccttaaacactcatcagtcatgaccatggccaagctagttttttccctttgttttctgcttttcagtggc

SEQ ID NO: 111273 - DNA, 249 bp, Glycine max
agcaaaatgaccaagttcacaatcctcctcatctctcttctcttctgcatcgcccacacttgcagcgcctccaaatggcagcaccagcaagatagctgccgcaagcagctccagggggtgaacctcacgccctgcgagaagcacatcatggagaagatccaaggccgcggcgatgacgatgatgatgatgacgacgacaatcacattctcaggaccatgcggggaagcatcaactacataaggcggaac

SEQ ID NO: 111274 - DNA, 262 bp, Glycine max
ggaacagcataatatacgcattgaatgggcgggcattggtacaagtggtgaattgcaatggtgagagagtgtttgatggagagctgcaagagggaggggtgctgatcgttccacaaaactttgcggtggctgcaaaatcccagagcgataactttgagtatgtgtcattcaagaccaatgatagaccctcgatcggaaaccttgcaggggcaaactcattgttgaacgcattgccagaggaagtgattcagcacacttttaa

SEQ ID NO: 111275 - DNA, 274 bp, Glycine max
ttcggctcgagaacaattccttcacttgcagcactgttgcatcatcatcttcattgcaaaaccctaaacttcaccttcaaccatgaccacacaagtaccaccacacagtgtccaagtccacacaacaacacaccgctacgaagctggcgtcgtcccccccggagcccgtttcgaaccgccgcgttatgaagccggcgtcaaagcgccctccacttaccattccgagagaggtccaacgacttcccaggtcctcgccgtcctcgccggcctcccg

SEQ ID NO: 111276 - DNA, 259 bp, Glycine max
gttcaatatcctagtataccttaataaataatttaagatactatgatgagagcacggttcccattactgttgctgggacttgttttcctggcttcagtttctgtctcatttggcattgcttactgggaaaaagagaaccccaaacacaacaagtgtctccagagttgcaatagcgagagagactcgtacaggaaccaagcatgccacgctcgttgcaacctccttaaggtggagaaagaagaatgtgaagaaggtgaaa

SEQ ID NO: 111277 - DNA, 237 bp, Glycine max
gcagaggctgcaagagtctctgtcgtggttgttcaccaaggaaagaatgggactgccgttaaggataacgatgaggagcagcaaggagagagcgaagaaagtgaagattctgagttacgaagacataagaataagaacccttttctcttcggctctaacaggttcgaaactctcttcaaaaaccaatatggtcgcattcgcgtcctccagaggttcaaccaacgctccccacaactt

SEQ ID NO: 111278 - DNA, 257 bp, Glycine max
ggcgaactgctcaaagaagaagactggagtctcttattgaagatggaagaagaatatattgaggagctatgcatgcagatattgaagtttaaaccggacttggtaatcacagagaagggtctgagtgatttggcaacccattatctcagcaagcatggagttagtgcaatcaggaggctgaggaaaactgataataatagaattgcaaaggcttgtggtgctgttattgtgaacagaccagatgaattgcaggagtc

SEQ ID NO: 111279 - DNA, 259 bp, Glycine max
tttgaacactcatcaccatggccaagcttgttctttccctttgtttccttcttttcagtggctgcttcgctctgagagagcaggcacagcaaaatgagtgccagatccaaaagctgaatgccctcaaaccggataaccgtatagagtcggaaggtgggttcattgagacctggaaccctaacaacaagccattccagtgtgccggtgttgccctctctcgctgcacccttaaccgcaatgcccttcgtagaccttccta

SEQ ID NO: 111280 - DNA, 260 bp, Glycine max
gtttatctccgcactccgtcttcatgaatcagcatcaccaccgctccaacacaggtgaaaatgagggagatccttcacgttcagggagggcaatgcgggaaccagatcggttcgaagttctgggaagtggtgtgcgacgagcacggcatagatccgacggggaagtacgtcggaaactcagatctacaactcgagcgcgtgaacgtgtactacaacgaagcttcctgcgggcggtttgtcccacgcgcagtgctgatgga

SEQ ID NO: 111281 - DNA, 260 bp, Glycine max
  unsure (1)..(260): unsure at all n locations
ctcttcttctcttgcggcgtnggttttagcgcacttcttctagatttaaggaagatgggtaaggaaaaggttcacatcagtattgtggtcattggccatgtcgactctgggaagtccactaccactggtcacctgatttacaagcttggaggcattgacaagcgtgttattgagaggtttgagaaggcagctgctgagatgaacaagaggtctttcaagtatgcctgggtgctggacaaacttaaggctgagcgtgaaag

SEQ ID NO: 111282 - DNA, 239 bp, Glycine max
cacaatgctcccttaccatacccttgaaggagcacaagttgcactaggcagaggactaacccttgctgagacaatatggttcaaatactctgccaacaaacctgattttgttcttcattgccacaacactctattcttgtgcttattttactctatagctccaattcctttcgtattaatggagcttagtgggtatgagaagctaaacaaacacaaaattcagccctcggttaagagat

SEQ ID NO: 111283 - DNA, 261 bp, Glycine max
tgtcgcatttggcattgcttactgggaaaaagagaaccccaaacacaacaagtgtctccagagttgcaatagcgagagagactcgtacaggaaccaagcatgccacgctcgttgcaacctccttaaggtggagaaagaagaatgtgaagaaggtgaaattccacgaccacgaccacgaccacaacacccggagagggaacctcagcaacccggtgagaaggaggaagacgaagatgagcaaccacgtccaatcccattccc

SEQ ID NO: 111284 - DNA, 257 bp, Glycine max
gtcaattccaacaacaccacaatgggaagaagaccggcgaggtgttaccggcagataaagaacaaaccgtacccgaaatcccgtttctgccgcggcgtgccggagccgaagatccgaatctacgacgtgggaatgaagaagaaaggcgtggacgagttcccgttctgcgtgcacctggtctcgtgggagaaggagaacgtctccagcgaggctttggaggcggcgcgcatcgcatgcaacaagtacatggccaagtt

SEQ ID NO: 111285 - DNA, 257 bp, Glycine max
ttgtctttgaacactcatcaccatggccaagcttgttctttccctttgtttccttcttttcagtggctgcttcgctctgagagagcaggcacagcaaaatgagtgccagatccaaaagctgaatgccctcaaaccggataaccgtatagagtcggaaggtgggttcattgagacctggaaccctaacaacatattgagtggcttcgcccctgaattcttgaaagaagcgttcggcgtgaacatgcagatagtgagaa

SEQ ID NO: 111286 - DNA, 256 bp, Glycine max
ctagactcttccttttctcttctctgtctaaggggtgccctgagatcacattgaacaatggtgaaggctgtggccgttcttggcagcagtgagggtgtcactggaactattcacttcgttcaggagggaagtggtccaaccaccgtaactggatctcttgctggtcttaagcctggtctccatggtttccatgtccatgccttgggggacactaccaatggttgcctctcaactggatcacatttcaatcctaata

SEQ ID NO: 111287 - DNA, 255 bp, Glycine max
ggggaagcccttcttcactctctctctttcttccctttgcttgctactcttgtcgagtgcatgctttgctattacctccagcaagttcaacgagtgccaactcaacaacctcaacgcgttggaacccgaccaccgcgttgagtccgaaggtggtcttattgaaacatggaactctcaacaccctgagctgcaatgcgccggtgtcactgtttccaaacgcaccctcaaccgcaacggcctccacttgccatctta

SEQ ID NO: 111288 - DNA, 256 bp, Glycine max
gtgaacaacgacgacagagactcctacagacttcaatctggtgatgccctgagagtcccctcaggaaccacatactatgtggtcaaccctgacaacaacgaaaatctcagattaataacactcgccatacccgttaacaagcctggtagatttgagagtttcttccagatctagcactgaagctcaacaatcctacttgcaaggattcagcaggaacattttagaggcctcctacgataccaaattcgaggagata

SEQ ID NO: 111289 - DNA, 254 bp, Glycine max
cttcgcccctgaattcttgaaagaagcgttcggcgtgaacatgcagatagtgagaaacctacaaggtgagaacgaagaggaggatagtggagccattgtgacagtgaaaggaggtctaagagtcacagctccagccatgaggaagccacagcaagaagaagatgatgatgatgaggaagagcagccacagtgcgtggagacagacaaaggttgccaacgccaaagcaaaaggagcagaaatggcattgatgaga

SEQ ID NO: 111290 - DNA, 257 bp, Glycine max
gtctttgaacactcatcaccatggccaagcttgttctttccctttgtttccttcttttcagtggctgcttcgctctgagagagcaggcacagcaaaatgagtgccagatccaaaagctgaatgccctcaaaccggataaccgtatagagtcggaaggtgggttcattgagacctggaaccctaacaacaagccattccagtgtgccggtgttgccctctctcgctgcacccttaaccgcaatgcccttcgtagacct

SEQ ID NO: 111291 - DNA, 254 bp, Glycine max
gtctttgaacactcatcaccatggccaagcttgttctttccctttgtttccttcttttcagtggctgcttcgctctgagagagcaggcacagcaaaatgagtgccagatccaaaagctgaatgccctcaaaccggataaccgtatagagtcggaaggtgggttcattgagacctggaaccctaacaacaagccattccagtgtgccggtgttgccctctctcgctgcacccttaaccgcaatgcccttcgtaga

SEQ ID NO: 111292 - DNA, 256 bp, Glycine max
ttgtctttgaacactcatcaccatggccaagcttgttctttccctttgtttccttcttttcagtggctgcttcgctctgagagagcaggcacagcaaaatgagtgccagatccaaaagctgaatgccctcaaaccggataaccgtatagagtcggaaggtgggttcattgagacctggaaccctaacaacaagccattccagtgtgccggtgttgccctctctcgctgcacccttaaccgcaatgcccttcgtaga

SEQ ID NO: 111293 - DNA, 256 bp, Glycine max
attaagaaaagccatttccatagcagcctaagaaaatgaagagcactagcttgttcgctatctttctactttgcgccttcacctcatacctaccttccgccaccgcccaggacgtgctcgacgtggatggcgatccgattcggaacggtttcatatactacgttttgccggcaataagaggaaacggtggcggaatagaacgagccgcactcgggaaagacacttgccctatcactgtagtgcaatctcccaatcc

SEQ ID NO: 111294 - DNA, 262 bp, Glycine max
gagtattttaccttgctgggaacccagatatagagcacccagagaccatgcaacaacagcagcagcagaagagtcatggtggacgcaagcaggggcaacaccagcagcaggaggaagaaggtggcagtgtgctcagtggcttcagcaaacatttcttagcacaatccttcaacaccaacgaggacacagctgagaaacttcggtctccagatgacgaaaggaagcagatcgtgacagtggagggaggcctcagcgttatcag

SEQ ID NO: 111295 - DNA, 238 bp, Glycine max
actagtataccttaataaataatttaagatactatgatgagagcacggttcccattactgttgctgggacttgttttcctggcttcagtttctgtctcatttggcattgcttactgggaaaaagagaaccccaaacacaacaagtgtctccagagttgcaatagcgagagagactcgtacaggcaccaagcatgccacgctcgttgcaatctccttaaggtggagaacgaagaatgtg

SEQ ID NO: 111296 - DNA, 230 bp, Glycine max
tgcaacacaacaaaaaaagacaacacagagagaagcgtcttaataaacgctcttctctgaaaaacctgatttcttctcttcttctcttctctttcgtttcgatcttcgatctctgaaaatgagagagtgcatttcaatccacatcggtcaggccggtattcaggtcggaaacgcctgctgggagctctactgcctcgaacacggcattcagcctgatgggcagatgccaa

SEQ ID NO: 111297 - DNA, 251 bp, Glycine max
gattattaacactttccttagttcaatatggggaagcccttcttcactctctctctttcttccctttgcttgctactcttgtcgagtgcatgctttgctattacctccagcaagttcaacgagtgccaactcaacaacctcaacgcgttggaacccgaccaccgcgttgagtccgaaggtggtcttattgaaacatggaactctcaacaccctgagctgcaatgcgccggtgtcactgtttccaaacgcac

SEQ ID NO: 111298 - DNA, 252 bp, Glycine max
gtaatttctcttacatacattgcttcagaaaggatcattcctggatatggtggtggtatgagttctgcaaaagctgctttagaaagtgatacaagagtgcttgcttttgaagctggtagaaagaaaagaatcagagtcaatactatatctgcaggtccattgggaagccgtgcagcaaaagcaattggcttcattgacatgatgattgactattcgtttaccaatgcaccactgacaaaagaactacatgct

SEQ ID NO: 111299 - DNA, 251 bp, Glycine max
gcagatcgtgacagtggagggaggcctcagcgttatcagccccaagtggcaagaacaagaagacgaagacgaagatgaagacgaagaatatgaacaaactccctcttatcctccacgacgaccaagccatggaaagcatgaagatgacgaggacgaggacgaagaagaagatcaacctcgtcctgatcaccctccacagcgaccaagcaggcccgaacaacaagaaccacgtggaagaggatgtcagacta

SEQ ID NO: 111300 - DNA, 250 bp, Glycine max
tgccaaccatacatatgtacctagtgagacaccagcaccacttgtggagtacagagaagaagaattgaagagtttaagaggaaatggacacgggagagcgcacggaatatgataggatctatgattatgatgtcctacaatgatttgggcaacccagataagagtgaaaagttagctcgtccagttcttggagggtctagcaccggtccctaccctcgtaggggaagaactggtcgaggtccaacagtta

SEQ ID NO: 111301 - DNA, 252 bp, Glycine max
gtagttcaatatcctagtataccttaataaataatttaagatactatgatgagagcacggttcccattactgttgctgggacttgttttcctggcttcagtttctgtctcatttggcattgcttactgggaaaaagagaaccccaaacacaacaagtgtctccagagttgcaatagcgagagagactcgtacaggaaccaagcatgccacgctcgttgcaacctccttaaggtggagaaagaagaatgtgaa

SEQ ID NO: 111302 - DNA, 252 bp, Glycine max
tcttcatagcatttggaaatttggctgatgacaccatcaattttgaggcttttccccataagctggtgcagtttggagagattcaggaaaaagttatattgaaattttcacaagaggaatttcttacagcttggtcaactcaggtgcgtcctgcaacaactctgttggctgacgggtgtccatatttgtatgctatggtgcatgatagttcagtgtctacaataccaggtgattttgttattggtgttaagt

SEQ ID NO: 111303 - DNA, 251 bp, Glycine max
ggcagactagtatccgatcctctgtcctctcgaagctttcatcgttcaacatattctcaccatctcagtcatgggcctgctatcttgttttaggtctaccgtcctgagaaaatgttccaaaggaagctctggcatgtcaagattcctgtatacgaacaattttcaacgaaacttgatttcgtctggtggcaatgaatcgtattatgggtattttaacaggagatcatacacttcactttatatgggaactg

SEQ ID NO: 111304 - DNA, 128 bp, Glycine max
gtagaatgcgaagaaggtcaaattccacgaccgcgaccacatcacccggagatggaacgtcagcaacacggtgagaaggtggaagacgagggtgagctgccacgtccattcccattcccacgcccacg

SEQ ID NO: 111305 - DNA, 254 bp, Glycine max
caaacatgatcctccaaggagacgctattgtgacctcctcgggaaagttacaactcaataaggttgacgaaaacggcaccccaaaaccctcgtctcttggtcgcgccctctactccacccccatccacatttgggacaaagaaaccggtagcgttgccagcttcgccgcttccttcaacttcaccttctatgcccctgacacaaaaaggcttgcagatgggcttgccttctttctcgcaccaattgacactaag

SEQ ID NO: 111306 - DNA, 257 bp, Glycine max
ctttgaacactgcatcaccatggccaagcttgttctttccctttgtttccttcttttcagtggctgcttcgctctgagagagcaggcacagcaaaatgagtgccagatccaaaagctgaatgccctcaaaccggataaccgtatagagtcggaaggtgggttcattgagacctggaaccctaacaacaagccattccagtgtgccggtgttgccctctctcgctgcacccttaaccgcaatgcccttcgtagacctt

SEQ ID NO: 111307 - DNA, 259 bp, Glycine max
tgctgcacgtcgattaaacaatcaactgtgtgatattgctatcaactgggccggtggactacatcatgccaagaaatgcgaggcatctggattttgttacatcaatgacttggttttaggaatcttggagcttcttaaatatcatgctcgtgttttgtatattgatatagatgtgcaccatggtgatggtgtagaagaagccttctacttcactgacagggtgatgactgtcagttttcacaagtatggagattcgttc

SEQ ID NO: 111308 - DNA, 254 bp, Glycine max
cttaaacactcatcagtcatcaccatggccaagctagttttttccctttgttttctgcttttcagtggctgctgcttcgctttcagttccagagagcagcctcagcaaaacgagtgccagatccaaaaactcaatgccctcaaaccggataaccgtatagagtcagaaggagggctcattgagacatggaaccctaacaacaagccattccagtgtgccggtgttgccctctctcgctgcaccctcaaccgcaa

SEQ ID NO: 111309 - DNA, 252 bp, Glycine max
tcatgaaccatcctggtcagattggaaatggctatgcccctgttcttgactgccacacttcccacattgctgtcaagtttgctgaactcatgaccaagattgacaggcgatctggcaaagagcttgagaaggaacccaagtttttgaagaatggtgatgctggttttgttaagatgattccgaccaaacccatggtggttgaaactttctctgagtaccccccacttggtcgctttgctgtcagggatatgc

SEQ ID NO: 111310 - DNA, 251 bp, Glycine max
cgatgaaccagttgttgccatcagtcttcttgacacctctaacttcaataaccagcttgatcaaacccctagggtattttaccttgctgggaacccagatatagagtacccagagaccatgcaacaacaacaacagcagaaaagtcatggtggacgcaagcaggggcaacaccagcaggaggaagaggaagaaggtggcagcgtgctcagtggcttcagcaaacacttcttggcacaatccttcaacacca

SEQ ID NO: 111311 - DNA, 250 bp, Glycine max
gttccccacaacttcagaatctccgagactaccgcattttggagttcaactccaaacccaacaccctccttctccccaaccatgctgacgctgattacctcatcgttatccttaacgggactgccattctttccttggtgaacaacgacgacagagactcctacagacttcaatctggtgatgccctgagagtcccctcaggaaccacatactatgtggtcaaccctgacaacaacgaaaatctcagatt

SEQ ID NO: 111312 - DNA, 250 bp, Glycine max
gttcaatatcctagtacaccgtattaaagaatttaagatatactatgatgagagcgcggttcccattactgttgctgggagttgttttcctggcatcagtttctgtctcatttggcattgcgtattgggaaaagcagaaccccagtcacaacaagtgcctccgaagttgcaatagcgagaaagactcctacaggaaccaagcatgccacgctcgttgcaacctccttaaggtggaggaagaagaagaatg

SEQ ID NO: 111313 - DNA, 251 bp, Glycine max
gtaaagcaatggctacttcaaagttgaaaacccagaatgtggttgtatctctctccctaaccttaaccttggtactggtgctactgaccagcaaggcaaactcagcggaaactgtttctttcagctggaacaagttcgtgccgaagcaaccaaacatgatcctccaaggagacgctattgtgacctcctcgggaaagttacaactcaataaggttgacgaaaacggcaccccaaaaccctcgtctcttggt

SEQ ID NO: 111314 - DNA, 252 bp, Glycine max
attctctccattgtctttgaacactcatcaccatggccaagcttgttctttccctttgtttccttcttttcagtggctgcttcgctctgagagagcaggcacagcaaaatgagtgccagatccaaaagctgaatgccctcaaaccggataaccgtatagagtcggaaggtgggttcattgagacctggaaccctaacaacaagccattccagtgtgccggtgttgccctctctcgctgcacccttaaccgca

SEQ ID NO: 111315 - DNA, 251 bp, Glycine max
gtcgagccgctttgttttctgcttttcagtggctgctgcttcgctttcagttccagagagcagcctcaggaaaacgagtgccagatccaaaaactcaatgccctcaaaccggataaccgtatagagtcagaaggagggctcattgagacatggaaccctaacaacaagccattccagtgtgccggtgttgccctctctcgctgcaccctcaaccgcaacgcccttcgtagaccttcctacaccaacggtcc

SEQ ID NO: 111316 - DNA, 248 bp, Glycine max
ggagggagctctttttctgccacacttcaattcaaaggccatagtggtactagtgattaatgaaggagaagcaaacattgaacttgttggcattaaagaacaacaacagaggcagcaacaggaagagcaacctttggaagtgcggaaatatagagctgaattgtctgaacaagatatatttgtaatcccagcaggttatccagttgtggtcaacgctacctcagatctgaatttctttgcttttggta

SEQ ID NO: 111317 - DNA, 252 bp, Glycine max
cgtatatcctagtacagcgtattaaagaatttaagatatactatgatgagagcgcggttcccattactgttgctgggagttgttttcctggcatcagtttctgtctcatttggcattgcgtattgggaaaagcagaaccccagtcacaacaagtgcctccgaagttgcaatagcgagatagactcctacaggaaccaagcatgccacgctcgttgcaacctccttaaggtggaggaagaagaagaatgcgaa

SEQ ID NO: 111318 - DNA, 254 bp, Glycine max
ggcgaagcaaccaaacatgatcctccaaggagacgctattgtgacctcctcgggaaagttacaactcaataaggttgacgaaaacggcaccccaaaaccctcgtctcttggtcgcgccctctactccacccccatccacatttgggacaaagaaaccggtagcgttgccagcttcgccgcttccttcaacttcaccttctatgcccctgacacaaaaaggcttgcagatgggcttgccttctttctcgcaccaa

SEQ ID NO: 111319 - DNA, 256 bp, Glycine max
agaattcttccaccaagttatgggttgccttgtgttgcttcttttctccctcttaggtctctcttctagttccagcatatcaactcatcgttccatattggaccttgacctaaccaagtttaccacacagaaacaggtgtcttcactgttccaactatggaagagtgagcatggacgtgtctaccataaccacgaagaagaggcaaagagacttgagattttcaagaataacttgaactatatcagggacatgaat

SEQ ID NO: 111320 - DNA, 214 bp, Glycine max
cttttgctctatagtacacagtcacaatatcacccacagtttctcttcatgctccactactttttagccctctctctttcttgctcttttcttttcttcttatccgactcagtcacccctacaaaaccaataaaccttgttgttctacccgttcaaaatgatggttccacagggctccattgggccaacctccaaaaaagaacccctctaatgc

SEQ ID NO: 111321 - DNA, 251 bp, Glycine max
gagattctcaacattgtgaaggaaaactttgatttcaggcctggtatgatctccatcaaccttgatctcaagaggggtggaaataacaggtttttgaagactgctgcctatggacactttggaagagaagaccctgacttcacatgggaagtggtcaaacccctcaagtgggagaaggcctaagtaattcattcgactgctctatgctggaagttttttgagcgttgcccttataatatgtctaatatcca

SEQ ID NO: 111322 - DNA, 247 bp, Glycine max
agacattctctccattgtctttgaacactcatcaccatggccaagcttgttctttccctttgtttccttcttttcagtggctgcttcgctctgagagagcaggcacagcaaaatgagtgccagatccaaaagctgaatgccctcaaaccggataaccgtatagagtcggaaggtgggttcattgagacacggaaccctaacaacaagccattccagtgtgccggtgttgccctctctcgctgcaccc

SEQ ID NO: 111323 - DNA, 250 bp, Glycine max
acttattaacactttccttagttcaatatggggaagcccttcttcactctctctctttcttccctttgcttgctactcttgtcgagtgcatgctttgctattacctccagcaagttcaacgagtgccaactcaacaacctcaacgcgttggaacccgaccaccgcgttgagtccgaaggtggtcttattgaaacatggaactctcaacaccctgagctgcaatgcgccggtgtcactgtttccaaacgca

SEQ ID NO: 111324 - DNA, 249 bp, Glycine max; identical to SEQ ID NO: 105002

SEQ ID NO: 111325 - DNA, 248 bp, Glycine max
gtagtataccttaataaataatttaagatactatgatgagagcacggttcccattactgttgctgggacttgttttcctggcttcagtttctgtctcatttggcattgcttactgggaaaaagagaaccccaaacacaacaagtgtctccagagttgcaatagcgagagagactcgtacaggaaccaagcatgccacgctcgttgcaacctccttaaggtggagatagaagaatgtgaagaaggtgaa

SEQ ID NO: 111326 - DNA, 248 bp, Glycine max
aaaccctagtctccatacatcaacttgggaggttaaagagacggcaacgttgtgctgtccgccttgaccgagccagagcttcgtcttggccctcgattttgccctgtaaaactaatcccagtcacaacagaaataatcaatggcaccgaaacagaccaaggctgagaagaagatcgcttacgatgcgaactgtgcgacctaatggaggagtacggccaaatcctcgttgtaaactccgacaacgtggg

SEQ ID NO: 111327 - DNA, 250 bp, Glycine max
cttattaacactttccttagttcaatatggggaagcccttcttcactctctctctttcttccctttgcttgctactcttgtcgagtgcatgctttgctattacctccagcaagttcaacgagtgccaactcaacaacctcaacgcgttggaacccgaccaccgcgttgagtccgaaggtggtcttattgaaacatggaactctcaacaccctgagctgcaatgcgccggtgtcactgtttccaaacgcac

SEQ ID NO: 111328 - DNA, 246 bp, Glycine max
gtgagtttgctgttcctcactgacctcaccatggcgaccagagccaagctttctttagctatcttccttttctttcttttagccttgatttcaaacctagccttgggcaaacttaaagaaaccgaggtcgaagaagatcccgagctcgtaacatgcaaacaccagtgccaacagcaacggcaatacactgagagtgacaagcgaacatgcttgcaacaatgtgacagtatgaagcaagagcgagag

SEQ ID NO: 111329 - DNA, 250 bp, Glycine max
taaaattcttccaccaagttatgggtacaccttgtgttgcttcttttctccctcttaggtctctcttctagttccagcatatcaactcatcgttccatattggaccttgacctaaccaagtttaccacacagaaacaggtgtcttcactgttccaactatggaagagtgagcatggacgtgtctaccataaccacgaagaagaggcaaagagacttgagattttcaagaataacttgaactatatcaggg

SEQ ID NO: 111330 - DNA, 250 bp, Glycine max
gtctgtttctgtctctgtgtttgcggctgaggattccgaacgagcgaccttcttcgtttctcgcaaagtttaagtcatcatgggtaaggaaaagactcacatcaacattgtcgtcattggacatgtcgactctgggaagtcaactaccactggtcatttgatctacaagcttggaggtattgacaagcgtgtgattgagaggttcgagaaggaggctgctgagatgaacaagaggtcattcaagtatgcc

SEQ ID NO: 111331 - DNA, 249 bp, Glycine max
aggctcgagctcgagccgaatcggctcgagaagaaagtcttccatagccccccaacaatgaagaacgccaacttctttgctctctttctcttttgtgcattcaccacctcatacctaccttcagccatcgctgatttcgtgctcgataatgaaggtaaccctcttgaaaatggtggcacatattatatcttgtcagacataacagcatttggtggaataagagcagccccaacgggaaatgaaagatgc

SEQ ID NO: 111332 - DNA, 256 bp, Glycine max
gtctttgaagtttctaagatgacttctccctacatcaaatgtacagtctctttcttcatagcatttggaaatttggctgatgacaccatcaattttgaggcttttccccacaagctggtgcagtttggagagattcaggaaaaagttgtattgaaattttcacaagaggaatttcttacagcttggtcaactcaggtgcgtcctacaacaactctgttggctgatgggtgtccatatttgtatgctatggtgcatg

SEQ ID NO: 111333 - DNA, 249 bp, Glycine max
gattgtctttgaacactcatcaccatggccaagcttgttctttccctttgtttccttcttttcagtggctgcttcgctctgagagagcaggcacagcaaaatgagtgccagctccaaaagctgaatgccctcaaaccggataagcgtatagagtcggaaggtgggttcattgagacctggaaccctaacaacaagccattccagtgtgccggtgttgccctcgctcgctgcacccttaaccgcaatgcc

SEQ ID NO: 111334 - DNA, 250 bp, Glycine max
atcgagccgcgaaggggaagacaagggagccattgtgacagtgaaaggaggtctgagcgtgaagagaaccacccacggacgagcagcaacaaagaccccaggaagaggaagaagaagaagaggatgagaagccacagtgcaagggtaaagacaaacactgccaacgcccccgaggaagccaaagcaaaagcagaagaaatggcattgacgagaccatatgcaccatgagacttcgccacaacattggcca

SEQ ID NO: 111335 - DNA, 245 bp, Glycine max
gattcgctcgcattgcttcgcctcacaacagcagctgcagcagcaatggctcccaaacgaggtggaaaggctccggctcttgccgctaagaagaagcctgagaaggtcacgaatccgttgttcgagaagcgtccgaagcagttcggaatcggaggggcgttgcctccgaagagagacttgactaggttcgtgaagtggccaaagaatgttcaaattcagaggaagaagagcattctgaagcagag

SEQ ID NO: 111336 - DNA, 246 bp, Glycine max
ctacaagctgcagctaccttcatgcaacccaccaaggttggcatagcctctcgcaacctcaaatctacacaatgcatttctaaggcttttggcttggaacctgctgcagctaaactcacttgctcccttcagcctgatctcaaagaatttgctcaaaaatgtgtcgacgctaccaaaattgcaggattcgcccttgccacctctgctctcgttgtttctggagcaagtgcagaaggtgttccaaaa

SEQ ID NO: 111337 - DNA, 243 bp, Glycine max
ctcatcaccatggccaagcttgttctttccctttgtttccttcttttcagtggctgcttcgctctgagagagcaggcacagcaaaatgagtgccagatccaaaagctgaatgccctcaaaccggataaccgtatagagtcggaaggtgggttcattgagacctggaaccctaacaacaagccattccagtgtgccggtgttgccctctctcgctgcacccttaaccgcaatgcccttcgtaga

SEQ ID NO: 111338 - DNA, 246 bp, Glycine max
atctgagcagccaaacactctctctctgtctctcgaaaattctcagtttgcagagaaaatctgaatcatgtcgtggcaagcgtatgtcgacgatcaccttctgtgtgacatcgaaggtaaccacctcactcacgctgctatcatcggccaagacggcagcgtttgggctcagagtaccgacttccctcagttcaaacctgaggagataactgccatcatgaatgactttaatgagcctggatcact

SEQ ID NO: 111339 - DNA, 249 bp, Glycine max
ggaacactcatcaccatggccaagcttgttctttccctttgtttccttcttttcagtggctgcttcgctctgagagagcaggcacagcaaaatgagtgccagatccaaaagctgaatgccctcaaaccggataaccgtatagagtcggaaggtgggttcattgagacctggaaccctaacaacaagccattccagtgtgccggtgttgccctctctcgctgcacccttaaccgcaatgcccttcgtaga

SEQ ID NO: 111340 - DNA, 247 bp, Glycine max
agcaaaatgaccaagttcacaatcctcctcatctctcttctcttctgcatcgcccacacttgcagcgcctccaaatggcagcaccagcaagatagctgccgcaagcagctccagggggtgaacctcacgccctgcgagaagcacatcatggagaagatccaaggccgcggcgatgacgatgatgatgatgacgacgacaatcacattctcaggaccatgcggggaagaatcaactacataaggagga

SEQ ID NO: 111341 - DNA, 247 bp, Glycine max
gggattctcaacattgtgaaggaaaactttgatttcaggcctggtatgatctccatcaaccttgatctcaagaggggtggaaataacaggtttttgaagactgctgcctatggacactttggaagagaagaccctgacttcacatgggaagtggtcaaacccctcaagtgggagaaggcctaagtaattcattccactgctctatgctggaagttttttgagcgttgcccttataatatgtctaata

SEQ ID NO: 111342 - DNA, 247 bp, Glycine max
gtgagtttgactcttgaagacattccaaaccatggaagcaacaactttgtttgcaattcgtggatttacaatgccaaactcttcaaaagtgaccgcattttctttgccaaccagacatatcttccaagtgagacaccagctccactagtcaaatatagagaagaagagttgcataatttaagaggagatggaactggagaacgcaaagagtgggaaaggatctatgattatgatgtctacaatgatt

SEQ ID NO: 111343 - DNA, 247 bp, Glycine max
aagagatgaggcttttggacacttgaagtcatctgactttcttacttatggactaaaatccgtatctcaaaatgttcttccattattgcaatctgcttttgatttgaatttcacaccccgtgagtttgatagctttgatgaagttcatggactctattcaggcggaattaagctgccaacagatataatcagcaagattagtccactacccgtgcttaaggaaatcttccgaactgatggtgaacag

SEQ ID NO: 111344 - DNA, 252 bp, Glycine max
aggaatttaagatatactatgatgagagcgcggttcccattactgttgctgggagttgttttcctggcatcagtttctgtctcatttggcattgcgtattgggaaaagcagaaccccagtcacaacaagtgcctccgaagttgcaatagcgagaaagactcctacaggaaccaagcatgccacgctcgttgcaacctccttaaggtggaggaagaagaagaatgcgaagaaggtcaaattccacgaccacga

SEQ ID NO: 111345 - DNA, 250 bp, Glycine max; identical to SEQ ID NO: 104106

SEQ ID NO: 111346 - DNA, 263 bp, Glycine max
gcaagagggagtgatcgtggaactctcaaaggaacaaattcggcaactgagcagacgtgccaaatctagttcaaggaaaaccatttcctccgaagatgaaccattcaacttgagaagcctgcaaccccatctattccaacaactttggaaagttctttgagatcacccctgagaaaaacccacagcttcgggacttggatatcttcctcagttctgtggatatcaacgaaggagctcttcttctaccacacttcaattcaaag

SEQ ID NO: 111347 - DNA, 175 bp, Glycine max
agcacgagcagagagaggaacaggaatggcctcgcaaggaggaaaaacgcggagaaaagggaagtgaagaggaagatgaggatgaggatgaggaacaagatgaacgtcaattcccattcccacgcccacctcatcagaaggaagagcgaaagcaagaggaagatgaggatgagga

SEQ ID NO: 111348 - DNA, 279 bp, Glycine max
tctgagattcggctctagcttcaaacttaattattaacacttccttagttcaatatggggaagcccttcactctctctcttgcttccctttgcttgctactcctgtcgagtgcatgctttgctattagctccagcaagctcaacgagtgccaactcaacaacctcaacgcgttggaacccgaccaccgcgttgagtctcgaagtggtttgattcagacatggaactctcaacaccctgagctgaaatgcgccggtgtcactgtttccaaactcaccctc

SEQ ID NO: 111349 - DNA, 258 bp, Glycine max
cattcagtcaaacactagctagggtattgggagctctcgttgtttcggagttagggaccttacgcagccatggccactgctacgaatgccgccgccgccccaccacgccagctctcccagaaggaagctgacatccagatgatgtttgccgccgacgtccacctcggcaccaagaactgcgacttccatatggaacgttacatcttcaagcgccgcaacgacgggatttacattattaaccttgggaagacgtgggag

SEQ ID NO: 111350 - DNA, 260 bp, Glycine max
cttaattattaacacttccttagttcaatatggggaagcccttcactctctctctttcttccctttgcttgctactcttgtcgagtgcatgctttgctattagctccagcaagctcaacgagtgccaactcaacaacctcaacgcgttggaacccgaccaccgcgttgagtccgaaggtggtttgattcaaacatggaactctcaacaccctgagctgaaatgcgccggtgtcactgtttccaaactcaccctcaaccgc

SEQ ID NO: 111351 - DNA, 261 bp, Glycine max
ctcttacacatacatagctagcttcaattcctcccatggcagacccacagcaacaagacaactacatgaagcgaaagccttccaattccaatgttctcgtcctcgccgccctcgtgcctttcggcgtctctcttctcatcctcgtcggcctcaccctctccgccaccgtcatcagcctcaccgtcgtcaccccactcttcgtcattttcagccccgtcttgctccccgcggccctattcatcgctctcgccgtcgccggct

SEQ ID NO: 111352 - DNA, 249 bp, Glycine max
ccctgtcactggaaccggcattaaccctgcaaggagtttcggaccagctgtgatcttcaacaacgacaaagcctgggacgaccaatggatttactgggttggaccgtttgttggagctgcggtggctgcaatctaccatcaatacattcttagaggttctgcaatcaaagctcttggatccttcaggagcaacgcttaattaaaaaaagaaaaaatcaagtttctccactacctaaattatgatgattt

SEQ ID NO: 111353 - DNA, 261 bp, Glycine max
caacaaggtaatggtatttttggcatgatattcccgggttgtcctagcacttatcaagagccgcaagaatctcagcaacgaggacgaagccagaggccccaagaccgtcaccaaaaggtacatcgcttcagagagggtgatttgatcgcagtgcctactggtgttgcatggtggatgtacaacaatgaagacactcctgttgttgccgtttctattattgacaccaacagcttggagaaccagctcgaccagatgcctagg

SEQ ID NO: 111354 - DNA, 254 bp, Glycine max
aacacttccttagttcaatatggggaagcccttcactctctctctgtcttccctttgcttgctactcttgtcgagtgcatgctttgctattagctccagcaagctcaacgagtgccaactcaacaacctcaacgcgttggaacccgaccaccgcgttgagtccgaagtggtttgattcaaacatggaactctcaacaccctgagctgaaatgcgccggtgtcactgtttccagactcaccctcaaccgcaatgg

SEQ ID NO: 111355 - DNA, 260 bp, Glycine max
ctcgagccgattgtctttgaacactcatcaccatggccaagcttgttctttccctttgtatccttcttttcagtggctgcttcgctctgagagagcaggcacagcaaaatgagtgccatatccaaaagctgaatgccctcaaaccggataaccgtatagagtcggaaggtgggttcattgagacctggaaccctaacaacaagccattccagtgtgccggtgttgccctctctcgctgcacccttaaccgcaatgccctt

SEQ ID NO: 111356 - DNA, 261 bp, Glycine max
atcaccatggccaagcttgttctttccctttgtttccttcttttcagtggctgcttcgctctgagagagcaggcacagcaaaatgagtgccagatccaaaagctgaatgccctcaaaccggataaccgtatagagtcggaaggtgggttcattgagacctggaaccctaacaacaagccattccagtgtgccggtgttgccctctctcgctgcacccttaaccgcaatgcccttcgtagaccttcctacaccaacggtccc

SEQ ID NO: 111357 - DNA, 263 bp, Glycine max
tatcctagtacaccgtattaaagaatttaagatatactatgatgagagcgcggttcccattactgttgctgggagttgttttcctggcatcagtttctgtctcatttggcattgcgtattgggaaaagcagaaccccagtcacaacaagtgcctccgaagttgcaatagcgagaaagactcctacaggaaccaagcatgccacgctcgttgcaacctccttaaggtggaggaagaagaagaatgcgaagaaggtcaaattcca

SEQ ID NO: 111358 - DNA, 263 bp, Glycine max
atatcctagtataccttaataaataatttaagatactatgatgagagcacggttcccattactgttgctgggacttgttttcctggcttcagtttctgtctcatttggcattgcttactgggaaaaagagaaccccaaacacaacaagtgtctccagagttgcaatagcgagagagactcgtacaggaaccaagcatgccacgctcgttgcaacctccttaaggtggagaaagaagaatgtgaagaaggtgaaattccacgac

SEQ ID NO: 111359 - DNA, 259 bp, Glycine max
caagttattatcaaataattaattaaattcctcgtggaatcttgttgaagccatgtctacagctggtcaggtcatcaagtgcagagctgcggtggcatgggaagcagggaagccactatcgatagaaaccatagaagtggcaccaccccagaaaggtgaagtgcgtttgaagatcctcttcaactccctttgccgtacagatgtttactggtgggatgctaagggccagactccgctgtttcctcgtatcttaggccac

SEQ ID NO: 111360 - DNA, 258 bp, Glycine max
atcaccatggccaagcttgttctttccctttgtttccttcttttcagtggctgcttcgctctgagagagcaggcacagcaaaatgagtgccagatccaaaagctgaatgccctcaaaccggataaccgtatagagtcggaaggtgggttcattgagacctggaaccctaacaacaagccattccagtgtgccggtgttgccctctctcgctgcacccttaaccgcaatgcccttcgtagaccttcctacaccaacggt

SEQ ID NO: 111361 - DNA, 259 bp, Glycine max
ctaaaatatcagcaagagcaaggaggtcatcaaagccagaaaggaaagcatcagcaagaagaagaaaacgaaggaggcagcatattgagtggcttcaccctggaattcttggaacatgcattcagcgtggacaagcagatagcgaaaaacctacaaggagagaacgaaggggaagacaagggagccatcgtgacagtgaaaggaggtctgagcgtgataaaaccacccacggacgagcagcaacaaagaccccaggaag

SEQ ID NO: 111362 - DNA, 259 bp, Glycine max
ttgctgttaaggatttgaagcgtggttatgttgcctcaaactcaaaggatgaccctgcaaaggaggctgctaacttcacagcccaagtcatcatcatgaaccaccctggtcagattggaaatggctatgcccctgtcctcgactgccacacttctcacattgctgtcaagtttgctgaactcatgaccaagattgacaggcgatccggcaaagagcttgagaaggagcccaagtttttgaagaacggtgatgctggttt

SEQ ID NO: 111363 - DNA, 256 bp, Glycine max
aagcaaagcaatggctacttcaaagttgaaaacccagaatgtggttgtatctctctccctaaccttaaccttggtactggtgctactgaccagcaaggcaaactcagcggaaactgtttctttcagctggaacaagttcgtgccgaagcaaccaaacatgatcctccaaggagacgctattgtgacctcctcgggaaagttacaactcaataaggttgacgaaaacggcaccccaaaaccctcgtctcttggtcgc

SEQ ID NO: 111364 - DNA, 258 bp, Glycine max
gcggtttcctttgttggtgttgctgggaactgttttcctggcatcagtttgtgtctcattaaaggtgagagaggatgagaataaccctttctacttgagaagctctaacagcttccaaactctctttgagaaccaaaacggtcgcattcgtctcctccagagattcaacaaacgctccccacaacttgagaaccttcgagactaccggattgtccagtttcagtcaaaacccaacacaatccttctcccccaccatgt

SEQ ID NO: 111365 - DNA, 256 bp, Glycine max
cggctcgagctctactggatgatattggtatagatttacctaaagcaccaagtaattttggtgagataattggaaaactaattttggctgggggattggattgtaagctggtgagagagattctcaagaaggtggatgatggcatgttccagagagcaatatttgacagtgtggtgggggccattagatctgcatctgggcaagccgtgttggatgctcaaacatctgatattgaggcctgccagagtatgctcaa

SEQ ID NO: 111366 - DNA, 258 bp, Glycine max
aaataatttaagatactatgatgagagcacggttcccattactgttgctgggacttgttttcctggcttcagtttctgtctcatttggcattgcttactgggaaaaagagaaccccaaacacaacaagtgtctccagagttgcaatagcgagagagactcgtacaggaaccaagcatgccaagctcgttgcaacctccttaaggtggagaaagaagaatgtgaagaaggtgaaattccacgaccacgaccacgaccac

SEQ ID NO: 111367 - DNA, 260 bp, Glycine max; identical to SEQ ID NO: 111350

SEQ ID NO: 111368 - DNA, 263 bp, Glycine max
cgaaaatgaagaaggaacaatattcttgtgaccatccacctgcatcatgggattggaggaaaaaaggtgtcatcacccaagtaaagtaccaagggggctgtggaagcggttgggcgttttctgccacgggagccatagaagcagcacatgcaatagcaacaggagaccttgttagcctttctgaacaagaactcgtagactgtgtggaagaaagcgaaggttgttacaatggatggcactatcaatcgttcgaatgggtttta

SEQ ID NO: 111369 - DNA, 263 bp, Glycine max
gataagtgctaggacaacccgggaatatcatgagccgcaagaatctcagcaacgaggacgaagccagaggccccaagaccgtcaccaaaaggtacatcgcttcagagagggtgatttgatcgcagtgcctactggtgttgcatggtggatgtacaacaatgaagacactcctgttgttgccgtttctattattgacaccaacagcttggagaaccagctcgaccagatgcctaggagattctatcttgctgggaaccaagagc

SEQ ID NO: 111370 - DNA, 259 bp, Glycine max
gagtttctaaaatatcagcagcagcagcaaggaggttcccaaagccagaaaggaaagcaacaagaagaagaaaacgaaggaagcaacatattgagtggcttcgcccctgaattcttgaaagaagcgttcggcgtgaacatgcagatagtgagaaacctacaaggtgagaacgaagaggaggatagtggagccattgtgacagtgaaaggaggtctaagagtcacagctccagccatgaggaagccacagcaagaagaag

SEQ ID NO: 111371 - DNA, 259 bp, Glycine max
ggaagccccacaccgtcccgtgcaaggtcacggggaagtgcggctccgttaccgttaggatggttcccgcgccgagaggttcggggatcgtggcggctagggttcccaagaaggtgctgcagttcgcggggattgatgatgttttcacctcctccagaggatccaccaagaccctcggcaacttcgttacggctacttttgattgcttgatgaaaacctatggattcctgacaccagaattctggaaggagactcgctt

SEQ ID NO: 111372 - DNA, 257 bp, Glycine max
gcaagggatgcaagggaggcagctgcaagggatgcaagggaagctgctgcaagggatgcaaaggtggaggcaagggatgtaaagagaacaacagtgacagcaacaaccgcaaccgcatgatgagtaattctgatattagagggagcattaatgtgttgttgtgatgtggtttatatggggaaattaaataaatgatgtatgtacctcttgcctatgtaggtttgtgtgttttgttttgttgtctagctttggttatt

SEQ ID NO: 111373 - DNA, 257 bp, Glycine max
atgagtttgaagaacaacatggtggtgctaaaggtgtgtttgttgcttcttttccttgtgggggttacagctgcacgcatggaactgagcttcttcaaaagtgatcagtcatcaagttatgatgatgatgagtattcaaaaccatgctgtgatctctgcatgtgcacacgctcaatgcctcctcaatgcagctgtgaagatattaggctgaattcatgccactcagattgtaagagctgtatgtgcacacgctcaca

SEQ ID NO: 111374 - DNA, 258 bp, Glycine max
ctccattgtctttgaacactcatcaccatggccaagcttgttctttccctttgtttccttcttttcagtggctgcttcgctctgagagagcaggcacagcaaaatgagtgccagatccaaaagctgaatgccctcaaaccggataaccgtatagagtcggaaggtgggttcattgagacctggaaccctaacaacaagccattccagtgtgccggtgttgccctctctcgctgcacccttaaccgcaatgcccttcgt

SEQ ID NO: 111375 - DNA, 264 bp, Glycine max
gtccagccccccaatggcctttgaacactcatcaccatggccaagcttgttctttccctttgtttccttcttttcagtggctgcttcgctctgagagagcaggcacagcaaaatgagtgccagatccaaaagctgaatgccctcaaaccggataaccgtatagagtcggaaggtgggttcattgagacctggaaccctaacaacaagccattccagtgtgccggtgttgccctctctcgctgcacccttaaccgcaatgccctt

SEQ ID NO: 111376 - DNA, 257 bp, Glycine max
ctctccattgtctttgaacactcatcaccatggccaagcttgttctttccctttgtttccttcttttcagtggctgcttcgctctgagagagcaggcacagcaaaatgagtgccagatccaaaagctgaatgccctcaaaccggataaccgtatagagtcggaaggtgggttcattgagacctggaaccctaacaacaagccattccagtgtgccggtgttgccctctctcgctgcacccttaaccgcaatgccctt

SEQ ID NO: 111377 - DNA, 257 bp, Glycine max
aaaattcttccaccaagttatgggttcccttgtgttgcttcttttctccctcttaggtctctcttctagttccagcatatcaactcatcgttccatattggaccttgacctaaccaagtttaccacacagaaacaggtgtcttcactgttccaactatggaagagtgagcatggacgtgtctaccataaccacgaagaagaggcaaagagacttgagattttcaagaataacttgaactatatcagggacatgaatg

SEQ ID NO: 111378 - DNA, 254 bp, Glycine max
ctcgagccgctcgagccggtataccttaataaataatttaagatactatgatgagagcacggttcccattactgttgctgggacttgttttcctggcttcagtttctgtctcatttggcattgcttactgggaaaaagagaaccccaaacacaacaagtgtctccagagttgcaatagcgagagagactcgtacaggaaccaagcatgccacgctcgttgcaacctccttaaggtggagcaagaagaatgtgaa

SEQ ID NO: 111379 - DNA, 257 bp, Glycine max
gcatggtggatgtacaacaatgaagacactcctgttgttgccgtttctattattgacaccaacagcttggagaaccagctcgaccagatgcctaggagattctatcttgctgggaaccaagagcaagagtttctaaaatatcagcagcagcagcaaggaggttcccaaagccagaaaggaaagcaacaagaagaagaaaacgaaggaagcaacatattgagtggcttcgcccctgaattcttgaaagaagcgttcgg

SEQ ID NO: 111380 - DNA, 258 bp, Glycine max
cttcaaacttaattattaacacttccttagttcaatatggggaagcccttcactctctctctttcttccctttgcttgctactcttgtcgagtgcatgctttgctattagctccagcaagctcaacgagtgccaactcaacaacctcaacgcgttggaacccgaccaccgcgttgagtccgaaggtggtttgattcaaacatggaactctcaacaccctgagctgaaatgcgccggtgtcactgtttccaaactcacc

SEQ ID NO: 111381 - DNA, 259 bp, Glycine max
ccaacgttcaaagtacgagaatttcgcattccaacgcacagcccctacgcggacaatgaatgctagtgagtgtgttgctaggggctgtgcgttggaatgcgcaattcttagtccaacgttcaaagtacgagaatttcaggtcaacgaaagccttcctttctcgatttctctttcatggaaaagctctggtccagatgcacaggacaatggatcagaaaatcagcagagttcccttgtttttcctaagggtaatcccata

SEQ ID NO: 111382 - DNA, 258 bp, Glycine max
gtcaagggatgctgcgttggtcccaagaaaagggttattacattgcgccaatccctccttaagcagacttctcgtgttgctctggaggagatcaagctcaagtttatcgacacctcttcaaagtttgggcatggtcgcttccagaccacacaggagaagcagaagttctttggacgcctcaaagcataattttgttaattggatggaaatgctggatttctattcggttaccatatcttataaacatattgtagtgtt

SEQ ID NO: 111383 - DNA, 261 bp, Glycine max
cccttcactctctctctttcttccctttgcttgctactcttgtcgagtgcatgctttgctattagctccagcaagctcaacgagtgccaactcaacaacctcaacgcgttggaacccgaccaccgcgttgagtccgaaggtggtttgattcaaacatggaactctcaacaccctgagctgaaatgcgccggtgtcactgtttccaaactcaccctcaaccgcaatggcctccacttgccatcttactcaccttatccccgg

SEQ ID NO: 111384 - DNA, 257 bp, Glycine max
aaaactcaatgccctcaaaccggataaccgtatagagtcagaaggagggctcattgagacatggaaccctaacaacaagccattccagtgtgccggtgttgccctctctcgctgcaccctcaaccgcaacgcccttcgtagaccttcctacaccaacggtccccaggaaatctacatccaacaaggtaagggtatttttggcatgatatacccgggttgtcctagcacatttgaagagcctcaacaacctcaacaaa

SEQ ID NO: 111385 - DNA, 255 bp, Glycine max
ccgtgtcgcagcaaaaccaaaccacatattaacttgtttgctctaagtcatggctctgatcttgcacgcaaccaaagcaaacaagaatgctttcaagactctgattgcggcagagtacagtggcgtccaagtggaattggcccctaatttcgagatgggtgtctctaatagaactcctgaattccttataatgaatcccataggaaaggttcctgtcttggaaacgcccgatggtccagtctttgagagcaatgc

SEQ ID NO: 111386 - DNA, 255 bp, Glycine max; identical to SEQ ID NO: 102867

SEQ ID NO: 111387 - DNA, 165 bp, Glycine max
ataaaccgcgatcacaggttgccgcaccttaaaaccggaaacagaagcaatcgttacttgatttcaagaatctctcaatttctttctacttctttgtgtacgatttcttaagggaaagaaaatcactctctgtgctggccacagacttcgtgaattatttgcttt

SEQ ID NO: 111388 - DNA, 241 bp, Glycine max
ggctcgaggaacaatcaaacagaagaggctacaggtcgcagaagcagacagctacaggacagtcaccagaagattcgtcacttcaatgaaggagacgtactcgtgattcctcctggtgttccttactggacctataacactggcgatgaaccagttgttgccatcagtcttcttgacacctctaacttcaataaccagcttgatcaaacccctagggtattttaccttgctgggaaccaga

SEQ ID NO: 111389 - DNA, 254 bp, Glycine max
gttgtagacagcaatgatagggacagagttgttgaggccagagatgagttacataggatgttgaatgaggatgaactgagagatgccgtattgcttgtgtttgcaaacaaacaagatcttcctaatgcaatgaatgctgctgagattactgacaagttgggtctccactctctgagacagcgtcactggtacattcagagcacctgtgcaacctctggggagggcctttacgaaggtctggactggctttccaa

SEQ ID NO: 111390 - DNA, 254 bp, Glycine max
gccattcatcatagcaacaaaccgacaccttagtgctcttcacccaatttataagcttctaactcctcactaccgtgacaccatgaacatcaacgcacttgctaggcaatctctcattaatgctgatggcataatagagaaatcttttttgccctcaaagcattccgttgagatgtcttcagcggtttataagaattgggttttcactgatcaagcactacctgcagatcttatcaagagaggagtggcaatta

SEQ ID NO: 111391 - DNA, 257 bp, Glycine max; identical to SEQ ID NO: 111376

SEQ ID NO: 111392 - DNA, 245 bp, Glycine max
gtgcggtttcctttgttggtgttgctgggaactgttttcctggcatcagtttgtgtctcattaaaggtgagagaggatgagaataaccctttctacttgagaagctctaacagcttccaaactctctttgagaaccaaaacggtcgcattcgtctcctccagagattcaacaaacgctccccacaacttgagaaccttcgagactaccggattgtccagtttcagtcaaaacccaacacaatcct

SEQ ID NO: 111393 - DNA, 253 bp, Glycine max
gtttgcagtcactgctttgtttagatcagaaccagatcgtgttctcttcttccattggcaaacatggcaactcaaatgagcaagaagagaaagtttgtggcggatggagtgtacttcgccgaactgaacgaggttctgacacgtgagttggcggaggacggttactccggcgtggaggttagggttacgccgatgcgcaccgagattatcatcagagccaccagaacccaagccgttctcggtgagaagggaa

SEQ ID NO: 111394 - DNA, 255 bp, Glycine max
atagtatgtggttcctgaggggactctcaggttaataacactcgccatacccgttaacaagcctggtagatttgagagtttcttcctatctagcactgaagctcaacaatcctacttgcaaggattcagcaggaacattttagaggcctcctacgataccaaattcgaggagataaacaaggttctgtttagtagagaggaagggcagcagcaaggggagcagaggctgcaagagagcgtgattgtggaaatctc

SEQ ID NO: 111395 - DNA, 258 bp, Glycine max
ctccattggtccttaaacactcatcagtcatcaccatggccaagctagttttttccctttgttttctgcttttcagtggctgctgcttcgctttcagttccagagagcagcctcagcaaaacgagtgccagatccaaaaactcaatgccctcaaaccggataaccgtatagagtcagaaggagggctcattgagacatggaaccctaacaacaagccattccagtgtgccggtgttgccctctctcgctgcaccctca

SEQ ID NO: 111396 - DNA, 260 bp, Glycine max
ggcctcttcttcatgcctaaggttcctgctctcattcagcgcccagacatggagactgtctgcaccacttatggcaaagtctttcatttctggcaggtcgataagggtcactctcttccatttgggatacctcagctcatgatggctctcactagagatggccagatctatgatcacctcctccaaagttctgcagagcgcatggggatagactatgaggaagaaagaaaagcgagagaatatatgacagggccagttca

SEQ ID NO: 111397 - DNA, 256 bp, Glycine max
gcaaaacattatattgagttttggaaacagattcctcccaatgagccgtatcgtgttattctcggtgatgtaagggacaaattatataatacacgtgaacgtgctcggcagttgttagccaatggaagctctgaaatccctgaggagactaccttcacaaatgttgaacagttcctggagcctcttgaattatgttatagatcgctgtgtgcatgtggtgaccaaccaatagctgatggaagccttcttgatttct

SEQ ID NO: 111398 - DNA, 255 bp, Glycine max
caaagtcttccatagccccccaaaaatgaagagcaccatcttctttgctctctttctcttttgtgccttcaccacctcatacctaccttcagccatcgctgatttcgtgctcgataatgaaggtaaccctcttgaaaatggtggcacatattatatcttgtcagacataacagcatttggtggaataagagcagccccaacgggaaatgaaagatgccctctcactgtggtgcaatctcgcaatgagctcgacaa

SEQ ID NO: 111399 - DNA, 252 bp, Glycine max
caatatcctagtacaccgtattaaagaatttaagatatactatgatgagagcgcggttcccattactgttgctgggagttgttttcctggcatcagtttctgtctcatttggcattgcgtattgggaaaagcagaaccccagtcacaacaagtgcctccgaagttgcaatagcgagaaagactcctacaggaaccaagcatgccacgctcgttgcaacctccttaaggtggaggaagaagaagaatgcgaag

SEQ ID NO: 111400 - DNA, 252 bp, Glycine max; identical to SEQ ID NO: 111314

SEQ ID NO: 111401 - DNA, 251 bp, Glycine max
cattgtctttgaacactcatcaccatggccaagcttgttctttccctttgtttccttcttttcagtggctgcttcgctctgagagagcaggcacagcaaaatgagtgccagatccaaaagctgaatgccctcaaaccggataaccgtatagagtcggaaggtgggttcattgagacctggaaccctaacaacaagccattccagtgtgccggtgttgccctctctcgctgcacccttaaccgcaatgccct

SEQ ID NO: 111402 - DNA, 253 bp, Glycine max
ataccttaataaataatttaagatactatgatgagagcacggttcccattactgttgctgggacttgttttcctggcttcagtttctgtctcatttggcattgcttactgggaaaaagagaaccccaaacacaacaagtgtctccagagttgcagtagcgagagagactcgtacaggaaccaagcatgccacgctcgttgcaacctccttaaggtggagagagaagaatgtgaagaaggtgaaattccacgac

SEQ ID NO: 111403 - DNA, 252 bp, Glycine max
caacaagcagcaggcttgatgaaagaagcagagcggttcctaatcttaagcaatatcgatcgcctgtggaaagaacatctgcaggcactaaaatttgttcagcaagccgtggggttacggggatatgcgcacgggatcctcttattgagtataagcttgaaggctataaccttttcttggatatgatggcacaaataagaagaaatgtcatatattctgtgtatcagtttcaacctgtgctggtagagcaag

SEQ ID NO: 111404 - DNA, 254 bp, Glycine max
gtttctgtctctgtgtttgcggctgaggattccgaacgagcgaccttcttcgtttctcgcaaagtttaagtcatcatgggtaaggaaaagactcacatcaacattgtcgtcattggacatgtcgactctgggaagtcaactaccactggtcatttgatctacaagcttggaggtattgacaagcgtgtgattgagaggttcgagaaggaggctgctgagatgaacaagaggtcattcaagtatgcctgggtgct

SEQ ID NO: 111405 - DNA, 248 bp, Glycine max
agatcatacatactagtgttcgtgggttgcaaagatgcttgggggtcttctccataggggtcataagataaaagggacagtggtgttgatgcgcaagaatgtgttggacgtgaatagcgtaaccagcgttgggggaattattggtcaaggtctcgacttagttggctcaacactcgatactcttactgccttcttgggccgatccgtgtctctccagcttattagtgctaccaaagctgatgccaacg

SEQ ID NO: 111406 - DNA, 253 bp, Glycine max
gtttctgtctctgtgtttgcggctgaggattccgaacgagcgaccttcttcgtttctcgcaaagtttaagtcatcatgggtaaggaaaagactcacatcaacattgtcgtcattggacatgtcgactctgggaagtcaactaccactggtcatttgatctacaagcttggaggtattgacaagcgtgtgattgagaggttcgagaaggaggctgctgagatgaacaagaggtcattcaagtatgcctgggtgc

SEQ ID NO: 111407 - DNA, 249 bp, Glycine max
ccctgtcactggaaccggcattaaccctgcaaggagtttcggaccagctgtgatcttcaacaacgacaaagcctgggacgaccaatggatttactgggttggaccgtttgttggagctgcggtggctgcaatctaccatcaatacattcttagaggttctgcaatcaaagctcttggatccttcaggagcaacgcttaattaaaaaaaagaaaatacaagtttctccactacctaaattatgatggttg

SEQ ID NO: 111408 - DNA, 245 bp, Glycine max
gaaaagctttctagctggtcataatatcaccattactgatggtattgacaaaactagtgcaactttgcagtttagaaagttagcagattgtgactttctcaagagaaactttaagcagatgtcgaatgtcttgtgggtggctcctgaggacaaggcgagtttatggtcacaacttcaatatgtttcgtgtaacaatctggaaatgcaagaagcttatcttgtcaatctcgtaaatgtgttacgag

SEQ ID NO: 111409 - DNA, 249 bp, Glycine max
aaaccctactcattctccatacctcaacgaagaggttaaagagacggcaacactttgctgtccgccttgaccgagcagagcttcgtcttggccctcgattttgccctaaagtactctcagtcacaacagacaccgtcgtcgtcgtcgtcgtcatcaatggcaccgaagcagaccaaggctgagaagaagatcgcttacgatgcgaactgtgcgacctaatggaggagtacggccagatcctcgttgtga

SEQ ID NO: 111410 - DNA, 250 bp, Glycine max
aattcttccccctccacccacccagcatatctctctattcccatttattagcacccctcacattaccttgtgtcaccaactactttgactcctttaccataccattacaataattatcaaacctaaccagtaaaaatggtgaccgtggaggaaatccgcaacgctcagcgttcccatggacccgccaccatcttggccttcggcaccgccacgccgtccaactgcgtctcccaagccgattaccctgact

SEQ ID NO: 111411 - DNA, 247 bp, Glycine max
ctcgagccgctcgagccgattcggctcgaggccagatccaaaaactcaatgccctcaaaccggataaccgtatagagtcagaaggagggctcattgagacatggaaccctaacaacaagccattccagtgtgccggtgttgccctctctcgctgcaccctcaaccgcaacgcccttcgtagaccttcctacaccaacggtccccaggaaatctacatccaacaaggtaagggtatttttggcatgat

SEQ ID NO: 111412 - DNA, 249 bp, Glycine max
ccaagttatgggtttccttgtgttgcttcttttctccctcttaggtctctcttctagttccagcatatcaactcatcgttccatattggaccttgacctaaccaagtttaccacacagaaacaggtgtcttcactgttccaactatggaagagtgagcatggacgtgtctaccataaccacgaagaagaggcaaagagacttgagattttcaagaataacttgaactatatcagggacatgaatgcaaa

SEQ ID NO: 111413 - DNA, 251 bp, Glycine max
cttcggtctccagatgacgaaaggaagcagatcgtgacagtggagggaggcctcagcgttatcagccccaagtggcaagaacaagaagacgaagacgaagatgaagacgaagaatatgaacaaactccctcttatcctccacgacgaccaagccatggaaagcatgaagatgacgaggacgaggacgaagaagaagatcaacctcgtcctgatcaccctccacagcgaccaagcaggcccgaacaacaaga

SEQ ID NO: 111414 - DNA, 251 bp, Glycine max
aacttattaacactttccttagttcaatatggggaagcccttcttcactctctctctttcttccctttgcttgctactcttgtcgagtgcatgctttgctattacctccagcaagttcaacgagtgccaactcaacaacctcaacgcgttggaacccgaccaccgcgttgagtccgaaggtggtcttattgaaacatggaactctcaacaccctgagctgcaatgcgccggtgtcactgtttccaaacgca

SEQ ID NO: 111415 - DNA, 256 bp, Glycine max
aagaaaagccatttccatagcagcctaagaaaatgaagagcactagcttgttcgctatctttctactttgcgccttcacctcatacctaccttccgccaccgcccaggacgtgctcgacgtggatggcgatccgattcggaacggtttcatatactacgttttgccggcaataagaggaaacggtggcggaatagaacgagccgcactcgggaaagacacttgccctatcactgtagtgcaatctcccaatccaaa

SEQ ID NO: 111416 - DNA, 254 bp, Glycine max
cttaattattaacacttccttagttcaatatgggcaagcccatcactctctctctttcttccctttgcttgctactcttgtcgagtgcatgctttgctattagctccagcaagctcaacgagtgccaactcaacaacctcaacgcgttggaacccgaccaccgcgttgagtccgaaggtggtttgattcaaacatggaactctcaacaccctgagctgaaatgcgccggtgtcactgtttccaaactcaccctc

SEQ ID NO: 111417 - DNA, 250 bp, Glycine max; identical to SEQ ID NO: 111323

SEQ ID NO: 111418 - DNA, 248 bp, Glycine max
cttggtccttaaacactcatcagtcatcaccatggccaagctagttttttccctttgttttctgcttttcagtggctgctgcttcgctttcagttccagagagcagcctcagcaaaacgagtgccagatccaaaaactcaatgccctcaaaccggataaccgtatagagtcagaaggagggctcattgagacatggaaccctaacaacaagccattccagtgtgccggtgttgccctctctcgctgca

SEQ ID NO: 111419 - DNA, 249 bp, Glycine max
acttattaacactttccttagttcaatatggggaagcccttcttcactctctctctttcttccctttgcttgctactcttgtcgagtgcatgctttgctattacctccagcaagttcaacgagtgccaactcaacaacctcaacgcgttggaacccgaccaccgcgttgagtccgaaggtggtcttattgaaacatggaactctcaacaccctgagctgcaatgcgccggtgtcactgtttccaaacgc

SEQ ID NO: 111420 - DNA, 250 bp, Glycine max
agagggtgtacatgggcattgtcatcatcctcgttaagctcttctggaagaagccccaccagcgctacaagttcgagccactccaagacgacgaggaactcgggaactctaattaccccgtcgtgcttgtgcagattccaatgttcaatgaaaaagaggtgtacaaggtgtcgattggagcagcttgcaatctttcatggcctgtggatcgtctcgtgatccaagtgctcgatgattctactgaccctac

SEQ ID NO: 111421 - DNA, 249 bp, Glycine max
ggaaaggttaactaagaagcaatacttcaatggccacccttgttgttcataaccaaacttcttctgctcaagatgctgaggctctccaacaggctttcaaaggatggggggctgatgacaaggccattatagcaatactgggtcacagaaatgttcatcagaggcaagaaatcagaaaagcttatgaggagatttaccaagaggatctcatcaaacgccttgagtccgagatctctggtgactttgaga

SEQ ID NO: 111422 - DNA, 248 bp, Glycine max
cctttgttcactcttcttctcttgcggctagggttttagcgcacgtcttctagatttaaggaagatgggtaaggacaaggttcacatcagtattgtggtcattggccatgtcgactctgggaaatccactaccactggtcacctgatttacaagcttggaggcattgacaagcgtgttattgagaggtttgagaaggaagctgctgagatgaacaagaggtctttcaagtatgcctgggtgctggaca

SEQ ID NO: 111423 - DNA, 249 bp, Glycine max
gctagcatggccatgattgcaaatggtcaagataatgaggttgcatcaattgatgttagcattgggaacatttacatgtcgctttgtcgttttgacgaggcgattttctcataccagaaggcgcttacggtgtttaagtctgccaagggtgagaaccacccttctgttgcctctgtttttgtgaggcttgctgatttgtaccacaggactggtaagcttcgcgagtcaaagtcttactgtgagaatgct

SEQ ID NO: 111424 - DNA, 252 bp, Glycine max
catttctacatcgctggctctgttccgtcgatgacgatggcgtttagggtgcgaaaccctgacctccgctttctcattcttctctctctcttgtccatgacttccgccaaggtcttcttcgaggagcgtttcgatgacggatggggaaatcgttgggttaaatcagattggaaaatagatgagaacctggctggggagtggaaccacacctctggccaatggaatggagacgctaacgacaaaggtattcaa

SEQ ID NO: 111425 - DNA, 254 bp, Glycine max
cttcacccatcaatagcaaaatgaccaagttcacaatcctcctcatctctcttctcttctgcatcgcccacacttgcagcgcctccaaatggcagcaccagcaagatagctgccgcaagcagctccagggggtgaacctcacgccctgcgagaagcacatcatggagaagatccaaggccgcggcgatgacgatgatgatgatgacgacgacaatcacattctcaggaccatgcggggaagaatcaactacata

SEQ ID NO: 111426 - DNA, 253 bp, Glycine max
gaagagtactatcttctttgctctctttctagtttgtgccttcaccatctcatacctgccttcagccaccgctcagttcgtgctcgacactgatgatgatcctcttcaaaacggtggcacatactatatgttgccagttatgagaggaaagggcggtggaatagaagtagattcaactggaaaagaaatatgccctctcactgttgtgcaatcacccaatgagctcgataaggggattggactagtctttaca

SEQ ID NO: 111427 - DNA, 252 bp, Glycine max
gtgttcccaggacctattgtgttttaaatccacaaaatccttttgtgttaaataggtggatggggaaactgactttcccccagggcacttcccgaagtgttaaaagattgcctctttctatatggggaggagctggtgcaaagaatgccattctcatgaatatgccaaatgctgttctttcaatgtggagatattttgttggagatctcgtctttgaagtttctaagatgacttctccctacatcaaatgta

SEQ ID NO: 111428 - DNA, 249 bp, Glycine max
tgaacactcatcaccatggccaagcttgttctttccctttgtttccttcttttcagtggctgcttcgctctgagagagcaggcacagcaaaatgagtgccagatccaaaagctgaatgccctcaaaccggataaccgtatagagtcggaaggtgggttcattgagacctggaaccctaacaacaagccattccagtgtgccggtgttgccctctctcgctgcacccttaaccgcaatgcccttcgtaga

SEQ ID NO: 111429 - DNA, 250 bp, Glycine max
caacactacactagcaagcacacacctttagcacaatcaccaatggcttcttccgacagcaagcttcccctgatacccatccctggtagctacgggcttcctttctttggacccatgactgacagacatgactatttctacaaccaaggacgcgacaagttctttgccgaacgaattaaaaagtacaactctacggttatgctaaccaacatgccaccgggtcctttcaattcctctaatcctagagtca

SEQ ID NO: 111430 - DNA, 250 bp, Glycine max
attcattcttaatctttgtgaaaaataatgttcatcgagaattttaaggttgagtgtcctaatgtgaagtacaccgagactgagattcagtccgtgtacaactacgaaaccaccgaacttgttcacgagaacaggaatggcacctatcagtggattgtcaaacccaaatctgtcaaatacgaatttaaaaccaacatccatgttcctaaattaggggtaatgcttgtgggttggggtggaaacaacggct

SEQ ID NO: 111431 - DNA, 250 bp, Glycine max
tcaatatcctagtataccttaataaataatttaagatactatgatgagagcacggttcccattactgttgctgggacttgttttcctggcttcagtttctgtctcatttggcattgcttactgggaaaaagagaaccccaaacacaacaagtgtctccagagttgcaatagcgagagagactcgtacaggaaccaagcatgccacgctcgttgcaacctccttaaggtggagaaagaagaatgtgaagaa

SEQ ID NO: 111432 - DNA, 246 bp, Glycine max; identical to SEQ ID NO: 104124

SEQ ID NO: 111433 - DNA, 247 bp, Glycine max
ccaccatcggatttaatgttgagactgtggagtacaagaacatcagcttcactctgtgggatgttggtggtcaggacaagatccgtccactgtggaggcattatttccagaacactcagggtctcatttttgtggttgatagcaatgatagagatcgagtggttgaggcaagggatgagctgcacagaatgttgaatgaggatgaacttagagatgctgttttgcttgtttttgccaacaagcaaga

SEQ ID NO: 111434 - DNA, 186 bp, Glycine max
cacccaacaccctccttctccccaaccatgctgacgctgattacctcatcgttatccttaacgggactgccattctttccttggtgaacaacgacgacagagactcctacagacttcaatctggtgatgccctgagagtcccctcaggaaccacatacaatggggcaaccctggaaaaaagggaaa

SEQ ID NO: 111435 - DNA, 248 bp, Glycine max
cacactttccttagttcaatatggggaagcccttcttcactctctctctttcttccctttgcttgctactcttgtcgagtgcatgctttgctattacctccagcaagttcaacgagtgccaactcaacaacctcaacgcgttggaacccgaccaccgcgttgagtccgaaggtggtcttattgaaacatggaactctcaacaccctgagctgcaatgcgccggtgtcactgtttccaaacgcaccctc

SEQ ID NO: 111436 - DNA, 249 bp, Glycine max
tttgaggacctgtaccatttgattaagaaggcagtttcaattaggaagcatcttgagaggaacaggaaggacaaggactccaagttcaggttgattcttgttgagagcagaatccaccgacttgctcgctattacaagaagactaagaagctcccaccagtctggaagtacgaatcaacaactgctagcactctggttgcttagagaatgtatcaactttcatgggttttgcttccttgcagtcaccgt

SEQ ID NO: 111437 - DNA, 252 bp, Glycine max
gagataaacaaggttctgtttagtagagaggaagggcagcagcaaggggagcagaggctgcaagagagcgtgattgtggaaatctcgaaggaacagattcgggcactgagcaaacgtgccaaatctagttcaaggaaaaccatttcttctgaagataaaccttttaacttgagaagccgcgaccccatctactccaacaagcttggcaagttctttgagatcaccccagagaaaaacccccagcttcgggat

SEQ ID NO: 111438 - DNA, 250 bp, Glycine max
tgaacactcatcaccatggccaagcttgttctttccctttgtttccttcttttcagtggctgcttcgctctgagagagcaggcacagcaaaatgagtgccagatccaaaagctgaatgccctcaaaccggataaccgtatagagtcggaaggtgggttcattgagacctggaaccctaacaacaagccattccagtgtgccggtgttgccctctctcgctgcacccttaaccgcaatgcccttcgtagac

SEQ ID NO: 111439 - DNA, 251 bp, Glycine max
tcctacgataccaaattcgaggagataaacaaggttctgtttagtagagaggaagggcagcagcaaggggagcagaggctgcaagagagcgtgattgtggaaatctcgaaggaacagattcgggcactgagcaaacgtgccaaatctagttcaaggaaaaccatttcttctgaagataaaccttttaacttgagaagccgcgaccccatctactccaacaagcttggcaagttctttgagatcaccccaga

SEQ ID NO: 111440 - DNA, 249 bp, Glycine max
agcaaaacgagtgccagatccaaaaactcaatgccctcaaaccggataaccgtatagagtcagacggagggctcattgagacatggaaccctaacaacaagccattccagtgtgccggtgttgccctctctcgctgcaccctcaaccgcaacgcccttcgtagaccttcctacaccaacggtccccaggaaatctacatccaacaaggtaagggtatttttggcatgatatacccgggttgtcctagca

SEQ ID NO: 111441 - DNA, 248 bp, Glycine max
cggctcgagattgtctttgaacactcatcaccatggccaagcttgttctttccctttgtttccttcttttcagtggctgcttcgctctgagagagcaggcacagcaaaatgagtgccagatccaaaagctgaatgccctcaaaccggataaccgtatagagtcggaaggtgggttcattgagacctggaaccctaacaacaagccattccagtgtgccggtgttgccctctctcgctgcacccttaac

SEQ ID NO: 111442 - DNA, 247 bp, Glycine max
ctctgccaaatgtttatcataaatgctggaccgggatttaggttgctatggaacactgtcaagtctttccttgatcccaaaacaacttcaaagattcatgttctcggaaacaagtaccaaagcaaattgcttgaaataattgatgccagtgagttgccagaatttctgggaggtacctgtacctgtgcagatcagggtggttgcctcagatctgataaaggaccctggaaaaaccctgaaatattga

SEQ ID NO: 111443 - DNA, 247 bp, Glycine max
tcctagtataccttaataaataatttaagatactatgatgagagcacggttcccattactgttgctgggacttgttttcctggcttcagtttctgtctcatttggcattgcttactgggaaaaagagaaccccaaacacaacaagtgtctccagagttgcaatagcgagagagactcgtacaggaaccaagcatgccacgctcgttgcaacctccttaaggtggagaaagaagaatgtgaagaaggt

SEQ ID NO: 111444 - DNA, 245 bp, Glycine max
tataccttaataaataatttaagatactatgatgagagcacggttcccattactgttgctgggacttgttttcctggcttcagtttctgtctcatttggcattgcttactgggaaaaagagaaccccaaacacaacaagtgtctccagagttacaatagcgagagagactcgtacaggaaccaagcatgccacgctcgttgcaacctccttaaggtggagaaagaagaatgtgaagaaggtgaat

SEQ ID NO: 111445 - DNA, 246 bp, Glycine max
ctcctaccgcgtcatcaccaaaacaaattttcctgaataccaaggacctgagaagattgtcatccgacgttacagtgactttgtctggttacgtgatcgcctttttgagaagtacaaaggcattttcattccccctcttccagagaaaagtgctgtagagaaatttcgtttcagtgctgaatttattgaaatgaggcggcaagcattggatgtatttgtaaataggatagcatcacatcatgaact

SEQ ID NO: 111446 - DNA, 248 bp, Glycine max
ctagactcttctttttctctaagtctaaggggtgccctgagatcactttgagcaatggtgaaggctgtggcagttcttggcagcagcgagggtgtcactggaactattttcttcactcaggagggaaatggtccaaccaccgtaactggatctcttgctggtcttaagcctggtctccatggcttccatgtccatgccttgggggacactaccaatggttgcctgtcaactggagcgcatttcaatcc

SEQ ID NO: 111447 - DNA, 248 bp, Glycine max
gtcctataagacgcgtcagaaggaacatgatgagaatgtgaagaaggttatcaaacgtctcaaacagaggaatccatcaaaagatggtcttgtctgtaccgctcgtaagccctggattgctgttgggatgcggaacgttgactataagagagcccgtcattttgaagttgatttgtctgctttccggaatgtacttgagatcgacaaagaacggatgattgcaagagttgagcccctagtcaacatgg

SEQ ID NO: 111448 - DNA, 249 bp, Glycine max
cactgttgcatcatcatcttcattgcaaaaccctaaacttcaccttcaaccatgaccacacaagtaccaccacacagtgtccaagtccacacaacaacacacatatacgaagctggcgtcgtcccccccggagcccgtttcgaaccgccgcgttatgaagccggcgtcaaagcgccctccatttaccattccgagagaggtccaacgacttcccaggtcctcgccgtcctcgccggcctcccggtcggt

SEQ ID NO: 111449 - DNA, 246 bp, Glycine max
caaaagcaatgactatgtcatttaatccaaacccgtgttctgatgcatggagtttggaatttctgaagcgtaccggatttcattgtgatatcatttgtgttactggatggactgccaccccaatgcaggatgttcaggttacaattgattggtttatttcctctcaggaatgtgttcccaggacctattgtgttttaaatccacaaaatccttttgtgttaaataggtggatggggaaactgactt

SEQ ID NO: 111450 - DNA, 161 bp, Glycine max
cttttgcttgagtggccactaggctcctgcatgtgcatttttatttttcttgttttggggtcacaactgccaaagcctagttgagtgtgtagctgttgtattttgtcttctacacatattgaataaaatgtgtgaaaccctattttgtatagggatgctac

SEQ ID NO: 111451 - DNA, 244 bp, Glycine max
caaacattctcatcattcacccaacaaaatggctctgcttctgatagtacccatttcactggtaaccctctggctcggttacaccctataccagcggctacgcttcaagctccctcctggcccacggccctggccggtagtcggtaacctctacgacataaaacccgtccggttccggtgcttcgctgagtgggcgcagtcttacggccctatcatatcggtctggttcggttcgaccctaaac

SEQ ID NO: 111452 - DNA, 242 bp, Glycine max
cagacagagggttaattgtggagtattttggaaggatgtcttacgttgctcataacgttaaccagccccaagagaaagatttgttggagggaaatttttcctttgatattaaatctcgctctagattggaaaaagtttcctctacaaaagcacaatttgttagtggaaaaaccttcaaatatgatataattggtgctggttcacattcttcagaaaattttcctgaaaaggaagatcaagaa

SEQ ID NO: 111453 - DNA, 241 bp, Glycine max
ttgaacactcatcaccatggccaagcttgttctttccctttgtttccttcttttcagtggctgcttcgctctgagagagcaggcacagcaaaatgagtgccagatccaaaagctgaatgccctcaaaccggataaccgtatagagtcggaaggtgggttcattgagacctggaaccctaacaacaagccattccagtgtgccggtgttgccctctctcgctgcacccttaaccgcaatgcc

SEQ ID NO: 111454 - DNA, 240 bp, Glycine max
ctgatcttctgtgaagggttcgagtgagagcatacctgtcgggacccgaaagatggtgaactatgcctgagcggggcgaagcataggaaactctggtggaggcccgcagcgatactgacgtgcaaatcgttcgtctgacttgggtataggggcgaaagactaatcgaaccgtctagtagctggttccctccgaagtttccctcaggatagctggagcccgcgggcgagttctatcgggta

SEQ ID NO: 111455 - DNA, 242 bp, Glycine max
ggaagtgcggaaatatagagccgaattgtctgaacaagatatatttgtaatcccagcaggttatccagttgtggtcaacgctacctcaaatctgaatttctttgctattggtattaatgccgagaacaaccagaggaacttcctcgcaggttcgcaagacaatgtgataagccagatacctagtcaagtgcaggagcttgcattccctgggtctgcacaagctgttgagaagctattaaaga

SEQ ID NO: 111456 - DNA, 243 bp, Glycine max
tgcagaccgagctagctagctagcaagcaagcacagagatggaggcaaagcgaggccatgccctcatgtgcttggcacgtgtttcactcttcctctgcgctctaaccctatccgctgctcacggaagcaccacggttcaagacatcgcgagaaagttgaaactcggggacaacgagcttctgcgcacggagaagaagttcaaggttttcatggagaattacgggaggagctactccacagagg

SEQ ID NO: 111457 - DNA, 156 bp, Glycine max
ctgttcctcactgaccaagccatagcgatgagaaccaaactttctttagctatctttttctttgatcttttagccttattttcaaacctagcctttggcaaatgtaaagaaaccgaggtagaagaagaagaccctgagctcgtaacatgcaaacac

SEQ ID NO: 111458 - DNA, 246 bp, Glycine max
cggaaaaagaagaagagaaaaaagatgagcgacggaggaaaacgacaaggtggaagagcgttgccgccgccgccaagaggccctccgcctcctcccccctctcgccctcgcctcgaacccgtcgatcgcgaaaagacatgtccgttactgctgcgagtgttcactaagattgggagtcaccattccatggaagactttgccgtcagaggcaaagagcccaaagacgaggttcagatttacacctgg

SEQ ID NO: 111459 - DNA, 241 bp, Glycine max; identical to SEQ ID NO: 110699

SEQ ID NO: 111460 - DNA, 243 bp, Glycine max
ctatactatgatgagagtgcggtttcctttgttggtgttgctgggaactgttttcctggcatcagtttgtgtctcattaaaggtgagagaggatgagaataaccctttctacttgagaagctctaacagcttccaaactctctttgagaaccaaaacggtcgcattcgtctcctccagagattcaacaaacgctccccacaacttgagaaccctcgagactaccggattgtccagtttcagtc

SEQ ID NO: 111461 - DNA, 242 bp, Glycine max
ctagtataccttaataaataatttaagatactatgatgagagcacggttcccattactgttgctgggacttgttttcctggcttcagtttctgtctcatttggcattgcttactgggaaaaagagaaccccaaacacaacaagtgtctccagagttgcaatagcgagagagactcgtacaggaaccaagcatgccacgctcgttgcaacctccttaaggtggagaaagaagaatgtgaagaa

SEQ ID NO: 111462 - DNA, 239 bp, Glycine max
gaaaactgtacaagtccgtatgggattaatcactttgttttacttgtgggttatggttcagcggatggtgtagattactggatagcgaaaaattcatggggagaagattggggagaagatggttacatttggatccaaagaaacacgggtaatttattaggagtgtgtgggatgaattatttcgcttcatacccaaccaaagaggaatcagaaacactggtgtctgctcgcgttaaagg

SEQ ID NO: 111463 - DNA, 242 bp, Glycine max
cacgaatggcaacacaagcaggaaaagcaccaaggaaaggaaagtgaagaagaagaagaagaccaagacgaggatgaggagcaagacaaagagagccaagaaagtgaaggttctgagtctcaaagagaaccacgaagacataagaataagaacccttttcacttcaactctaaaaggttccaaactctcttcaaaaaccaatatggccacgttcgcgtcctccagaggttcaacaaacgctc

SEQ ID NO: 111464 - DNA, 240 bp, Glycine max
caaccctagtctccatacatcaacttgggaggttaaagagacggcaacgttgtgctgtccgccttgaccgagccagagcttcgtcttggccctcgattttgccctgtaaaactaatcccagtcacaacagaaataatcaatggcaccgaaacagaccaaggctgagaagaagatcgcttacgatgcgaactgtgcgacctaatggaggagtacggccaaatcctcgttgtaaactccgac

SEQ ID NO: 111465 - DNA, 243 bp, Glycine max
ctaaaattctttcaccaagttatgggttcccttgtgttgctccatttctccctcttaggtctctcttctagttccagcatatcaactcatcgttccatattggaccttgacctaaccaagtacaccacacagaaacaggtgtcttcactgttccaactatggaagagtgagcatggacgtgtctaccataaccacgaagaagaggcaaagagacttgagattttcaagaataacttgaactat

SEQ ID NO: 111466 - DNA, 242 bp, Glycine max
caaacattgaacttgttggcctaaaagaacaacaacaggagcagcaacaggaagagcaacctttggaagtgcggaaatatagagccgcattgtctgaacaagatatatttgtaatcccagcaggttatccagttgtggtcaacgctacctcaaatctgaatttctttgctattggtattactgccgagaacaaccagaggaacttcctcgcaggttcgcaagacaatgtgatatgccagata

SEQ ID NO: 111467 - DNA, 241 bp, Glycine max
gtagactgtgtggaagaaagcgaaggttgttacaatggatggcactatcaatcgttcgaatgggttttagaacatggtgggattgccactgatgatgcttatccttacagagctaaagagggtagatgcaaagccaataagatacaagacaaggttacaattgacggatatgaaactctaataatgtcagatgagagtacagaatcagagacagagcaagcgttcttaagcgccatccttg

SEQ ID NO: 111468 - DNA, 242 bp, Glycine max
gagcaagagtttctaaaatatcagcagcagcagcaaggaggttcccaaagccagaaaggaaagcaacaagaagaagaaaacgaaggaagcaacatattgagtggcttcgcccctgaattcttgaaagaagcgttcggcgtgaacatgcagatagtgagaaacctacaaggtgagaacgaagaggaggatagtggagccattgtgacagtgaaaggaggtctaagagtcacagctccagccat

SEQ ID NO: 111469 - DNA, 241 bp, Glycine max
cggctcgagattgtctttgaacactcatcaccatggccaagcttgttctttccctttgtttccatcttttcagtggctgcttcgctctgagagagcaggcacagcaaaatgagtgccagatccaaaagctgaatgccctcaaaccggataaccgtatagagtcggaaggtgggttcattgagacctggaaccctaacaacaagccattccagtgtgccggtgttgccctctctcgctgcac

SEQ ID NO: 111470 - DNA, 239 bp, Glycine max
ggagaagaagaagggtgagctaaagtcaattttccttcctttcctttccactagtcacaaaatagaacaaatggacatggccagactcttcgccttgcacgacgtcgacgccaccatcatcaccaccgcacataacgccaccgttttccaaaagtccatcgatttagatgcgagtcgcggtcgccccatcagaacgcacgttgtcaacttccccgccgcacaagtgggtctccccgttg

SEQ ID NO: 111471 - DNA, 202 bp, Glycine max
tctctccattggtccttaaacactcatcagtcatcaccatggccaagctagttttttccctttgttttctgcttttcagtggctgctgcttcgctttcagttccagagagcagcctcagcaaaacgagtgccagatccaaaaactcaatgccctcaaaccggataaccgtatagagtcagaaggagggctcattgagacatg

SEQ ID NO: 111472 - DNA, 256 bp, Glycine max
cacaacacaacccatggccaccacctccgcattcctcctccttacactcctcctgctgctccacctcgccatcgccgctcacggcatcggcatcaactacggcacgctcggcgacaaccttccaccgcccgcggcggtggcgaacttcctgaagacgaagacgaccatcgaccgcgtgaagatctacgacgtgaacccggacatcctgcgggccttcgccggcagcggcatctccgtgacggtgaccgcccccaac

SEQ ID NO: 111473 - DNA, 250 bp, Glycine max
gtactcaacattttacactcttttcttcttctcgttgttgcttcgctgttgaatcatggatcagaaggtcgatttcagcgctccccattccatgggaaccactatcatcggcgttacttacaacggcggtgtcgttctcggagccgactctcgaaccagcaccggagtgtatgttgccaaccgagcatcggacaaaatcactcagctcactgataatgtataacgtgtgtcgctctggatcggctgctga

SEQ ID NO: 111474 - DNA, 261 bp, Glycine max
gtaagtcttccatagccccccaaaaatgaagagcaccatcttctttgctctctttctcttttgtgccttcaccacctcatacctaccttcagccatcgctgatttcgtgctcgataatgaaggtaaccctcttgaaaatggtggcacatattatatcttgtcagacataacagcatttggtggaataagagcagccccaacgggaaatgaaagatgccctctcactgtggtgcaatctcgcaatgagctcgacaaagggat

SEQ ID NO: 111475 - DNA, 259 bp, Glycine max
ggaagccaaagcaaaagcagaagaaatggcattgacgagaccatatgcaccatgagacttcgccacaacattggccagacttcatcacctgacatctacaaccctcaagccggtagcgtcacaaccgccaccagccttgacttcccagccctctcgtggctcagactcagtgctgagtttggatctctccgcaagaatgcaatgttcgtgccacactacaacctgaacgcgaacagcataatatacgcattgaatggac

SEQ ID NO: 111476 - DNA, 264 bp, Glycine max
tatcattcaaaggcgatagtgatactggtaattaatgaaggagatgcaaacattgaacttgttggcctaaaagaacaacaacaggagcagcaacaggaagagcaacctttggaagtgcggaaatatagagccgaattgtctgaacaagatatatttgtaatcccagcaggttatccagttgtggtcaacgctacctcaaatctgaatttctttgctattggtattaatgccgagaacaaccagaggaacttcctcgcaggttcg

SEQ ID NO: 111477 - DNA, 261 bp, Glycine max
taaaattcttccaccaagttatgggtttccttgtgttgcttcttttctccctcttaggtctctcttctagttccagcatatcaactcatcgttccatattggaccttgacctaaccaagtttaccacacagaaacaggtgtcttcactgttccaactatggaagagtgagcatggacgtgtctaccataaccacgaagaagaggcaaagagacttgagattttcaagaataacttgaactatatcagggacatgaatgcaa

SEQ ID NO: 111478 - DNA, 143 bp, Glycine max
cgaataaaacaacaaaggctttgctgccctttgttaagtataaaataacgggtaatgtaattgtacccttgtgtaatgagtcactcaagtacctatgcgggaaaatcataaattaaaagagaaatttcaatgaattttctgtc

SEQ ID NO: 111479 - DNA, 261 bp, Glycine max
taaagagccagcaggccaggcaggtgaagaacaacaaccctttcagcttcctggttccacctcaggagtctcagaggagagctgtggcttagagagccctttttgcatgtgctaccacacttttgtccttttgggctctagctagtgctggtagcagtaaataagaatgaataaaagaaacaaaggcttagatgccctttgttaagtgtagaataacgggtatagtaactatgtacccttgtgtaatgagtcactcaagta

SEQ ID NO: 111480 - DNA, 266 bp, Glycine max
ggcgcggttcccattactgttgctgggagttgttttcctggcatcagtttctgtctcatttggcattgcgtattgggaaaagcagaaccccagtcacaacaagtgcctccgaagttgcaatagcgagaaagactcctacaggaaccaagcatgccacgctcgttgcaacctccttaaggtggaggaagaagaagaatgcgaagaaggtcaaattccacgaccacgaccacaacacccggagagggaacgtcagcaacacggtgaga

SEQ ID NO: 111481 - DNA, 259 bp, Glycine max
cgaagatgaagataaacctcgtcctagtcgaccaagccaaggaaagcgtgaacaagaccaggaccaggacgaggacgaagatgaagatgaagatcaacctcgcaagagccgcgaatggagatcgaaaaagacacaacccagaagacctagacaagaagaaccacgtgaaagaggatgcgagacaagaaacggggttgaggaaaatatctgcaccttgaagcttcacgagaacatgctcgcccttcacgcgctgacttct

SEQ ID NO: 111482 - DNA, 259 bp, Glycine max
gtcattgacaaagagaggagaggagactatttgggaaaaactgttcaggttgtccctcatatcactgatgctattcaagattggattgaaagagtggcccacatacctgtagatggaaagaccagtccagctgatgtatgtgtcatagaattgggtggaaccataggagatattgagtccatgccatttattcaggcattaggacaattctcatacagagtaggtgctggcaacttttgcttagttcatgtcagccttg

SEQ ID NO: 111483 - DNA, 244 bp, Glycine max
attgtctttgaacactcatcaccatggccaagcttgttctttccctttgtttccttcttttcagtggctgcttcgctctgagagagcaggcacagcaaaatgagtgccagatccaaaagctgaatgccctcaaaccggataaccgtatagagtcggaaggtgggttcattgagacctggaaccctaacaacaagccattccagtgtgccggtgttgcactctctcgctgcaccttaaccgcaat

SEQ ID NO: 111484 - DNA, 259 bp, Glycine max
ctcaacgagtgccaactcaacaacctcaacgcgttggaacccgaccaccgcgttgagtccgaaggtggtttgattcaaacatggaactctcaacaccctgagctgaaatgcgccggtgtcactgtttccaaactcaccctcaaccgcaatggcctccacttgccatcttactcaccttatccccggatgatcatcatcgcccaagggaaaggagcacttggagttgcaattccaggatgtcctgagacgtttgaggagc

SEQ ID NO: 111485 - DNA, 113 bp, Glycine max
ctaaggcttagcttgccttttgttcactgtaaaataataatgtaagtactctctataatgagtcacgaaacttttgcgggaataaaaggagaaattccaatgagttttctgtc

SEQ ID NO: 111486 - DNA, 260 bp, Glycine max
caagacaaggttacaattgacggatatgaaactctaataatgtcagatgagagtacagaatcagagacagagcaagcgttcttaagcgccatccttgagcaaccaattagtgtctccattgatgcaaaagattttcatttatacaccgggggaatttatgatggagaaaactgtacaagtccgtatgggattaatcactttgttttacttgtgggttatggttcagcggatggtgtagattactggatagcgaaaaattc

SEQ ID NO: 111487 - DNA, 257 bp, Glycine max
atggaatttactctccacattggaatctgaatgcaaacagtgtgatctatgtgactcgaggacaaggaaaggttagagttgtgaactgccaagggaatgcagtgttcgacggtgagcttaggaggggacaattgctggtggtaccacagaacttcgtggtggcggagcaagccggagaacaaggattcgaatacatagtattcaagacacaccacaacgcagtcactagctacttgaaggatgtgtttagggcaact

SEQ ID NO: 111488 - DNA, 253 bp, Glycine max
gaagcgttactttttcttcttctttctcttcattttcttcgctcttcgatcttcgtccggggactgctccgaataccaccaccaccactcgccgatggccacgatcggaggcttacacgactcccaaggctctcaaaacagcgtcgaaaccgaagccctcgctcgattcgccgtagacgaacacaacaagaagcagaattcgcttctggagtttgctagggtggttagggcacaggaacaggttgttgctggt

SEQ ID NO: 111489 - DNA, 257 bp, Glycine max
attgtctttgaacactcatcaccatggccaagcttgttctttccctttgtttccttcttttcagtggctgcttcgctctgagagagcaggcacagcaaaatgagtgccagatccaaaagctgaatgccctcaaaccggataaccgtatagagtccggaaggtgggttcattgagacctggaacccaaccaccaagccattccagtgtgccggtgttgccctctctggctgaacccttaaccgcaatgcccttcgtag

SEQ ID NO: 111490 - DNA, 263 bp, Glycine max
ctacaacagcagaaaagtcatggtggacgcaagcaggggcaacaccagcaggaggaagaggaagaaggtggcagcgtgctcagtggcttcagcaaacacttcttggcacaatccttcaacaccaacgaggacatagctgagaaacttcagtctccagacgacgaaaggaagcagatcgtgacagtggaaggaggtctcagcgttatcagccccaagtggcaagaacaacaagatgaagatgaagatgaagacgaagatgatga

SEQ ID NO: 111491 - DNA, 259 bp, Glycine max
ggctcgagggaaggtcttgctgaggccattgatgatggcaagattggaccaagggatgaccccaaggttcgttccaagatcttgtctgaagagttcggttgggacaaggatcttgccaagagaatctggtgctttggccctgagacccttggacccaacatggtggttgatatgtgcaagggagtccagtatttgaatgaaatcaaggattctgtggttgctggattccgtgggcatcaaaagaaggtgctttggctga

SEQ ID NO: 111492 - DNA, 256 bp, Glycine max
gtaaaagttgtattgaaattttcacaagaggaatttcttacagcttggtcaactcaggtgcgtcctacaacaactctgttggctgatgggtgtccatatttgtatgctatggtgcatgatagttcagtgtctacaataccaggtgattttgtcattggtgttaagttgacaaccataaacaatatgtgtgcatatgggctcaatcctggtatttcaggttctcgtcttttgggcacattcctcagtctatttcaca

SEQ ID NO: 111493 - DNA, 161 bp, Glycine max
cggctcgagttgtctttgaacactcatcaccatggccaagcttgttctttccctttgtttccatcttttcagtggctgcttcgctctgagagagcaggcacagcaaaatgagtgccagatccaaaagctgaatgccctcaaaccggataaccgtatagagt

SEQ ID NO: 111494 - DNA, 254 bp, Glycine max
gtggctagtgctgtgtatatgaagtacttatgtttcgctagctttccgttcttctctttttgttcgcttcggctcctttaggttttccttccgtgcgtttactcggaactactcttccactcttcgtttaaaatgtctgacgtggaagagtatcgttgtttcattggtggccttgcgtggtcaacatctgatagagagttaaaggatacgtttgaaaagtttggcaagcttattgaggcaaaggtggttgttga

SEQ ID NO: 111495 - DNA, 256 bp, Glycine max
gtacaccgtattaaagaatttaagatatactatgatgagagcgcggttcccattactgttgctgggagttgttttcctggcatcagtttctgtctcatttggcattgcgtattgggaaaagcagaaccccagtcacaacaagtgcctccgaagttgcaatagcgagaaagactcctacaggaaccaagcatgccacgctcgttgcaacctccttaaggtggaggaagaagaagaatgcgaagaaggtcaaattcca

SEQ ID NO: 111496 - DNA, 258 bp, Glycine max
ctttgaacactcatcaccatggccaagcttgttctttccctttgcttccttcttttcagtggctgcttcgctctgagagagcaggcacagcaaaatgagtgccagatccaaaagctgaatgccctcaaaccggataaccgtatagagtcggaaggtgggttcattgagacctggaaccctaacaacaagccattccagtgtgccggtgttgccctctctcgctgcacccttacacgcaatgcccttcgtagaccttcc

SEQ ID NO: 111497 - DNA, 260 bp, Glycine max
ctagttatgggtttccttgtgttgcttcttttctccctcttaggtctctcttctagttccagcatatcaactcatcgttccatcattggaccttgacctaaccaagtttaccacacagatacaggtgtcttcactgttccaactatggaagagtgagcatggacgtgtctaccataaccacgaagaagaggcaaagagacttgagattttcaagaataacttgaactatatcagggacatgaatgctaacagaaaatcac

SEQ ID NO: 111498 - DNA, 256 bp, Glycine max
ttttctatcttttcttactgtttcattttccattttttagttattccgatattcggacgcatcaacttgttatgaaatcacattgatagcctctactcgtgtcctagctcgtctaagagctagatttgcctcaattgtttgtctcttgccttccgccttattcaaattagcttctgctatttcaagagtttgctgtgcttcttgtggatcaatgtcactacccttgttccgcatcatttactaaaacagtgatctc

SEQ ID NO: 111499 - DNA, 259 bp, Glycine max
  unsure (1)..(259): unsure at all n locations
gtaccgacaagatcatcaccaccgaaggtagaaaagttggcataaaaaaagccctcgttttctacgttggcaaagcccccaagggcaccaaaaccaattggatcatgcacgagtatcgcctcctcgactcttcccgaaagaacactggcaccaagcttgatgattgggttctgtgtcgtatatacaagaagaactcgagtgcactgaagacggcgcaaaacggcgtggnttccgagcaacgagcacactcaatacagca

SEQ ID NO: 111500 - DNA, 258 bp, Glycine max
ctcgtcggatcgcacggcctttgtgctggcgacgcatcattcaaatttctgccctatcaactttcgatggtatgatagtggcctaccatggtggtgacgggtgacggagaattagggttcgattccggagatggagcctgagaaacggctaccacatccaaggaaggcagcaggcgcgcagattacccaatcctgacacggggaggtagtgacaatctataacgataccgggctcattgagtctggtaattggaatga

SEQ ID NO: 111501 - DNA, 255 bp, Glycine max
gtggagagggaacgtcagcaacacggtgagaaggaggaagacgaaggtgagcagccacgtccattcccattcccacgcccacgccaacctcatcaagaggaagagcacgagcagaaggaggaacacgaatggcatcgcaaggaggaaaaacacggaggaaagggaagtgaagaggaacaagatgaacgtgaacacccacgcccacaccaacctcatcaaaaggaagaggaaaagcacgaatggcaacacaagcag

SEQ ID NO: 111502 - DNA, 258 bp, Glycine max
cttccttagttcaatatggggaagcccttcactctctctctttactccctttgcttgctactcttgtcgagtgcatgctttgctattagctccagcaagctcaacgagtgccaactcaacaacctcaacgcgttggaacccgaccaccgcgttgagtccgaaggtggtttgattcaaacatggaactctcaacaccctgagctgaaatgcgccggtgtcactgtttccaaactcaccctcaaccgcaatggcctccac

SEQ ID NO: 111503 - DNA, 258 bp, Glycine max
cttcacttgcagaacttagttctctgttgcatcatcatcatctacattagtgttagccctaaacttcaccttcaaccatgaccacagtgccaccacacagtgtccaagtgcacacaacaacacaccgctacgaagccggcgtcgtcccgccggctcgttttgaggcgccgcgttacgaagccggcatcaaggcgccctcttccatttaccattccgagagaggtccgacgacctctcaggttctcgcagttgtcgccg

SEQ ID NO: 111504 - DNA, 256 bp, Glycine max
gtccaatatgttgtcctctacaagaatggaatttactctccacattggaatctgaatgcaaacagtgtgatctatgtgactcgaggacaaggaaaggttagagttgtgaactgccaagggaatgcagtgttcgacggtgagcttaggaggggacaattgctggtggtaccacagaacttcgtggtggcggacaagccggagaacaaggattcgaatacatagtattcaagacacaccacaacgcagtcactagcta

SEQ ID NO: 111505 - DNA, 257 bp, Glycine max
tgccgtttctattattgacaccaacagcttggagaaccagctcgaccagatgcctaggagattctatcttgctgggaaccaagagcaagagtttctaaaatatcagcagcagcagcaaggaggttcccaaagccagaaaggaaagcaacaagaagaagaaaacgaaggaagcaacatattgagtggcttcgcccctgaattcttgaaagaagcgttcggcgtgaacatgcagatagtgagaaacctacaaggtgaga

SEQ ID NO: 111506 - DNA, 252 bp, Glycine max
ggagttgcaattccaggatgtcctgagacgtttgaggagccacaagaacaatcaaacagaagaggctcaaggtcgcagaagcagcagctacaggacagtcaccagaagattcgtcacttcaatgaaggagacgtactcgtgattcctcctggtgttccttactggacctataacactggcgatgaaccagttgttgccatcagtcttcttgacacctctaacttcaataaccagcttgatcaaacccctagg

SEQ ID NO: 111507 - DNA, 256 bp, Glycine max
cttcaaacttaattattaacacttccttagttcaatatggggaagcccttcactctctctctttcttccctttgcttgctactcttgtcgagtgcatgctttgctattagctccagcaagctcaacgagtgccaactcaacaacctcaacgcgttggaacccgaccaccgcgttgagtccgaaggtggtttgattcaaacatggaactctcaacaccctgagctgaaatgcgccggtgtcactgtttccaaactca

SEQ ID NO: 111508 - DNA, 251 bp, Glycine max
atacatagtagtgttggtgggttgcaaagatgcttgggggtcttctccataggggtcataagataaaagggacagtggtgttgatgcgcaagaatgtgttggacgtgaatagcgtaaccagcgttgggggaattattggtcaaggtctcgacttagttggctcaacactcgatactcttactgccttcttgggccgatccgtgtctctccagcttattagtgctaccaaagctgatgccaacggaaaaggg

SEQ ID NO: 111509 - DNA, 257 bp, Glycine max
cttccttagttcaatatggggaagcccttcactctctctctttcatccctttgcttgctactcttgtcgagtgcatgctttgctactagctccagcaagctcaacgagtgccaactcaacaacctcaacgcgttggaacccgaccaccgcgttgagtccgaaggtggtttgattcaaacatggaactctcaacaccctgagctgaaatgcgccggtgtcactgtttccaaactcaccctcaaccgcaatggcctcca

SEQ ID NO: 111510 - DNA, 221 bp, Glycine max
gaaccttcgagactaccgtgttgtagagctcatggctaaacccaacaccctctttctcccccaccacgctgacgctgattttctcctccttgtccttagcgggagagccttaattaacttggtgaaacccgacgacagagacccctactaccttgaccgtggttatgcacaaagaatccctgcaggaaccactgtctatttggttaacccggacaagaaga

SEQ ID NO: 111511 - DNA, 258 bp, Glycine max
ggatgtacaacaatgaagacactcctgttgttgccgtttctattattgacaccaacagcttggagaaccagctcgaccagatgcctaggagattctatcttgctgggaaccaagagcaagagtttctaaaatatcagcagcagcagcaaggaggttcccaaagccagaaaggaaagcaacaagaagaagaaaacgaaggaagcaatcgattgagtggcttcgcccctgaattcttgaaagaagcgttcggcgtgaaca

SEQ ID NO: 111512 - DNA, 247 bp, Glycine max
cttaaatgatgagcaccatcttcattgctctctttctcttttgtgccttcaccatctcatacctaccttcagccatcgctgatttcgtgctcgataatgaaggtaaccctcttgaaaatggtggcacatattatatcttgtcagacataacagcatttggtggaataagagcagccccaacgggacatgaaagatgccctctcactgaggtgcaatctcgcgatgagctcgacagagggattggaac

SEQ ID NO: 111513 - DNA, 251 bp, Glycine max
gttctgaaggggatataaacaacactactatatttgttggagggcttgattctgataccagtgatgaggatctcagacaaccatttttgcaatttggtgaggttgtctctgtgaaaattccagttggtaaagggtgtggatttgttcaatttgctgacagaaagaatgctgaggaagcaattcagggattgaatgggacagtaattgggaagcagacagtgcgtctttcttggggtcgcagtccaggaaat

SEQ ID NO: 111514 - DNA, 253 bp, Glycine max
gcatgctttgctattagctccagcaagctcaacgagtgccaactcaacaacctcaacgcgttggaacccgaccaccgcgttgagtccgaaggtggtttgattcaaacatggaactctcaacaccctgagctgaaatgcgccggtgtcactgtttccaaactcaccctcaaccgcaatggcctccacttgcactcttactcaccttatccccggatgatcatcatcgcccaagggaaaggagcacttggagttg

SEQ ID NO: 111515 - DNA, 254 bp, Glycine max
gttaatgtagcatgtgctgctgttggcttgacatcaagttacactccaactccattgttggaatctggtttgcaaaaagacagagggttaattgtggagtattttggaaggatgtcttacgttgctcataacgttaaccagccccaagagaaagatttgttggatggaaatttttcctttgatattaaatctcgctctagattggaaaaagtttcctctacaaaagcacaatttgttagtggaaaaaccttcaa

SEQ ID NO: 111516 - DNA, 251 bp, Glycine max
taaagatttgtatctgtttataaattctccgggggggtgggtaatacccggaatagctatttatgatactatgcaatttgtacaaccagatgtacagacagtatgtatgggattagccgcttcaatgggatcctttcttttggcaggaggagaaattaccaaacgtttagcattccctcacgctagggtaatgatccaccaacccgctagttctttttatgaggcacaaacgggagaatttatcctggaag

SEQ ID NO: 111517 - DNA, 253 bp, Glycine max
caaagaggagttaataattgaagaaaatgtccaagtatggaacatctctattggtgccttctgttcatgaacttgtgaagcaacctatcaccaaagttccagatcaatatcttcatccaaatcaagatcctcctgatatatctaacacaaccttaccacaagttccagtcatcgaccttagtaaattgttatctgaagatgtcactgagctagagaagctagacgatgcatgcaaggaatgggggttcttcca

SEQ ID NO: 111518 - DNA, 251 bp, Glycine max
ctcgagccgattcggctcgagggtccttaaacactcatcagtcaactccatggccaagctagttttttccctttgttttcagcttttcagtggctgctgcttcgctttcagttccagagagcagcctcagcaaaacgagtgccagatccaaaaactcaatgccctcaaaccggataaccgtatagagtcagaaggagggctcattgagacatggaaccctaacaacaagccattccagtgtgccggtgttg

SEQ ID NO: 111519 - DNA, 243 bp, Glycine max
ctagcttagtttctatatatgcgttatttgtctctgagtactttatctctcttgtgcattacctttgtggtcatggcagcctccgtggatcccctagtggttggtcgcgtgatcggcgatgtggtagacatgttcattccttcagtcaacatgtccgtttactttgggtcgaagcacgtcacaaatggctgtgacatcaagccatccattgccatcagccctcctaagctcacgctcaccggc

SEQ ID NO: 111520 - DNA, 160 bp, Glycine max
gttcaatatcctagtataccttaataaataatttaagatactatgatgagagcacggttcccattactgttgctgggacttgttttcctggcttcagtttctgtctcatttggcattgcttactgggaaaaagagaaccccaaacacaacaagtgtctca

SEQ ID NO: 111521 - DNA, 254 bp, Glycine max
cttcacttgcagcactgttgcatcatcatcttcattgcaaaaccataaacttcaccttcaaccatgaccacacaagtaccaccacacagtgtccaagtccacacaacaacacaccgctacgaagctggcgtcgtcccccccggagcccgtttcgaaccgccgcgttatgaagccggcgtcaaagcgccctccatttaccattccgagagaggtccaacgacttcccaggtcctcgccgtcctcgccggcctccc

SEQ ID NO: 111522 - DNA, 246 bp, Glycine max
ggagaagcaaacattgaacttgttggcattaaagcacaacaacagatgcagcaacaggaagagcaacctttggaagtgcggaaatatagagctgaattgtctgaacaagatatatttgtaatcccagcaggttatccagttgtggtcaacgctacctcagatctgaatttctttgcttttggtatcaatgccgagaacaaccagaggaacttccttgcaggttcgaaagacaatgtgataagccag

SEQ ID NO: 111523 - DNA, 251 bp, Glycine max
tataccttaataaataatttaagatactatgatgagagcacggttcccattactgttgctgggacttgttttcctggcttcagtttctgtctcatttggcattgcttactgggaaaaagagaaccccaaacacaacaagtgtctccagagttgcaatagcgagagagactcgtacaggaaccaagcatgccacgctcgttgcaacctccttaaggtggagaaagaagaatgtgaagaaggtgaaattccac

SEQ ID NO: 111524 - DNA, 248 bp, Glycine max
gaaattttgataaaccgcgatcacaagttgccgcaccttaaaaccggaaacaaaagcaatcgttacttgatttcaagaatctctcaatttctttctacttctttgtgtacgatttcttaagggaaagaaaatcactctctgtgctggccacagacttcgtgaatcattgtcttttccacttttagtctatttgctgaacactctcctatttgatataggacttcgtgtcagatttaaacttcttctgt

SEQ ID NO: 111525 - DNA, 250 bp, Glycine max
gtaagaagtttaagagggtaagcatattcctgtatctaatattagtgcaggggaaaatcatgtagttcaaatacccctaatggcacaggaggaaattctgtcttctagtgcaagtgatttcagaactgcaatggtgagtaaaaatagcaagcctcaagctactgcaatgcatgtgggagctatagaaattatcattgatagtttcgcaagtcctgactgcaacatagttggtgcaatgcttttggttgat

SEQ ID NO: 111526 - DNA, 248 bp, Glycine max
gatcattgcaacccctcttcttgttatcttcagccccatccttgtccctgctgcgtttgtgctgttcctggttgcttctggctttttgttctctgggggctgtggtgtggctgccattgctgctttatcttggatttacaactacgtttctgggaaccagcctgcgggttctgacacccttgactatgcaaaagggtaccttactgataaggcaagggatgtgaaggagagggcaaaggattatggaa

SEQ ID NO: 111527 - DNA, 205 bp, Glycine max
gttcaatatcctagtacaccgtattaaagaatttaagatatactatgatgagagcgcggttcccattactgttgctgggagttgttttcctggcatcagtttctgtctcatttggcattgcgtattgggaaaagcagaaccccagtcacaacaagtgcctccgaagttgcaatagcgagaaagactcctacaggaaccaagcatg

SEQ ID NO: 111528 - DNA, 253 bp, Glycine max
cgagaatttaagatatactatgatgagagcgcggttcccattactgttgctgggagttgttttcctggcatcagtttctgtctcatttggcattgcgtattgggaaaagcagaaccccagtcacaacaagtgcctccgaagttgcaatagcgagaaagactcctacaggaaccaagcatgccacgctcgttgcaacctccttaaggtggaggaagaagaagaatgcgaagaaggtcaaattccacgaccacga

SEQ ID NO: 111529 - DNA, 274 bp, Glycine max
cttgagaggtgtaggataagtgggagctggaaacagcgaaagtgaaataccactacttttaacgttattttacttattccgtgaatcggaagccgggcactgcccctctttttggacccaaggtcggcttcggccggtcgatccgggcggaagacattgtcaggtggggagtttggctggggcggcacatctgttaaaagataacgcaggtgtcctaagatgagctcaacgagaacagaaatctcgtgtggaacaaaagggtaaaagctcgttt

SEQ ID NO: 111530 - DNA, 201 bp, Glycine max
agacgtttgagaagccacaacagcaatcaagcagaagaggctcaaggtcgcagcagcaactacaagacagtcaccagaagattcgtcacttcaatgaaggagacgtactagtgattcctcctggtgttccttactggacctataacactggcgatgaaccagttgttgccatcagtcttcttgacacctccaacttcaaca

SEQ ID NO: 111531 - DNA, 114 bp, Glycine max
atcatcgcccaagggaaaggagcacttggagttgcaattccaggatgtcctgagacgtttgaggagccacaagaacaatcaaacagaagaggctcaaggtcgcagaagcagcag

SEQ ID NO: 111532 - DNA, 269 bp, Glycine max
cttagttcaatatggggaagcccttcactctctctctttcttccatttgcttgctactcttgtcgagtgcatgctttgctattagctccagcaagctcaacgagtgccaactcaacaacctcaacgcgttggaacccgaccaccgcgttgagtccgaaggtggtttgattcaaacatggaactctcaacaccctgagctgaaatgcgccggtgtcactgtttccaaactcaccctcaaccgcaatggcctccacttgccatcttactca

SEQ ID NO: 111533 - DNA, 272 bp, Glycine max
tttgaacactcatcaccatggccaagcttgttctttccctttgtttccttcttttcagtggctgcttcgctctgagagagcaggcacagcaaaatgagtgccagatccaaaagctgaatgccctcaaaccggataaccgtatagagtcggaaggtgggttcattgagacctggaaccctaacaacaagccattccagtgtgccggtgttgccctctctcgctgcacccttaaccgcaatgcccttcgtagaccttcctacaccaacggtccc

SEQ ID NO: 111534 - DNA, 273 bp, Glycine max
catcactcctcaagagttcagcaaaaagtacttgcaagctcccaaggatgtgtcgcagcaaatcaaaatggccaacaagaaaatgaagaaggaacaatattcttgtgaccatccacctgcatcatgggattggaggaaaaaaggtgtcatcacccaagtaaagtaccaagggggctgtggaagcggttgggcgttttctgccacgggagccatagaagcagcacatgcaatagcaacaggagaccttgttagcctttctgaacaagaactcgt

SEQ ID NO: 111535 - DNA, 274 bp, Glycine max
cctagtacaccgtattaaagaatttaagatatactatgatgagagcgcggttcccattactgttgctgggagttgttttcctggcatcagtttctgtctcatttggcattgcgtattgggaaaagcagaaccccagtcacaacaagtgcctccgaagttgcaatagcgagaaagactcctacaggaaccaagcatgccacgctcgttgcaacctccttaaggtggaggaagaagaagaatgcgaagaaggtcaaattccacgaccacgaccaca

SEQ ID NO: 111536 - DNA, 272 bp, Glycine max
ctctcttcaaaaaccaatatggccacgttcgcgtcctccagaggttcaacaaacgctcccaacagcttcagaatctccgagactaccgcattttggagttcaactccaaacccaacacccttcttctcccccaccatgctgacgctgattacctcatcgttatccttaacgggactgccattcttaccttggtggacaacgacgagaatctcagaatgataacactcgccatacccgttaacaaacccggtagatttgagagtttcttccta

SEQ ID NO: 111537 - DNA, 170 bp, Glycine max
cttaattagtgttcatgaatatgtcaagccttactttagtggttgcaaattgaaaagctttctagctggtcataatatcaccattactgatggtattgacaaaactagtgcaactttgcaatttagaaagttagcagattgtgattttctcaagagaaactttaagcaga

SEQ ID NO: 111538 - DNA, 268 bp, Glycine max
tctccattggtccttaaacactcatcagtcatcaccatggccaagctagttttttccctttgttttctgcttttcagtggctgctcgttcgctttcagttccagagagcagcctcagcaaaacgagtgccagatccaaaaactcaatgccctcaaaccggataaccgtatagagtcagaaggagggctcattgagacatggaaccctaacaacaagccattccagtgtgccggtgttgccctctctcgctagcacctcaaccgcaacg

SEQ ID NO: 111539 - DNA, 272 bp, Glycine max
cattgtctttgaacactcatcaccatggccaagcttgttctttccctttgtttccttcttttcagtggctgcttcgctctgagagagcaggcacagcaaaatgagtgccagatccaaaagctgaatgccctcaaaccggataaccgtatagagtcggaaggtgggttcattgagacctggaaccctaacaacaagccattccagtgtgccggtgttgccctctctcgctgcacccttaaccgcaatgcccttcgtagaccttcctacaccaa

SEQ ID NO: 111540 - DNA, 193 bp, Glycine max
gttcgtcgtggacaggcagatagtgagaaagctacaatggcacccttctcttcctcttcgttctcaccttgtagattgtctttgaacactcatcaccatggccaagcttgttctttccctttgtttccttcttttcagtggctgcttcgctctgagagagcaggcacagcaaaatgagtgccagatccaaaag

SEQ ID NO: 111541 - DNA, 156 bp, Glycine max
agaatcttatcaccggcgtcaccaagggctaccgctacaaaatgaggttcgtttatgcccattttcccatcaacgcaagcatcggcaacagcaacaagtctattgagatccgaaatttccttggcgagaagaaggtgaggaaagtcgacatgcttg

SEQ ID NO: 111542 - DNA, 271 bp, Glycine max
attgtctttgaacactcatcaccatggccaagcttgttctttccctttgtttccttcttttcagtggctgcttcgctctgagagagcaggcacagcaaaatgagtgccagatccaaaagctgaatgccctcaaaccggataaccgtatagagtcggaaggtgggttcattgagacctggaaccctaacaacaagccattccagtgtgccggtgttgccctctctcgctgcacccttaaccgcaatgcccttcgtagaccttcctacaccaa

SEQ ID NO: 111543 - DNA, 123 bp, Glycine max
actccctatgctgctatgcttgctgcacaggacgttgctgccagatgcaaggaactgggcataactgctcttcatatcaagctccgtgcgacgggtggaaacaagacaaaaacacctggtcct

SEQ ID NO: 111544 - DNA, 273 bp, Glycine max
gttgcagaccgagctagctagctagcaagcaagcacagagatggaggcaaagcgaggccatgccctcatgtgcttggcacgtgtttcactcttcctctgcgctctaaccctatccgctgctcacggaagcaccacggttcaagacatcgcgagaaagttgaaactcggggacaacgagcttctgcgcacggagaagaagttcaaggttttcatggagaattacgggaggagctactccacagaggaggagtatttgcgccgtttggggatttt

SEQ ID NO: 111545 - DNA, 274 bp, Glycine max
caagaagaagagcacgagcagagagaggaacaggaatggcctcgcaaggaggaaaaacgcggagaaaagggaagtgaagaggaagatgaggatgaggatgaggaacaagatgaacgtcaattcccattcccacgcccacctcatcagaaggaagagcgaaagcaagaggaagatgaggatgaggagcagcagcgagagagcgaagaaagtgaagattctgagttacgaagacataagaataagaacccttttctcttcggctctaacaggttcg

SEQ ID NO: 111546 - DNA, 75 bp, Glycine max
cagcacccctccctcttgcagctctccatcaaacactctctcaccattgcaattcaccacttgtaccaatgcccg

SEQ ID NO: 111547 - DNA, 272 bp, Glycine max
aattaatgaaggagatgcaaacattgaacttgttggcctaaaagaacaacaacaggagcagcaacaggaagagcaacctttggaagtgcggaaatatagagccgaattgtctgaacaagatatatttgtaatcccagcaggttatccagttgtggtcaacgctacctcaaatctgaatttctttgctattggtattaatgccgagaacaaccagaggaacttcctcgcaggttcgcaagacaatgtgataagccagatacctagtcaagtgc

SEQ ID NO: 111548 - DNA, 273 bp, Glycine max
actcgaccaagccaaggaaagcgtgaacaagaccaggaccaggacgaggacgaagatgaagatgaagatcaacctcgcaagagccgcgaatggagatcgacaaagacacaacccagaagacctagacaagaagaaccacgtgaaagaggatgcgagacaagaaacggggttgaggaaaatatctgcaccttgaagcttcacgagaacattgctcgcccttcacgcgctgacttctacaaccctaaagctggtcgcattagtaccctcaacagc

SEQ ID NO: 111549 - DNA, 190 bp, Glycine max
aaattcttccaccaagttatgggtttccttgtgttgcttcttttctccctcttaggtctctcttctagttccagcatatcaactcatcgttccatattggaccttgacctaaccaagtttaccacacagaaacaggtgtcttcactgttccaactatggaagagtgagcatggacgtgtctaccataacc

SEQ ID NO: 111550 - DNA, 267 bp, Glycine max
cttaattattaacacttccttagttcaatatggggaagcccttcactctctctctttcttccctttgcttgctactcttgtcgagtgcatgctttgctattagctccagcaagctcaacgagtgccaactcaacaacctcaacgcgttggaacccgaccaccgcgttgagtccgaaggtggtttgattcaaacatggaactctcaacaccctgagctgaaatgcgccggtgtcactgtttccaaactcaccctcaaccgcaatggcc

SEQ ID NO: 111551 - DNA, 270 bp, Glycine max
ctcgagccgctccggaggacgcgaatgcgaccatattggtttttgaagagagtttcgaaccagttagagccgaagagaaaagggttcttattcttatgtcttcgtaactcagaatcttcactttcttcgccccaaccatgctgacgctgattacctcatcgttatccttaacgggactgccattctttccttggtgaacaacgacgacagagactcctacagacttcaatctggtgatgccctgagagtcccctcaggaaccacatacta

SEQ ID NO: 111552 - DNA, 85 bp, Glycine max
caattattaacactttccttagttcaatatggggaagcccttcttcactctctctctttcttccctttgcttgctactcttgtcg

SEQ ID NO: 111553 - DNA, 273 bp, Glycine max
ctcgagccgaatcggctcgagtgaacactcatcaccatggccaagctctgttctttccctttacttccttcttttcagtggcagcttcgctctgagagagcaggcacagcaaaatgagtgccagatccaaaagctgaatgccctcaaaccggataaccgtatagagtcggaaggtgggttcattgagacctggaaccctaacaacaagccattccagtgtgccggtgttgccctctctcgctgcacccttaaccgcaatgcccttcgtagacc

SEQ ID NO: 111554 - DNA, 268 bp, Glycine max
agcaatgttcgtgccacactacaacctgaacgcgaacagcataatatacgcattgaatggacgggcattgatacaagtggtgaattgcaacggtgagagagtgtttgatggagagctgcaagagggacgggtgctgatcgtgccacaaaactttgtggtggctgcaagatcacagagtgacaacttcgagtatgtgtcattcaagaccaatgatacacccatgatcggcactcttgcaggggcaaactcattgttgaacgcattacca

SEQ ID NO: 111555 - DNA, 269 bp, Glycine max
aaagcaatggctacttcaaagttgaaaacccagaatgtggttgtatctctctccctaaccttaaccttggtactggtgctactgaccagcaaggcaaactcagcggaaactgtttctttcagctggaacaagttcgtgccgaagcaaccaaacatgatcctccaaggagacgctattgtgacctcctcgggaaagttacaactcaataaggttgacgaaaacggcaccccaaaaccctcgtctcttggtcgcgacctctactccacccc

SEQ ID NO: 111556 - DNA, 268 bp, Glycine max
cttgaaggaaagacagtaggaaccgttggcgcgggtcgaattgggaagcttttgctccagaggttgaaaccttttagctgtaatcttctttattttgatcgacttaggatagatcctgaattggagaaagagattggagcaaaatttgaggaggaccttgatgcaatgcttccaaagtgtgatgtgattgttatcaacacccctctcactgagcagacaaggggattgtttgacaaaaatagaattgctaagtgcaagaaaggtgtct

SEQ ID NO: 111557 - DNA, 267 bp, Glycine max
attggaatctgaatgcaaacagtgtgatctatgtgactcgaggacaaggaaaggttagagttgtgaactgccaagggaatgcagtgttcgacggtgagcttaggaggggacaattgctggtggtaccacagaacttcgtggtggcggacaagccggagaacaaggattcgaatacatagtattcaagacacaccacaacgcagtcactagctacttgaaggatgtgtttagggcaattccctcagaggttcttgcccattcttacaa

SEQ ID NO: 111558 - DNA, 156 bp, Glycine max
ctcgagccgtgaaactcaagaaattcttgcatataattgaggattcccctgttttccctgttatatatgacagtaagagaactgtgttatccttacccccaattattaatggtgcacattcagccatcactctggagacaaagaatgtatttattg

SEQ ID NO: 111559 - DNA, 123 bp, Glycine max
cagaaaggaaagcaacaagaagaagaaaacgaaggaagcaacatattgagtggcttcgcccctgaattcttgaaagaagcgttcggcgtgaacatgcagatagtgagatacctacaaggtgag

SEQ ID NO: 111560 - DNA, 270 bp, Glycine max
atggtccttaaacactcatcagtcatcaccatggccaagctagttttttccctttgttttctgcttttcagtggctgctagttcgctttcagttccagagagcagcctcagcaaaacgagtgccagatccaaaaactcaatgccctcaaaccggataaccgtatagagtcagaaggagggctcattgagacatggaaccctaacaacaagccattccagtgtgccggtgttgccctctctcgctgcaccctcaaccgcaacgcccttcgt

SEQ ID NO: 111561 - DNA, 270 bp, Glycine max
cttctcttctgtgtttcttagaagaattaagatggctaccttgactgtacctccagttcctccttcccccagagatgatgccatgcagctttaccgtgcttttaagggatttgggtgtgatacaagtgctgttatcaatatacttgctcatcgagatgctacacagcgtgcctacatccagcaagaatacaaagcaatgtattctgaggaactttccaagcgcttagcttcggagcttagtggaaagttagagactgcagttctgctctg

SEQ ID NO: 111562 - DNA, 121 bp, Glycine max
gacgctgattacctcatcgttatccttaacgggactgccattctttccttggtgaacaacgacgacagagactcctacagacttcaatctggtgatgccctgagagtcccctcaggaacca

SEQ ID NO: 111563 - DNA, 267 bp, Glycine max
  unsure (1)..(267): unsure at all n locations
ttctccccgatgcaatcggaactacttgtggccaacgtcttgagaaggtgttcggaaccgagcactcccacattcttcgagttccctttagaactgagaagggaattgttcgtcagtggatctcaagattcgaagtctggccatacttggaaacttacactgaggatgttgctcatgagcttgccaaagagttgcaaggcaagccagatctgattgtcggaaactacagtgatggaaacattgntgcctcttgttggcacataaatt

SEQ ID NO: 111564 - DNA, 269 bp, Glycine max
actatgtttattgattttgggctggcgaaagacagggatggaggttgctatctgaggtatgatgatacaaatcctgaagcagaaaagaaagagtatattgatcacattgaagaaattgttcagtggatgggttggaaaccattcaagattacttacacaagtgattacttccaagaattgtacgaattagcagtggagctcataaaaaagggtcatgcttatgttgatcatcagacacctgatgagataaaggagcatagggagaagaa

SEQ ID NO: 111565 - DNA, 264 bp, Glycine max
gtctttgaacactcatcaccatggccaagcttgttctttccctttgtttccttcttttcagtggctgcttcgctctgagagagcaggcacagcaaaatgagtgccagatccaaaagctgaatgccctcaaaccggataaccgtatagagtcggaaggtgggttcattgagacctggaaccctaacaacaagccattccagtgtgccggtgttgccctctctcgctgcacccttaaccgcaatgcccttcgtagaccttcctaca

SEQ ID NO: 111566 - DNA, 80 bp, Glycine max
atctagcactgaagctcagcaatcctacttgcaaggattcagcaggaacattttagaggcctcctacgataccaaattcg

SEQ ID NO: 111567 - DNA, 266 bp, Glycine max
tagagacctccttccatagcgaattcgaggagataaacagggttttgttgggagaggaagaggagcagaggcagcaagagggagtgatcgtggaactctcaaaggaacaaattcggcaactgagcagacgtgccaaatctagttcaaggaaaaccatttcctccgaagatgaaccattcaacttgagaagccgcaaccccatctattccaacaactttggaaagttctttgagatcacccctgagaaaaacccacagcttcgggac

SEQ ID NO: 111568 - DNA, 81 bp, Glycine max
attaacactttccttagttcaatatggggaagcccttcttcactctctctctttcttcccgttgcttgctaatcttgtcga

SEQ ID NO: 111569 - DNA, 268 bp, Glycine max
ctctctccctctctgttcgcactctgtctttcccctgtttccgcgtcactgagtcatggcgattcgcaactcgctcaccggccaattcctccgccgcagctccgtcgccggagcaaggctcatgtcttcttcgtcctcatggttccggagcatcgagcccgctcccaaggatcctatcctcggagtcactgaagctttcctcgccgatcagagtccaaacaaagtcaacgtcggagtgggtgcgtatcgcgatgaccacggcaaacct

SEQ ID NO: 111570 - DNA, 266 bp, Glycine max
attctctccattgtctttgaacactcatcaccatggccaagcttgatctttccctttgattccttcttttcagtggctgcttcgctctgagagagcaggcacagcaaaatgagtgccagatccaaaagctgaatgccctcaaaccggataaccgtatagagtcggaaggtgggttcattgagacctggaaccctaacaacaagccattccagtgtgccggtgttgccctctctcgctgcacccttaaccgcaatgcccttcgtaga

SEQ ID NO: 111571 - DNA, 268 bp, Glycine max
  unsure (1)..(268): unsure at all n locations
ccgtgataacacactaacacnancacatnatcaantttacttgacaacaatattgtanaactcaaaatctagtttcatacttttnttcttcttcttnaaatggctctccaggctgcttctcttgtncctgcttctttctcggttcttaaanagggaaagagtggtgtgtctctcaaggactccaccttgttcggtctttcattttcagaanctatcaaagctaacttnagctcttctgnattgaggtncaagagggaattcgaacaaa

SEQ ID NO: 111572 - DNA, 264 bp, Glycine max
atcaatctggcgatgccctaagagtccctgcaggaaccacatactatgtggttaaccctgacaacgacgagaatctcagaatgataacactcgccatacccgttaacaaacccggtagatttgagagtttcttcctatctagcactgcagctcaacagtcctacttgcaagggttcagcaagaatattctagaggcctcatacgacaccaaattcgaggagataaacaaggttctgtttggtagagaggaggggcagcaacaag

SEQ ID NO: 111573 - DNA, 268 bp, Glycine max
attggaagtgcggaaatatagagctgaattgtctgaacaagatatatttgtaatcccagcaggttatccagttgtggtcaacgctacctcagatctgaatttctttgcttttggtatcaatgccgagaacaaccagaggaacttccttgcaggttcgaaagacaatgtgataagccagatacctagtcaagtgcaggagcttgcgttccctgggtctgcaaaagatattgagaacctaataaagagccaaagtgagtcctactttgtg

SEQ ID NO: 111574 - DNA, 188 bp, Glycine max
ataaaattcttccaccaagttatgggtttccttgtgttgcttcttttctccctcttaggtctctcttctagttccagcatatcaactcatcgttccatattggaccttgacctaaccaagtttaccacacagaaacaggtgtcttcactgttccaactatggaagagtgagcatggacgtgtctacca

SEQ ID NO: 111575 - DNA, 262 bp, Glycine max
aacaaaagagaagaagatgggtttgaagaacaacatggtggtgctaaaggtgtgtttggtgctacttttccttgtggggggtactactagtgccaacttgaggctgagtaagcttggcctgctcatgaaaagtgatcatcatcaacactcaaatgatgatgagtcttcaaaaccatgctgtgatcaatgcgcatgcacaaagtcaaaccctcctcaatgccgctgttcagatatgaggctgaattcgtgccattcagcttgc

SEQ ID NO: 111576 - DNA, 120 bp, Glycine max
aagcaaagcaatggctacttcaaagttgaaaacccagaatgtggttgtatctctctccctaaccttaaccttggtactggtgctactgaccagcaaggcaaactcagcggaaactgtttc

SEQ ID NO: 111577 - DNA, 266 bp, Glycine max
gggggggaaatgatactacaagccactaggcatgggtctagcaaaggaaacaataatgggaggtggaggccgtgtggccaaagttgaaattcagcagaagaagcctctctcaagggttccaaacacaaagccaccgttcactgttggccaactcaagaaagccattccaccgcactgctttcagcgttccctcctcacttcattgtcctatgttgtttatgacctttcattggctttcattttctacattgccactacctacttcc

SEQ ID NO: 111578 - DNA, 266 bp, Glycine max
caaagcaacaagaagaagagaacgaaggaaagcaacaagaagaagaaaacgaaggaagcaacatattgagtggcttcgcccctgaattcttgaaagaagcgttcggcgtgaacatgcagatagtgagaaacctacaaggtgagaacgaagaggaggatagtggagccattgtgacagtgaaaggaggtctaagagtcacagctccagccatgaggaagccacagcaagaagaagatgatgatgatgaggaagagcagccacagtgc

SEQ ID NO: 111579 - DNA, 267 bp, Glycine max
cgagtgccagatccaaaaactcaatgccctcaaaccggataaccgtatagagtcagaaggagggctcattgagacatggaaccctaacaacaagccattccagtgtgccggtgttgccctctctcgctgcaccctcaaccgcaacgcccttcgtagaccttcctacaccaacggtccccaggaaatctacatccaacaaggtaagggtatttttggcatgatatacccgggttgtcctagcacatttgaagagcctcaacaacctca

SEQ ID NO: 111580 - DNA, 187 bp, Glycine max
gtgcctactggtgttgcatggtggatgtacaacaatgaagacactcctgttgttgccgtttctattattgacaccaacagcttggagaaccagctcgaccagatgcctaggagattctatcttgctgggaaccaagagcaagagtttctaaaatatcagcagcagcagcaaggaggttcccaaagcc

SEQ ID NO: 111581 - DNA, 80 bp, Glycine max
aacaattccttcacttgcagcactgttgcatcatcatcttcattgcaaaaccctaaacttcaccttcaaccatgaccaca

SEQ ID NO: 111582 - DNA, 267 bp, Glycine max
tgaacactcatcaccatggccaagcttgttctttccctttgtttccttcttttcagtggctgcttcgctctgagagagcaggcacagcaaaatgagtgccagatccaaaagctgaatgccctcaaaccggataaccgtatagagtcggaaggtgggttcattgagacctggaaccctaacaacaagccattccagtgtgccggtgttgccctctctcgctgcacccttaaccgcaatgcccttcgtagaccttcctacaccaacggt

SEQ ID NO: 111583 - DNA, 265 bp, Glycine max
cgggaagcccttcactctctctctttcttccctttgcttgctactcttgtcgagtgcatgctttgctattagctccagcaagctcaacgagtgccaactcaacaacctcaacgcgttggaacccgaccaccgcgttgagtccgaaggtggtttgattcaaacatggaactctcaacaccctgagctgaaatgcgccggtgtcactgtttccaaactcaccctcaaccgcaatggcctccacttgccatcttactcaccttatccc

SEQ ID NO: 111584 - DNA, 267 bp, Glycine max
tcactcttcactcaaaactcttctctttcattttcataattcccacacattatggctgagcttcactaccaaccacaacaccaataccccctccgctaccctaacgatccacaccaacaaacccgttcctccacccaccaggtcgtcaaggccgccaccgccgtcacagcgggcggctccctcttgatcctcgcctcgttgatcctcgccgccaccgtcattgccctcaccatcgtcaccccgctgttcgtcattttcagtccggtt

SEQ ID NO: 111585 - DNA, 80 bp, Glycine max
catcgttatccttaacgggactgccattcttaccttggtgaacaacgacgaccgagactcttacaaccttcaatctggcg

SEQ ID NO: 111586 - DNA, 260 bp, Glycine max
gaagcaggtgggaggcactacattcacgagcattggagccttcgatacgtgttttgtgaaaacctacgaaactctggcgccgcccattacggtgcacttcgaggggttggacctgaaactgccgttggaaaacagcttgatccacagcagcgcgggttcgctggcgtgtcttgcaatggcggcggcacccaacaatgtgaactcggtgttgaacgcatcgccaactttcagcaacagaaccttaggattttgtttgatac

SEQ ID NO: 111587 - DNA, 265 bp, Glycine max
agacgtttgagaagccacaacagcaatcaagcagaagaggctcaaggtcgcagcagcaactacaagacagtcaccagaagattcgtcacttcaatgaaggagacgtactagtgattcctcctggtgttccttactggacctataacactggcgatgaaccagttgttgccatcagtcttcttgacacctccaacttcaacaatcagcttgatcaaaccccagagtattttaccttgctgggaacccagatatagagcacccagag

SEQ ID NO: 111588 - DNA, 263 bp, Glycine max
agcagccccaacgggaaatgaaagatgccctctcactgtggtgcaatctcgcaatgagctcgacaaagggattggaacaatcatctcgtccccatatcgaatccgttttatcgccgaagccatcctttgagccttaagttcgattcatttgcagttataatgctgtgtgttggaattcctaccgagtggtctgttgtggaggatctaccagaaggacctgctgttaaaattggtgagaacaaagatgcaatggatggttggtt

SEQ ID NO: 111589 - DNA, 262 bp, Glycine max
tctctccattggtccttaaacactcatcagtcatcaccatggccaagctagttttttccctttgttttctgcttttcagtggctgctgcttcgctttcagttccagagagcagcctcagcaaaacgagtgccagatccaaaaactcaatgccctcaaaccggataaccgtatagagtcagaaggagggctcattgagacatggaaccctaacaacaagccattccagtgtgccggtgttgccctctctcgctgcaccctcaa

SEQ ID NO: 111590 - DNA, 260 bp, Glycine max
gaatcaatggccagcgctcagctcacagcaatagcgtcatcgatctctacggcgtcgtttgaagggcttcgaccttccgctgttcagtttgcttccacgggcagaattagaattggcaatctctcccaaaggtccttccggggcttggttgtcaaagccgccaccgttgttgcccccaaatacactgcgataaagcctctgggagatagagtgtaataaaaattaaggaagcagaggagaaaactgagggtgggattttg

SEQ ID NO: 111591 - DNA, 261 bp, Glycine max
gcaaagcaatggctacttcaaagttgaaaacccagaatgtggttgtatctctctccctaaccttaaccttggtactggtgctactgaccagcaaggcaaactcagcggaaactgtttctttcagctggaacaagttcgtgccgaagcaaccaaacatgatcctccaaggagacgctattgtgacctcctcgggaaagttacaactcaataaggttgacgaaaacggcaccccaaaaccctcgtctcttggtcgcgccctct

SEQ ID NO: 111592 - DNA, 262 bp, Glycine max
gaaggctcatccaagccaatatcttggtattcttgactcaagtaacatagggaacttctccaaccacctctttgctgttgagtttgacacagcaaaggattttgagtttggggacattgatgacaaccatgttggaattgacatcaatagcttggcctccaatgcctctgcatctgcaggttactacactggggatgatgattcaagcaacagaatctcaccctccaaagtagggtacctattctagcttgggttgattatg

SEQ ID NO: 111593 - DNA, 143 bp, Glycine max
atactatgtggtcaaccctgacaacaacgaaaatctcagattaataacactcgccatacccgttaacaagcctggtagagttgagagtttctgcctatctagcactgaagctcaacaatcctacttgcaaggattcagcagga

SEQ ID NO: 111594 - DNA, 259 bp, Glycine max
cttctcttgcggctagggttttagcgcagttcttctagatttaaggaagatgggtaaggaaaaggttcacatcagtattgtggttattggccatgttgactctgggaagtccactaccactggccacctgatctacaagcttggaggcattgacaagcgtgttattgagagatttgagaaggaagctgctgagatgaacaagaggtctttcaagtatgcctgggtgcttgataagcttaaggctgagcgtgaaagagga

SEQ ID NO: 111595 - DNA, 119 bp, Glycine max
tctccattgtctttgaacactcatcaccatggccaagcttgttctttccctttgtttccttcttttcagtggctgcttcgctctgagagagcaggcacagcaaaatgagtgccagatcc

SEQ ID NO: 111596 - DNA, 258 bp, Glycine max
tcgacaaccaattcacatcactgaaggaaattatgtcagaaagcaagatgtcagcattgaatatgatgcatgtacaattccaaatgattgtggttcattggttgttgccaaggttggaaatcacaaacaaattgttggtttccatgttgctggaagcaaaggaagactgggatatgcttcattgataccatatgttgagccagttgtgcagctcaaagtgctgaagtttactttgacttcttccctgtggaggttgat

SEQ ID NO: 111597 - DNA, 116 bp, Glycine max
gtacaccgtattaaagaatttaagatatactatgatgagagcgcggttcccattactgttgctgggagttgttttcctggcatcagtttctgtctcatttggcattgcgtattggg

SEQ ID NO: 111598 - DNA, 252 bp, Glycine max
gtcttccatagccccccaaaaatgacgagcaccatcttctttgctctctttctctttcgtgccttcaccacctcatacctaccttcagccatcgctgatttcgtgctcgataatgaaggtaaccctcttgaaaatggtggcacatattatatcttgtcagacataacagcatttggtggaataagagcagccccaacgggaaatgatagatgccctctcactgtggtgcaatctcgcaatgagctcgacaaa

SEQ ID NO: 111599 - DNA, 79 bp, Glycine max
tgggccgatccgtgtctctccagcttattagtgctaccaaagctgatgccaacggaaaacggaaacttggaaaggctac

SEQ ID NO: 111600 - DNA, 263 bp, Glycine max
ctcaacaaagaggacaaagcagcagaccacaagaccgtcaccagaagatctataacttcagagagggtgatttgatcgcagtgcctactggtgttgcatggtggatgtacaacaatgaagacactcctgttgttgccgtttctattattgacaccaacagcttggagaaccagctcgaccagatgcctaggagattctatcttgctgggaacaagagcaagagtttctacaatatcagcaagagcaaggaggtcatcaaagcc

SEQ ID NO: 111601 - DNA, 262 bp, Glycine max
ttgtctttgaacactcatcaccatggccaagcttgttctttccctttggttccttcttttcagtggctgcttcgctctgagagagcaggcacagcaaaatgagtgccagatccaaaagctgaatgccctcaaaccggataaccgtatagagtcggaaggtgggttcattgagacctggaaccctaacaacaagccattccagtgtgccggtgttgccctctctcgctgcaaccttaaccgcaatgcccttcgtagaccttcc

SEQ ID NO: 111602 - DNA, 261 bp, Glycine max
cacttgccatcttactcaccttatccccaaatgatcattgtcgttcaagggaagggagcaattggatttgcatttccgggatgtcctgagacgtttgagaagccacaacagcaatcaagcagaagaggctcaaggtcgcagcagcaactacaagacagtcaccagaagattcgtcacttcaatgaaggagacgtactagtgattcctcctggtgttccttactggacctataacactggcgatgaaccagttgttgccatc

SEQ ID NO: 111603 - DNA, 261 bp, Glycine max
gcaaaatgaccaagttcacaatcctcctcatctctcttctcttctgcatcgcccacacttgcagcgcctccaaatggcagcaccagcaagatagctgccgcaagcagctccagggggtgaacctcacgccctgcgagaagcacatcatggagaagatccaaggccgcggcgatgacgatgatgatgatgacgacgacaatcacattctcaggcacatgcggggaagaatcaactacataaggaggaacgaaggaaaagacg

SEQ ID NO: 111604 - DNA, 262 bp, Glycine max
tcacgagtgtggtcaccatgccttcagcaagtacccatgggttgatgatgttgtgggtttgaccgttcactcagcacttttagtcccttatttctcatggagaataagccatcgccgccaccactccaacacgggttcccttgaccgtgatgaagtgtttgtcccaaaaccaaaatccaaagttgcatggtacaccaagtacctgaacaacctctaggaagggctgcttctcttctcatcacactcacaatagggtggcctt

SEQ ID NO: 111605 - DNA, 260 bp, Glycine max
attggtccttaaacactcatcagtcatcaccatggccaagctagttttttccctttgttttctgcttttcagtggctgctgcttcgctttcagttccagagagcagcctcagcaaaacgagtgccagatccaaaaactcaatgccctcaaaccggataaccgtatagagtcagaaggagggctcattgagacatggaaccctaacaacaagccattccagtgtgccggtgttgccctctctcgctgcaccctcaaccgca

SEQ ID NO: 111606 - DNA, 257 bp, Glycine max
ctgggaaccaagagcaagagtttctacagtatcagccacagaagcagcaaggaggtactcaaagccagaaaggaaagcgtcagcaagaagaagaaaacgaaggaggcagcatattgagtggcttcgccccggaattcttggaacatgcgttcgtcgtggacaggcagatagtgagaaagctacaaggtgagaacgaagaggaagagaaggtgccattgtgacagtgaaaggaggtctcagcgtgataagcccaccca

SEQ ID NO: 111607 - DNA, 259 bp, Glycine max
atatactatgatgagagtgcggtttcctttgttggtgttgctgggaactgttttcctggcatcagtttgtgtctcattaaaggtgagagaggatgagaataacccttatctacttgagaagctctaacagcttccaaactctctttgagaaccaaaacggtcgcattcgtctcctccagagattcaacaaacgctccccacaacttgagaacttcgagactaccggattgtccagtttcagtcaaaacccaacacaatc

SEQ ID NO: 111608 - DNA, 238 bp, Glycine max
cttgtgcaccgtaagggttgtgaagcaggcagagaagagccatggtgcacgtttccttctaccgaaactatgggaaaaccttcaagaagcctcgtcgtccgtacgagaaggagcgtttggacgccgagttgaagctggtcggtgagtacggacttcgctgcaagagggagttgtggagggttcagtacgctctcagccgcatccgtaacacgccagaaatcttttgaaccctcgagag

SEQ ID NO: 111609 - DNA, 260 bp, Glycine max
ggctacttcaaagttgaaaacccagaatgtggttgtatctctctccctaaccttaaccttggtactggtgctactgaccagcaaggcaaactcagcggaaactgtttctttcagctggaacaagttcgtgccgaagcaaccaaacatgatcctccaaggagacgctattgtgacctcctcgggaaagttacaactcaataaggttgacgaaacggcaccccaaaaccctcgtctcttggtcgcgccctctactccacccc

SEQ ID NO: 111610 - DNA, 256 bp, Glycine max
attcaatgaagtcttcaagtcaattggtttgaatggtgtttatctatttttattggtggatgaccttgccaattttctcaggacttactcttctacagattttgtgggattcagtgttaccattcctcacaaggagacagcacttaagtgttgtgatgaggttgatccagtggctaagtcaataggagctgtgaattgcattgtaagagaccaactgacgggaaattgattgggtataacactgattatgttggtg

SEQ ID NO: 111611 - DNA, 259 bp, Glycine max
taaacactcatcagtcatcaccatggccaagctagttttttccctttgttttctgcttttcagtggctgctgcttcgctttcagttccagagagcagcctcagcaaaacgagtgccagatccaaaaactcaatgccctcaaaccggataaccgtatagagtcagaaggagggctcattgagacatggaaccctaacaacaagccattccagtgtgccggtgttgccctctctcgctgcaccctcaaccgcaacgccctt

SEQ ID NO: 111612 - DNA, 252 bp, Glycine max
gtcattggtgctaagttgacaatcataaaccatatgtgtgcatacgggctcaatcctggtatttcaggttctcgtcttttgggcaccattcctcagtctatttcacagcaaactgtttggaatcaaatggcaacagtgagaacaccattgaattttgattctagcaagcagagcttttgtcaattttctattgaccttctcggtggaggaattgtagtggacaaaactggagattggatcacacttatacaa

SEQ ID NO: 111613 - DNA, 253 bp, Glycine max
ctgatcgttccacaaaactttgcggtggctgcaaaatcccagagcgataactttgagtatgtgtcattcaagaccaatgatagaccctcgatcggaaaccttgcaggggcaaactcattgttgaacgcattgccagaggaagtgattcagcacacttttaacctaaagagccagcaggccaggcaggtgaagaacaacaaccctttcagcttcctggttccacctcaggagtctcagaggagagctgtggctt

SEQ ID NO: 111614 - DNA, 113 bp, Glycine max
gatcatacatagtagtgttggtgggttgcaaagatgcttgggggtcttctccataggggtcataagataaaagggacagtggtgttgatgcgcaagaatgtgttggacgtgaa

SEQ ID NO: 111615 - DNA, 261 bp, Glycine max
ccgctccgtcgagcgaatcggctcactcaccgcgacgacagagactcctacagacttcaatctagtgatgccctgagagtcccaccaggaaccacatactatgtggtcaaccctgacaacaacgaaaatctcagattaataacactcgccatacccgttaacaagcctggtagatttgagagtttcttcctatctagcactgaagctcaacatcctacttgcaaggattcagcaggaacattttagaggcctcctacgata

SEQ ID NO: 111616 - DNA, 258 bp, Glycine max
caaataattaattaaattcctcgtggaatcttgttgaagccatgtctacagctggtcaggtcatcaagtgcagagctgcggtggcatgggaagcagggaagccactatcgatagaaaccatagaagtggcaccaccccagaaagtgaagtgcgtttgaagatcctcttcaactccctttgccgtacagatgtttactggtgggatgctagggccagactccgctgtttcctcgtatcttaggccacgaagcttcgggg

SEQ ID NO: 111617 - DNA, 257 bp, Glycine max
caggatgtgaaatccaacaacatattggttgatgcagagtttgtggcataaattgcagattttggagttgccaaaatggttactggagtcagccaaaggacatgatcaatgtctgtgattgcaggatcctatggctacattgcaccagaatacgcgtacactcagggtgaatgagaagtgtgacatatatagctttggcgtggtcctttggagttagtaactggaagacccccaattgatccagagtatggtgaaag

SEQ ID NO: 111618 - DNA, 253 bp, Glycine max
tcttcttcgtctcaaacctcttcgttccttcgattcattccatttcttccaaaatggccaaagacccagttcgcgttctcgtcactggagccgcaggcaaattggatatgctcttgtccctatgattgctaggggagtgatgctgggtcctgaccagcccgtgatcctccacatgcttgacattcctccagcagcagagtcgttgaatggggttaaaatggaattggtggatgctgcattccctcttcttaaa

SEQ ID NO: 111619 - DNA, 255 bp, Glycine max
aattattaacacttccttagttcaatatggggaagcccttcactctctctctttcttccctttgcttgctactcttgtcgagtgcatgctttgctattagctccagcaagctcaacgagtgccaactcaacaacctcaacgcgttggaacccgaccaccgcgttgagtccgaaggtggtttgattcaaacatggaactctcaacacctgagctgaaatgcgccggtgtcactgtttccaaactcaccctcaaccg

SEQ ID NO: 111620 - DNA, 256 bp, Glycine max
gtgcctttcgggggccgaggcccctactgctggtcggcaaacggacggcgggcgcacgcgtcgcttctagcccggattctgacttagaggcgttcagtcataatccaacgcacggtagcttcgcgccactggcttttcaaccaagcgcgatgaccaattgtgcgaatcaacggttcctctcgtactaggttgaattactattgcgacactgtcatcagtagggtaaaactaacctgtctcacgacggtctaaaccc

SEQ ID NO: 111621 - DNA, 245 bp, Glycine max
ctcgagccgcgcctttctctctcttctttttactctctctctgtctctctctacgctttctacgttcgagatccctcaagggatccactaactgaaggagaaatggggttgacattcaccaagcttttcagccggcttttcgccaagaaggaaatgcgaattctgatggtgggtctcgatgcagctggtaagaccaccatcctgtacaagctcaaacttggagagatcgttaccacaattcccac

SEQ ID NO: 111622 - DNA, 258 bp, Glycine max
aattccttcacttgcagcactgttgcatcatcatcttcattgcaaaaccctaaacttcaccttcaaccatgaccacacaagtaccaccacacagtgtccaagtccacacaacaacacaccgctacgaagctggcgtcgtcccccccggagcccgtttcgaaccgccgcgttatgaagccggcgtcaaagcgccctccatttaccattccgagagaggtccaacgacttcccaggtcctcgccgtcctcgccggcctcc

SEQ ID NO: 111623 - DNA, 253 bp, Glycine max
gaagatgaagatcaacctcgcaagagccgcgaatggagatcgaaaaagacacaacccagaagacctagacaagaagaaccacgtgaaagaggatgcgagacaagaaacggggttgaggaaaatatctgcaccttgaagcttcacgagaacattgctacgcccttcacgcgctgacttctacaaccctaaagctggtcgcattagtaccccaacagcctcaccctcccagccctccgccaattccaactcagtg

SEQ ID NO: 111624 - DNA, 259 bp, Glycine max
ccttaaacactcatcagtcatcaccatggccaagctagttttttccctttgttttctgcttttcagtggctgctgcttcgctttcagttccagagagcagcctcagcaaaacgagtgccagatccaaaaactcaatgccctcaaaccggataaccgtatagagtcagaaggagggctcattgagacatggaaccctaacaacaagccattccagtgtgccggtgttgccctctctcgctgcaccctcaaccgcaacgcc

SEQ ID NO: 111625 - DNA, 259 bp, Glycine max
gaaagtcttccatagccccccaaaaatgaagagcaccatcttctttgctctctttctcttttgtgccttcaccacctcatacctaccttcagccatcgctgatttcgtgctcgataatgaaggtaaccctcttgaaaatggtggcacatattatatcttgtcagacataacagcatttggtggaataagagcagccccaacgggaaatgaaagatgccctctcactgtggtgcaatctcgcaatgagctcgacaaaggg

SEQ ID NO: 111626 - DNA, 251 bp, Glycine max
gttcaatatactagtataccttaataaataatttaagatactatgatgagagcacggttcccattactgttactgggacttgtgttcctggcttcagtttctgtctcatttagcattgcttactgggataaagagaaccccaaacacatcaagtgtctccagagttgcaatagcgagagagactcgtacaggaaccaagcatgccagctcgttgcaagctcctgaaggtggagatagaagaatgtgaagaa

SEQ ID NO: 111627 - DNA, 254 bp, Glycine max
caacagtgagaacaccattgaattttgattctagcaagcagagcttttgtcaattttctattgaccttctcggtggaggaattttagtggacaaaactggagattggatcacacttatacaaaattctccaattagtaacttgttgagagttgctgcttggaagaaaggctgtttaatggttaagattgtgatgtctgggaatgcagcagtcaaaaggagtgattgggcctcattggtacaagtgtttttaaca

SEQ ID NO: 111628 - DNA, 254 bp, Glycine max
cacgttttcaagaaggcaagagaagagattgagtcagtggtaggcaaagaaaggctggtcaaagaatcagacattcccaacctaccatacctacaagcagtgctgaaggaaaccctaaggctgcacccgccaaccccaatattcgcaagagaagccatgcgaacatgccaggttgaaggctacgacattccggaaaattccactatttgatcagcacatgggccattggtagggatccaaattactgggatgac

SEQ ID NO: 111629 - DNA, 243 bp, Glycine max
atcaaattcttccaccaagttatgggtttccttgtgttgcttcttttctccctcttaggtctctcttctagttccagcatatcaactcatcgttccatattggaccttgacctaaccaagtttaccacacagacacaggtgtcttcactgttccaactatggaagagtgagcatggacgtgtctaccataaccacgaagatgaggcaaagagacttgagattttcacgaataacttgaactat

SEQ ID NO: 111630 - DNA, 71 bp, Glycine max
gacaaggaaaggttagagttgtgaactgccaagggaatgcagtgttcgacggtgagcttaggaggggacaa

SEQ ID NO: 111631 - DNA, 258 bp, Glycine max
ctcttcttctcttgcggctagggttttagcgcagttcttctagatttaaggaagatgggtaaggaaaaggttcacatcagtattgtggtcattggccatgtcgactctgggaaatccactaccactggtcacctgatttacaagcttggaggcattgacaagcgtgttattgagaggtttgagaaggaagctgctgagatgaacaagagtctttcaagtatgcctgggtgctggacaaacttaaggctgagcgtgaaa

SEQ ID NO: 111632 - DNA, 242 bp, Glycine max
gcaacggtgagagagtgtttgatggagagctgcaagagggacgggtgctgatcgtgccacaaaactttgtggtggctgcaagatcacagagtgacaacttcgagtatgtgtcattcaagaccaatgatacacccatgatcggcactcttgcaggggcaaactcattgttgaacgcattaccagaggaagtgattcagcacactttcaacctaaaaagccagcaggccaggcagataaagaac

SEQ ID NO: 111633 - DNA, 256 bp, Glycine max
ctttgaacactcatcaccatggccaagcttgttctttccctttgtacccttcttttcagtggctgcttcgctctgagagagcaggcacagcaaaatgagtgccagatccaaaagctgaatgccctcaaaccggataaccgtatagagtcggaaggtgggttcattgagacctggaaccctaacaacaagccattccagtgtgccggcgttgccctctctcgctgcacccttaaccgcaatgcccttcgtagacctt

SEQ ID NO: 111634 - DNA, 257 bp, Glycine max
gttgcaggcagtgtcatctctcctttgacgacaagatgagcatcccaattccccatcggcagttattcatagacggagactggaaagtccccgtcctcaagaatcggattcccatcatcaacccttccacccaacacatcatccgggatatcccagcagctactaaggaagacgttgatctcgctgtcgctgccgccaaagctgccctctcccgcaacaagggcgccgattgggcctccgcttccggctccgttcgg

SEQ ID NO: 111635 - DNA, 259 bp, Glycine max
cattccttcacttgcagcactgttgcatcatcatcttcattgcaaaaccctaaacttcaccttcaaccatgaccacacaagtaccaccacacagtgtccaagtccacacaacaacacacccctacgaagctggcgtcgtcccccccggagcccgtttcgaaccgccgcgttatgaagccggcgtcaaagcgccctccatttaccattccgagagaggtccaacgacttcccaggtcctcgccgtcctcgccggcctccc

SEQ ID NO: 111636 - DNA, 256 bp, Glycine max
cttaaacactcatcagtcatcaccatggccaagctagttttttccctttgttttctgcttttcagtggctgctggttcgctttcagttccagagagcagcctcagcaaaacgagtgccagatccaaaaactcaatgccctcaaaccggataaccgtatagagtcagacggagggctcattgagacatggaaccctaacaacaagccattccagtgtgccggtgttgccctctctcgctgcaccctcaaccgcaacg

SEQ ID NO: 111637 - DNA, 246 bp, Glycine max
ctcgagccggttggatctctcttctgccgaagttgtcaccaaatacaaaaccgctgctgagatcgttaacaaggccttgaagctagttatttcagaatgtaaaccaaaggcgaagattgtggatatttgtgagaaaggggattcatacattagagagcaaactggaaatgtgtacaagaatgtgaagtggaagattgagagaggtgttgctttcccaacatgtttatcaatcaacaacgttgtctg

SEQ ID NO: 111638 - DNA, 254 bp, Glycine max
gagaaaggaaaggttaactaagaagcaatacttcaatggccacccttgttgttcataaccaaacttcttctgctcaagatgctgaggctctccaacaggctttcaaaggatggggggctgatgacaaggccattatagcaatactgggtcacagaaatgttcatcagaggcaagaaatcagaaaagcttatgaggagatttaccaagaggatctcatcaaacgccttgagtccgagatctctggtgactttgag

SEQ ID NO: 111639 - DNA, 252 bp, Glycine max
tctccattggtccttaaacactcatcagtcatcaccatggccaagctagttttttccctttgttttctgcttttcagtggctgctgcttcgctttcagttccagagagcagcctcagcaaaacgagtgccagatccaaaaactcaatgccctcaaaccggataaccgtatagagtcagaaggagggctcattgagacatggaacctaacaacaagccattccagtgtgccggtgttgccctctctcgctgca

SEQ ID NO: 111640 - DNA, 250 bp, Glycine max; identical to SEQ ID NO: 104106

SEQ ID NO: 111641 - DNA, 112 bp, Glycine max
gtctttgaacactcatcaccatggccaagcttgttctttccctttgtttccttcttttcagtggctgcttcgctctgagagagcaggcacagcaaaatgagtgccagatcca

SEQ ID NO: 111642 - DNA, 248 bp, Glycine max
ggcagcagcaaggggagcagaggctgcaagagagcgtgattgtggaaatctcgaaggaacagattcgggcactgagcaaacgtgccaaatctagttcaaggaaaaccatttcttctgaagataaaccttttaacttgagaagccgcgaccccatctactccaacaagcttggcaagttctctgagatcaccccagagaaaacccccagcttcgggacttggatatcttcctcagtattgtggatatga

SEQ ID NO: 111643 - DNA, 117 bp, Glycine max
ggcgctgagtaacactttccttagttcaatatggggaagcccttcttcactctcgctctttcttccctttgcttgctactcttgtcgagtgcatgctttgctaagtcctccagcaag

SEQ ID NO: 111644 - DNA, 254 bp, Glycine max
attgtctttgaacactcatcaccatggccaagcttgttctttccctttgtttccttcttttcagtggctgcttcgctctgagagagcaggcacagcaaaatgagtgccagatccaaaagctgaatgccctcaaaccggataaccgtatagagtcggaaggtgggttcattgagacctggaaccctaacaacaagccattccagtgtgccggtgttgccctctctcgctgcacccttaaccgcaatgcccttcgt

SEQ ID NO: 111645 - DNA, 249 bp, Glycine max
gcaagaagaagatgatgatgatgaggaagagcagccacagtgcgtggagacagacaaaggttgccaacgccaaagcaaaaggagcagaaatggcattgatgagaccatttgcacaatgagacttcgccaaaacattggtcagaattcatcacctgacatctacaaccctcaagctggtagcatcacaaccgccaccagccttgacttcccagccctctggcttctcaaactcagtgcgcagtatggatc

SEQ ID NO: 111646 - DNA, 249 bp, Glycine max
ggatgtacaacaatgaagacactcctgttgttgccgtttctattattgacaccaacagcttggagaaccagctcgaccagatgcctaggagattctatcttgctgggaaccaagagcaagagtttctaaaatatcagcagcagcagcaaggaggttcccaaagccagaaaggaaagcaacaagaagaagaaaacgaaggaagcaacatattgagtggcttcgcccctgaattcttgaaagaagcgttcg

SEQ ID NO: 111647 - DNA, 248 bp, Glycine max
caaactttctttagctatctttttcttttttcttttagccttattttcaaacctagcctttggcaaatgtaaagaaaccgaggtagaagaagaagaccctgagctcgtaacatgcaaacaccaatgccaacagccacagcaatacactgagggtgacaagcgggtatgcttgcaaagatgtgacaggtatcatcgtatgaagcaagagcgagagaaacaaatccaagaggaaactcgtgagaagaaag

SEQ ID NO: 111648 - DNA, 152 bp, Glycine max
gttcaatatcctagtataccttaataaataatttaagatactatgatgagagcacggttcccattactgttgctgggacttgttttcctggcttcagtttctgtctcatttggcattgcttactgggaaaaagagaaccccaaacacaacaa

SEQ ID NO: 111649 - DNA, 240 bp, Glycine max
ttcgagcgaatcggctcaggctctagtatatggtcaaatgaatgaaccgcccggagctcgtatgagagttggtttaactgccctgactatggcggaatattttcgagatgtcaatgaacaagatgtacttctatttatcgacaatatctttcgcttcgtccaagcaggatctgaagtatctgccttattgggtcgaatgccttctgctgtgggttatcaacccactcttagtactgaaat

SEQ ID NO: 111650 - DNA, 243 bp, Glycine max
gttcaatatcctagtacaccgtattaaagaatttaagatatactatgatgagagcgcggttcccattactgttgctgggagttgttttcctggcatcagtttctgtctcatttggcattgcgtattgggaaaagcagaaccccagtcacaacaagtgcctccgaagttgcaatagcgagaaagactcctacaggaaccaagcatgccacgctcgttgcaacctccttaaggtggaggaagaag

SEQ ID NO: 111651 - DNA, 240 bp, Glycine max
tggtccttaaacactcatcagtcatcaccatggccaagctagttttttccctttgttttctgcttttcagtggctgctgcttcgctttcagttccagagagcagcctcagcaaaacgagtgccagatccaaaaactcaatgccctcaaaccggataaccgtatagagtcagaaggagggctcattgagacatggaaccctaacaacaagccattccagtgtgccggtgttgccctctctc

SEQ ID NO: 111652 - DNA, 153 bp, Glycine max
tataaataatttaagatactatgatgagagcacggttcccattactgttgctgggacttgttttcctggcttcagtttctgtctcatttggcattgcttactgggaaaaagagaaccccaaacacaacaagtgtctccagagttgcaatagcg

SEQ ID NO: 111653 - DNA, 236 bp, Glycine max
cactcatcagtcatcaccatggccaagctagttttttccctttgttttctgcttttcagtggctgctgcttcgctttcagttccagagagcagcctcagcaaaacgagtgccagatccaaaaactcaatgccctcaaaccggataaccgtatagagtcagaaggagggctcattgagacatggaaccctaaaaacaagccattccagtgtgccggtgttaccctctctcgctgcac

SEQ ID NO: 111654 - DNA, 254 bp, Glycine max
cacgaatggcaacacaagcaggaaaagcaccaaggaaaggaaagtgaagaagaagaagaagaccaagacgaggatgaggagcaagacaaagagagccaagaaagtgaaggttctgagtctcaaagagaaccacgaagacataagaataagaacccttttcacttcaactctaaaaggttccaaactctcttcaaaaaccaatatggccacgttcgcgtcctccagaggttcaacaaacgctcccaacagcttca

SEQ ID NO: 111655 - DNA, 243 bp, Glycine max
aacttattaacactttccttagttcaatatggggaagcccttcttcactctctctctttcttccctttgcttgctactcttgtcgagtgcatgctttgctattacctccagcaagttcaacgagtgccaactcaacaacctcaacgcgttggaacccgaccaccgcgttgagtccgaaggtggtcttattgaaacatggaactctcaacaccctgagctgcaatgcgccggtgtcactgtttc

SEQ ID NO: 111656 - DNA, 242 bp, Glycine max
ccagaagacctagacaagaagaaccacgtgaaagaggatgcgagacaagaaacggggttgaggaaaatatctgcaccttgaagcttcacgagaacattgctcgcccttcacgcgctgacttctacaaccctaaagctggtcgcattagtaccctcaacagcctcaccctcccagccctccgccaattccaactcagtgcccaatatgttgtcctctacaagaatggaatttactctccacat

SEQ ID NO: 111657 - DNA, 243 bp, Glycine max
actcgtcctagtcgaccaagccaaggaaagcgtgaacaagaccaggaccaggacgaggacgaagatgaagatgaagatcaacctcgcaagagccgcgaatggagatcgaaaaagacacaacccagaagacctagacaagaagaaccacgtgaaagaggatgcgagacaagaaacggggttgaggaaaatatctgcaccttgaagcttcacgagaacattgctcgcccttcacgcgctgacttc

SEQ ID NO: 111658 - DNA, 243 bp, Glycine max
ctctcttcgacctcgcatcgcaccttcaacttaacctattccacttgtaatcgtaaacgctttgctagaagaagagacaaagtgtgtctgtgtgtgtgagagagagagcaatggctggctcgtgggcacgccgttctctgattgttctagccatcatttccttcggatgtctatttgcgatttccattgctaaggaggaagccaccaagttagggacggtcatcggcattgatcttggaacaa

SEQ ID NO: 111659 - DNA, 246 bp, Glycine max
gcgtgaacatgcagatagtgagaaacctacaaggtgagaacgaagaggaggatagtggagccattgtgacagtgaaaggaggtctaagagtcacagctccagccatgaggaagccacagcaagaagaagatgatgatgatgaggaagagcagccacagtgcgtggagacagacaaaggttgccaacgccaaagcaaaaggagcagaaatggcattgatgagaccatttgcacaatgagacttcgcc

SEQ ID NO: 111660 - DNA, 256 bp, Glycine max
catttttgtactaagaagcatttgttacatttatgtaaccaaaggaaaatcaaaagtacgcaggaggtgaagctcggtggcgaaatcaacatgcaacgcagtgaaagcatgcgactaaaggagaagaaggtgaaggatttgatggttgacaagaagaggctagtggaggtgccgtacatggcgtccctggcccacacaatgactacactggtggcgaacaaggttgtggcggtgccggtggctgcgccccggggca

SEQ ID NO: 111661 - DNA, 249 bp, Glycine max
caatatcctagtataccttaataaataatttaagatactatgatgagagcacggttcccattactgttgctgggacttgttttcctggcttcagtttctgtctcatttggcattgcttactgggaaaaagagaaccccaaacacaacaagtgtctccagagttgcaatagcgagagagactcgtacaggaaccaagcatgccacgctcgttgcaacctccttaaggtggagaaagaagaatgtgaagaa

SEQ ID NO: 111662 - DNA, 247 bp, Glycine max
ttcgagcgaatcggctcgagagagcagagcgccttgaagagctatggctgtcggaaagaataagaggatttccaagggaaagaagggtggcaagaagaaagccgctgatccctttgccaagaaagactggtacgatatcaaggccccttccctcttccaggtcaagaatattggcaaaaccctcgtctctcgtacccagggaaccaagattgcatccgaagactcaaacatcgggtttttgaggtct

SEQ ID NO: 111663 - DNA, 247 bp, Glycine max
caggctcagatggaaacaaatttgtttaaattgtctcttgatgatgttgaaactcctaaaggttccatgttggatcttaaaatctctcaatctaaaattgcacttcccaaaaacacagttggaggaaccatcctgcgtagtgatctattggcaaattttttgacagagggcaattttagagcaagtgttgatttgcagcgcactcatcgtattaaaggaatgattacaatggtggccacagttggta

SEQ ID NO: 111664 - DNA, 248 bp, Glycine max
attccccttatctttctctcttctctctccccgcccaaaccctaactccctaccctattccgctttctctcatccatcatgaaaggaggaaagtccaagaccgaatctaagagagccgatgccaaacttgctgtgaataagaagggcgccgccaccaagactaggaaacccgccggaaaggggaaggcagcgaaagatcctaacaagccaaagaggcctccaagtgctttcttcgttttcatggagga

SEQ ID NO: 111665 - DNA, 242 bp, Glycine max
gaacactcatcaccatggccaagcttgttctttccctttgtttccttcttttcagtggctgcttcgctctgagagagcaggcacagcaaaatgagtgccagatccaaaagctgaatgccctcaaaccggataaccgtatagagtcggaaggtgggttcattgagacctggaaccctaacaacaagccattccagtgtgccggtgttgccctctctcgctgcacccttaaccgcaatgccctt

SEQ ID NO: 111666 - DNA, 239 bp, Glycine max
cttaattattaacacttccttagttcaatatggggaagcccttcactctctctctttcttccctttgcttgctactcttgtcgagtgcatgctttgctattagctccagcaagctcaacgagtgccaactcaacaacctcaacgcgttggaacccgaccaccgcgttgagtccgaagtggtttgattcaaacatggaactctcaacaccctgagctgaaatgcgccggtgtcactgttt

SEQ ID NO: 111667 - DNA, 241 bp, Glycine max
attcaaatgagaactttgaaggccgaagaggggaaaggttccatgtgaacggcacttgcacatgggttagtcgatcctaagggacgggggaagcccgtctgatagcgctctgtgcgcgtactccgaaagggaatcgggttaaaattcctgaaccgggacgtcgcgtgctcacagcaacgatagggtctccgaagacgtcggcgggccccccagaaagatttatcttctctgtataacagcc

SEQ ID NO: 111668 - DNA, 255 bp, Glycine max
agttcacaatcctcctcatctctcttctcttctgcatcgccacacttgcagcgcctccaaatggcagcaccagcaagatagctgccgcaagcagctccagggggtgaacctcacgccctgcgagaagcacatcatggagaagatccaaggccgcggcgatgacgatgatgatgatgacgacgacaatcacattctcaggaccatgcggggaagaatcaactacataaggaggaacgaaggaaaagacgaagacga

SEQ ID NO: 111669 - DNA, 120 bp, Glycine max
atgaaggagacgtactcgtgattcctccaggtgatccttactggacctataacactggcgatgaaccggttgtggccatcaggcttcatgacacctctaacttcaataaccagcttgatc

SEQ ID NO: 111670 - DNA, 245 bp, Glycine max
ctgaagatgacgaggacgaggacgaagaagaagatcaacctcgtcctgatcaccctccacagcgaccaagcaggcccgaacaacaagaaccacgtggaagaggatgtcagactagaaatggggttgaggaaaatatttgcaccatgaagcttcacgagaacattgctcgcccttcacgtgctgacttctacaacccaaaagctggtcgcattagcaccctcaacagtctcaccctcccagccctc

SEQ ID NO: 111671 - DNA, 242 bp, Glycine max
ctgcaaaggattctacccgccgctcgatgggaattgcgctgtcaaggcgtctcgtagggctaatccgcctcacgagggtcaccaacggcacgtgcctttggggggccgaggcccctactgctggtcggcaaacggacggcgggcgcacgcgtcgcttctagcccggattctgacttagaggcgttcagtcataatccaacgcacggtagcttcgcgccactggcttttcaacgaagcgcgat

SEQ ID NO: 111672 - DNA, 240 bp, Glycine max
attgctagaatggaatttcgatgctcagtcatctcttttaccattctcttctctcttgctcttgcaggagagagccatgtccatgcatcgctacctgaggaagattattgggaagctgtttggccaaacactcccattcccactgcactgcgagagcttctaaagcctctccctgcaggtgttgaaatcgatgaactccctaagcaaattgatgatacacagtacccaaaaacattcttc

SEQ ID NO: 111673 - DNA, 149 bp, Glycine max
gttcaatatactagtatacctcaatagataatttgagatactatgatgacagcacggctcccattactgttggtgggacttgttttcctggcttcagtttctgtctcatttggcattgcttaatgggcagatgagaaccccaaacacaa

SEQ ID NO: 111674 - DNA, 241 bp, Glycine max
aagacagtcaccagaagattcgtcacttcaatgaaggagacgtactagtgattcctcctggtgttccttactggacctataacactggcgatgaaccagttgttgccatcagtcttcttgacacctccaacttcaacaatcagcttgatcaaaaccccagagtattttaccttgctgggaacccagatatagagcacccagagaccatgcaacaacagcagcagcagaagagtcatggtgg

SEQ ID NO: 111675 - DNA, 241 bp, Glycine max; identical to SEQ ID NO: 111106

SEQ ID NO: 111676 - DNA, 253 bp, Glycine max
gcaaagcaatggctacttcaaagttgaaaacccagaatgtggttgtatctctctccctaaccttaaccttggtactggtgctactgaccagcaaggcaaactcagcggaaactgtttctttcagctggaacaagttcgtgccgaagcaaccaaacatgatcctccaaggagacgctattgtgacctcctcgggaaagttacaactcaataaggttgacgaaaacggcaccccaaaaccctcgtctcttggtcg

SEQ ID NO: 111677 - DNA, 250 bp, Glycine max
cttaataaataatttaagatactatgatgagagcacggttcccattactgttgctgggacttgttttcctggcttcagtttctgtctcatttggcattgcttactgggaaaaagagaaccccaaacacaacaagtgtctccagagttgcaatagcgagagagactcgtacaggaaccaagcatgccacgctcgttgcaacctccttaaggtggagaaagaagaatgtgaagaaggtgaaattccacgacc

SEQ ID NO: 111678 - DNA, 248 bp, Glycine max
cgcaagcaaaaagaaagaatcccaggcgaggagaaagatggaggggaaggagcaggatgtgtcgttgggagcgaacaagttccccgagagacagccgattgggacggcggcgcagagccaagacgacggcaaggactaccaggagccggcgccggcgccgctggttgacccgacggagtttacgtcatggtcgttttacagagcagggatagcagagtttgtggccacttttctgtttctctacatca

SEQ ID NO: 111679 - DNA, 246 bp, Glycine max
caactcaacaacctcaacgcgttggaacccgaccaccgcgttgagtccgaaggtggtttgattcaaacatggaactctcaacaccctgagctgaaatgcgccggtgtcactgtttccaaactcaccctcaaccgcaatggcctccacttgccatcttactcaccttatccccggatgatcatcatcgcccaagggaaaggagcacttggagttgcaattccaggatgtcctgagacgtttgaggag

SEQ ID NO: 111680 - DNA, 135 bp, Glycine max
tcctagtacaccgtattaaagaatttaagatatactatgatgagagcgcggttcccattactgttgctgggagttgttttcctggcatcagtttctgtctcaattgggaattcgcattggggaaagcagaacccc

SEQ ID NO: 111681 - DNA, 238 bp, Glycine max
cccatttcttctcttctttcttcttctctttcgcttcttcgatcttcgatcttcgtcgctgaaaatgagagagtgcatttcaatccacatcggccaggccgggattcaggttggaaacgcctgctgggagctttactgcctcgaacacggcattcagcctgatgggcagatgccaagtgacaagaccgttggtggaggtgatgatgctttcaacaccttcttcagtgaactggggcag

SEQ ID NO: 111682 - DNA, 239 bp, Glycine max
ctccattgtctttgaacactcatcaccatggccaagcttgttctttccctttgtttccttcttttcagtggctgcttcgctctgagagagcaggcacagcaaaatgagtgccagatccaaaagctgaatgccctcaaaccggataaccgtatagagtcggaaggtgggttcattgagacctggaaccctaacaacaagccattccagtgtgccggtgttgccctctctcgctgcaccct

SEQ ID NO: 111683 - DNA, 239 bp, Glycine max
gtcctctacaggaatggaatttactctccacattggaacttgaacgcgaacagtgtgatctatgtgactcgagggaaaggaagagttagagtggtgaactgccaagggaatgcagtgttcgacggtgagctaaggaggggacaattgctagtggtgccgcagaactttgtggtggctgagcaagggggagaacaaggattggaatacgtatgttcaagacacaccacaacgccgtgagc

SEQ ID NO: 111684 - DNA, 237 bp, Glycine max
aagcagatgaatatgtaattcctcatggtgattgggttgaaattgtctcctctccacattatctgtctgaaatcgttatatacgctagttttgtggtagctactggaggatccaacctaacaatctggctgctttttgtttttgtggtggcaaatctgtcatttgcagctgtggaaacacatggctggtatcgtcagaaatttgaagattatccaagtagtcgctttgctataattc

SEQ ID NO: 111685 - DNA, 241 bp, Glycine max
ttaattattaacacttccttagttcaatatggggaagcccttcactctctctctttcttccctttgcttgctactcttgtcgagtgcatgctttgctattagctccagcaagctcaacgagtgccaactcaacaacctcaacgcgttggaacccgaccaccgcgttgagtccgaaggtggtttgattcaaacatggaactctcaacaccctgagctgaaatgcgccggtgtcactgtttcc

SEQ ID NO: 111686 - DNA, 151 bp, Glycine max
attgtctttgaacactcatcaccatggccaagcttgttctgtccctttgtgtccttcttttccatgggatgcttcgctctgagagagcaggcacagcaaaatgagtgccagatccaaaagctgaatgccctcaaaccggataaccgtatag

SEQ ID NO: 111687 - DNA, 148 bp, Glycine max
cgcatcgctatccttgacgggactgccattcttaccttggtgcacaacgacgaccgagactcttacaaccttcaatcacgcgatgccctaagagtccctgcaggaaccacatactatgtggttaagcctggcaacgacgagaatctca

SEQ ID NO: 111688 - DNA, 244 bp, Glycine max
ggagaagcaaacattgaacttgttggcattaaagaacaacaacagaggcagcaacaggaagagcaacctttggaagtgcggaaatatagagctgaattgtctgaacaagatatatttgtaatcccagcaggttatccagttgtggtcaacgctacctcagatctgaatttctttgcttttggtatcaatgccgagaacaaccagaggaacttccttgcaggttcgaaagacaatgtgataagcc

SEQ ID NO: 111689 - DNA, 247 bp, Glycine max
cgaggaacactcatcaccatggccaagcttgttctttccctttgtttccttcttttcagtggctgcttcgctctgagagagcaggcacagcaaaatgagtgccagatccaaaagctgaatgccctcaaaccggataaccgtatagagtcggaaggtgggttcattgagacctggaaccctaacaacaagccattccagtgtgccggtgttgccctctctcgctgcacccttaaccgcaatgcccttc

SEQ ID NO: 111690 - DNA, 208 bp, Glycine max
aattcttccaccaagttatgggtttccttgtgttgcttcttttctccctcttaggtctctcttctagttccagcatatcaactcatcgttccatattggaccttgacctaaccaagtttaccacacagaaacaggtgtcttcactgttccaactatggaagagtgagcatggacgtgtctaccataaccacgaagaagaggcaaagag

SEQ ID NO: 111691 - DNA, 150 bp, Glycine max
gattaatgaaggagatgcaagcattgagcttgttggcctagaagaacaacaacaggagcagcaacaggacgagcaacctttggaagtgcgggcatatagagccgaattgtctgaacaagatatacttgtaatcccagcaggttatccagt

SEQ ID NO: 111692 - DNA, 238 bp, Glycine max
cacacttccttagttcaatatggggaagcccttcactctctctctttcttccctttgcttgctactcttgtcgagtgcatgcattgctattagctccagcaagctcaacgagtgccaactcaacaacctcaacgcgttggaacccgaccaccgcgttgagtccgacggcggtttcattcaaacatggaactctcaacaccctgagctgacatgcgccggtgtcactgtatccaaactc

SEQ ID NO: 111693 - DNA, 238 bp, Glycine max
ctcggttctgccttcacaaaaaaattatcgagatcccctttttctcctaagaaaagccatggctaagggtcccggtctctactctgacatcggcaagaaagccagggatctgctgttcaaggactaccacagtgaccagaagttcaccatcaccacctactcacccactggagttgctataacagcatcaggaaccaggaaaagtgaactgtttgtggctgatgtcaacacccagttg

SEQ ID NO: 111694 - DNA, 237 bp, Glycine max
cacagacacacgtcaaaatatccaatcatttcacatggaaagtgccactcaagtcggtgcggcggctcagcccagctcagcttcagcgtcggtgattccctccgccttcgacggcaccctgggccgtcaccttgctcgccgcctcgccgagaccggtgtcagggacgtcttctccgttcccggcgacttcaacttgacgctcctcgaccacctcatcgccgagccgagtctcaacct

SEQ ID NO: 111695 - DNA, 235 bp, Glycine max
cttaaacactcatcagtcatcaccatggccaagctagtttgttccctttgttttctgcttttcagtggctgctgcttcgctttcagttccagagagcagcctcagcaaaacgagtgccagatccaaaaactcaatgccctcaaaccggataaccgtatagagtcagaaggagggctcattgagacatggaaccctaacaacaagccattccagtgtgccggtgttgccctctctc

SEQ ID NO: 111696 - DNA, 147 bp, Glycine max
ctcgagcgcttaaacactcatcagtcatcaccatggccaagctagttttttccctttgttttctgcttttcagtggctgctgcttcgctttcagttccagagagcagcctcagcaaaacgagtgccagatccaaaaactcaatgccc

SEQ ID NO: 111697 - DNA, 256 bp, Glycine max
ctcgagccgctcgagccgcataaaattcttccaccaagttatgggtttccttgtgttgctacttttctcactcttaggtctctcttctagttccagcatatcaactcatcgttccatattggaccttgacctaaccaagtttaccacacagaaacaggtgtcttcactgttccaactatggaagagtgagcatggacgtgtctaccataaccacgaagaagaggcaaagagacttgagattttcaagaataacttg

SEQ ID NO: 111698 - DNA, 252 bp, Glycine max
ctcgagccgttcctctacaaaagcacaatttgttagtggaaaaaccttcaaatatgatataattggtgctggttcacattcttcagaaaattttcctgaaaaggaagatcaagaaaaacccaaaaagattgatgccagattgagacaaagaatagatcctcaatacaatgaggttcaggctcagatggaaacaaatttgtttaaattgtctcttgatgatgttgaaactcctaaaggttccatgttggatct

SEQ ID NO: 111699 - DNA, 251 bp, Glycine max
catttgcacaatgagacttcgccaaaacattggtcagaattcatcacctgacatctacaaccctcaagctggtagcatcacaaccgccaccagccttgacttcccagccctctggcttctcaaactcagtgcccagtatggatcactccgcaagaatgctatgttcgtgccacactacaccctgaacgcgaacagcataatatacgcattgaatgggcgggcattggtacaagtggtgaattgcaatggtg

SEQ ID NO: 111700 - DNA, 249 bp, Glycine max
ggaacagattcgggcactgagcaaacgtgccaaatctagttcaaggaaaaccatttcttctgaagataaaccttttaacttgagaagccgcgaccccatctactccaacaagcttggcaagttctttgagatcaccccagagaaaaacccccagcttcgggacttggatatcttcctcagtattgtggatatgaacgagggagctcttcttctaccacactccaattcaaaggcgatagtgatactggt

SEQ ID NO: 111701 - DNA, 247 bp, Glycine max
ctttataaacagatgtataaaaataacatatttcatttagcttctatatgctcactataactagttatttcggttttttactagtggttttaattataacctcatctctatacattggtctgagtaaaatacgacttatttgatttgtaattttgagaggaatagtcaattttggaataagacattcattagttccttactgtgtcaatttacaattctcggtcgttgagattcatgatcaatacag

SEQ ID NO: 111702 - DNA, 247 bp, Glycine max
attcactggggagtgtggtgaatgcacctattgcaagtctgaagagagcaacctgtgtgagcttctcaggatcaacactgacagaggagtgatgctcagtgatggcaaaacaaggttctccaaaaatggacaacctatttaccacttcgttggaacctccactttcagtgaatacactgttcccgatgaaggatgtgtcgccaagatcaaccctgctgcccctcttgacaaagttgctgttgtcagt

SEQ ID NO: 111703 - DNA, 247 bp, Glycine max
ctcgagccgaacaataattccttcacttgcagaacttagttctctgttgcatcatcatcatcttcattagtgttagccctaaacttcaccttcaaccatgaccacagtgccaccacacagtgtccaagtgcacacaacaacacaccgctacgaagccggcgtcgtcccgccggctcgttttgaggcgccgcgttacgaagccggcatcaaggcgccctcttccatttaccattccgagagaggtccg

SEQ ID NO: 111704 - DNA, 245 bp, Glycine max
cacacaactactacaagtacttccttacaatcaaaaccaacaacaactatggcaagttatcaaaagcactacgatgatcagggtcgcaaggttgacgagtatggcaacgttgagaagcaaaccgacgaatacggcaaccctgttcatgctgctagtgtcacctatgtagccaccagaactgctgctggtggttacagtgatgacattaataagcaacatgataccaccaatgcctacggcgtaga

SEQ ID NO: 111705 - DNA, 88 bp, Glycine max
cattccttcactggcagcactgttgcatcatcatcttcattgcaaaaccctagacttcaccgtcaaccatgaccacacaagtaccacc

SEQ ID NO: 111706 - DNA, 248 bp, Glycine max
ccccattcccacgcccacaacctcgtcaagaagaagagcacgagcagagagaggaacaggaatggcctcgcaaggaggaaaaacgcggagaaaagggaagtgaagaggaagatgaggatgaggatgaggaacaagatgaacgtcaattcccattcccacgcccacctcatcagaaggaagagcgaaagcaagaggaagatgaggatgaggagcagcagcgagagagcgaagaaagtgaagattctgag

SEQ ID NO: 111707 - DNA, 249 bp, Glycine max
ccattgtctttgaacactcatcaccatggccaagcttgttctttccctttgtttccttcttttcagtggctgcttcgctctgagagagcaggcacagcaaaatgagtgccagatccaaaagctgaatgccctcaaaccggataaccgtatagagtcggaaggtgggttcattgagacctggaaccctaacaacaagccattccagtgtgccggtgttgccctctctcgctgcacccttaaccgcaatgc

SEQ ID NO: 111708 - DNA, 254 bp, Glycine max
aagagcacgagcagagagaggaacaggaatggcctcgcaaggaggaaaaacgcggagaaaagggaagtgaagaggaagatgaggatgaggatgaggaacaagatgaacgtcaattcccattcccacgcccacctcatcagaaggaagagcgaaagcaagaggaagatgaggatgaggagcagcagcgagagagcgaagaaagtgaagattctgagttacgaagacataagaataagaacccttttctcttcggc

SEQ ID NO: 111709 - DNA, 251 bp, Glycine max
ctccattgtctttgaacactcatcaccatggccaagcttgttctttccctttgtttccttcttttcagtggctgcttcgctctgagagagcaggcacagcaaaatgagtgccagatccaaaagctgaatgccctcaaaccggataaccgtatagagtcggaaggtgggttcattgagacctggaaccctaacaacaagccattccagtgtgccggtgttgccctctctcgctgcacccttaaccgcaatgc

SEQ ID NO: 111710 - DNA, 250 bp, Glycine max
ccttattaacactttccttagttcaatatggggaagcccttcttcactctctctctttcttccctttgcttgctactcttgtcgagtgcatgctttgctattacctccagcaagttcaacgagtgccaactcaacaacctcaacgcgttggaacccgaccaccgcgttgagtccgaaggtggtcttattgaaacatggaactctcaacaccctgagctgcaatgcgccggtgtcactgtttccaaacgca

SEQ ID NO: 111711 - DNA, 249 bp, Glycine max
ctctccattgtctttgaacactcatcaccatggccaagcttgttctttccctttgtttccttcttttcagtggctgcttcgctctgagagagcaggcacagcaaaatgagtgccagatccaaaagctgaatgccctcaaaccggataaccgtatagagtcggaaggtgggttcattgagacctggaaccctaacaacaagccattccagtgtgccggtgttgccctctctcgctgcacccttaaccgca

SEQ ID NO: 111712 - DNA, 248 bp, Glycine max
aaaattcttccaccaagttatgggttaccttgtgttgcttcttttctccctcttaggtctctcttctagttccagcatatcaactcatcgttccatattggaccttgacctaaccaagtttaccacacagaaacaggtgtcttcactgttccaactatggaagagtgagcatggacgtgtctaccataaccacgaagaagaggcaaagagacttgagattttcaagaataacttgaactatatcaggg

SEQ ID NO: 111713 - DNA, 246 bp, Glycine max
ctctacaagaatggaatttactctccacattggaatctgaatgcaaacagtgtgatctatgtgactcgaggacaaggaaaggttagagttgtgaactgccaagggaatgcagtgttcgacggtgagcttaggaggggacaattgctggtggtaccacagaacttcgtggtggcggacaagccggagaacaaggattcgaatacatagtattcaagacacaccacaacgcagtcactagctacttga

SEQ ID NO: 111714 - DNA, 245 bp, Glycine max
ttgtctttgaacactcatcaccatggccaagcttgttctttccctttgtttccttcttttcagtggctgcttcgctctgagagagcaggcacagcaaaatgagtgccagatccaaaagctgaatgccctcaaaccggataaccgtatagagtcggaaggtgggttcattgagacctggaaccctaacaacaagccattccagtgtgccggtgttgccctctctcgctgcacccttaaccgcaatg

SEQ ID NO: 111715 - DNA, 245 bp, Glycine max
cccacgcccacaacctcgtcaagaagaagagcacgagcagagagaggaacaggaatggcctcgcaaggaggaaaaacgcggagaaaagggaagtgaagaggaagatgaggatgaggatgaggaacaagatgaacgtcaattcccattcccacgcccacctcatcagaaggaagagcgaaagcaagaggaagatgaggatgaggagcagcagcgagagagcgaagaaagtgaagattctgagttac

SEQ ID NO: 111716 - DNA, 247 bp, Glycine max
ctcgagccgattcggctcgagttcttctaccacacttcaattcaacacgcgatagtgatacacgtaattaatgaaggagataccaacattgaacttgttggcctaaaagaacaacaacaggagcagcaacaggaagagcaacctttggaagtgcggaaatatagagccgaattgtctgaacaagatatatttgtaatcccagcaggttatccagttgtggtcaacgctacctcaaatctgaatttct

SEQ ID NO: 111717 - DNA, 245 bp, Glycine max
cacggagactttgccgaactatacatgttcaaatggaccacccttcttattcctccaacaacccttctcataataaacttggtgggggtggttgctggcatctcctatgccatcaacagtggctaccaatcttggggacccctctttggtaagcttttctttgcattttgggtgatcatccatctataccctttcctcaaaggtctcatggggcgccaaaacagaacaccaaccattgtggtggt

SEQ ID NO: 111718 - DNA, 247 bp, Glycine max
ctcgagccgtttgaacactcatcaccatggccaagcttgttctttccctttgtttccttcttttcagtggctgcttcgctctgagagagcaggcacagcaaaatgagtgccagatccaaaagctgaatgccctcaaaccggataaccgtatagagtcggaaggtgggttcattgagacctggaaccctaacaacaagccattccagtgtgccggtgttgccctctctcgctgcacccttaaccgcaa

SEQ ID NO: 111719 - DNA, 252 bp, Glycine max
ctccattgtctttgaacactcatcaccatggccaagcttgttctttccctttgtttccttcttttcagtggctgcttcgctctgagagagcaggcacagcaaaatgagtgccagatccaaaagctgaatgccctcaaaccggataaccgtatagagtcggaaggtgggttcattgagacctggaaccctaacaacaagccattccagtgtgccggtgttgccctctctcgctgcacccttaaccgcaatgcc

SEQ ID NO: 111720 - DNA, 253 bp, Glycine max
cggaaagaataaagaaagcgcaaaaattggagctgcttttgactgctggcattggttctgatcacgttgatctcaaagctgcagctgctgctggtttaactgtggcagaggtcacgggaagcaatgtcgtgtcggttgcggaggatgaactcatgagaatcctcattctaatgaggaatttcttgcctgggtaccatcaggctgttaagggtgaatggaatgttgctggcattgcacatagagcttatgatct

SEQ ID NO: 111721 - DNA, 251 bp, Glycine max; identical to SEQ ID NO: 104060

SEQ ID NO: 111722 - DNA, 251 bp, Glycine max
tccacacattctccgtcgccacgacaacaatggctccaaagaaaggtgcgaaaggtggagttgtagcagcaaagaagaaggttcaggagaaggtaacgaaccctttgttcgagaagcgtccgaagcagttcgggatcggaggcgcgctgccgccgaagcgggacctgacgcgcttcgtgaagtggccgaagaacgtccaaatccaacgcaagaagcgcatcctcaagcagaggctcaaggtccctccggct

SEQ ID NO: 111723 - DNA, 248 bp, Glycine max
ctagttcaatatcctagtataccttaataaataatttaagatactatgatgagagcacggttcccattactgttgctgggacttgttttcctggcttcagtttctgtctcatttggcattgcttactgggaaaaagagaaccccaaacacaacaagtgtctccagagttgcaatagcgagagagactcgtacaggaaccaagcatgccacgctcgttgcaacctccttaaggtggagaaagaagaatg

SEQ ID NO: 111724 - DNA, 248 bp, Glycine max
cttcatttccctccccccactcccaccgccaacgccaaacaaaccctaaatctctctcgtcttcttcttcttcttcctccttcaaccatgagcgagatcctgcacgttcagggaggccaatgcggtaaccaaatcggttccaagttctgggaggtgatatgcgacgagcacggcatcgatcctaccggaaagtacaacgacgaaggcaacagtggcatccaactcgagaggatcaatgtctattacaa

SEQ ID NO: 111725 - DNA, 246 bp, Glycine max
gatattcccgggttgtcctagcacttatcaagagccgcaagaatctcagcaacgaggacgaagccagaggccccaagaccgtcaccaaaaggtacatcgcttcagagagggtgatttgatcgcagtgcctactggtgttgcatggtggatgtacaacaatgaagacactcctgttgttgccgtttctattattgacaccaacagcttggagaaccagctcgaccagatgcctaggagattctatct

SEQ ID NO: 111726 - DNA, 245 bp, Glycine max
caactaacaataattccttcacttgcagaacttagttctctgttgcatcatcatcatcttcattagtgttagccctaaacttcaccttcaaccatgaccacagtgccaccacacagtgtccaagtgcacacaacaacacaccgctacgaagccggcgtcgtcccgccggctcgttttgaggcgccgcgttacgaagccggcatcaaggcgccctcttccatttaccattccgagagaggtccgac

SEQ ID NO: 111727 - DNA, 244 bp, Glycine max
ggagcagaagaaggcaaagatagtggcagagctccaagctgtgaagcacaacagtggcaagtcctacaatcagttagcggaggagactggactcaccaacgtctatgttgctcagcttctcaggagacaggctcagctcaatccccaaactgcccctctacttcgggcagcgctgcccgacctgccccaagaccttgtttctgagatgatgagaccccctttgaggtcttatgaccctaatctc

SEQ ID NO: 111728 - DNA, 245 bp, Glycine max
ttaaagcggtgcctgatccgtttcgtggactaggaaatgaggcaatcctggatattgctgactctggaagagactattacaccttctggttctttacaacctttcagtgtaagctgtcaggcaatcagcactgtgatctgaatttccgaggaatcaattactgtgctgatgtctatttaaatgggcaccagatggtcctcccaaaaggaatgtttcggagacattctcttgatgtcaccaatatt

SEQ ID NO: 111729 - DNA, 243 bp, Glycine max
gtggaatcatcaaagcggatataggcattaaagatggtctcattgtttcaattggaaaagcaggaaatccagacatcatggatgatgtattttttaatatgatcattggggctaatattgaagttattgctggagaagggttgattgtaacagcaggggctatagattgtcacgtgcattatatatgccctcaattagtagatgaggccatatcaagcggcatcacaacattagtgggaggtg

SEQ ID NO: 111730 - DNA, 242 bp, Glycine max
ccttagttcaatatggggaagcccttcttcactctctctctttcttccctttgcttgctactcttgtcgagtgcatgctttgctattacctccagcaagttcaacgagtgccaactcaacaacctcaacgcgttggaacccgaccaccgcgttgagtccgaaggtggtcttattgaaacatggaactctcaacaccctgagctgcaatgcgccggtgtcactgtttccaaacgcaccctcaa

SEQ ID NO: 111731 - DNA, 246 bp, Glycine max
cttggtgattcagggcttatacccttagagataaggtttttgcatgatcctgctaaagatacaggttttgtcggcagtgcattgacaagtaacatgatacgattttttaagacccaagatgaatcatggagccatgaggttgccatatcagtgaaaccattgaaagtgcaaaactggattcttcctgaaatgcctgggcttataactgattttctgatttctcttgatgatcggtttctgtatttt

SEQ ID NO: 111732 - DNA, 248 bp, Glycine max
ggggaagcccttcactctctctctttcttccctttgcttgctactcttgtcgagtgcatgctttgctattagctccagcaagctcaacgagtgccaactcaacaacctcaacgcgttggaacccgaccaccgcgttgagtccgaaggtggtttgattcaaacatggaactctcaacaccctgagctgaaatgcgccggtgtcactgtttccaaactcaccctcaaccgcaatggcctccacttgccat

SEQ ID NO: 111733 - DNA, 247 bp, Glycine max
ctcgagccgcaacaagaagaagaaaacgaaggaagcaacatattgagtggcttcgcccctgaattcttgaaagaagcgttcggcgtgaacatgcagatagtgagaaacctacaaggtgagaacgaagaggaggatagtggagccattgtgacagtgaaaggaggtctaagagtcacagctccagccatgaggaagccacagcaagaagaagatgatgatgatgaggaagagcagccacagtgcgtgg

SEQ ID NO: 111734 - DNA, 246 bp, Glycine max
gttatccttaacgggactgccattcttaccttggtgaacaacgacgaccgagactcttacaaccttcaatctggcgatgccctaagagtccctgcaggaaccacatactatgtggttaaccctgacaacgacgagaatctcagaatgataacactcgccatacccgttaacaaacccggtagatttgagagtttcttcctatctagcactcaagctcaacagtcctacttgcaagggttcagcaag

SEQ ID NO: 111735 - DNA, 129 bp, Glycine max
gtctactttaattacagtactgtacctaccttccaataaaaaagatgcaaggctagagatccaataaatcttgcatcctatctaatgtttcaattatcttgtgttttaatgctgtaatggagcctacaa

SEQ ID NO: 111736 - DNA, 246 bp, Glycine max
aacagcttggagaaccagctctaccagatgcctaggagattctatcttgctgggaaccaagagcaagagttgctgaaatatcaacagcagcagcaaggaggttcccaaagccagaaaggatagcaacaaggagacgataacgatggaagcaacatattgagtggcttcgcaccggagttcttgaaagaagcgtgcggcgtgaacatgcagatagtgagacacctacaaggtgacgacggagaggag

SEQ ID NO: 111737 - DNA, 244 bp, Glycine max
ttctctgtctgcttcttcactttctctcgtttcaatcgaaaccaaaacaaaaacatgggcagaaaattcttcgtcggtggcaactggaaatgcaatgggaccactgaggaggtaaagaagattgttactactttgaatgaggctaaagtccctggagaagatgtcgtagaagttgttgtgagccctccttttgtgttccttcctgttgtaaaaagtttgctgcgccctgatttccatgtttcgg

SEQ ID NO: 111738 - DNA, 245 bp, Glycine max
caacaatcctacttgcaaggattcagcaggaacattttagaggcctcctacgataccaaattcgaggagataaacaaggttctgtttagtagagaggaagggcagcagcaaggggagcagaggctgcaagagagcgtgattgtggaaatctcgaaggaacagattcgggcactgagcaaacgtgccaaatctagttcaaggaaaaccatttcttctgaagataaaccttttaacttgagaagccg

SEQ ID NO: 111739 - DNA, 246 bp, Glycine max
cttggagaaccagctcgaccagatgcctaggagattctatcttgctgggaaccaagagcaagagtttctaaaatatcagcaagagcaaggaggtcatcaaagccagaaaggaaagcatcagcaagaagaagaaaacgaaggaggcagcatattgagtggcttcaccctggaattcttggaacatgcattcagcgtggacaagcagatagcgaaaaacctacaaggagagaacgaaggggaagacaa

SEQ ID NO: 111740 - DNA, 247 bp, Glycine max
caagttatgggtttccttgtgttgcttcttttctcactcttaggtctctcttctagttccagcatatcaactcatcgttccatattggaccttgacctaaccaagtttaccacacagaaacaggtgtcttcactgttccaactatggaagagtgagcatggacgtgtctaccataaccacgaagaagaggcaaagagacttgagattttcaagaataacttgaactatatcagggacatgaatgcaa

SEQ ID NO: 111741 - DNA, 268 bp, Glycine max
tcggtattcggctcgcggcaaaagcagaagacatggcattgacgagaccatatgcaccatgagacttcgccacaacattggccagacttcatcacctgacatctacaaccctcaagccggtagcgtcacaaccgccaccagccttgacttcccagccctctcgtggctcagactcagtgctgagtttggatctctccgcaagaatgcaatgttcgtgccacactacaacctgaacgcgaacagcataatatacgcattgaatggacgg

SEQ ID NO: 111742 - DNA, 252 bp, Glycine max
gccgtttctattattgacaccaacagcttggagaaccagctcgaccagatgcctaggagattctatcttgctgggaaccaagagcaagagtttctaaaatatcagcagcagcagcaaggaggttcccaaagccagaaaggaaagcaacaagaagaagaaaacgaaggaagcaacatattgagtggcttcgcccctgaattcttgaaagaagcgttcggcgtgaacatgcagatagtgagaaacctacaaggt

SEQ ID NO: 111743 - DNA, 249 bp, Glycine max
ggaaggatgtcttacgttgctcataacgttaaccagccccaagagaaagatttgttggagggaaatttttcctttgatattaaatctcgctctagattggaaaaagtttcctctacaaaagcacaatttgttagtggaaaaaccttcaaatatgatataattggtgctggttcacattcttcagaaaattttcctgaaaaggaagatcaagaaaaacccaaaaagattgatgccagattgagacaaaga

SEQ ID NO: 111744 - DNA, 249 bp, Glycine max
ctcttgacacctctaacttcaataaccagcttgatcaaacccctagggtattttaccttgctgggaacccagatatagagtacccagagaccatgcaacaacaacaacagcagaaaagtcatggtggacgcaagcaggggcaacaccagcaggaggaagaggaagaaggtggcagcgtgctcagtggcttcagcaaacacttcttggcacaatccttcaacaccaacgaggacccggctgagaaacttc

SEQ ID NO: 111745 - DNA, 245 bp, Glycine max
tgaatgtctctgccgaagataaaaccactggccagaaaaataagatcactatcaccaatgacaagggtagattgtcaaaggaagatattgagaagatggttcaagaggctgagaagtacaagtctgaggatgaagagcacaagaagaaggttgaggccaaaaacgctttggaaaactatgcatacaacatgaggaacaccgtgaaggatgacaagattggtgagaaacttgacccggctgacaag

SEQ ID NO: 111746 - DNA, 244 bp, Glycine max
agtgatttcagtgagtgatcggtgttcacttgatctcatcataatcgtcagcgtcaattgaagaagatgccgatcagaaacatcgccgtcggaaggcctgaagaggcgactcaccccgacacgttgaaggcggctttggctgagttcatctcaaccttcatcttcgtgttcgccggctcaggctccggcatcgcctacaacaagctcaccgacaacggcgctgccacccctgccggcctcatct

SEQ ID NO: 111747 - DNA, 244 bp, Glycine max
ataagaacccttttctcttcggctctaacaggttcgaaactctcttcaaaaaccaatatggtcgcattcgcgtcctccagaggttcaaccaacgctccccacaacttcagaatctccgagactaccgcattttggagttcaactccaaacccaacaccctccttctccccaaccatgctgacgctgattacctcatcgttatccttaacgggactgccattctttccttggtgaacaacgacga

SEQ ID NO: 111748 - DNA, 252 bp, Glycine max
tcggctcgatggtagtgtcatcatccgcagctgctgttattctcaccgcaaacaaacagtgagtcatggccgtctgaaagaacaagcgcatgctccaaagggaaaaagggtggcaagaagaaggcagctgatccctttgccaagaaggattggtatgacattaaggccccttctctttgtcaagtgaaaaatgttggcgaaaccctcgtctctcgtacgcagggtaccaagattgcttctgaaggacttaaa

SEQ ID NO: 111749 - DNA, 241 bp, Glycine max
actcgagccgattcggctcgagttcttctaccacacttcaattcaatccgcgatagtggatacacggtaattaatgaatgagataccaacattgaacttgttggcctaaaagaacagcaacaggagcagcaacaggaagagcaacctttggaagtgcggaaatatagagccgaattgtctgaacaagatatatttgtaatcccagcaggttatccagttgtggtcaacgctacctcaaatc

SEQ ID NO: 111750 - DNA, 243 bp, Glycine max
cttaattattaacacttccttagttcaatatggggaagcccttcactctctctctttcttccctttgcttgctactcttgtcgagtgcatgctttgctattagctccagcaagctcaacgagtgccaactcaacaacctcaacgcgttggaacccgaccaccgcgttgagtccgaaggtggtttgattcaaacatggaactctcaacaccctgagctgaaatgcgccggtgtcactgtttcca

SEQ ID NO: 111751 - DNA, 241 bp, Glycine max
gtctttgaacactcatcaccatggccaagcttgttctttccctttgtttccttcttttcagtggctgcttcgctctgagagagcaggcacagcaaaatgagtgccagatccaaaagctgaatgccctcaaaccggataaccgtatagagtcggaaggtgggttcattgagacctggaaccctaacaacaagccattccagtgtgccggtgttgccctctctcgctgcacccttaaccgcaa

SEQ ID NO: 111752 - DNA, 242 bp, Glycine max
gtctttgaacactcatcaccatggccaagcttgttctttccctttgtttccttcttttcagtggctgcttcgctctgagagagcaggcacagcaaaatgagtgccagatccaaaagctgaatgccctcaaaccggataaccgtatagagtcggaaggtgggttcattgagacctggaaccctaacaacaagccattccagtgtgccggtgttgccctctctcgctgcacccttaaccgcaat

SEQ ID NO: 111753 - DNA, 243 bp, Glycine max
aacaactcctgcaagatttctttaatgggaaggagctctgcaagagcatcaatcctgatgaggctgtggcatatggtgctgcagttcaagctgctatcttgagtggtgagggtaatgagaaggttcaggatcttctccttcttgatgtcacccctctctctcttgggttggaaactgctggtggggtgatgacagtcttgatccccaggaacactactatcccaacaaagaaagaacaggttt

SEQ ID NO: 111754 - DNA, 243 bp, Glycine max
ctcatcaccatggccaagcttgttctctccctttgtttccgtcgtttcagtggctgcttcgctctgagagagcaggcacagcaaaatgagtgccagatccaaaagctgaatgccctcaaaccggataaccgtatagagtcggaaggtgggttcattgagacctggaaccctaacaacaagccattccagtgtgccggtgttgccctctctcgctgcacccttaaccgcaatgcccttcgtaga

SEQ ID NO: 111755 - DNA, 247 bp, Glycine max
gtcaaatagtcgaaactcatcgttcataagacgaggggatactcggcggaataggagtcctgtgcattcagggttatggatatctattgagctggtcctactcctgagccagattgttgcatctataattgttttgtctttgtcaaggcatgaacatccgcgtaccccgttgtttcaatggatcattggttatgcttctggatgtgctgctaccctccctctactttattggcggtattatcatcat

SEQ ID NO: 111756 - DNA, 247 bp, Glycine max
tatatatactatgatgagagtgcggtttcctttgttggtgttgctgggaactgttttcctggcatcagtttgtgtctcattaaaggtgagagaggatgagaataaccctttctacttgagaagctctaacagcttccaaactctctttgagaaccaaaacggtcgcattcgtctcctccagagattcaacaaacgctccccacaacttgagaaccttcgagactaccggattgtccagtttcagtca

SEQ ID NO: 111757 - DNA, 245 bp, Glycine max
gatcatacatagtagtgttggtgggttgcaaagatgcttgggggtcttctccataggggtcataagataaaagggacagtggtgttgatgcgcaagaatgtgttggacgtgaatagcgtaaccagcgttgggggaattattggtcaaggtctcgacttagttggctcaacactcgatactcttactgccttcttgggccgatccgtgtctctccagcttattagtgctaccaaagctgatgccaa

SEQ ID NO: 111758 - DNA, 245 bp, Glycine max
ctcaagtccaacctacccctttttcttctcccaccaacttcaccgtctctcttcctcgatcatgtctcacttcaagggcaagtaccatgatgagcttattgtcaatgctgcttacattggcactcctggaaagggtattcttgctgctgatgagtcaacagggacaattggcaagcgtttggccagcatcagtgtagagaatgttgaatccaacaggcgtgctcttagggagctgcttttcaccg

SEQ ID NO: 111759 - DNA, 245 bp, Glycine max
caaactttctttagctatctttttcttttttcttttagccttattttcaaacctagcctttggcaaatgtaaagaaaccgaggtagaagaagaagaccctgagctcgtaacatgcaaacaccaatgccaacagccacagcaatacactgagggtgacaagcgggtatgcttgcaaagatgtgacaggtatcatcgtatgaagcaagagcgagagaaacaaatccaagaggaaactcgtgagaaga

SEQ ID NO: 111760 - DNA, 243 bp, Glycine max
  unsure (1)..(243): unsure at all n locations
acttctctcttctctctgcatcgcttcaggttcttctgaaaagatgtctcgcgtgtatgttggtaacttggattcacgagtcaccgagagagatctcgaagacgaattccgtgttttcggagttattcggagtgtttgggttgcacgtagaccacctggnnatgcttttattgactttgatgatcgcagagatgcacaggatgctatccgtgaattggatggcaagaatggttggagggttga

SEQ ID NO: 111761 - DNA, 243 bp, Glycine max
gcaagctcaacgagtgccaactcaacaacctcaacgcgttggaacccgaccaccgcgttgagtccgaaggtggtttgattcaaacatggaactctcaacaccctgagctgaaatgcgccggtgtcactgtttccaaactcaccctcaaccgcaatggcctccacttgccatcttactcaccttatccccggatgatcatcatcgcccaagggaaaggagcacttggagttgcaattccaggat

SEQ ID NO: 111762 - DNA, 82 bp, Glycine max
cttcgccacaacattggccagacttcatcacctgacatctacaacgctcaagccggtagcgtcacaaccgccaccagccttg

SEQ ID NO: 111763 - DNA, 241 bp, Glycine max
gaccgagctagctagctagcaagcaagcacagagatggaggcaaagcgaggccatgccctcatgtgcttggcacgtgtttcactcttcctctgcgctctaaccctatccgctgctcacggaagcaccacggttcaagacatcgcgagaaagttgaaactcggggacaacgagcttctgcgcacggagaagaagttcaaggttttcatggagaattacgggaggagctactccacagaggag

SEQ ID NO: 111764 - DNA, 243 bp, Glycine max
tccattgtctttgaacactcatcaccatggccaagcttgttctttccctttgtttccttcttttcagtggctgcttcgctctgagagagcaggcacagcaaaatgagtgccagataaaaaagctgaatgccctcaaaccggataaccgtatagagtcggaaggtgggttcattgagacctggaaccctaacaacaagccattccagtgtgccggtgttgccctctctcgctgcacccttaacc

SEQ ID NO: 111765 - DNA, 243 bp, Glycine max
gagaaaggcaaggagatgagcaaggcagagactgaggcaggggatgaaggtcctattgtgactgaagctgacatacagcatattgtctcatcctggactggtattcctgttgagaaagtctcaacagatgaatctgatcgcctcctgaagatggaagagactttacataagcgagtcattggtcaggatgaagcagttaaagccattagtcgggctatccgtcgagctcgggttggactaaaa

SEQ ID NO: 111766 - DNA, 244 bp, Glycine max
ctcttcttctcttgcggccagggttttagcgcagcttcttctagatttaaggaagatgggtaaggaaaaggttcacatcagtattgtggtcattggccatgtcgactctgggaaatccactaccactggtcacctgatttacaagcttggaggcattgacaagcgtgttattgagaggtttgagaaggaagctgctgagatgaacaagaggtctttcaagtatgcctgggtgctggacaaactt

SEQ ID NO: 111767 - DNA, 247 bp, Glycine max
aaaattcttccaccaagttatgggtttgcttgtgttgcttcttttctccctcttaggtctctcttctagttccagcatatcaactcatcgttccatattggaccttgacctaaccaagtttaccacacagaacaggtgtcttcactgttccaactatggaagagtgagcatggacgtgtctaccataaccacgaagaagaggcaaagagacttgagattttcaagaataacttgaactatatcaggg

SEQ ID NO: 111768 - DNA, 247 bp, Glycine max
  unsure (1)..(247): unsure at all n locations
gtggtgaacaaacttagaggatcactgaagattgcagcactgaaggcccctgggtttggagagcgcaagagccagtaccttgatgatattgccatcttgactggaggtactgtaatcagagaagaggttgccttactttggacaaagctggatcagaggttctcggatatggctccacgactaatgcncaccaaggatacaaccacaattgttggtgatggaagtacccaggaagcagtgaacaaga

SEQ ID NO: 111769 - DNA, 247 bp, Glycine max
cttactggacctataacactggcgatgaaccagttgttgccatcagtcttcttgacacctccaacttcaacaatcagcttgatcaaaaccccagagtattttaccttgctgggaacccagatatagagccccagagaccatgcaacaacagcagcagcagaagagtcatggtggacgcaagcaggggcaacaccagcagcaggaggaagaaggtggcagtgtgctcagtggcttcagcaaacatttc

SEQ ID NO: 111770 - DNA, 249 bp, Glycine max
atacggccttgatgataacactatagacttcattggtcatgctttggcgcttcatagcgatgatcgctacttggctgagccagcactggacaccgtgaagagaatgaagttatatgcagagtctcttgcacctttcaaggagggtcaccttacatatatcctttgtatggtttaggagagcttccccaggcatttgcacggcttagtgctgtttatggtggaacatatatgttgaataagcctgagtgc

SEQ ID NO: 111771 - DNA, 250 bp, Glycine max
agaatgtggttgtatctctctccctaaccttaaccttggtactggtgctactgaccagcaaggcaaactcagcggaaactgtttctttcagctggaacaagttcgtgccgaagcaaccatacatgatcctcaaggagacgctattgtgacctcctcgggaaagttacaactcaataaggttgacgaaaacggcaccccaaaaccctcgtctcttggtcgcgccctctactccacccccatccacatttgg

SEQ ID NO: 111772 - DNA, 251 bp, Glycine max
ctaagaaagtcttccatagccccccaaaaatgaagagcaccatcttctttgctctctttctcttttgtgccttcaccacctcatacctaccttcagccatcgctgatttcgtgctcgataatgaaggtaacctcttgaaaatggtggcacatattatatcttgtcagacataacagcatttggtggaataagagcagccccaacgggaaatgaaagatgccctctcactgtggtgcaatctcgcaatgagc

SEQ ID NO: 111773 - DNA, 248 bp, Glycine max
tggctcgaggccgtttctattattgacaccaacagcttggagaaccagctcgaccagatgcctaggagattctatcttgctgggaaccaagagcaagagtttctaaaatatcagcagcagcagcaaggaggttccaaagccagaaaggaaagcaacaagaagaagaaaacgaaggaagcaacatattgagtggcttcgcccctgaattcttgaaagaagcgttcggcgtgaacatgcagatagtgaga

SEQ ID NO: 111774 - DNA, 246 bp, Glycine max
ctagtataccttaataaataatttaagatactatgatgagagcacggttcccattactgttgctgggacttgttttcctggcttcagtttctgtctcatttggcattgcttactgggaaaaagagaacccaaacacaacaagtgtctccagagttgcaatagcgagagagactcgtacaggaaccaagcatgccacgctcgttgcaacctccttaaggtggagaaagaagaatgtgaagaaggtga

SEQ ID NO: 111775 - DNA, 235 bp, Glycine max
ggctcgagcaatatcctagtataccttaataccataatttaagatactctgatgagagcacggttcccacttactgttgctgggacttgttttcctggcttcagtttctgtctcatttgcattgcttactgggaaaaagagaaccccaaacacaacaagtgtctccagagttgcaatagcgagagagactcgtacaggaaccaagcatgccacgctcgttgcaacctccttaagg

SEQ ID NO: 111776 - DNA, 246 bp, Glycine max
gcctcctacgataccaaattcgaggagataaacaaggttctgtttagtagagaggaagggcagcagcaaggggagcagaggctgcaagagagcgtgattgtggaaatctcgaaggaacagattcgggcactgagcaaacgtgccaaatctagttcaaggaaaaccatttcttctgaagataaaccttttaacttgagaagccgcgaccccatctactccaacaagcttggcaagttctttgagatc

SEQ ID NO: 111777 - DNA, 247 bp, Glycine max
attctagaggcctcatacgacaccaaattcgaggagataaacaaggttctgtttggtagagaggaggggcagcaacaaggggaggagaggctgcaagagagtgtgattgtggaaatctcaaagaaacaaatcgggaactgagcaaacatgccaaatctagttcaaggaaaaccatttcttctgaagataaacctttcaacttgagaagccgcgaccccatctattccaacaagcttggcaagttgtt

SEQ ID NO: 111778 - DNA, 247 bp, Glycine max
ccttgctctatactacacagtacacacactagaagaataatggcttccatcctccactactttttagccctctctctttcttgctcttttcttttcttcttatccgactcagtcacccctacaaaaccaaaaaccttgttgttctacccgttcaaaatgatggttccacagggctccattggtccaacctccaaaaaagaacccctctaatgcaagtaccagtcctggtggacctcaatggaaatca

SEQ ID NO: 111779 - DNA, 250 bp, Glycine max
tctcgagccgaatcggctcgagattcacccaacaacgttgcttattcacgcaactaaataaatcctgaagagtactatcttatttgctctctttctagtttgtgccttcaccatctcatacctgccttcagcaccgctcagttcgtgctcgacactgatgatgatcctcttcaaaacggtggcacatactatatgttgccagttatgagaggaaagggcggtggaatagaagtagattcaactggaaaag

SEQ ID NO: 111780 - DNA, 250 bp, Glycine max
caatatcctagtataccttaataaataatttaagatactatgatgagagcacggttcccattactgttgctgggacttgttttcctggcttcagtttctgtctcatttggcattgcttactgggaaaaagaaaccccaaacacaacaagtgtctccagtgttgcaatagcgagagagactcgtacaggaaccaagcatgccacgctcgttgcaacctccttaaggtggagatagaagaatgtgaagaagg

SEQ ID NO: 111781 - DNA, 250 bp, Glycine max
caaaacacttgcaaactagttttgtttttggaacatatcgcattacattacattagattggtggcaaagcaatggcatcgtcactacaagcagcagctactttcatgcaacccaccaagtttttgcagctaagtctactcaggccatatctaaggcttttggtttggaacctgctggagttaataaggtcacatgctcccttcaggctgatcttaaggacttggctcacaagtgtgttgatgctaccaaa

SEQ ID NO: 111782 - DNA, 249 bp, Glycine max
actcatcaccatggccaagcttgttctttccctttgtttccttcttttcagtggctgcttcgctctgagagagcaggcacagcaaaatgagtgccagatccaaaagctgaatgccctcaaaccggataaccgatagagtcggaaggtgggttcattgagacctggaaccctaacaacaagagtttccagtgtgccggtgttgccctctctcgctgcacccttaaccgcaatgcccttcgtagaccttcc

SEQ ID NO: 111783 - DNA, 251 bp, Glycine max
aatgtgataagccagatacctagtcaagtgcaggagcttgcattccctgggtctgcacaagctgttgagaagctattaaagaaccaaagagaatcctactttgtggatgctcagcctaagaagaaagaggagggaataagggaagaaagggtcctttgtcttcaattttgagggctttttactgaataagtatgtactaaaatgtatgctgtaatagctcatagtgagcgaggaaagtatcgggctatgta

SEQ ID NO: 111784 - DNA, 252 bp, Glycine max
caatatcctagtataccttaataaataatttaagatactatgatgagagcacggttcccattactgttgctgggacttgttttcctggcttcagtttctgtctcatttggcattgcttactgggaaaaagagaccccaaacacaacaagtgtctccagagttgcaatagcgagagagactcgtacaggaaccaagcatgccacgctcgttgcaacctccttaaggtggagaaagaagaatgtgaagatggtg

SEQ ID NO: 111785 - DNA, 249 bp, Glycine max
ccagaagcgctacgccgttgtctccgccatcgctgcctccgccatcccctccctcgtcctcgcccgcggccaccgcatcgagtccgtcccggagctcccactcgtcgttagcgactccgccgagagcgtcggaaaacaaaagaagcaatcaaagtcctcaagcagatcggagcattccctgacgcagagatagcaaaagacagtcgcagcattcgtcctggaaaggggaaaatgcgtaaccgtcgctac

SEQ ID NO: 111786 - DNA, 245 bp, Glycine max
cgttcacgctaccccttgctgctctactactacctttcaagttttaaaagtataaagatggcagagacattcctatttacctcagagtcggtgaacgagggacaccctgacaagctctgcgaccaaatcccgatgctgtcctcgacgcttgcctcgagcaggacccagacagcaaagttgcctgcgaaacatgcaccaaaaccaacttggtcatggtcttcggagacctcacgaccaaggccaac

SEQ ID NO: 111787 - DNA, 246 bp, Glycine max
ctttgcttttggtatcaatgccgagaacaaccagaggaacttccttgcaggttcgaaagacaatgtgataagccagatacctagtcaagtgcaggagcttgcgttccctgggtctgcaaaagatattgaaacctaataaagagccaaagtgagtcctactttgtggatgctcagcctcagcagaaagaggaggggaacaagggaagaaagggtcctttgtcttcaattttgagggctttttactga

SEQ ID NO: 111788 - DNA, 246 bp, Glycine max
ctccattgtctttgaagactcatcagcatggcctagcttgttctttccctttgtttccttcttttcagtggctgcttcgctctgagagagcaggcacagcataatgagtgccagaacactgtaagctgaagccctcaaaccggataaccgtatagagtcggaaggtgggttcattgagacctggaaccctaacaacaagccattccagtgtgccggtgttgccctctctcgctgcattcttaaccg

SEQ ID NO: 111789 - DNA, 250 bp, Glycine max
gagcggctcgagcaacaatggcttcagagaagaaactttcgaacccaatgagggagataaaagtgcagaagctcgtcctcaatatctctgttggcgagagtggagatcgtctcaccagagcctccaaggtgttggaacaacttagtggccaaaccccagtgttttccaaagcaaggtacactgttcgttcctttgggattagaagaaatgagaagattgcatgctatgtcactgtcagaggtgacaaggc

SEQ ID NO: 111790 - DNA, 245 bp, Glycine max
gagaaagagagaattcgtaaaccctaatttcggaaagatcggcgatgactgcctccaaggatcgcgagaacttcgtctacatcgccaaactcgccgagcaggccgagcgttacgaagagatggtggaataatgaagaacgttgcgaatctcgacgttgaactgacggtggaggagcggaatctgctttctgttgggtacaagaatgtgattggtgctcgcagacgtcctggaggatcctgtcttc

SEQ ID NO: 111791 - DNA, 248 bp, Glycine max
ataatactcagcatggctaagcttgttctttccctttgttttctgcttttcagtggctgctgcttcgctttcagtttcagagagcagccacagcaaaacgagtgccagatccaacgcctcaatgccctcaaccggataaccgtatagagtcagaaggtggcttcattgagacatggaaccctaacaacaagccattccagtgtgccggtgttgccctctctcgctgcaccctcaaccgcaacgccctt

SEQ ID NO: 111792 - DNA, 248 bp, Glycine max
ttcaaaccttgctctatactacacagtacacacactagaagaataatggcttccatcctccactactttttagccctctctctttcttgctcttttcttttcttcttatccgactcagtcacccctacaaaccaataaaccttgttgttctacccgttcaaaatgatggttccacagggctccattgggccaacctccaaaaaagaacccctctaatgcaagtaccagtcctggtggacctcaatgga

SEQ ID NO: 111793 - DNA, 248 bp, Glycine max
ccttaaacactcatcagtcatcaccatggccaagctagttttttccctttgttttctgcttttcagtggctgctgcttcgctttcagttccagagagcagcctcagctaaacgagtgccagatccaaaaatcaatgccctcaaaccggataaccgtatagagtcagaaggagggctcattgagacatggaaccctaacaacaagccattccagtgccggtgttgccctctctcgctgcaccctcaacc

SEQ ID NO: 111794 - DNA, 250 bp, Glycine max
tctcgagccgattcggctcgaggattttgtccatccaaaccttaaatagattcagtgaagaacaacgttaatggcatctctaggtgtgcaagcagttcatcctcctccattaacatccacctccgacccactcctctttttgatggcaccaccaggttgtacatcagttattcttgcccctatgcacaacgtgtatggatcgctcggaacttcaagggactaaaagacaagatcaatttggtccctataa

SEQ ID NO: 111795 - DNA, 246 bp, Glycine max
ctttccttagttcaatatggcggaagcccttcttcactctctctctttcttccctttgcttgctactcttgtcgagtgcatgctttgctattacctccagcaagttcaacgagtgccaactcaacaacctcacgcgttggaacccgaccaccgcgttgagtccgaaggtggtcttattgatacatggaactctcaacaccctgagctgcaatgcgccggtgtcactgtttccaaacgcaccctcaa

SEQ ID NO: 111796 - DNA, 244 bp, Glycine max
gttgttgccgtttctattattgacaccaacagcttggagaaccagctcgaccagatgcctaggtgattctaccttgctgggaaccaagagcaagagtttctaaaatatcagcaagagcaaggaggtcataaagccagaaaggaaagcatcagcaagaagaagaaaacgaaggaggcagcatattgagtggcttcaccctggaattcttggaacatgcattcagcgtggacaagcagatagcgaa

SEQ ID NO: 111797 - DNA, 245 bp, Glycine max
agatatgaagagtactatcttctttgctctctttctagtttgtgccttcaccatctcatacctgccttcagccaccgctcagttcgtgctcgacactgatgatgatcctcttcaaaacggtggcacatctatatgttgccagttatgagaggaaagggcggtggaatagaagtagattcaactggaaaagaaatatgccctctcactgttgtgcaatcacccaatgagctcgataaggggattgg

SEQ ID NO: 111798 - DNA, 244 bp, Glycine max
ccgagaacaaccagaggaacttccttgcaggttcgaaagacaatgtgataagccagatacctagtcaagtgcaggagcttgcgttccctgggtctgcaaaagatattgagaacctaataaagagccaagtgagtcctactttgtggatgctcagcctcagcagaaagaggaggggaacaagggaagaaagggtcctttgtcttcaattttgagggctttttactgaataagtatgtagtactaa

SEQ ID NO: 111799 - DNA, 244 bp, Glycine max
agtacaccgtattaaagaatttaagatatactatgatgagagcgcggttccctttactgttgctgggagttgttttcctggcatcagtttctgtctcatttggcattgcgtattgggaaaagcagaacccagtcacaacaagtgcttccgaagttgcaatagcgagaaagactcctacaggaaccaagcatgccacgctcgttgcaacctccttaaggtggaggaagaagaagaatgcgaagaa

SEQ ID NO: 111800 - DNA, 244 bp, Glycine max
ctccattggtccttaaacactcatcagtcatcaccatggccaagctagttttttccctttgttttctgcttttcagtggctgctgcttcgctttcagttccagagagcagcctcagcaaaacgagtgcagatccaaaaactcaatgccctcaaaccggataaccgtatagagtcagaaggagggctcattgagacatggaaccctaacaacaagccattccagtgtgccggtgttgccctctct

SEQ ID NO: 111801 - DNA, 248 bp, Glycine max
cacagattcgggcactgagcaaacgtgccaaatctagttcaaggaaaaccatttcttctgaagataaaccttttaacttgagaagccgcgaccccatctactccaacaagcttggcaagttctttgagataccccagagaaaaacccccagcttcgggacttggatatcttcctcagtattgtggatatgaacgagggagctcttcttctaccacacttcaattcaaaggcgatagtgatactggtaa

SEQ ID NO: 111802 - DNA, 247 bp, Glycine max
ggcagcagcaaggggagcagaggctgcaagagagcgtgattgtggaaatctcgaaggaacagattcgggcactgagcaaacgtgccaaatctagttcaaggaaaaccatttcttctgaagataaacctttaacttgagaagccgcgaccccatctactccaacaagcttggcaagttctttgagatcaccccagagaaaaacccccagcttcgggacttggatatcttcctcagtattgtggatatg

SEQ ID NO: 111803 - DNA, 248 bp, Glycine max
ataaaattcttccaccaagttatgggtctccttgtgttgcttcttttctccctcttaggtctctcttctagttccagcatatcaactcatcgttccatattggaccttgacctaaccaagtttaccacacgaaacaggtgtcttcactgttccaactatggaagagtgagcatggacgtgtctaccataaccacgaagaagaggcaaagagacttgagattttcaagaataacttgaactatatcagg

SEQ ID NO: 111804 - DNA, 251 bp, Glycine max
gtatttttggcatgatatacccgggttgtcctagcacatttgaagagcctcaacaacctcaacaaagaggacaaagcagcagaccacaagaccgtcaccagaagatctataacttcagagagggtgatttgatcgcagtgcctactggtgttgcatggtggatgtacaacaatgaagacactcctgttgttgccgtttctattattgacaccaacagcttggagaaccagctcgaccagatgcctaggaga

SEQ ID NO: 111805 - DNA, 114 bp, Glycine max
ctatgatgagagtgcggtttcctttgttggtgttgctgggaactgttttcctggcatcagtttgtgtctcattaaaggtgagagaggatgagaataaccctttctacttgagaa

SEQ ID NO: 111806 - DNA, 246 bp, Glycine max
gttcaatatcctagtataccttaataattaatttaagatactatgatgagagcacggttcctattactgttgctgggacttgttttcctggcttcagtttctgtctcatttggcattgcttactgggaaaagagaaccccaaacacaacaagtgtctccagagttgcaatagcgagagagactcgtacaggaaccaagcatgccacgctcgttgcaacctccttaaggtggagaaagaagaatgtg

SEQ ID NO: 111807 - DNA, 243 bp, Glycine max
ctccatttgtccttgaatataatactcagcatggctaagcttgttctttccctttgttttctgcttttcagtggctgctgcttcgctttcagtttcagagagcagccacagcaaaacgagtgccagaccaacgcctcaatgccctcaaaccggataaccgtatagagtcagaaggtggcttcattgagacatggaaccctaacaacaagccattccagtgtgccggtgttgccctctctcgct

SEQ ID NO: 111808 - DNA, 244 bp, Glycine max
taaaattcttccaccaagttatgggtttccttgtgttgcttcttttctccctcttaggtctctcttctagttccagcatatcaactcatcgttccatattggaccttgacctaaccaagtttaccaacagaaacaggtgtcttcactgttccaactatggaagagtgagcatggacgtgtctaccataaccacgaagaagaggcaaagagacttgagattttcaagaataacttgaactatatc

SEQ ID NO: 111809 - DNA, 242 bp, Glycine max
cggctcgagtgagagtgcggtttcctttgttggtgttgctgggaactgttttcctggcatcagtttgtgtctcattaaaggtgagagaggatgagaataaccctttctacttgagatgctctaacgcttccaaactctctttgagaaccaaaacggtcgcattcgtctcctccagagattcaacaaacgctccccacaacttgagaactgtcgagactaccggattgtccagtttcagtcaa

SEQ ID NO: 111810 - DNA, 243 bp, Glycine max
cagtgtttctcttccttcttctacttcttcttcttcttcttcgttgaatcgcgattgttctgtgcgagagaaagaagagagagatcgaaaatggcgttggctttcgacgagttcggaaggccgttctaatcctgaaggagcaggagcagaagagcagactccgaggattggacgctcagaaagccaacatctccgccggctaagccgtggctcgcatcctccgaacctccctcggccccaaag

SEQ ID NO: 111811 - DNA, 241 bp, Glycine max
ctccattggtccttcaacactcatcagtcatcaccatggccaagctagtttcttcccactgtcacctgcttttcagtggctgctgcttcgctttcagttccagagagcagcctcagcaaaacgagtccagatccaaaaactcaatgcgctcaaaccggataaccgtatagagtcagttggagggctcattgagacatggtacgctaacaacaagccattccagtgtgccggtgttgccctc

SEQ ID NO: 111812 - DNA, 202 bp, Glycine max
cgaagatgaagacgaagaatatgaacaaactccctcttatcctccacgacgaccaagccatggaaagcatgaagatgacgaggacgaggacgaagaagaagatcaacctcgtcctgatcaccctccacgcgaccaagcaggcccgaacaacaagaaccacgtggaagaggatgtcagactagaaatggggttgaggaaaata

SEQ ID NO: 111813 - DNA, 194 bp, Glycine max
ctaaacagaaccttgtttagtagagaggaagggcagcagcaaggggagcagaggctgcaagagagcgtgattgtggaaatctcgaaggaacagattcgggcactgagcaaacgtgccaaatctagttaaggaaaaccatttcttctgaagataaaccttttaacttgagaagccgcgaccccatctactcaaag

SEQ ID NO: 111814 - DNA, 249 bp, Glycine max
cactttccttagttcaatatgtgggaagcccttcttcactctctctctttcttccctttgcttgctactcttgtcgagtgcatgctttgctattacctccagcaagttcaacgagtgccaactcaacaactcaacgcgttggaacccgaccaccgcgttgagtccgaaggtggtcttattgaaacatggaactctcaacaccctgagctgcaatgcgccggtgtcactgtttccaaacgcaccctcaac

SEQ ID NO: 111815 - DNA, 245 bp, Glycine max
gtggattgcaaccatccctcgcaataggcgaaaagtttttgagctcttcttctacactcactcacgacccatacccacttcattgtcttcttcatctttcacgtgggcattttctatgcatgcactatttccccggtttctacctcttcttggttgatcggtacctaaggtttttgcaatcaagacgccgagttcgtttggtttctgctcgtgttttaccatgtgagactgtagaactcaacttc

SEQ ID NO: 111816 - DNA, 246 bp, Glycine max
gcaaagcaatggctacttcaaagttgaaaacccagaatgtggttgtatctctctccctaaccttaaccttggtactggtgctactgaccagcaaggcaaactcagcggaaactgtttctttcagctggaacaagttcgtgccgaagcaaccaaacatgatcctccaaggagacgctattgtgacctcctcgggaaagttacaactcaataaggttgacgaaaacggcaccccaaaaccctcgtctc

SEQ ID NO: 111817 - DNA, 243 bp, Glycine max
caccaacgaggacatagctgagaaacttcagtctccagacgacgaaaggaagcagatcgtgacagtggaaggaggtctcagcgttatcagccccaagtggcaagaacaacaagatctagatgaagagaagacgaagatgatgaagatgaacaaattccctctcaccctcctcgccgaccaagccatggaaagcgtgaacaagacgaggacgaggacgaagatgaagataaacctcgtcctagt

SEQ ID NO: 111818 - DNA, 198 bp, Glycine max
gaagactcatcaccatggccaagcttgttctttccctatgtttccttcttttcagtggctgcttcgctctgagagagcaggcacagcaaaatgagtgccagatccaaaagctgaatgccctcaaacggataaccgtatagagtcggaaggtgggttcattgagacctggaacccgaacaacaagccattccagtgtgc

SEQ ID NO: 111819 - DNA, 244 bp, Glycine max
gattgttcacccaccaataggaagagccgacatcgaaggatcaaaaagcaacgtcgctatgaacgcttggctgccacaagccagttatccctgtggtaacttttctgacacctctagcttcaaattccgaaggactaaaggatcgataggccacgctttcacggttcgtattcgtactggaaatcagaatcaaacgagcttttacccttttgttccacacgagatttctgttctcgttgagctc

SEQ ID NO: 111820 - DNA, 245 bp, Glycine max
agaaaagccatttccatagcagcctaagaaaatgaagagcactagcttgttcgctatctttctactttgcgccttcacctcatacctaccttccgccaccgcccaggacgtgctcgacgtggatggcatccgattcggaacggtttcatatactacgttttgccggcaataagaggaaacggtggcggaatagaacgagccgcactcgggaaagacacttgccctatcactgtagtgcaatctcc

SEQ ID NO: 111821 - DNA, 245 bp, Glycine max
gccgtttctattattgacaccaacagcttggagaaccagctcgaccagatgcctaggagattctatcttgctgggaaccaagagcaagagtttctaaaatatcagcagcagcagcaaggaggttcccaagccagaaaggaaagcaacaagaagaagaaaacgaaggaagcaacatattgagtggcttcgcccctgaattcttgaaagaagcgttcggcgtgaacatgcagatagtgagataccta

SEQ ID NO: 111822 - DNA, 248 bp, Glycine max
aacaattccttcacttgcagcactgttgcatcatcatcttcattgcaaaaccctaaacttcaccttcaaccatgaccacacaagtaccaccacacagtgtccaagtccacacaacaacacacccctacaagctggcgtcgtcccccccggagcccgtttcgaaccgccgcgttatgaagccggcgtcaaagcgccctccatttaccattccgagagaggtccaacgacttcccaggtcctcgccgtcc

SEQ ID NO: 111823 - DNA, 246 bp, Glycine max
caatatcctagtataccttaataaataatttaagatactatgatgagagcacggttcccattactgttgctgggacttgttttcctggcttcagtttctgtctcatttggcattgcttactgggaaaagagaaccccaaacacaacaagtgtctccagagttgcaatagcgagagagactcgtacaggaaccaagcatgccacgctcgttgcaacctccttaaggtggagaaagaagaatgtgaag

SEQ ID NO: 111824 - DNA, 204 bp, Glycine max
cttattaacactttccttagttcaatatggggaagcccttcttcactctctctctttcttccctttgcttgctactcttgtcgagtgcatgctttgctattacctccagcaagttcaacgagtgccaatcaacaacctcaacgcgttggaacccgaccaccgcgttgagtccgaaggtggtcttattgaaacatggaactctca

SEQ ID NO: 111825 - DNA, 147 bp, Glycine max
gaacactcatcaccatggccaagcttgttctttccctttgtttccttcttttcagtggctgcttcgctctgagagagcaggcacagcaaaatgagtgccagatccaaaagctgaatgccctcaaaccggataccgtatagagtcgga

SEQ ID NO: 111826 - DNA, 277 bp, Glycine max
gcaggcacagcaaaatgagtgccagatccaaaagctgaatgccctcaaaccggataaccgtatagagtcggaaggtgggttcattgagacctggaaccctaacaacaagccattccagtgtgccggtgttgccctctctcgctgcacccttaaccgcaatgcccacgtagaccttctataccaacggtccccaggaaatctacatacaacaaggtaatggtattgtttgggcatgagattccccggggttgtcctagcacttatcaagagccgcaag

SEQ ID NO: 111827 - DNA, 269 bp, Glycine max
ctgaaactgagatcataattactaagaatcaaatgatccagctgaaatgcgcacttgtggttttgtgtctgatgttgatatgagagacaagctgactaccttcatcattaagaaccctccagaagttaagaaaggatccaaagacaagaaggccatgaggagagctgagaaggagagactgaaggaaggtgaattagctgatgaggaacagaagaaagtgaagaaagaggttaagaagaaaggctcttcatcttctaaggatggcacta

SEQ ID NO: 111828 - DNA, 270 bp, Glycine max
cttactggacctataacactggcgatgaaccagttgttgccatcagtcttcttgacacctccaacttcaacaatcagcttgatcaaaaccccagagtattttaccttgctgggaacccagatatagagcacccagagaccatgcaacaacagcagcagcagaagagtcatggtggacgcaagcaggggcaacaccagcagcaggaggaagaaggtggcagtgtgctcagtggcttcagcaaacatttcttagcacaatccttcaacacca

SEQ ID NO: 111829 - DNA, 270 bp, Glycine max
cttaattcttaacacttccttagttcactatggggaagcccttcactctctctctaacttccctttgcttgctactcttgtcgagtgcatgctttgctattagctccagcaagctcaacgagtgccaactcaacaacctcaacgcgttggaacccgaccaccgcgttgagtccgaaggtggtttgattcaaacatggaactctcaacaccctgagctgaaatgcgccggtgtcactgtttccaaactcgacctcaaccgcaatggcctcc

SEQ ID NO: 111830 - DNA, 269 bp, Glycine max
ctcacatagcagaatggcttctactcaatgtttcttgcaccaccatgctcttaccacccctgccagatccccatcacaacgcatcatggttagcaccaagcctaaccagcttgtttgcaaggcacagaagcaagaggatattgatgtcagcccaatctctcgccggttagctctaaccgtgctcattggtgctgctgctgttggctccaaagtccaacctgctgatgcagcttatggggaagctgccaatgtgtttggaaagccaaaga

SEQ ID NO: 111831 - DNA, 267 bp, Glycine max
ccaggcaccaagcatgccacgctcgttgcaacctccttaaggtggaggaagaagaagaatgcgaagaaggtcaaattccacgaccacgaccacacaacccggagagggaacgtcagcaacacggtgagaaggaggaagacgaaggtgagcagccacgtccattcccattcccacgcccacgccaacctcatcaagaggaagagcacgagcagaaggaggaacacgaatggcatcgcaaggaggaaaaacacggaggaaagggaagtg

SEQ ID NO: 111832 - DNA, 265 bp, Glycine max
taaacactcatcagtcatcaccatggccaagctagttttttccctttgttttctgcttttcagtggctgctgcttcgctttcagttccagagagcagcctcagcaaaacgagtgccagatccaaaaactcaatgccctcaaaccggataaccgtatagagtcagaaggagggctcattgagacatggaaccctaacaacaagccattccagtgtgccggtgttgccctctctcgctgcaccctcaaccgcaacgcccttcgtaga

SEQ ID NO: 111833 - DNA, 266 bp, Glycine max
ctgccagtagtcatatgcttgtctcaaagattaacccatgcatgaggtaagtatgaactaattcagactgtgaaattgcgattggctcattaaatcagttatagtttgtttgatggtatcttctactcggataaccgtagtaattctagagctaatacgtgcaacaaaccccgacttctggaagggatgcatttattagttaaaaggtcaacacaggctctgcctgttagctttgatgattcatgataactcgtcggatcgcacgg

SEQ ID NO: 111834 - DNA, 258 bp, Glycine max
gttcaatatcctagtataccttaataaataatttaagatactatgatgagagcacggttcccattactgttgctgggacttgttttcctggcttcagtttctgtctcatttggcattgcttactgggaaaaagagaaccccaaacacaacaagtgtctccagagttgcaatagcgagagagactcgtacaggaaccaagcatgccacgctcgttgcaacttcctaaaggtggagaaagaggattgtgaggaaggtgaa

SEQ ID NO: 111835 - DNA, 266 bp, Glycine max
taaaattcttccaccaagttatgggtccccttgtgttgcttcttttctccctcttaggtctctcttctagttccagcatatcaactcatcgttccatattggaccttgacctaaccaagtttaccacacagaaacaggtgtcttcactgttccaactatggaagagtgagcatggacgtgtctaccataaccacgaagaagaggcaaagagacttgagattttcaagaataacttgaactatatcagggacatgaatgcaaacaga

SEQ ID NO: 111836 - DNA, 272 bp, Glycine max
cgatgatgatgatgaggaagagcagccacagtgcgtggagacagacaaaggttgccaacgccaaagctaaaggagcagaaatggcattgatgagaccatttgcacaatgagacttcgccaaaacattggtcagaattcatcacctgacatctacaaccctcaagctggtagcatcacaaccgccaccagccttgacttcccagccctctggcttctcaaactcagtgcccagtatggatcactccgcaagaatgctatgttcgtgccacact

SEQ ID NO: 111837 - DNA, 271 bp, Glycine max
tcgcagcaaaaccaagccacccactaacttgtttggtccaagacatggctctgatcctgcatgctaccaaaacaaacaagaatgccttcaagactctgattgcggcagagtacagtggcgtccaagtggaattggcccctaatttcgagatgggtgtctctaacaaaactcctgaatttctcaagatgaatcctattggaaaggttcctgttttggaaacgcccgatggtccagtctttgagagcaatgcaatcgctcgttacgttgctcg

SEQ ID NO: 111838 - DNA, 271 bp, Glycine max
ctcttcctcaccgattgctagaatggaatttcgatgctcagtcatctcttttaccattctctactctcttgctcttgcaggagagagccatgtccatgcatcgctacctgaggaagattattgggaagctgtttggccaaacactcccattcccactgcactgcgagagcttctaaagcctctccctgcaggtgttgaaatcgacgaactccctaagcaaattgatgatacacagtacccaaaaacattcttctataaagaagaccttcat

SEQ ID NO: 111839 - DNA, 271 bp, Glycine max
agcaaaatgaccaagttcacaatcctccacatctctcttctcttctgcatcgcccacacttgcagcgcctccaaatggcagcaccagcaagatagctgccgcaagcagctccagggggtgaacctcacgccctgcgagacgcacatcatggagaagatccaaggccgcggcgatgacgatgatgatgatgacgacgacaatcacattctcaggaccatgcggggaagaatcaactacataaggaggaacgaaggacaagacgaagacgaag

SEQ ID NO: 111840 - DNA, 267 bp, Glycine max
gaaggaggaagacgaagatgagcaaccacgtccaatcccattcccacgcccacaacctcgtcaagaagaagagcacgagcagagagaggaacaggaatggcctcgcaaggaggaaaaacgcggagaaaagggaagtgaagaggaagatgaggatgaggatgaggaacaagatgaacgtcaattcccattcccacgcccacctcatcagaaggaagagcgaaagcaagaggaagatgaggatgaggagcagcagcgagagagcgaaga

SEQ ID NO: 111841 - DNA, 266 bp, Glycine max
attgtctttgaacactcatcaccatggccaagcttgttctttccctttgtttcctacttttcagtggctgcttcgctctgagagagcaggcacagcaaaatgagtgccagatccaaaagctgaatgccctcaaaccggataaccgtatagagtcggaaggtgggttcattgagacctggaaccctaacaacaagccattccagtgtgccggtgttgccctctctcgctgcacccttaaccgcaatgcccttcgtagaccttcctac

SEQ ID NO: 111842 - DNA, 272 bp, Glycine max
cagttattatcaaataattaattaaattccacgtggaatcttgttgaagccatgtctacagctggtcaggtcatcaagtgcagagctgcggtggcatgggaagcagggaagccactatcgatagataccatcgacgtggcaccaccccagaaaggtgacgtgcgtctgatgatcctacttcaactaccctttgccgtacagatgtttactggtgggatgctaagggtcagactccgctgttacctcgtatctaaggccacgaagcttcgggg

SEQ ID NO: 111843 - DNA, 265 bp, Glycine max
cttaattattaacacttccttagttcaatatggggaagcccttcactctctctctttcttccctatgcttgctactcttgtcgagtgcatgctttgctattagctccagcaagctcaacgagtgccaactcaacaacctcaacgcgttggaacccgaccaccgcgttgagtccgaaggtggtttgattcaaacatggaactctcaacaccctgagctgaaatgcgccggtgtcactgtttccaaactcaccctcaaccgcaatgg

SEQ ID NO: 111844 - DNA, 265 bp, Glycine max
gttcaatatcctagtataccttaataaataatttaagatactatgatgagagcacggttcccattactgttgctgggacttgttttcctggcttcagtttctgtctcatttggcattgcttactgggaaaaagagaaccccaaacacaacaagtgtctccagagttgcaatagcgagagagactcgtacaggaaccaagcatgccacgctcgttgcaacctccttaaggtggagaaagaagaatgtgaagaaggtgaaattccac

SEQ ID NO: 111845 - DNA, 265 bp, Glycine max
cttaaacactcatcagtcatcaccatggccaagctagttttttccctttgttttctgcttttcagtggctgctgcttcgctttcagttccagagagcagcctcagcaaaacgagtgccagatccaaaaactcaatgccctcaaaccggataaccgtatagagtcagaaggagggctcattgagacatggaaccctaacaacaagccattccagtgtgccggtgttgccctctctcgctgcaccctcaaccgcaacgcccttcgta

SEQ ID NO: 111846 - DNA, 256 bp, Glycine max
tggcgatgaaccagttgttgccatcagtcttcttgacacctccaacttcaacaatcagcttgatcaaaaccccagagtattttaccttgctgggaacccagatatagagcacccagagaccatgcaacaacagcagcagcagaagagtcatggtggacgcaagcaggggcaacaccagcagcaggaggaagaaggtggcagtgtgctcagtggcttcagcaaacatttcttagcacaatccttcaacaccaacgag

SEQ ID NO: 111847 - DNA, 265 bp, Glycine max
ctgaataattaagaaaagccatttccatagcagcctaagaaaatgaagagcactagcttgttcgctatctttctactttgcgccttcacctcatacctaccttccgccaccgcccaggacgtgctcgacgtggatggcgatccgattcggaacggtttcatatactacgttttgccggcaataagaggaaacggtggcggaatagaacgagccgcactcgggaaagacacttgccctatcactgtagtgcaatctcccaatccaa

SEQ ID NO: 111848 - DNA, 266 bp, Glycine max
cttaattattaacacttccttagttcaatatggggaaacccttcactctctctctttcttccctttgcttgctactcttgtcgagtgcatgctttgctattagctccagcaagctcaacgagtgccaactcaacaacctcaacgcgttggaacccgaccaccgcgttgagtccgaaggtggtttgattcaaacatggaactctcaacaccctgagctgaaatgcgccggtgtcactgtttccaaactcaccctcaaccgcaatggc

SEQ ID NO: 111849 - DNA, 268 bp, Glycine max
ctgaagcaaagcaatggctacttcaaagttgaaaacccagaatgtggttgtatctctctccctaaccttaaccttggtactggtgctactgaccagcaaggcaaactcagcggaaactgtttctttcagctggaacaagttcgtgccgaagcaaccaaacatgatcctccaaggagacgctattgtgacctcctcgggaaagttacaactcaataaggttgacgaaaacggcaccccaaaaccctcgtctcttggtcgcgccctctac

SEQ ID NO: 111850 - DNA, 267 bp, Glycine max
caagatctccatatctgttcccaaaagcttgtttgtaagaatggcttccggtgaacagcaattccctcctcaacaacaacaaacgcagcctgggaaggagcatgctatgactccagtaccccaattcactagccctgactacaagccttcaaataaacttcaagggaagattgcattagtcactgggggtgattctgggattggacgagcggtgtgtaacttgtttgccttagaaggtgctaccgtggccttcacgtatgtgaaggg

SEQ ID NO: 111851 - DNA, 259 bp, Glycine max
gcagagagtgcggtaggctcatccgagaccggaagcagcaatggggatcgatctcaaggccggaggtaaaagcaaaaaaaccaaaagaacagcacccaagtccaatgatatctatcttaagctcttggtcaagcttgatcgcttccttgttcgaagaactggcagcaaattcaatgccgttatactcaagagattgttcatgagcaaggttaacaagcccccattgtctttgtcaaggttgattaagtataccaagggg

SEQ ID NO: 111852 - DNA, 268 bp, Glycine max
acaaaactttgcggtggctgcaaaatcccagagcgataactttgagtatgtgtcattcaagaccaatgatagaccctcgatcggaaaccttgcaggggcaaactcattgttgaacgcattgccagaggaagtgattcagcacacttttaacctaaagagccagcaggccaggcaggtgaagaacaacaacccattcagcttcctggttccacctcaagagtctcagaggagagctgtggcttagagagccctttttgcatgtgctacc

SEQ ID NO: 111853 - DNA, 269 bp, Glycine max
tgagaagccacagtgcaagggtaaagacaaacactgccaacgcccccgaggaagccaaagcaaaagcagaagaaatggcattgacgagaccatatgcaccatgagacttcgccacaacattggccagacttcatcacctgacatctacaaccctcaagccggtagcgtcacaaccgccaccagccttgacttcccagccctctcgtggctcagactcagtgctgagtttggatctctccgcaagaatgcaatgttcgtgccacactaca

SEQ ID NO: 111854 - DNA, 263 bp, Glycine max
gatctgtacctgcctagccattgatttggaaaagtccaagcttcaaagatgagtaagcttcagagtgatgctcttagagaagctatctcaggaatcatgactgattccaaggaaaagaacaggaaatttgtggagaccattgaactccaaattgggctgaaaaactatgatccccagaaggacaagcgttttagtggctctgttaagttgcctcacattcctcgccccaagatgaagatttgtatgcttggagatgcccaaca

SEQ ID NO: 111855 - DNA, 263 bp, Glycine max
ctcgagccgctctccattgtcattgaacactcatcaccatggccacgcttgttctttccctacgattccttcttttcagtggctgcttcgctctgagagagcaggcacagcaaaatgagtgccagatccaaaagctgaatgccctcaaaccggataaccgtatagagtcggaaggtgggttcattgagacctggaaccctaacaacaagccattccagtgtgccggtgttgcccactctcgctgcacccttaaccgcaatgcc

SEQ ID NO: 111856 - DNA, 246 bp, Glycine max
aacactcatcaccatggccaagcttgttctttccctttgtttccttcttttcagtggctgcttcgctctgagagagcaggcacagcaaaatgagtgccagatccaaaagctgaatgccctcaaaccggataaccgtatagagtcggaaggtgggttcattgagacctggaaccctaacaacaagccattccagtgtgccggtgttgccctctctcgctgcacccttaaccgcaatgcccttcgtag

SEQ ID NO: 111857 - DNA, 261 bp, Glycine max
ctctcatgttcctgtgttagcaccacttcccattgggtttgccgacttcatggttcacttggctacaatccctgtcactggaaccggcattaaccctgcaaggagtttcggaccagctgtgatcttcaacaacgacaaagcctgggacgaccaatggatttactgggttggaccgtttgttggagctgcggtggctgcaatctaccatcaatacattcttagaggttctgcaatcaaagctcttggatccttcaggagcaa

SEQ ID NO: 111858 - DNA, 247 bp, Glycine max
tgcagaccgagctagctagctagcaagcaagcacagagatggaggcaaagcgaggccatgccctcatgtgcttggcacgtgtttcactcttcctctgcgctctaaccctatccgctgctcacggaagcaccacggttcaagaagaagcgagagagatgaaactcggggacaacgagcttctgcgcacggagaagaagttcaaggttttcatggagaattacgggaggagctactccacagaggagga

SEQ ID NO: 111859 - DNA, 264 bp, Glycine max
gccacactacaccctgaacgcgaacagcataatatacgcattgaatgggcgggcattggtacaagtggtgaattgcaatggtgagagagtgtttgatggagagctgcaagagggaggggtgctgatcgttccacaaaactttgcggtggctgcaaaatcccagagcgataactttgagtatgtgtcattcaagaccaatgatagaccctcgatcggaaaccttggaggggcaaactcattgttgaacgcattgccagaggaagt

SEQ ID NO: 111860 - DNA, 266 bp, Glycine max
cttgtctttgaacactcatcaccatggccaagcttgttcttaccctttgtttccttcttttcagtggctgcttcgctctgagagagcaggcacagcaaaatgagtgccagatccaaaagctgaatgccctcaaaccggataaccgtatagagtcggaaggtgggttcattgagacctggaaccctaacaacaagccattccagtgtgccggtgttgccctctctcgctgcacccttaaccgcaatgcccttcgtagaccttcctac

SEQ ID NO: 111861 - DNA, 267 bp, Glycine max
caggagcagcaacaggaagagcaacctttggaagtgcggaaatatagagtcgaattgtctgaacaagatatatttgtaatcccagcaggttatccagttgtggtcaacgctacctcaaatctgaatttctttgctattggtattaatgccgagaacaaccagaggaacttcctcgcaggttcgcaagacaatgtgataagccagatacctagtcaagtgcaggagcttgcattccctgggtctgcacaagctgttgagaagctatta

SEQ ID NO: 111862 - DNA, 266 bp, Glycine max
ctagtataccttaataaataatttaagatactatgatgagagcacggttcccattactgttgctgggacttgtttacctggcttcagtttctgtctcatttggcattgcttactgggaaaaagagaaccccaaacacaacaagtgtctccagagttgcaatagcgagagagactcgtacaggtcccaagcatgccacgctcgttgcaacctccttaaggtggagaaagacgaatgtgaagaaggtgaaattccacgaccacgacca

SEQ ID NO: 111863 - DNA, 263 bp, Glycine max
ccttagttcaatatggggaagcccttcactctctctcttacttccctttgcttgctactcttgtcgagtgcatgctttgctattagctccagcaagctcaacgagtgccaactcaacaacctcaacgcgttggaacccgaccaccgcgttgagtcccgaaggtggtttgatccaaacatggaatcttcaacaccctgagctgaaatgcgcgggtgtcatggttcccaactccaccttaaccggaatgggctccaattgccaac

SEQ ID NO: 111864 - DNA, 266 bp, Glycine max
caacatgccaaacgacagcgttctgagtcttttcttcttcgttaccctcttcacatgccttctctctgctaattcccacgatgaccatattttcctaccgagtcaactccatgacgatgactcagtgagttgcactgctaccgacccaaaccttaactacaagccggtgatcggaatcctgacccaccccggcgacggtgcctctggccggctcagcaacgccaccggggtttcttacatcgccgcctcctacgttaaattcgtgg

SEQ ID NO: 111865 - DNA, 259 bp, Glycine max
caaagacggaggaaagggaagtgaagaggaacaagatgaacgtgaacacccacgcccacaccaacctcatcacaaggaagaggaaaagcacgaatggcaacacaagcaggaaaagcaccaaggaaaggaaagtgaagaagaagaagaagaccaagacgaggatgaggagcaagacaaagagagccaagaaagtgaaggttctgagtctcaaagagaaccacgaagacataagaataagaacctattcacttacactcta

SEQ ID NO: 111866 - DNA, 260 bp, Glycine max
cactcatcagtcatcaccatggccaagctagttttttccctttgttttctgcttttcagtggctgctgcttcgctttcagttccagagagcagcctcagcaaaacgagtgccagatccaaaaactcaatgccctcaaaccggataaccgtatagagtcagaaggagggctcattgagacatggaaccctaacaacaagccattccagtgtgccggtgttgccctctctcgctgcaccctcaaccgcaacgcccttcgtag

SEQ ID NO: 111867 - DNA, 264 bp, Glycine max
cttaattattaacacttccttagttcaatatggggaagccctatcactctctctctttcttccctttgcttgctactcttgtcgagtgcatgctttgctattagctccagcaagctcaacgagtgccaactcaacaacctcaacgcgttggaacccgaccaccgcgttgagtccgaaggtggtttgattcaaacatggaactctcaacaccctgagctgaaatgcgccggtgtcactgtttccaaactcaccctcaaccgcaat

SEQ ID NO: 111868 - DNA, 263 bp, Glycine max
aattcttccaccaagttatgggttcccttgtgttgcttcttttctccctcttaggtctctcttctagttccagcatatcaactcatcgttccatattggaccttgacctaaccaagtttaccacacagaaacaggtgtctctcactgttccaactatggaagagtgagcatggacgtgtctaccataaccacgaagaagaggcaaagagacttgagattttcaagaataacttgaactatatcagggacatgaatgcaaacag

SEQ ID NO: 111869 - DNA, 291 bp, Glycine max
gtacatcagctcatacttcagctcgaggatcaaacactcgagaactctctagccagctctgctactttcttcctaatctcgtatattctcgaactcactctaatttctaacgcggcctataaattgcggtttgggttctctctctcacctcactcacaacaatatctgcaaataaaataccactctacaaaactctccagtaattctgaaaattttattttcttttggtgaaattaacagctctgtgattgatcaatggcgacaaaggaaggcaaagccataggcatcgat

SEQ ID NO: 111870 - DNA, 270 bp, Glycine max
  unsure (1)..(270): unsure at all n locations
cttcatcttcagcaacaccacttcccgtgaagaccatgacatgttccaccancaccacnactgngnctnctncctacttccncttcttgggccatgttgaagtcagatgctgaggaagatgcagagaaaaaccattgcaaccgatacatgcatgaccaaacttgatgcaactttgtcttccaccgcttccatggagntttctcaacagcaaaaccctgatcctggccttggtggcactgttggagagtgcatgggtgatgttntggacat

SEQ ID NO: 111871 - DNA, 265 bp, Glycine max
tgcaatcaaattagttcattctctttgcgcagttccctacctctccttacaagatgcagatcttcgacaagaccctacaccggaaagaccatcacccttgaggtggaaagctctgacaccatcgacaacgtcaaggccaagatccaggacaaggaaggaattcccccggatcagcaacgtctcatcttcgccggaaagcagctcgatgacggccgtaccctcgccgactacaacatccagaaggagtcaaccctacaccttgtcc

SEQ ID NO: 111872 - DNA, 266 bp, Glycine max
ctgagttacgaagacataagactaagaacccttttctcttcggctctaacaggttcgaaactctcttcaaaaaccaatatggtcgcattcgcgtcctccagaggttcaaccaacgctccccacaacttcagaatcaccgagactaccgcattttggagttcaactccaaacccaacaccctccttctccccaaccatgctgacgctgattacctcatcgttatccttaacgggactgccattctttccttggtgaacaacgacgac

SEQ ID NO: 111873 - DNA, 237 bp, Glycine max
cacaatgctcccttaccatacccttgaaggagcacaagttgcactaggcagaggactaacccttgctgagacaatatggttcaaatactctgccaacaaacctgattttgttcttcattgccacaacactctattcttgtgcttattttactctatagctccaattcctttcgtattaatggagcttagtgggtatgagaagctaaacaaacacaaaattcagccctcggttgagag

SEQ ID NO: 111874 - DNA, 265 bp, Glycine max
ctagtctttgaacactcatcaccatgaccaagcatgttcttaccctaagtttaccaactattcagtggctgcttcgctctgagagagcaggcacagcaaaatgagtgccagatccaaaagctgaatgccctcaaaccggataaccgtatagagtcagaaggtgggttcattgagacctggaaccctaacaacaaaccataccagtgagccggtgatgcccacacacgctgcacccttaaccgcaatgccctacgtagacctacct

SEQ ID NO: 111875 - DNA, 262 bp, Glycine max
ggctacttcaaagttgaaaacccagaatgtggttgtatctcacaccctaaccttaaccttggtactggtgctactgaccagcaaggcaaactcagcggaaactgtttctttcagctggaacaagttcgtgccgaagcattcaaacatgatcctccaaggagacgctattgtgacctcctcgggaaagttacaactcaataaggttgacgaaaacggcaccccaaaaccctcgactcttggtcgcgccctctactccaccccc

SEQ ID NO: 111876 - DNA, 255 bp, Glycine max
caatttctaattagggtttcgcttagagtaaccaataaccatgggagtcttcacctttgtcgtccgcaaatccggcagcgaatggagcgccaagcaacattccggcgacatcgaggcctccgccgattccaccttcgatctccaacggaagctcgtgcaagccgctctcgccgttgattcctccggtggagttcagtcctctttctctcccgggtctcctacctccgctgtgttccaggtgatagtgggtggtgc

SEQ ID NO: 111877 - DNA, 241 bp, Glycine max
gtccttaaacactcatcagtcatcaccatggccaagctagttttttccctttgttttctgcttttcagtggctgctgcttcgctttcagttccagagagcagcctcagcaaaacgagtgccagatccaaaaactcaatgccctcaaaccggataaccgtatagagtcagaaggagggctcattgagacatggaaccctaacaacaagccattccagtgtgccggtgttgccctctctcgct

SEQ ID NO: 111878 - DNA, 260 bp, Glycine max
atctctatcgagtaaattaactatgaagcctaccctactattatccctttccttcctgcctctctttactttcctggctctttcagaagatgttgaacaagttgtggacataagtggcaaccccattttcccaggtggcacatattacattatgccatcaacttggggcgctgccggtggtggattgaaactaggccggacaggaaactcaaactgcccagttactgttttgcaagattactcagaaatcttccgtggca

SEQ ID NO: 111879 - DNA, 252 bp, Glycine max
tctctccattggtccttaaacactcatcagtcatcaccatggccaagctagttttttcccattgttttctgcttttcagtggctgctgcttcgctttcagttccagagagcaacctcaggtaaacgagtgccagatccgaaaactcattgccctcaaaccggataaccgtatagagtcagaaggagggctcattgagacatggaaccctaacaacaagccattccagtgtgccggtgttgccctctctcgct

SEQ ID NO: 111880 - DNA, 269 bp, Glycine max
acggtgccttgacaccatcgacttctgctacaaaccttgcaagtccagtgcatgaggatgatggactcggatttagtcatcagaaactctctgacttgcttcaagccctagaggcctccatgacttttgtgtgggggcgacgactagaacgtggtgtagaaagctcgcaatggccagctgtttgcttgtggcttatcttgggcggtactgtcgaaagtgaagaaagaggttaagaagaaaggctcttcatcttctaaggatggcactaa

SEQ ID NO: 111881 - DNA, 264 bp, Glycine max
tccaaacccaacaccctccttctccccaaccatgctgacactgattacctcatcgttatccttaacgggactgccattctatccttggtgaacaacgacgacagagactcctacagacttcaatctggtgatgccctgagagtcccctcaggaaccacatactatgtggtcaaccctgacaacaacgaaaatctcagattaataacactcgccatacccgttaacaagcctggtagatttgagagtttcttcctatctagcact

SEQ ID NO: 111882 - DNA, 254 bp, Glycine max
cttaattattaacacttccttagttcaatatggggaagcccatcactctcactcttactaccctttgattgctactcatgtcgagtacatgctttgctattagctccagcaagctcaaagagtaccaactcaacaacgtcaacgcgttgaacaccgaccaccgagttgagtccgaaggtggtttgattcatacatggaactctcaacaccctgagctagattgcgccggtgtcactgtttccaaactacatctc

SEQ ID NO: 111883 - DNA, 256 bp, Glycine max; identical to SEQ ID NO: 110884

SEQ ID NO: 111884 - DNA, 262 bp, Glycine max
gggaagcccttcttcactctctctctttcttccctttgcttgctactcttgtcgagtgcatgctttgctattacctccagcaagttcaacgagtgccaactcaacaacctcaacgcgttggaacccgaccaccgcgttgagtccgaaggtggtcttattgaaacatggaactctcaacaccctgagctgcaatgcgccggtgtcactgtttccaaacgcaccctcaaccgcaacggcctccacttgccatcttactcacctt

SEQ ID NO: 111885 - DNA, 264 bp, Glycine max
agaagctcaacgatcctacttgcaaagattcagcaggaacattttagaagcctcctacgataccaaattcgaggagataaacaaggttactgtttagtagagaggaagggcagcagcaaggggagcagatgctgcaagagagcgtgattgtggaaatctcgaaggaacagattcgggcactgagcaaacgtgccaaatctagttcaaggaaaaccatttcttctagaagataaaccttttaacttgagaaaccgcgaccccatc

SEQ ID NO: 111886 - DNA, 260 bp, Glycine max
ttcacgagaacattgctcgcccttcacgtgctgacttctacaacccaaaagctggtcgcattagcaccctcaacagtctcaccctcccagccctccgccaattcggactcagtgcccaatatgttgtcctctacaggaatggaatttactctccacattggaacttgaacgcgaacagtgtgatctatgtgactcgagggaaaggaagagttagagtggtgaactgccaagggaatgcagtgttcgacggtgagctaagg

SEQ ID NO: 111887 - DNA, 262 bp, Glycine max
gttcaatatcctagtataccttaataaataatttaagatactatgatgagagcacggttcccattactgttgctgggacttgttttcctggcttcagtttctgtctcatttggcattgcttactgggaaaaagagaaccccaaacactacaagtgtctccagagttgcaatagcgagagagactcgtacaggaaccaagcatgccacgctcgttgcaacctctttaaggtggagaaagaagaatgtgaagaaggtgaaattc

SEQ ID NO: 111888 - DNA, 259 bp, Glycine max
cgaatattctagaggcctcatacgacaccaaattcgaggagataaacaaggttctgtttggtagagaggaggggcagcaacaaggggaggagaggctgcaagagagtgtgattgtggaaatctcaaagaaacaaattcgggaactgagcaaacatgccaaatctagttcaaggaaaaccatttcttctgaagataaacctttcaacttgagaagccgcgaccccatctattccaacaagcttggcaagttgtttgagat

SEQ ID NO: 111889 - DNA, 239 bp, Glycine max
aacttattaacactttccttagttcaatatggggaagcccttcttcactctctctctttctaccctttgcttgctactcttgtcgagtgcatgctttgctattacctccagcaagttcaacgagtgccactcaacaacctcaacgcgtcggaacccgaccaccgcgttgagtccgaaggtggtcctattgaaacatgggactctcaacaccctgagctgcaatgcgccggtgtcactgt

SEQ ID NO: 111890 - DNA, 105 bp, Glycine max
gctgagcatccacaaagtaggtaggggaataagggaagatagggtccttgtgtcttcaattctgagggctttttactgaataagtatgtactacaatgtatgctg

SEQ ID NO: 111891 - DNA, 102 bp, Glycine max
gtgatttgatcgcagtgcctactggtgttgcatggtggatgtacaacaatgaagacactcctgttgttgccgtttctattattgtcaccaacagcttggaga

SEQ ID NO: 111892 - DNA, 249 bp, Glycine max
tctacatacaacaaggtaatggtatttttggcatgatattcccgggttgtcctagcacttatcaagagccgcaagaatctcagcaacgaggacgaagctataggcaccatgaccgtcgccataaggtacatcgcttcagatagggtgattagatcgcagtgactactggtgttacatcgtggatgtacaacaatgaggacactcctgttgttgccgtttctattattgacaccaacagcttggagaacc

SEQ ID NO: 111893 - DNA, 246 bp, Glycine max
gtcagaaggagggctcattgagacatggaaccctaacaacaagccattccagtgtgccggtgttgccctctctcgctgcaccctcaaccgcaacgcccttcgtagaccttcctacaccaacggtcccaaggaaatctacatccaacaaggtaagggtatttttggcatgatatacccgggttgtcctagcacatttgaagagcctcaacaacctcaacaaagaggacaaagcagcagaccacaaga

SEQ ID NO: 111894 - DNA, 245 bp, Glycine max
tctctccattgtctttgaacactcatcaccatggccaagcttgttctttccctttgtttccttcttttcagtggctgcttcgctctgagagagcaggcacagcaaaatgagtgccagatccaaaagctgaatgccctcaaaccggataaccgtatagagtcggaaggtgggttcatagagacctggaaccctaacaacaagccattccagtgtgccggtgttgccctctctagctgcacccttaa

SEQ ID NO: 111895 - DNA, 246 bp, Glycine max
gagaaccccaaacacaacaagtgtctccagagttgcaatagcgagagagactcgtacaggaaccaagcatgccacgctcgttgcaacctccttaaggtggagaaagaagaatgtgaagaaggtgaattccacgaccacgaccacgaccacaacacccggagagggaacctcagcaacccggtgagaaggaggaagacgaagatgagcaaccacgtccaatcccattcccacgcccacaacctcgtc

SEQ ID NO: 111896 - DNA, 247 bp, Glycine max
gtctttgaacactcatcaccatggccaagcttgttctttccctttgtttccttcttttcagtggctgcttcgctctgagagagcaggcacagcaaaatgagtgccagatccaaaagctgaatgccccaaaccggataaccgtatagagtcggaaggtgggttcattgagacctggaaccctaacaacaagccattccagtgtgccggtgttgccctctctcgctgcacccttaaccgcaatgccctt

SEQ ID NO: 111897 - DNA, 227 bp, Glycine max
taaaattcttccaccaagttatgggtttccttgtgttgcttcttttctccctcttaggtctctcttctagttccagcatatcaactcatcgttccatattggaccttgacctaaccaagtttaccacacagaaacaggtgtcttcactgttccaactatggaagagtgagcatggacgtgtctaccataaccacgaagaagaggcaaagagacttgagatttccaag

SEQ ID NO: 111898 - DNA, 248 bp, Glycine max
ctccattgtctttgaacactcatcaccatggccaagcttgttctttccctttgtttccttcttttcagtggctgcttcgctctgagagagcaggcacagcaaaatgagtgccagatccaaaagctgaatgccctcaaaccggataaccgtatagagtcggaaggtgggttcattgagacctggaaccctaacaacaagccattccagtgtgccggtgttgccctctctcgctgcacccttaaccgcaa

SEQ ID NO: 111899 - DNA, 165 bp, Glycine max
tctaaacccaactcacgtaccacttgaatcggcgaacaaccgaacccttgggaccttcttcaaccccaggatgtgatgagtcgacatcgaggtgccaaacgactccgtcgataagagctcttgggagtcatcagcctgttatccccggcgtacctttgatccgtt

SEQ ID NO: 111900 - DNA, 247 bp, Glycine max
cttccaccaagttatgggtttccttgtgttgcttcttttctccctcttaggtctctcttctagttccagcatatcaactcatcgttccatattggaccttgacctaaccaagtttaccacacagaaacaggtgtcttcactgttccaactatggaagagtgagcatggacgtgtctaccataaccacgaagaagaggcaaagagacttgagattttcaagaataacttgaactatatcagggacatg

SEQ ID NO: 111901 - DNA, 246 bp, Glycine max
ctcgagccgaatcggctcgaggatcatacatagtagtgttggtgcgttgcaaagatgcttgggggtcttctccataggggtcataagataaaagggacagtggtgttgatgcgcaagaatgtgttggacgtgaatagcgtaaccagcgttgggggaattattggtcaaggtctcgacttagttggctcaacactcgatactcttactgccttcttgggccgatccgtgtctctccagcttattagt

SEQ ID NO: 111902 - DNA, 247 bp, Glycine max
ttgatggagagctgcaagagggaggggtgctgatcgttccacaaaactttgcggtggctgcaaaatcccagagcgataactttgagtatgtgtcattcaagaccaatgatagaccctcgatcggaaaccttgcaggggcaaactcattgttgaacgcattgccagaggaagtgattcagcacacttttaacctaaagagccagcaggccaggcaggtgaagaacaacaaccctttcagcttcctggt

SEQ ID NO: 111903 - DNA, 246 bp, Glycine max
ctcgagccgaaaatgaccaagttcacaatcctcctcatctctcttctcttctgcatcgcccacacttgcagcgcctccaaatggcagcaccagcaagatagctgccgcaagcagctccagggggtgaacctcacgccctgcgagaagcacatcatggagaagatccaaggccgcggcgatgacgatgatgatgatgacgacgacaatcacattctcaggaccatgcggggaagaatcaactacata

SEQ ID NO: 111904 - DNA, 242 bp, Glycine max
gttcaatatcctagtataccttaataaataatttaagatactatgatgagagcacggttcccattactgttgctgggacttgttttcctggcttcagtttctgtctcatttggcattgcttactgggaaaaagagaaccccaaacacaacaagtgtctccagagttgcaatagcgagagagactcgtacaggaaccaagcatgccacgctcgttgcaacctccttaaggtggagaaagaaga

SEQ ID NO: 111905 - DNA, 245 bp, Glycine max
gttcaatatcctagtataccttaataaataatttaagatactatgatgagagcacggttcccattactgttgctgggacttgttttcctggcttcagtttctgtctcatttggcattgcttactgggaaaaagagaaccccaaacacaacaagtgtctccagagttgcaatagcgagagagactcgtacaggaaccaagcatgccacgctcgttgcaacctccttaaggtggagaaagaagaatg

SEQ ID NO: 111906 - DNA, 112 bp, Glycine max
gtgaacggcacttgcacatgggctagtcgatcctaagggacgggggaagctcgtctgatagcgctctgtgcgcgcactccgaaagggaatcgggttaaaattcctgaagcgg

SEQ ID NO: 111907 - DNA, 246 bp, Glycine max
tcaatatcctagtataccttaataaataatttaagatactatgatgagagcacggttcccattactgttgctgggacttgtattcctggcttcagattctgtctcatttggcattgattactgggatcaagagaaccccagacactgcatgtgtctccagcgatgcaatagcgagtcagactcgtatagggaccatgcttgccacgctcgttgcaacctccttaaggtgcagatagaagaatgtga

SEQ ID NO: 111908 - DNA, 247 bp, Glycine max
tgggttttagaacatggtgggattgccactgatgatgattatccttacagagctaaagagggtagatgcgaagccaataagatacaagacaaggttacgattgacggatatgagactctaataatgtcagatgagagtgcagaatcagagacagagcaagcgttcttaagcgccatccttgagcaaccaattagtgtctccattgatgcaaaagattttcatttatacaccgggggaatttatgatg

SEQ ID NO: 111909 - DNA, 246 bp, Glycine max
cgacgaccgagactcttacaaccttcaatctggcgatgccctaagagtccctgcaggaaccacatactatgtggttaaccctgacaacgacgagaatctcagaatgataacactcgccatacccgttaacaaacccggtagatttgagagtttcttcctatctagcactcaagctcaacagtcctacttgcaagggttcagcaagaatattctagaggcctcatacgacaccaaattcgaggagat

SEQ ID NO: 111910 - DNA, 246 bp, Glycine max
gtccttaaacactcatcagtcatcaccatggccaagctagttttttccctttgttttctgcttttcagtggctgctgcttcgctttcagttccagagagcagcctcagcaaaacgagtgccagatccaaaaactcaatgccctcaaaccggataaccgtatagagtcagaaggagggctcattgagacatggaaccctaacaacaagccattccagtgtgccggtgttgccctctctcgctgcacc

SEQ ID NO: 111911 - DNA, 245 bp, Glycine max
aaaattcttccaccaagttatgggtttccttgtgttgcttcttttctccctcttaggtctctcttctagttccagcatatcaactcatcgttccatattggaccttgacctaaccaagtttaccaacagaaacaggtgtcttcactgttccaactatggaagagtgagcatggacgtgtctaccataaccacgaagaagaggcaaagagacttgagattttcaagaataacttgaactatatcag

SEQ ID NO: 111912 - DNA, 247 bp, Glycine max
aaattcttccaccaagttatgggtttccttgtgttgcttcttttctccctcttaggtctctcttctagttccagcatatcaactcatcgttccatattggaccttgacctaaccaagtttaccacacagaaacaggtgtcttcactgttccaactatggaagagtgagcatggacgtgtctaccataaccacgaagaagaggcaaagagacttgagattttcaagaataacttgaactatatcaggg

SEQ ID NO: 111913 - DNA, 245 bp, Glycine max
atcctagtacaccgtattaaagaatttaagatatactatgatgagagcgcggttcccattactgttgctgggagttgttttcctggcatcagtttctgtctcatttggcattgcgtattgggaaaagcagaaccccagtcacaacaagtgcctccgaagttgcaatagcgagaaagactcctacaggaaccaagcatgccacgctcgttgcaacctccttaaggtggaggaagaagaagaatgcg

SEQ ID NO: 111914 - DNA, 245 bp, Glycine max
ggccaagctagttttttccctttgttttctgcttttcagtggctgctgcttcgctttcagttccagagagcagcctcagcaaaacgagtgccagatccaaaaactcaatgccctcaaaccggataaccgtatagagtcagaaggagggctcattgagacatggaaccctaacaacaagccattccagtgtgccggtgttgccctctctcgctgcaccctcaaccgcaacgcccttcgtagacctt

SEQ ID NO: 111915 - DNA, 246 bp, Glycine max
aacaattccttcacttgcagcactgttgcatcatcatcttcattgcaaaaccctaaacttcaccttcaaccatgaccacacaagtaccaccacacagtgtccaagtccacacaacaacacacatagacgaagctggcgtcgtcccccccggagcccgtttcgaaccgccgcgttatgaagccggcgtcaaagcgccctccatttaccattccgagagaggtccaacgacttcccaggtcctcgccg

SEQ ID NO: 111916 - DNA, 243 bp, Glycine max
ctttaacaaggattgcttagttgttcaatggtcaggagacaatccgaatagtgtggcaggtttgaccctaaatattccaggagatctcgccatcagccttggcactagtgatactgtatttatgatcactaaagatcctaatccaggattagagggacatgtcttccccaatccagttgatgcagaaggttacatggtaatgctggtatacaaaaatggatcccttacccgagaagatgtgcg

SEQ ID NO: 111917 - DNA, 246 bp, Glycine max
cattcccacgcccacctcatcagaaggaagagcgaaagcaagaggaagatgaggatgaggagcagcagcgagagagcgaagaaagtgaagattctgagttacgaagacataagaataagaaccctttctcttcggctctaacaggttcgaaactctcttcaaaaaccaatatggtcgcattcgcgtcctccagaggttcaaccaacgctccccacaacttcagaatctccgagactaccgcatttt

SEQ ID NO: 111918 - DNA, 243 bp, Glycine max
aatcaaacgagcttttacccttttgttccacacgagatttgaagctagaggtgtcagaaaagttaccacagggataactggcttgtggcagccaagcgttcatagcgacgttgctttttgatccttcgatgtcggctcttcctatcattgtgaagcagaattcaccaagtgttggattgttcaccaaccatagggacgtgagctgggttagaccgtcgtgagacaggtagtttacccactgat

SEQ ID NO: 111919 - DNA, 247 bp, Glycine max
tctgactcctatagtttcctctgctaattccatatccccgttttccttcactcttgaaccccgattcatttccaccagcacaagaagctaggctgcaatatcaataccttctcacatgaaagcttggacatactctgagtatggataatccaaggaagttctcaagtttaatcagagtgtggctttgcctgaggtgaaggaagaccaggtcctcatcaaggtcgctgctgtttcccttaacccaatt

SEQ ID NO: 111920 - DNA, 247 bp, Glycine max; identical to SEQ ID NO: 105284

SEQ ID NO: 111921 - DNA, 245 bp, Glycine max
gccttgctcggttatcactggtcaacgacggtggcgttatagaacaaacatttttgtggggaaggtattctgtggaaatgtctgctgtagtttacaaggattgggtttttacagatcaagcattgcctgctgatcttataaaaagaggaatggcaattgaggatccatcgtgccctcatggcattcgccttgttatagaggactacccttatgctgttgatggacttgagatatgggatgctatc

SEQ ID NO: 111922 - DNA, 247 bp, Glycine max
atgaagataaacctcgtcctagtcgaccaagccaaggaaagcgtgaacaagaccaggaccaggacgaggacgaagatgaagatgaagatcaacctcgcaagagccgcgaatggagatcgaaaaagacacaacccagaagacctagacaagaagaaccacgtgaaagaggatgcgagacaagaaacggggttgaggaaaatatctgcaccttgaagcttcacgagaacattgctcgcccttcacgcgc

SEQ ID NO: 111923 - DNA, 245 bp, Glycine max
gcaagatagctgccgcaagcagctccagggggtgaacctcacgccctgcgagaagcacatcatggagaagatccaaggccgcggcgatgacgatgatgatgatgacgacgacaatcacattctcaggaccatgcggggaagaatcaactacataaggaggaacgaaggaaaagacgaagacgaagaagaagaaggacacatgcagaagtgctgcacagaaatgagcgagctgagaagccccaaat

SEQ ID NO: 111924 - DNA, 242 bp, Glycine max
ctcgagccgttaattattaacacttccttagttcaatatggggaagcccttcactctctctctttcttccctttgcttgctactcttgtcgagtgcatgctttgctattagctccagcaagctcaacgagtgccaactcaacaacctcaacgcgttggaacccgaccaccgcgttgagtccgaagtggtttgattcaaacatggaactctcaacaccctgagctgaaatgcgccggtgtcac

SEQ ID NO: 111925 - DNA, 243 bp, Glycine max
cagaaagcaagctcatcctagagttttaaaaatggcagcagcctcctccatggctctctcttccccatccttggctggcaaggccgtgaagctgggcccatcagcccccgaagtcgggagggtcagcatgaggaagaccgtcaccaagcaggcctcctccggaagcccatggtacggcccagaccgcgtcaagtacttgggcccattctctggcgagcccccgtcctacctcactggcgagtt

SEQ ID NO: 111926 - DNA, 241 bp, Glycine max
cttattaacactttccttagttcaatatggggaagcccttcttcactctctctctttcttccctttgcttgctactcttgtcgagtgcatgctttgctattacctccagcaagttcaacgagtgccaactcaacaacctcaacgcgttggaacccgaccaccgcgttgagtccgaaggtggtcttattgaaacatggaactctcaacaccctgagctgcaatgcgccggtgtcactgtttc

SEQ ID NO: 111927 - DNA, 243 bp, Glycine max
ctttattccttttgtaatttcattcattcttaatctttgtgaaaaataatgttcatcgagaattttaaggttgagtgtcctaatgtgaagtacaccgagactgagattcagtccgtgtacaactacgaaaccaccgaacttgttcacgagaacaggaatggcacctatcagtggattgtcaaacccaaatctgtcaaatacgaatttaaaaccaacatccatgttcctaaattaggggtaatg

SEQ ID NO: 111928 - DNA, 243 bp, Glycine max
ggcagaaagcaagctcatcctagagttttaaaaatggcagcagcctcctccatggctctctcttccccatccttggctggcaaggccgtgaagctgggcccatcagcccccgaagtcgggagggtcagcatgaggaagaccgtcaccaagcaggcctcctccggaagcccatggtacggcccagaccgcgtcaagtacttgggcccattctctggcgagcccccgtcctacctcactggcgag

SEQ ID NO: 111929 - DNA, 245 bp, Glycine max
agcaaatattactctgatgataatcaggtatgagaagtatcatgtttgctatggaggtcaagaggaagagaggaaagctaattataccgatatggttaataaatactacgatcttgttaccagcttttatgagtttggctggggggaatctttccattttgcacccagatggaaaggggaatctcttcgagagagcatcaagcgacatgaacacttccttcctttacaacttggactgaagccag

SEQ ID NO: 111930 - DNA, 246 bp, Glycine max
ctctcttctcttctgcatcgcccacacttgcagcgcctccaaatggcagcaccagcaagatagctgccgcaagcagctccagggggtgaacctcacgccctgcgagaagcacatcatggagaagatccaaggccgcggcgatgacgatgatgatgatgacgacgacaatcacattctcaggaccatgcggggaagaatcaactacataaggaggaacgaaggaaaagacgaagacgaagaagaaga

SEQ ID NO: 111931 - DNA, 246 bp, Glycine max
cactcatcaccatggccaagcttgttctgtccctttgtgtccttcttttcagtggctgcttcgctctgagagagcaggcacagcaaaatgagtgccagatccaaaagctgaatggcctcaaaccggataaccgtatagagtcggaaggtgggttcattgagacctggaaccctaacaacaagccactccagtgtgccggtgttgccctctctcgctgcacccttaaccgcaatgcccttcgtagac

SEQ ID NO: 111932 - DNA, 163 bp, Glycine max
attgtctttgaacactcatcaccatggccaagcttgctctttccctttgtgtccttcttttcagtggctgcttcgctctgagagagcatgcacagcgaaatgagtgccagatccacaagctgaatgtcctcataccggataagggtatagagtcgtaaggtgg

SEQ ID NO: 111933 - DNA, 242 bp, Glycine max
cagactcgtgaacatgctctgctttcattcacccttggtgtgaaacagatgatttgctgctgtaacaaaatggatgctactacacccaagtattccaaggccaggtatgatgaaattgtgagtaaagtctcttcctacttgaagaaagtaggatacaaccctgacaagattccttttgttcctatctctggttttgagggagacaacatgattgagaggtccacaaaccttgactggtacaa

SEQ ID NO: 111934 - DNA, 245 bp, Glycine max
aaacattctctccattgtctttgaacactcatcaccatggccaagcttgttctttccctttgtttccttcttttcagtggctgcttcgctctgagagagcaggcacagcaaaatgagtgccagatccaaaagctgaatgccctcaaaccggataaccgtatagagtcggaaggtgggttcattgagacctggaaccctaacaacaagccattccagtgtgccggtgttgccctctctcgctgcac

SEQ ID NO: 111935 - DNA, 243 bp, Glycine max
ataaagatgagtttgaagaacaacatggtggtgctaaaggtgtgtttgttgcttcttttccttgtgggggttacagctgcacgcatggaactgagcttcttcaaaagtgatcagtcatcaagttatgatgatgatgagtattcaaaaccatgctgtgatctctgcatgtgcacacgctcaatgcctcctcaatgcagctgtgaagatattaggctgaattcatgccactcagattgtaagagc

SEQ ID NO: 111936 - DNA, 241 bp, Glycine max; identical to SEQ ID NO: 104135

SEQ ID NO: 111937 - DNA, 242 bp, Glycine max
aatcattccaatacacatggcttccgaaaggcaagcgttgatgcttattctcttaacaacattcttcttcaccataaagccttcacaggccagtactactggtggcataacaatctactggggccaaaacattgacgacggcaccttgacttccacatgcgacactggaaacttcgagattgtcaacctagctttcctcaatgcgtttggttgcggcataactccatcatggaacttcgctg

SEQ ID NO: 111938 - DNA, 243 bp, Glycine max
cctgggtctgcacaagctgttgagaagctattaaagaaccaaagagaatcctactttgtggatgctcagcctaagaagaaagaggaggggaataagggaagatagggtcctttgtcttcagatttgagggcttttttactgaataagtatgtactaaaatgtatgctgtaatagctcatagtgagcgaggaaagtatcgggctatgtaactatgactagagcttcaactatgaataaataaat

SEQ ID NO: 111939 - DNA, 243 bp, Glycine max
tgtgtgtgtatggtgatgataacttgaatagtgttcatgaatatgtcaagccttactttagtggttctaaattgaaaagctttctagctggtcataatatcaccattactgatggtattgacaaactagtgcaactttgcagtttagaaagttagcagattgtgactttctcaagagaaactttaagcagatgtcgaatgtcttgtgggtggctcctgaggacaaggcgagtttatggtcaca

SEQ ID NO: 111940 - DNA, 244 bp, Glycine max
aaatgaccaagttcacaatcctcctcatctctcttctcttctgcatcgcccacacttgcagcgcctccaaatggcagcaccagcaagatagctgccgcaagcagctccagggggtgaacctcacgccctgcgagaagcacatcatggagaagatccaaggccgcggcgatgacgatgatgatgatgacgacgacaatcacattctcaggaccatgcggggaagaatcaactacataaggaggaa

SEQ ID NO: 111941 - DNA, 245 bp, Glycine max
ctccattggtccttaaacactcatcagtcatcaccatggccaagctagttttttccctttgttttctgcttttcagtggctgctgcttcgctttcagttccagagagcagcctcagcaaaacgagtgccagatccaaaaactcaatgccctcaaaccggataaccgtatagagtcagaaggagggctcattgagacatggaaccctaacaacaagccattccagtgtgccggtgttgccctctct

SEQ ID NO: 111942 - DNA, 240 bp, Glycine max
tacaaattagcatatttgtcagccttcttagaggggttttacgtaatggagttttatactttcttcgggaccctgctgatccaaactacaatccgttccgtgatctgatagatgatcctgtgcacaaacatgctcgcagggttctgttatctgttgcagtttatgggagtctgattgtgatgctggtattcttgcctgtcaaacatgccatgcggatggcaccttcgattttcccgcttg

SEQ ID NO: 111943 - DNA, 240 bp, Glycine max
agggtctaataaaatgagtatggtacatatctatttgaagattgttagtcaaaaagaatgggcaagagagaagcatatttagggcaatgacattcttaaagaaattaaaaagctaacagcaaaaacaattaataaagatgagtttgaagaacaacatggtggtgctaaaggtgtgtttgttgcttcttttccttgtgggggttacagctgcacgcatggaactgagcttcttcaaaagtg

SEQ ID NO: 111944 - DNA, 240 bp, Glycine max
gttcaatatcctagtataccttaataaataatttaagatactatgatgagagcacggttcccattactgttgctgggacttgttttcctggcttcagtttctgtctcatttggcattgcttactgggaaaaagagaaccccaaacacaacaagtgtctccagagttgcaatagcgagagagactcgtacaggaaccaagcatgccacgctcgttgcaacctccttaaggtggagaaagaa

SEQ ID NO: 111945 - DNA, 242 bp, Glycine max
ataatactcagcatggctaagcttgttctttccctttgttttctgcttttcagtggctgctgcttcgctttcagtttcagagagcagccacagcaaaacgagtgccagatccaacgcctcaatgccctcaaaccggataaccgtatagagtcagaaggtggcttcattgagacatggaaccctaacaacaagccattccagtgtgccggtgttgccctctctcgctgcaccctcaaccgcaa

SEQ ID NO: 111946 - DNA, 241 bp, Glycine max
agaaggaggaacacgaatggcatcgcaaggaggaaaaacacggaggaaagggaagtgaagaggaacaagatgaacgtgaacacccacgcccacaccaacctcatcaaaaggaagaggaaaagacagaatggcaacacaagcaggaaaagcaccaaggaaaggaaagtgaagaagaagaagaagaccaagacgaggatgaggagcaagacaaagagagccaagaaagtgaaggttctgagtc

SEQ ID NO: 111947 - DNA, 241 bp, Glycine max
gtcatatgcttgtctcaaagattaagccatgcatgtgtaagtatgaactaattcagactgtgaaactgcgaatggctcattaaatcagttatagtttgtttgatggtatctactactcggataaccgtagtaattctagagctaatacgtgcaacaaaccccgacttctggaagggatgcatttattagataaaaggtcaacacaggctctgcctgttgctttgatgattcatgataactc

SEQ ID NO: 111948 - DNA, 244 bp, Glycine max
taaaattcttccaccaagttatgggtatacttgtgttgcttcttttctccctcttaggtctctcttctagttccagcatatcaactcatcgttccatattggaccttgacctaaccaagtttaccacacagaaacaggtgtcttcactgttccaactatggaagagtgagcatggacgtgtctaccataaccacgaagaagaggcaaagagacttgagattttcaagaataacttgaactatat

SEQ ID NO: 111949 - DNA, 254 bp, Glycine max
caatattcgaagagttaggtatatcagttgatgttgtagctacaagtgaagttagtatttccttgacattggatccatcaaagctatggagcagagaactaattcaacaggaacttgactatgttgtcgaagaactggaaaaaattgcagtagtaaatctcttaaagaccagatccataatctctctcattggaaatgttcagagatcatcactaatattggagaaggcctttcatgttcttcgaactcttggg

SEQ ID NO: 111950 - DNA, 252 bp, Glycine max
cggctcgagcggctcgagctcgagccgagatcggctcgagctctccattgtctttgaacactcatcaccatgaccaagcttgttctgtccctttgtttccttcttttcagtggatgcttcgctctgagagagcaggcacagcaaaatgagtgccagatccaaaagctgaatgccctcaaaccggataaccgtatagagtcggaaggtgggttcattgagacctggaaccctaacaacaagccattccagtgt

SEQ ID NO: 111951 - DNA, 248 bp, Glycine max; identical to SEQ ID NO: 105618

SEQ ID NO: 111952 - DNA, 249 bp, Glycine max
attctcttctttattccttttgtaatttcattcattcttaatctttgtgaaaaataatgttcatcgagaattttaaggttgagtgtcctaatgtgaagtacaccgagactgagattcagtccgtgtacaactacgaaaccaccgaacttgttcacgagaacaggaatggcacctatcagtggattgtcaaacccaaatctgtcaaatacgaatttaaaaccaacatccatgttcctaaattaggggtaa

SEQ ID NO: 111953 - DNA, 249 bp, Glycine max
cggaaaccttgcagggtctatcattggtcttgaatgacacatactcaaagttatcgctcgagggtctatcattggtcttgaatgacacatactcaaagttagaccctcgatcggaaaccttgcaggggcaaactcattgttgaacgcattgccagaggaagtgattcagcacacttttaacctaaagagccagcaggccaggcaggtgaagaacaacaaccctttcagcttcctggttccacctcagga

SEQ ID NO: 111954 - DNA, 249 bp, Glycine max
ctctccattggtccttaaacactcatcagtcatcaccatggccaagctagttttttccctttgttttctgcttttcagtggctgctgcttcgctttcagttccagagagcagcctcagcaaaacgagtgccagatccaaaaactcaatgccctcaaaccggataaccgtatagagtcagaaggagggctcattgagacatggaaccctaacaacaagccattccagtgtgccggtgttgccctctctcg

SEQ ID NO: 111955 - DNA, 248 bp, Glycine max
tctctccattgtctttgaacactcatcaccatggccaagcttgttctttccctttgtttccttcttttcagtggctgcttcgctctgagagagcaggcacagcaaaatgagtgccagatccaaaagctgaatgccctcaaaccggataaccgtatagagtcggaaggtgggttcattgagacctggaaccctaacaacaagccattccagtgtgccggtgttgccctctctcgctgcacccttaaccg

SEQ ID NO: 111956 - DNA, 246 bp, Glycine max
agaaattaagagagttttttttgttcctcactgaccaagccatagcgatgagaaccaaactttctttagctatctttttcttttttcttttagccttattttcaaacctagcctttggcaaatgtaaagaaaccgaggtagaagaagaagaccctgagctcgtaacatgcaaacaccaatgccaacagccacagcaatacactgagggtgacaagcgggtatgcttgcaaagatgtgacaggtatc

SEQ ID NO: 111957 - DNA, 248 bp, Glycine max
gaactagttcaatatcctagtataccttaataaataatttaagatactatgatgagagcacggttcccattactgttgctgggacttgttttcctggcttcagtttctgtctcatttggcattgcttactgggaaaaagagaaccccaaacacaacaagtgtctccagagttgcaatagcgagagagactcgtacaggaaccatatatgccacgctcgttgcaacctccttaaggtggagaaagaaga

SEQ ID NO: 111958 - DNA, 255 bp, Glycine max
attctctccattgtctttgaacactcatcaccatggccaagcttgttctttccctttgtttccttcttttcagtggctgcttcgctctgagagagcaggcacagcaaaatgagtgccagatccaaaagctgaatgccctcaaaccggataaccgtatagagtcggaaggtgggttcattgagacctggaaccctaacaacaagccattccagtgtgccggtgttgccctctctcgctgcacccttaaccgcaatg

SEQ ID NO: 111959 - DNA, 251 bp, Glycine max
cgcatcaggtctccaaggtgaacagcctctggtcgatggaacaatgtaggcaagggaagtcggcaaaatggatccgtaacctcgggaaaaggattggctctgagggctgggcacgggggtcccagtcccgaacccgtcggctgtcggtggactgctcgagctgcttccgcggcgagagcgggtcgtcgcgtgccggtcgggggacggattgggaacgggcccttcggggcctcttccccgggcgtcgaaca

SEQ ID NO: 111960 - DNA, 250 bp, Glycine max
ggcaagttctttgagatcaccccagagaaaaacccccagcttcgggacttggatatcttcctcagtattgtggatatgaacgagggagctcttcttctaccacacttcaattcaaaggcgatagtgatactggtaattaatgaaggagatgcaaacattgaacttgttggcctaaaagaacaacaacaggagcagcaacaggaagagcaacctttggaagtgcggaaatatagagccgaattgtctgaac

SEQ ID NO: 111961 - DNA, 250 bp, Glycine max
caaggttctgtttggtagagaggaggggcagcaacaaggggaggagaggctgcaagagagtgtgattgtggaaatctcaaagaaacaaattcgggaactgagcaaacatgccaaatctagttcaaggaaaaccatttcttctgaagataaacctttcaacttgagaagccgcgaccccatctattccaacaagcttggcaagttgtttgagattaccccagagaaaaaccctcagcttcgggacttggat

SEQ ID NO: 111962 - DNA, 236 bp, Glycine max
gcagcaacaaacaaacatcttttaccttaaacaacaatggccgatgccgaggatattcaacccctcgtttgcgataatggaaccggaatggtcaaggctggttttgctggagatgatgcaccgagggctgtgttccctagcattgtggggcgtccacgtcacactggggtgatggttgggatggcgcagaaagatgcgtatgttggggacgatgcttactccaagaggggtatttt

SEQ ID NO: 111963 - DNA, 248 bp, Glycine max
tggtccttaaacactcatcagtcatcaccatggccaagctagttttttccctttgttttctgcttttcagtggctgctgcttcgctttcagttccagagagcagcctcagcaaaacgagtgccagatccaaaaactcaatgccctcaaaccggataaccgtatagagtcagaaggagggctcattgagacatggaaccctaacaacaagccattccagtgtgccggtgttgccctctctcgctgcacc

SEQ ID NO: 111964 - DNA, 247 bp, Glycine max
ctcaacgattgcctcaacgacatcactcgcgctcttcttcaatccgatgttcaattcaagcttgtccgcgacatgcagaccaacatcaagaacattgtcaacctcgacgatctcgctgccggtcacaacaaacgcaggatcatccaacaagctgtgtttaacgaactctgcaaaattctggaccctgggaagccctctttcactcccaaaaagggcaaaacaagtgttgtcatgtttgttggtttgc

SEQ ID NO: 111965 - DNA, 198 bp, Glycine max
cttcgggacttggatatcttcctcagtattgtggatatgaacgaaggagctcttcttctaccacacttcaattcaaaggcgatagtgatactggtaattaatgaaggagatgcaaacattgaacttgttggcctaaaagaacaacaacaggagcagcaacaggaagagcaacctttggaagtgcggaaatatagagcc

SEQ ID NO: 111966 - DNA, 256 bp, Glycine max
gcacaatgcatcatctcaaagaaattaagagagttttttttgttcctcactgaccaagccattgcgatgagaaccaaactttctttagctatctttttcttttttcttttagccttattttcaaacctagcctttggcaaatgtaaagaaaccgaggtagaagaagaagaccctgagctcgtaacatgcatacaccaatgccaacagccacagcaatacactgagggtgacaagcgggtatgcttgcaaagatgtg

SEQ ID NO: 111967 - DNA, 252 bp, Glycine max
ctccattggtccttaaacactcatcagtcatcaccatggccaagctagttttttccctttgttttctgcttttcagtggctgctgcttcgctttcagttccagagagcagcctcagcaaaacgagtgccagatccaaaaactcaatgccctcaaaccggataaccgtatagagtcagaaggagggctcattgagacatggaaccctaacaacaagccattccagtgtgccggtgttgccctctctcgctgca

SEQ ID NO: 111968 - DNA, 242 bp, Glycine max
ctgctcgcgttaaaggtcatcgaagagttgatcactctcctctttgagccgtaaaggttcaatacaacgagtgcttgttttcttagggacaagcattgtacttatgtatgattctgtgtaaccatgagtcttccacgttgtactaatgtgaagggcaaaaataaaacacagaacaagttcgtttttctcaaataatgtgaaggtagaaaatggaaccatgcctcctctcttgcatgtgattt

SEQ ID NO: 111969 - DNA, 249 bp, Glycine max
gttcaatatcctagtacaccgtattaaagaatttaagatatactatgatgagagcgcggttcccattactgttgctgggagttgttttcctggcatcagtttctgtctcatttggcattgcgtattgggaaaagcagaaccccagtcacaacaagtgcctccgaagttgcaatagcgagaaagactcctacaggaaccaagcatgcgacgctcgttgcaacctccttaaggtggaggaagaagaagaat

SEQ ID NO: 111970 - DNA, 245 bp, Glycine max
tctctccattgtctttgaacactcatcaccatggccaagcttgttctttccctttgtttccttcttttcagtggctgcttcgctctgagagagcaggcacagcaaaatgagtgccagatccaaaagctgaatgccctcaaaccggataaccgtatagagtcggaaggtgggttcattgagacctggaaccctaacaacaagccattccagtgtgccggtgttgccctctctcgctgcacccttaa

SEQ ID NO: 111971 - DNA, 245 bp, Glycine max
gttggagatctcgtctttgaagtttctaagatgacttctccctacatcaaatgtacagtctctttcttcatagcatttggaaatttggctgatgacaccatcaattttgaggcttttccccacaagctggtgcagtttggagagattcaggaaaaagttgtattgaaattttcacaagaggaatttcttacagcttggtcaactcaggtgcgtcctacaacaactctgttggctgatgggtgtcc

SEQ ID NO: 111972 - DNA, 243 bp, Glycine max
ggaaaaagttgtattgaaattttcacaagaggaatttcttacagcttggtcaactcaggtgcgtcctacaacaactctgttggctgatgggtgtccatatttgtatgctatggtgcatgatagttcagtgtctacaataccaggtgattttgtcattggtgttaagttgacaaccataaacaatatgtgtgcatatgggctcaatcctggtatttcaggttctcgtcttttgggcacattcct

SEQ ID NO: 111973 - DNA, 245 bp, Glycine max
cttaattattaacacttccttagttcaatatggggatgcccttcactctctctctttcttccctttgcttgctactcttgtcgagtgcatgctttgctattagctccagcaagctcaacgagtgccaactcaacaacctcaacgcgttggaacccgaccaccgcgttgagtccgaaggtggtttgattcaaacatggaactctcaacaccctgagctgaaatgcgccggtgtcactgtttccaaa

SEQ ID NO: 111974 - DNA, 248 bp, Glycine max
attttatccaattgaaattttaaaaatgactgggataaacttaagaattcaattattgaaattgaataagtaaacaatttaattggattggtcgaatggtatcaaaaaaatggagtactaactcccatttcttatttattattgaattaaccgatcaacttgctttgttatcgaacatttctttttgatttcaaaaattttccggaaaaaatttgaatctatttttatatgcgaatcaatcctactac

SEQ ID NO: 111975 - DNA, 251 bp, Glycine max
ctccattggtccttaaacactcatcagtcatcaccatggccaagctagttttttccctttgttttctgcttttcagtggctgctgcttcgctttcagttccagagagcagccttcgcaaaacgagtgccagatccaaaaactcaatgccctcaaaccggataaccgtatagagtcagaaggagggctcattgagacatggaaccctaacaacaagccattccagtgtgccggtgttgccctctctcgctgc

SEQ ID NO: 111976 - DNA, 252 bp, Glycine max
ctcgagccgaaagatcatacatagtagtgttggtgggttgcaaagatgcttgggggtcttatccataggggtcataagataaaagggacagtggtgttgatgcgcaagaatgtgttggacgtgaatagcgtaaccagcgttgggggaattattggtcaaggtctcgacttagttggctcaacactcgatactcttactgccttcttgggccgatccgtgtctctccagcttattagtgctaccaaagctgat

SEQ ID NO: 111977 - DNA, 251 bp, Glycine max
atcctacttgcaaggattcagcaggaacattttagaggcctcctacgataccaaattcgaggagataaacaaggttctgtttagtagagaggaagggcagcagcaaggggagcagaggctgcaagagagcgtgattgtggaaatctcgaaggaacagattcgggcactgagcaaacgtgccaaatctagatcaaggaaaaccatttcttctgaagataaaccttttaacttgagaagccgcgaccccatct

SEQ ID NO: 111978 - DNA, 249 bp, Glycine max
ctcgagccgaatcggctcgagggaagagcagccacagtgcgtggacacagacaaaggttgacaacgccaaagcaaaaggagcagaaatggcattgatgagaccatttgcacaatgagacttcgccaaaacattggtcagaattcatcacctgacatctacaaccctcaagctggtagcatcacaaccgccaccagccttgacttcccagccctctggcttctcaaactcagtgcccagtatggatcact

SEQ ID NO: 111979 - DNA, 247 bp, Glycine max; identical to SEQ ID NO: 105284

SEQ ID NO: 111980 - DNA, 246 bp, Glycine max
tcctagtacaccgtattaaagaatttaagatatactatgatgagagcgcggttcccattactgttgctgggagttgttttcctggcatcagtttctgtctcatttggcattgcgtattgggaaaagcagaaccccagtcacaacaagtgcctccgaagttgcaatagcgagaaagactcctacaggaaccaagcatgccacgctcgttgcaacctccttaaggtggaggaagaagaagaatgcgag

SEQ ID NO: 111981 - DNA, 245 bp, Glycine max
caagtgtctccagagttgcaatagcgagagagactcgtacaggaaccaagcatgccacgctcgttgcaacctccttaaggtggagaaagaagaatgtgaagaaggtgaaattccacgaccacgaccacgaccacaacacccggagagggaacctcagcaacccggtgagaaggaggaagacgaagatgagcaaccacgtccaatcccattcccacgcccacaacctcgtcaagaagaagagcacg

SEQ ID NO: 111982 - DNA, 246 bp, Glycine max
ctccattggtccttaaacactcatcagtcatcaccatggccaagctagttttttccctttgttttctgcttttcagtggctgctgcttcgctttcagttccagagagcagcctcagcaaaacgagtgccagatccaaaaactcaatgccctcaaaccggataaccgtatagagtcagaaggagggctcattgagacatggaaccctaacaacaagccattccagtgtgccggtgttgccctctctc

SEQ ID NO: 111983 - DNA, 244 bp, Glycine max
gcttggcaagttctttgagatcaccccagagaaaaacccccagcttcgggacttggatatcttcctcagtattgtggatatgaacgagggagctcttcttctaccacacttcaattcaaaggcgatagtgatactggtaattaatgaaggagatgcaaacattgaacttgttggcctaaaagaacaacaacaggagcagcaacaggaagagcaacctttggaagtgcggaaatatagagccgaa

SEQ ID NO: 111984 - DNA, 244 bp, Glycine max
tcctagtataccttaataaataatttaagatactatgatgagagcacggttcccattactgttgctgggacttgttttcctggcttcagtttctgtctcatttggcattgcttactgggaaaaagagaaccccaaacacaacaagtgtctccagagttgcaatagcgagagagactcgtacaggaaccaagcatgccacgctcgttgcaacctccttaaggtggagaaagaagaatgtgaagaa

SEQ ID NO: 111985 - DNA, 247 bp, Glycine max
actagtcaaatatagagaagaagagttgcataatttaagaggagatggaactggaaaacgcaaagagtgggaaaggatctatgattatgatgtctacaatgatttaggtgatccggataaaggtgaaaatcatgcccgtcctgttcttggaggaaatgacacctttccttatcctcgtagggggagaactggtagaaaaccaacaaggaaagatcctaatagtgagagtaggagcaatgatgtttat

SEQ ID NO: 111986 - DNA, 251 bp, Glycine max
tgacaacttcgagtatgtgtcattcaagaccaatgatacacccatgatcggcactcttgcaggggcaaactcattgttgaacgcattaccagaggaagtgattcagcacactttcaacctaaaaagccagcaggccaggcagataaagaacaacaaccctttcaagttcctggttccacctcaggagtctcagaagagagctgtggcttagagccctttttgtatgtgctaccccacttttgtctttttgg

SEQ ID NO: 111987 - DNA, 254 bp, Glycine max
aaaatctttatctcaatatgtcttaccggcgttcgaatctgttttcgatttgaacttcacgccaaatgagtttgatagcttccaagatgtgcgtgacctccacgaaggtggaattaagcttcctacagaagtaattagcacaattatgcccttaccggtggtcaaagaactctttcgtacagatggtgaacaagtcctcaagtttccaccacctcatgtcatccaagtgagtaagtctgcatggatgaccgatg

SEQ ID NO: 111988 - DNA, 254 bp, Glycine max
tgatattgccatcttgactggaggtactgtaatcagagaagaggttggccttactttggacaaagctgggaaagaggttctcggatatgcctccaaggtggtgctcaccaaggatacaaccacaattgttggtgatggaagtacccaggaagcagtgaacaagagagttgcacaaattaggaacctaattgaggctgctgagcaagagtatgagaaagaaaagctgaatgagagaattgctaaattgtctggtg

SEQ ID NO: 111989 - DNA, 249 bp, Glycine max
gttcaatatcctagtataccttaataaataatttaagatactatgatgagagcacggttcccattactgttgctgggacttgttttcctggcttcagtttctgtctcatttggcattgcttactgggaaaaagagaaccccaaacacaacaagtgtctccagagttgcaatagcgagagagactcgtacaggaaccaagcatgccacgctcgttgcaacctccttaaggtggagaaagaagaatgtgaa

SEQ ID NO: 111990 - DNA, 244 bp, Glycine max
cttcgatcttcgatcttcgtcgctgaaaatgagagagtgcatttcaatccacatcggccaggccgggattcaggttggaaacgcctgctgggagctttactgcctcgaacacggcattcagcctgatgggcagatgccaagtgacaagaccgttggtggaggtgatgatgctttcaacaccttcttcagtgaaactggggcaggaaagcacgtgccccgcgcgatttttgtagatcttgagccc

SEQ ID NO: 111991 - DNA, 246 bp, Glycine max
ctctcttatcagtatgtattcaaaaccctagctaggtttttggagctccctttctttctttccgatcccaccgtcaaacttgtcattctatatgctttgcagggtccattgaatatgtctctgtcgttggatcttcctcccaagggtggcttcagttttgatctatgccgaagaaacgcaatgcttcaaaacaagggcctcaaagccccaacctttctcaaaactggcaccactattgtcggttta

SEQ ID NO: 111992 - DNA, 245 bp, Glycine max
actcgagcgaatcggctcgaggaagatgaggatgaggagcagcaacgagagagcgaagaaactgaagattctgagttacgacgacataagaataagaacccttttctcttcggctctaacaggttcgaaactctcttcaaaaaccaatatggtcgcattcgcgtcctccagaggttcaaccaacgctccccacaacttcagaatctccgagactaccgcattttggagttcaactccaaacccaa

SEQ ID NO: 111993 - DNA, 244 bp, Glycine max
gcggtttcctttgttggtgttgctgggaactgttttcctggcatcagtttgtgtctcattaaaggtgagagaggatgagaataaccctttctacttgagaagctctaacagcttccaaactctctttgagaaccaaaacggtcgcattcgtctcctccagagattcaacaaacgctccccacaacttgagaaccttcgagactaccggattgtccagtttcagtcaaaacccaacacaatcctt

SEQ ID NO: 111994 - DNA, 241 bp, Glycine max
cgaaatagtatcttcgtttgttcaatatgtttggttcattaggcatggcacaggaatctggtatgttcatggttagccagacaattggcagtgttttgtgctgcaaatgtggaattccaatgcaacccaatgctgctaatatgtgtgtcaagtgtctgcgatcggaagttgatattacagaaggactgctgaagcgtcttgtgctggtgcattgccctgagtgtgacagttacttgcagcc

SEQ ID NO: 111995 - DNA, 248 bp, Glycine max
  unsure (1)..(248): unsure at all n locations
tcattngacgaanagtgagagagtctnatctgtcgtctctgatctctgatcgcatcttcattccgaaaatggctgnttcggctatcantggagcgaggctaactctagggangtctctntcctcttcnacgcgatcannaacnncangcaatggcncgnatctatcgaccccaagacacgataanaaactcactcntaccaagnccgaggaagtntcntgtggccaaggantgagtcccacttangat

SEQ ID NO: 111996 - DNA, 251 bp, Glycine max
gttcagcaaaaagtacttgcaagctcccaaggatgtgtcgcagcaaatcaaaatggccaacaagaaaatgaagaaggaacaatattcttgtgaccatccacctgcatcatgggattggaggaaaaaaggtgtcatcacccaagtaaagtaccaagggggctgtggaagcggttgggcgttttctgccaatcgaaccatagaagcagcacatgcaatagcaacaggagaccttgttagcctttctgaacaag

SEQ ID NO: 111997 - DNA, 248 bp, Glycine max
cttcaaacttaattattaacacttccttagttcaatatggggaagcccttcactctctctctttcttccctttgcttgctactcttgtcgagtgcatgctttgctattagctccagcaagctcaacgagtgccaactcaacaacctcaacgcgttggaacccgaccaccgcgttgagtccgaaggagatttgattcaaacatggaactctcaacaccctgagctgaaatgcgccggtgtcactgtttc

SEQ ID NO: 111998 - DNA, 246 bp, Glycine max
gggaggggtgctgatcgttccacaaaactttgcggtggctgcaaaatcccagagcgataactttgagtatgtgtcattcaccagccttgacttcccagccctctggcttctcaaactcagtgcccagtatggatcactccgcaagaatgctatgttcgtgccacactacaccctgaacgcgaacagcataatatacgcattgaatgggcgggcattggtacaagtggtgaattgcaatggtgagag

SEQ ID NO: 111999 - DNA, 245 bp, Glycine max
ctagtataccttaataaataatttaagatactatgatgagagcacggttcccattactgttgctgggacttgttttcctggcttcagtttctgtctcatttggcattgcttactgggaaaaagagaaccccaaacacaacaagtgtctccagagttgcaatagcgagagagactcgtacaggaaccaagcatgccacgctcgttgcaacctccttaaggtggagaaagaagaatgtgaagaaggt

SEQ ID NO: 112000 - DNA, 245 bp, Glycine max
aaaaggttccaaactctcttcaaaaaccaatatggccacgttcgcgtcctccagaggttcaacaaacgctcccaacagcttcagaatctccgagactaccgcattttggagttcaactccaaacccaacacccttcttctcccccaccatgctgacgctgattacctcatcgttatccttaacgggactgccattcttaccttggtgaacaacgacgaccgagactcttacaaccttcaatctgg

SEQ ID NO: 112001 - DNA, 241 bp, Glycine max
ccaagttatgggtttccttgtgttgcttcttttctccctcttaggtctctcttctagttccagcatatcaactcatcgttccatattggaccttgacctaaccaagtttaccacacagaaacaggtgtcttcactgttccaactatggaagagtgagcatggacgtgtctaccataaccacgaagaagaggcaaagagacttgagattttcaagaataacttgaactatatcagggacatg

SEQ ID NO: 112002 - DNA, 244 bp, Glycine max
ctggtccttaaacactcatcagtcatcaccatggccaagctagttttttccctttgtgctctgctattcagtggctgctgcttcgctttcagttccagagagcagcctcagcaaaacgagtgccagatccaaaaactcaatgccctcaaaccggataaccgtatagagtcagaaggagggctcattgagacatggaatcctaacagcaagccattccagtgtgccggtgttgccctctctcgct

SEQ ID NO: 112003 - DNA, 242 bp, Glycine max
ggtgatctgaaagacaagccatggtggcctaagttgcaaacaattgaagagcttgttgaaatttgcaccattatcatatggactgcttcagccctccatgcagccgttaactttggtcaatatccatatggaggtttcattctgaatcgcccaacttcttctagaaggttgcttcctgagaaaggcaccccagaatatgaagaaatggtgaaaagtcatcaaaaggcttatttgagaactat

SEQ ID NO: 112004 - DNA, 244 bp, Glycine max
cactcatcagtcatcaccatggccaagctagttttttccctttgttttctgcttttcagtggctgctgcttcgctttcagttccagagagcagcctcagcaaaacgagtctgagatccaaaaactcaatgccctcaaaccggataaccgtatagagtcagaaggagggctcattgagacatggaaccctaacaacaagccattccagtgtgccggtgttgccctctctcgctgcaccctcaacc

SEQ ID NO: 112005 - DNA, 248 bp, Glycine max
ccaacctctcaagtccaacctacccctttttcttctcccaccaacttcaccgtcttcttcctcgatcatgtctcacttcaagggcaagtaccatgatgagcttattgtcaatgctgcttacattggcactcctggaaagggtattcttgctgctgatgagtcaacagggacaattggcaagcgtttggccagcatcagtgtagagaatgttgaatccaacaggcgtgctcttagggagctgcttttca

SEQ ID NO: 112006 - DNA, 229 bp, Glycine max
ctcactgacctcaccatggcgaccagagccaagctttctttagctaacttccttttctgtcttttagccttgatttcaaacctaaccttgggcaaacttaaagaaaccgaggtcgaagaagatcccgagctcgtaacatgcaaacaccagtgccaacagcaacggcaatacactgagagtgacaagcgaacatgcttgcgacaatgtgacagtatgaagctagagcgag

SEQ ID NO: 112007 - DNA, 278 bp, Glycine max
gcagcagcgagagagcgaagaaagtgaagattctgagttacgaagacataagaataagaacccttttctcttcggctctaacaggttcgaaactctcttcaaaaaccaatatggtcgcattcgcgtcctccagaggttcaaccaacgctccccacaacttcagaatctccgagactaccgcattttggagttcaactccaaacccaacaccctccttctccccaaccatgctgacgctgattacctcatcgttatccttaacgggactgccattcttt

SEQ ID NO: 112008 - DNA, 265 bp, Glycine max
gttcaatatcctagtacaccgtattaaagaatttaagatatactatgatgagagcgcggttcccattactgttgctgggagttgttttcctggcatcagtttctgtctcatttggcattgcgtattgggaaaagcagaaccccagtcacaacaagtgcctccgaagttgcaatagcgagaaagactcctacaggaaccaagcatgccacgctcgttgcaacctccttaaggtggaggaagaagaagaatgcgaagaaggtcaaat

SEQ ID NO: 112009 - DNA, 188 bp, Glycine max
cattgtctttgaacactcatcaccatggccaagcttattctgtcccttagtgtccttctattcagtggctgcttcgctctgagagagcaggcacagcaaaatgagtgccagatccaaaagctgaatgccctcaaaccggataaccgtatagagtcggcaggtgggttcattgagacctggaaccctaa

SEQ ID NO: 112010 - DNA, 269 bp, Glycine max
ctcgagccgattcggctcgaggggagctggaggtgattcacagcagctgggcaatgcttggtgcccctagctgaactttgccagagatccttgagaagaatggtgtcaaattcggcgaggccgtgtggttcaaggccggtgcacagatcttctcagagggaggccttgattacttgggcaacccaaacctgatccatgctcagagcatctatgctatctgagctgttcaggttgtgctcatggggtttgttgaaggttacagagttggt

SEQ ID NO: 112011 - DNA, 242 bp, Glycine max
ctcaataccaaaatgaccaagcttacaattctcctcatcgctcttctcttcatcgcccacacctgctgcgcctccaaatggcaacagcaccagcaagagagctgccgcgagcggctcaaggggatcaacctcaacccctgtgagcacatcatggagaagatccaagctggccgccgcggcgatgacggcagcgacgaagatcacattctcatcaggaccatgccgggaagaatcactacatc

SEQ ID NO: 112012 - DNA, 270 bp, Glycine max
gttcaatatcctagtataccttaataaataatttaagatactatgatgagagcacggttcccattactgttgctgggacttgttttcctggcttcagtttctgtctcatttggcattgcttactgggaaaaagagaaccccaaacacaacaagtgtctccagagttgcaatagcgagagagactcgtacaggaaccaagcatgccacgctcgttgcaacctccttaaggtggagaaagaagaatgtgaagaaggtgaaattccacgacca

SEQ ID NO: 112013 - DNA, 268 bp, Glycine max
taaaattcttccaccaagttatggagtgacttgtgttgcttctgttctccctcttaggtctcacttctagttccagcatatctactcatcgttccatattggaccttgacctaaccaagtttaccacacagaaacaggtggcttcactgttccaactatggaagagtgagcatggacgtgtctaccataaccacgaagaagaggcaaagagacttgagattttcaagcataacttgaactatatcagggacatgaatgcacacagaaa

SEQ ID NO: 112014 - DNA, 282 bp, Glycine max
ctcaaactcgagccgtcctagtataccttaatacataatttaagatactatgatgagagcacggttacacattactgttgctgggacttgttttcctggcttcagtttctgtctcatttggcattgcttactgggaaatagagaaccccaaacacaacaagtgtctccagagttgctatagcgagagagactcgtacaggaaccaagcatgccacgctcgttgcaacctccttaaggtggagaaagacgaatgtgacgaaggtgaaattccacgaccacgac

SEQ ID NO: 112015 - DNA, 276 bp, Glycine max
gttcaatatcctagtataccttaataaataatttaagatactatgatgagagcacggttcccattactgttgctgggacttgttttcctggcttcaatttctgtctcatttggcattgcttactgggaaaaagagaaccccaaacacaacaagtgtctccagagttgcaatagcgagagagactcgtacagaaaccatttcttctgaagataaaccttttaacttgagctgccgcgaccccatctactccaacaagcttggcaagttctttgagat

SEQ ID NO: 112016 - DNA, 267 bp, Glycine max
ctaaacctcgtcctagtcgaccaagccaaggaaagcgtgaacaagaccaggaccaggacgaggacgaagatgaagatgaagatcaacctcgcaagagccgcgaatggagatcgaaaaagacacaacccagaagacctagacaagaagaaccacgtgaaagaggatgcgagacaagaaacggggttgaggaaaatatctgcaccttgaagcttcacgagaacattgctcgcccttcacgcgctgacttctacaacctaaactggtcgc

SEQ ID NO: 112017 - DNA, 273 bp, Glycine max
ttaattattaacacttccttagttcaatatggggaagcccttcactctctctctttcttccctttgcttgctactcttgtcgagtgcatgctttgctattagctccagcaagctcaacgagtgccaactcaacaacctcaacgcgttggaacccgaccaccgcgttgagtccgaaggtggtttgattcaaacatggaactctcaacaccctgagctgaaatgcgccggtgtcactgtttccaaactcaccctcaaccgcaatggcctccactt

SEQ ID NO: 112018 - DNA, 271 bp, Glycine max
ggggaagcccttcttcactctctctctttcttccctttgcttgctactcttgtcgagtgcatactttgctattacctccaacaagttcaacgagtgccaactcaacaacctcaacgcgttggaacccgaccaccgcgttgagtccgaaggtggtcttattgaaacatggaactctcaacaccctgagctgcaatgcgccggtgtcactgtttccaaacgacacctcaaccgcaacggcctccacttgccatcttactcaccttatccccaa

SEQ ID NO: 112019 - DNA, 268 bp, Glycine max
ggcatcctgctcctcctggcgggattgaccctggcaggaaccctcaccggactggcagttgccacgccgctcttcgtcctcttcagcccggtgctggttccagccacggtcgccatcggcctggccgtggccgggttcctgacgtcgggggccttcgggctcacggcgctgtcttccttctcctggatcctgaactacatcgtggagacccagccagcctcggagaacctcgccgccgctgcgaagcatcacctcgccgatgcggcgg

SEQ ID NO: 112020 - DNA, 268 bp, Glycine max
ccataattaattaaattcctcgtggaatcttgttgaagccatgtctacagctggtcaggtcatcaagtgcagagctgcggtggcatgggaagcagggaagccactatcgatagaaaccatagaagtggcaccaccccagaaaggtgaagtgcgtttgaagatcctcttcaactccctttgccgtacagatgtttactggtgggatgctaagggccagactccgctgtttcctcgtatcttaggccacgaagcttcggggattgtggag

SEQ ID NO: 112021 - DNA, 268 bp, Glycine max
gtgctcgacactgatgatgatcctcttcaaaacggtggcacatactatatgttgccagttatgagaggaaagggcggtggaatagaagtagattcaactggaaaagaaatatgccctctcactgttgtgcaatcacccaatgagctcgataaggggattggactagtctttacatctccattacatgccctttttatcgccgaagctatcctttgagcattaagtttggttcatttacagttataacgctgtgtgccggcatgcctac

SEQ ID NO: 112022 - DNA, 274 bp, Glycine max
aagtttccggcttattttacgacggcagatacaaattctggactaaacacgagagaaaccttgctttgacagaagaagaaaagatggaagtgattagaaatagaggcattcctgctgatgtacttgcaaagcgagctcatgaatttgaaaaacatgttgctcatgaaagcctcaaggatcaaattcctgctgttgacaagttgtattctactaaggttaataagtttgcaaaagttatgaaccttagacaagtgttgttggtgatcttaaactt

SEQ ID NO: 112023 - DNA, 290 bp, Glycine max
gatacggctcgagccataaggtggagacagaagaatgtgaagaaggtgaaattccacgaccacgaccacggccacaacacccggagagggaacctcagcaacccggtgagaaggaggaagacgaagatgagcaaccacgtccaatcccattcccacgcccacaacctcgtcaagaagaagagcacgagcagagagaggaacaggaatggcctcgcaaggaggaaaaacgcggagaaaagggaagtgaagaggaagatgaggatgaggatgaggaacaagatgaacgtcaa

SEQ ID NO: 112024 - DNA, 271 bp, Glycine max
aatgccagcaggccaggcaggtgaagaacaacaaccctttcagcttcctggttccacctcaggagtctcagaggagagctgtggcttagagagccctttttgcatgtgctaccacacttttgtccttttgggctctagctagtgctggtagcagtaaataagaatgaataaaagaaacaaaggcttagatgccctttgttaagtgtagaataacgggtatagtaactatgataccttgtgtaatgagtcactcaagtacctatgacgggaa

SEQ ID NO: 112025 - DNA, 275 bp, Glycine max
gaggaattttagtggacaaaactggagattggatcacacttatacaaaattctccaattagtaacttgttgagagttgctgcttggaagaaaggctgtttaatggttaagattgtgatgtctgggaatgcagcagtcaaaaggagtgattgggcctcattggtacaagtgtttttaacaaacagcaacagtacagagcattttgatgcatgtaagtggacaaaatcggaaccacattcctgggaattgatcttcccaatagaggtatgtggtcct

SEQ ID NO: 112026 - DNA, 264 bp, Glycine max
tcaatatcctagtataccttaataaataatttaagatactatgatgagagcacggttcccattactgttgctgggacttgttttcctggcttcagtttctgtctcatttggcattgcttactgggaaaaagagaaccccaaacacaacaagtgtctccagagttgcaatagcgagagagactcgtacaggaaccaagcatgccacgctcgttgcaacctccttaaggtggagaaagaagaatgtgaagaaggtgaaattccacg

SEQ ID NO: 112027 - DNA, 273 bp, Glycine max
gcaaacattgaacttgttggcctaaaagaacaacaacaggagcagcaacaggaagagcaacctttggaagtgcggaaatatagagccgaattgtctgaacaagatatatttgtaatcccagcaggttatccagttgtggtcaacgctacctcaaatctgaatttctttgctattggtattaatgccgagaacaaccagaggaacttcctcgcaggttcgcaagacaatgtgataagccagatacctagtcaagtgcaggagcttgcattccct

SEQ ID NO: 112028 - DNA, 265 bp, Glycine max
ctaaaattcttccaccaagttatgggtccccttgtgttgcttcttttctcccacttaggtctctcttctagttccagcatatcaactcatcgttccatattggaccttgacctaaccaagtttaccacacagaaacaggtgtcttcactgttccaactatggaagagtgagcatggacgtgtctaccataaccacgaagaagaggcaaagagacttgagattttcaagaataacttgaactatatcagggacatgaatgcaaaca

SEQ ID NO: 112029 - DNA, 263 bp, Glycine max
gttcaatatcctagtataccttaatacataatttaagatactatgatgagagcacggttcccattactgttgctgggacttgttttcctggcttcagtttctgtctcatttggcattggttactgggaaaaagagaaccctaaacacaacaagtgtctccagagttgcactagcgagagtgactcgtaccagaaccaaacatgaccagcccggttgcaccttccttaaggtggagacagatgatgtgaagaaggtgaattcca

SEQ ID NO: 112030 - DNA, 266 bp, Glycine max
ctatgatgagagtgcggtttcctttgttggtgttgctgggaactgttttcctggcatcagtttgtgtctcattaaaggtgagagaggatgagaataaccctttctacttgagaagctctaacagcttccaaactctctttgagaaccaaaacggtcgcattcgtctcctccagagattcaacaaacgctccccacaacttgagactcatcgagactaccggattgtccagtttcagtcaaaacccaacacaatccttctcccccac

SEQ ID NO: 112031 - DNA, 270 bp, Glycine max
tcttcaaaaaccaatatggtcgcattcgcgtcctccagaggttcaaccaacgctccccacaacttcagaatctccgagactaccgcattttggagttcaactccaaacccaacaccctccttctccccaaccatgctgacgctgattacctcatcgttatccttaacgggactgccattctttccttggtgaacaacgacgacagagactcctacagacttcaatctggtgatgccctgagagtcccctcaggaaccacatactatgtgg

SEQ ID NO: 112032 - DNA, 267 bp, Glycine max
ctcgagccgaccttaatacataatttaagatactatgatgcgagcacggttcccattactgttgctgggacttgttttcctggcttcagtttctgtctcatttggcattgcttactgggaaaaagagaaccccaaacacaacaagtgtctccagagttgcaatagcgagagagactcgtacaggaaccaagcatgccacgctcgttgcaacctccttaaggtggagaaagaagaatgtgaagaaggtgaaattccacgaccacgacc

SEQ ID NO: 112033 - DNA, 271 bp, Glycine max
cgcaagtgaggtttattaggggaagcgtggctagcagagactagagagatagaattagaattaaaaagcgtgaaggacagtgataggtttggtttggaaggaagaagaaaatgaaggccatagtgataacgaggccaggaggtcccgaagtgctccaacttgaggaagtggaagatcccctagtcggagacgacgagcttctcatcggagtccacgccacttcccttaacagagccgatacctttcagaggaaagctcctaccctccccct

SEQ ID NO: 112034 - DNA, 263 bp, Glycine max
cggagatgcaaacattgaacttgttggcctaaaagaacaacaacaggagcagcaacaggaagagcaacctttggaagtgcggaaatatagagccgaattgtctgaacaagatatatttgtaatcccagcaggttatccagttgtggtcaacgctacctcaaatctgaatttctttgctattggtattaataccgagaacaaccagaggaacttcctcacaggttcgcaagacaatgtgataagccagatacctagtcaagtgc

SEQ ID NO: 112035 - DNA, 249 bp, Glycine max
cccttaataaataatttaagatactatgatgagagcacggttcccattactgttgctgggacttgttttcctggcttcagtttctgtctcatttggcattgcttactgggaaaaagagaaccccaaacacaacaagtgtctccagagttgcaatagcgagagagactcgtacaggaaccaagcatgccacgctcgttgcaacctccttaaggtggagaaagaagaatgtgaagaaggtgaaattccacg

SEQ ID NO: 112036 - DNA, 270 bp, Glycine max
cttaacacttccttagttcaatatggggaagcccttcactctctctctttcttccctttgcttgctactcttgtcgagtgcatgctttgctattagctccagcaagctcaacgagtgccaactcaacaacctcaacgcgttggaacccgaccaccgcgttgagtccgaaggtggtttgattcaaacatggaactctcaacaccctgagctgaaatgcgccggtgtcactgttttcaaactcaccctcaaccgcaatggcctccacttgcc

SEQ ID NO: 112037 - DNA, 241 bp, Glycine max
ctcctagtataccttaataaataatttaagatactatgatgagagcacggttcccattactgttgctgggacttgttttcctggcttcagtttctgtctcatttggcattgcttactgggaaaaagagaaccccaaacacaacaagtgtctccagagttgcaatagcgagagagactcgtacaggaaccaagcatgccacgctcgttgcaacctccttaaggtggagaaagaagaatgtga

SEQ ID NO: 112038 - DNA, 264 bp, Glycine max
cgttgaacaaaactcattttccaactacatttcttccaccaactcataaaattctcatatctgttcccaaaagcttgtttgtgagaatggcttcgggtgaaaagaaattcccacctcaacaacaacaaacacagcctgggaaggagcatgctatgaatccagtaccccaattcactagccctgactacaagccttcaaataaacttcaaggaaagatagcattagtgactgggggtgactctgggattggacgagcggtgtgta

SEQ ID NO: 112039 - DNA, 145 bp, Glycine max
tgcaagttgagttttacctcaagagtgtgactcttgacgacgttccaaaccaaggaaccattcgctttgtttgcaactcatgggtttataacactaaactttacacacgcgtgcgcattttctttgccaaccatacatatgttcc

SEQ ID NO: 112040 - DNA, 262 bp, Glycine max
acttaacaacagcacaaagcgggttactgtctgttcaagctaccatctctctctctctttcttagtgcctccttgccagaagttaaaatggcccaagaaactttcctattcacatctgaatcagtgaacgaggggcaccctgacaagctctgtgaccagatctccgatgctgtgctcgatgcatgcttggagcaggttcctgacagcaaggttgcctgtgaaacctgcaccaagaccaacatggtgatggttttcggagaga

SEQ ID NO: 112041 - DNA, 263 bp, Glycine max
caaaatgaccaagttcacaatcctcctcatctctcttctcttctgcatcgcccacacttgcagcgcctccaaatggcagcaccagcaagatagctgccgcaagcagctccagggggtgaacctcacgccctgcgagaagcacatcatggagaagatccaaggccgcggcgatgacgatgatgatgatgacgacgacaatcgcattctcaggaccatgcggggaagaatcaactacataaggaggaacgaaggacaagacgaag

SEQ ID NO: 112042 - DNA, 262 bp, Glycine max
gttcaatatcctagtataccttaataaataatttaagatactatgatgagagcacggttcccattactgttgctgggacttgttttcctggcttcagtttctgtctcatttggcattgcttactgggaaaaagagaaccccaaacacaacaagtgtctccagagttgcaatagcgagagagactcgtacaggaaccaagcatgccacgctcgttgcaacctaccttaaggtggagaaagatgatgtgaagaaggtgaaattc

SEQ ID NO: 112043 - DNA, 267 bp, Glycine max
gcaaaggattatggaagttatgctctctccttcacatcccttgccttatcagtaaggtacccttttgcatagtcaagggtgtcagaccccgcaagctggttcccagaaacgtagttgtaaatccaagataaagcagcaatggcagccacaccacagcccccagagaacaaaaagccagatgcaaccaggaacagcacaaacgcagcagggacaaggatggggctgagttcaatatcctagtataccttaataaataatttaagatac

SEQ ID NO: 112044 - DNA, 269 bp, Glycine max
cttctcccatttcctctcagaaccctcgatcactcccacgcgctcctatatcctctccttcaccgtcgctctctccaacgatcacaacaacatcgtcatcccatggcaaacgccgcatctggtatggcagtccatgatgactgcaagttaaggtttttggagctgaagacaaagaggacacaccgtttcatagtttttaagattgaggagcagcagaagcaggtcattgtggagaagcttggtgagccagcccaaggctatgaagattt

SEQ ID NO: 112045 - DNA, 271 bp, Glycine max
cttaattattaacacttccttagttcaatatggggcagcccttcactctctctctttcttccctttgcttgctactcttgtcgagtgcatgctttgctattagctccagcaagctcaacgagtgccaactcaacaacctcaacgcgttggaacccgaccaccgcgttgagtccgaaggtggtttgattcaaacatggaactctcaacaccctgagctgaaatgcgccggtgtcactgtttccaaactcaccctcaaccgcaatggcctcca

SEQ ID NO: 112046 - DNA, 254 bp, Glycine max
tcaagttattatcaaataattaattaaattccacgtggaatcttgttgaagccatgtctacagctggtcaggtcatcaagtgcagagctgcggtggcatgggaagcagggaagccactatcgatagaaaccatagaagtggcaccaccccagaaaggtgaagtgcgtttgaagatcctacttcaactccctttgccgtacagatgtttactggtgggatgctaagggccagactccgctatatcctcgtatctt

SEQ ID NO: 112047 - DNA, 259 bp, Glycine max
gaagcatatactccatggagggaaatttcatccatgctattgagatgaatgaccaattccgaacaagggatcctgagaaagcacatgtgtttttcttaccttttagtgtagcaatgttggtgcaatttgtctatgtacgtgactctcatgactttggccccataaaaaagactgtcacggactatgtcaacgtcatcgcgggaagatatccctattggaaccgaagccttggagctgatcacttttatcttgcttgcca

SEQ ID NO: 112048 - DNA, 244 bp, Glycine max
ttggtccttaaacactcatcagtcatcaccatggccaagctagttttttccctttgttttctgcttttcagtggctgctgcttcgctttcagttccagagagcagcctcagcaaaacgagtgccagatccaaaaactcaatgccctcaaaccggataaccgtatagagtcagaaggagggctcattgagacatggaaccctaacaacaagccattccagtgtgccggtgttgccctctctcgct

SEQ ID NO: 112049 - DNA, 245 bp, Glycine max
acaacaacgaaaatctcagattaataacactcgccatacccgttaacaagcctggtagatttgagagtttcttcctatctagcactgaagctcaacaatcctacttgcaaggattcagcaggaacattttagaggcctcctacgataccaaattcgaggagataaacaaggttctgtttagtagagaggaagggcagcagcaaggggagcagaggctgcaagagagcgtgattgtggaaatctcg

SEQ ID NO: 112050 - DNA, 263 bp, Glycine max
  unsure (1)..(263): unsure at all n locations
ttttctcaaagccttgttccccttcacgtctatgccccttccaactatgtgtctttgacactaaacaagtgctatcaagtggcaggngaaggcatgtggggggttctggagttaggtgcatggctgtgggggaagcancaaccactgggacaaagaagagangtggatatgagcttcaaacactcactagctgnttgctnaagcaggagcaagctggggtgattgatgcagaactcatattgtgctgtctagcnttccatggc

SEQ ID NO: 112051 - DNA, 250 bp, Glycine max
acttaaacactcatcagtcatcaccatggccaagctagttttatccctttgatttctgcttttcagtggctgatcgttcgctttcagttccagagagcagcctcagcaaaacgagtgccagatccaaaagctcaatgccctcaaaccggataaccgtatagagtcagaaggcgggctcattgagacatgagaacctaacaacaagccattccagtgtaccggtgttgccctctctcgctgacacctcaac

SEQ ID NO: 112052 - DNA, 82 bp, Glycine max
gacccaacctatgttaatatctgagtggcgttgtacctttgaatcaccttaataaaatgtcagtcttcaagttttgtacttt

SEQ ID NO: 112053 - DNA, 244 bp, Glycine max
cgactttaagatatactatgatgagagcgcggttcccattactgttgctgggagttgttttcctggcatcagtttctgtctcatttggcattgcgtattgggaaaagcagaaccccaatcacaacaagtgcctccgacgttgcaatagcgagaaagactcctacaggaaccaagcatgccacgctcgttgcaacctccttaaggtggaggaagaagaagaatgcgaagaaggtcaaattccacg

SEQ ID NO: 112054 - DNA, 263 bp, Glycine max
gggtttccttgtgttgcttcttttctccctcttaggtctctcttctagttccagcatatcaactcatcgttccatattggaccttgacctaaccaagtttaccacacagaaacaggtgtcttcactgttccaactatggaagagtgagcatggacgtgtctaccataaccacgaagaagaggcaaagagacttgagattttcaagaataacttgaactatatcagggacatgaatgcaaacagaaaatcaccccattctcatc

SEQ ID NO: 112055 - DNA, 238 bp, Glycine max
cgagaagagaggcgagggggggagaaggggttgcagagagagagagagagagagatgtcatcatctacagacctggacaggcaaatagagcagttgaagaggtgtgagcctcttaaggagtctgaagtgaaggcgctttgcctcaaagccatggaaatccttgtcgaagagagcaacgttcaaagggtcgacgcccctagtcaccatatgtggtgatattcacggtcagttttatgac

SEQ ID NO: 112056 - DNA, 259 bp, Glycine max
aaactttaacacagggtgaaccttgttgaagtcgcataaatgacaagcatgatgatgtgaggttgaggccatcttatggcataataacaaataagtaaattttgtatgataataaaaagtatggcccatgtaccatcccaacgagcctatgattatatctgagtggcgttgtaccttacaatcgccttaataaaatgtcagtcttcacgtgttatcttaaaagaaaaaagaagggtctaggaataaatgttgctcaagt

SEQ ID NO: 112057 - DNA, 258 bp, Glycine max
ctggaaagcgtgaacaagacgaggacgaggacgaagatgaagataaacctcgtcctagtcgaccaagccaaggaaagcgtgaacaagaccaggaccaggacgaggacgaagatgaagatgaagatcaacctcgcaagagccgcgaatggagatcgaaaaagacacaacccagaagacctagacaagaagaaccacgtgaaagaggatgcgagacaagaaacggggttgaggaaaatatctgcaccttgaagcttcacg

SEQ ID NO: 112058 - DNA, 259 bp, Glycine max
gcagagttgaacatgttgatcattctcgcaaatcggctgaacaggctgtgaaggccatcaaggcagctgaggaaggaaaaacagttgaggagtatgattaccttccatacttctattcccgttcattcgatctgtcttggcaattctatggcgacaatgtcggcgacacagtgctattcggagacaacaatcctgcgtcttcaaagccaaagtttgggacatactggattaaagacgggaaagttgtcggggtctttct

SEQ ID NO: 112059 - DNA, 242 bp, Glycine max
ctaacacctcaaattctgtgattcgggtaatggccaccagtggaggcgatgagggccagaacaaccctgccctcgacccggatttggatgctccggatgacccggatcacgagttcgctgagttcgggtcgggttgcttctggggtgctgagttggcctttcagcgagttgtgggtgtggtgaagactgaggttggttacactcagggtcacactccggatccgaattacaaactggtttgc

SEQ ID NO: 112060 - DNA, 261 bp, Glycine max
ggtggtaccacagaacttcgtggtggcggacaagccggagaacaaggattcgaatacatagtattcaagacacaccacaacgcagtcactagctacttgaaggatgtgtttagggcaattccctcagaggttcttgcccattcttacaaccttcgacagagtcaagtgtctgagcttaagtatgaaggaaattggggtcctttggtcaaccctgagtctcaacaaggctcaccccgtgttaaagtcgcataaatgacaagc

SEQ ID NO: 112061 - DNA, 263 bp, Glycine max
  unsure (1)..(263): unsure at all n locations
ggngngngngagcgtcttacctttccattatncanaatggctgtttcngtancacnggcgngcngtnncnnctcnngcnntggttggcgatacctctttcctctcccncgcgctctcgaancgtcgcantggccgtatccgtcgncccnaagaccgacaacaaactcactcttaccaagtccgaggnngctttcgctgctgccaaggagctgntgcctggnggtgtcaatccccagttcgtgccttcaaatccgtgggtggtc

SEQ ID NO: 112062 - DNA, 267 bp, Glycine max
cggctcgagggagaattcccgtatactgcaaatgaaggtcctgtcaatcttatgttgcagatcctaggatgatccatcaccatcaccattgaaaaacaagttttcacctgaattctgctcttttgttgatgcttgcttacaaaaggatccagatactaggccaacagcagagcagctgctttcgcacccctttatcacaaagcatgatgatgccaaggttgatttggcaggatttgttcgatacgtttttgcacctacacaaagatt

SEQ ID NO: 112063 - DNA, 107 bp, Glycine max
ggtcaatatcctagtataccttaatacataatttaagatactatgatgcgagcacggttcccattactgttgctgggacttgtgttcctggcttcagtttctgtctc

SEQ ID NO: 112064 - DNA, 251 bp, Glycine max
gccagatgatggtcatctcttgcttctctccacagtgccattgctcattgtgaacggttttcttgtgaccatcacatatctgcagcacacacactatgccttgcctcactatgattcatcagaatgggattggctgaggggtgctttggcaactatggacagagattatgggattctgaacaaggtgtttcaccacataactgatactcatgtggctcaccatcttttctctacaatgccacattaccatg

SEQ ID NO: 112065 - DNA, 246 bp, Glycine max
catagtagtgttggtgggttgcaaagatgcttgggggtcttctccataggggtcataagataaaagggacagtggtgttgatgcgcaagaatgtgttggacgtgaatagcgtaaccagcgttgggggaattattggtcaagccaacggaaaagggaaacttggaaaggctacctttttggaaggtatcattacttcattgccaactttgggagcaggccaatctgcattcaaaattaattttgaat

SEQ ID NO: 112066 - DNA, 244 bp, Glycine max
attttatccaattgaaattttaaaaatgactgggataaacttaagaattcaattattgaaattgaataagtaaacaatttaattggattggtcgaatggtatcaaaaaaatggagtactaactcccatttcttatttattattgaattaaccgatcaacttgctttgttatcgaacatttctttttgatttcaaaaattttccggaaaaaatttgaatctatttttatatgcgaatcaatccta

SEQ ID NO: 112067 - DNA, 246 bp, Glycine max
aagacgaagacgaagatgaagacgaagaatatgaacaaactccctcttatcctccacgacgaccaagccatggaaagcatgaagatgacgaggacgaggacgaagaagaagatcaacctcgtcctgatcaccctccacagcgaccaagcaggcccgaacaacaagaaccacgtggaagaggatgtcagactagaaatggggttgaggaaaatatttgcaccatgaagcttcacgagaacattgctc

SEQ ID NO: 112068 - DNA, 243 bp, Glycine max
agttaatgagctccttctccattttcttggctactatgtgcaggtttggacccatgatccagtgcgacttgtcctccgatgactaagaagttaaaagcaatgttgtcacttgtacgtactaacacatgatgtgatagtttatgctagctagctataacataagctgtctctgagtgtgttgtatattaataaagatcatcactggtgaatggtgatcgtgtacgtaccctacttagtaggcaa

SEQ ID NO: 112069 - DNA, 241 bp, Glycine max
tgaacactcatcaccatggccaagcttgttctttccctttgtttccttcttttcagtggctgcttcgctctgagagagcaggcacagcaaaatgagtgccagatccaaaagctgaatgccctcaaaccggataaccgtatagagtcggaaggtgggttcattgagacctggaaccctaacaacaagccattccagtgtgccggtgttgccctctctcgctgcacccttaaccgcaatgccc

SEQ ID NO: 112070 - DNA, 239 bp, Glycine max
ctaaatactcctgggtgaccgatagtgaagtagtaccgtgagggaagggtgaaaagaacccccatcggggagtgaaatagaacatgaaaccgtaagctcccaagcagtgggaggaggctcgggactctgaccgcgtgcctgttgaagaatgagccggcgactcataggcagtggcttggttaagggaaaccaccggagccgtagcgaaagcgagtcttcacagggcaattgtcactgct

SEQ ID NO: 112071 - DNA, 239 bp, Glycine max
caagtttaccacacagaaacaggtgtcttcactggtccaactatggaagagtgagcatggacgtggctaacaataccaccgagaagaggcaagagacttgagattttcaagagtaacttgaactatatcagggacatgactgcaaacagaaaatcaccccattctcatcgtttaggattgaacaagtttgctgacatcactcctcaagagttcagcaaaaagtacttgcaagctcccaa

SEQ ID NO: 112072 - DNA, 245 bp, Glycine max
  unsure (1)..(245): unsure at all n locations
ccctcgagccgctcgagcggctcgagcaccgccggaatcttacggaccggacgcgtaccctcacgccagggaccnctccacagggacggataccctccgcaggcgtatccagcacaggggtaccctccaccctacgcgcctcctcagtacgctcagcctccgccgcaacaacaccagaattcatctggcccgggttgcttagaaggatggtacgtttctctctctctctctctgtgttataaaat

SEQ ID NO: 112073 - DNA, 239 bp, Glycine max
aggattctcttctttattccttttgtaatttcattcattcttaatctttgtgaaaaataatgttcatcgagaattttaaggttgagtgtcctaatgtgaagtacaccgagactgagattcagtccgtgtacaactacgaaaccaccgaacttgttcacgagaacaggaatggcacctatcagtggattgtcaaacccaaatctgtcaaatacgaatttaaaaccaacatccatgttcct

SEQ ID NO: 112074 - DNA, 243 bp, Glycine max
ctccattgtctttgaacactcatcaccatggccaagcttgttctttccctttgtttccttcttttcagtggctgcttcgctctgagagagcaggcacagcaaaatgagtgccagatccaaaagctgaatgccctcaaaccggataaccgtatagagtcggaaggtgggttcattgagacctggaaccctaacaacaagccattccagtgtgccggtgttgccctctctcgctgcacccttaac

SEQ ID NO: 112075 - DNA, 246 bp, Glycine max
cttaattattaacacttccttagttcaatatggggaaccccttcactctctctctttcttccctttgcttgctactcttgtcgagtgcatgctttgctattagctccagcaagctcaacgagtgccaactcaacaacctcaacgcgttggaacccgaccaccgcgttgagtccgaaggtggtttgattcaaacatggaactctcaacaccctgagctgaaatgcgccggtgtcactgtttccaaac

SEQ ID NO: 112076 - DNA, 247 bp, Glycine max
gttcaatatcctagtacaccgtattaaagaatttaagatatactatgatgagagcgcggttcccattactgttgctgggagttgttttcctggcatcagtttctgtctcatttggcattgcgtattgggaaaagcagaaccccagtcacaacaagtgcctccgaagttgcaatagcgagaaagactcctacaggaaccaagcatgccacgctcgttgcaacctccttaaggtggaggaagaagaaga

SEQ ID NO: 112077 - DNA, 241 bp, Glycine max
gttcaatatcctagtacaccgtattaaagaatttaagatatactatgatgagagcgcggttcccattactgttgctgggagttgttttcctggcatcagtttctgtctcatttggcattgcgtattgggaaaagcagaaccccagtcacaacaagtgcctccgaagttgcaatagcgtgaaagactcctacaggaaccaagcatgccacgctcgttgcaacctccttaaggtggaggaaga

SEQ ID NO: 112078 - DNA, 242 bp, Glycine max
agtgtttctcttccttcttcttcttcttcttcttcttcttcgttgaatcgcgattgttctgtgcgagagaaagaagagagagatcgaaaatggcgttggctttcgacgagttcggaaggccgttcataatcctgaaggagcaggagcagaagagcagactccgaggattggacgctcagaaagccaacatctccgccggcaaagccgtggctcgcatcctccgaacctccctcggccccaaa

SEQ ID NO: 112079 - DNA, 245 bp, Glycine max
  unsure (1)..(245): unsure at all n locations
ctcagaaacctggtgtggtgtctgttttccctgaccccattctgaagctccacactacacgttcattccgatttcctcaaaagccaaactcgtgtcaatatcgacaccaaaccacatacgctgtccggttcttctttttcttcatcagacgtcattcttgncgtcttagacacaggcatatggccagaggcggcgagttttagcgacaagggtttcggtcctgttccatcccgatggaaaggcac

SEQ ID NO: 112080 - DNA, 239 bp, Glycine max
ctcaaaccggataaccgtatagagtcggaaggtgggttcattgagacctggaaccctaacaacaagccattccagtgtgccggtgttgccctctctcgctgcacccttaaccgcaatgcccttcgtagaccttcctacaccaacggtccccaggaaatctacatacaacaaggtaatggtatttttggcatgatattcccgggttgtcctagcacttatcaagagccgcaagaatctca

SEQ ID NO: 112081 - DNA, 242 bp, Glycine max
ctccattgtctttgaacactcatcaccatggccaagcttgttctttccctttgtttccttcttttcagtggctgcttcgctctgagagagcaggcacagcaaaatgagtgccagatccaaaagctgaatgccctcaaaccggataaccgtatagagtcggaaggtgggttcattgagacctggaaccctaacaacaagccattccagtgtgccggtgttgccctctctcgctgcacccttaa

SEQ ID NO: 112082 - DNA, 241 bp, Glycine max
caaagttgattcccagaaacactgttatcccaaccaagaaatctcaggtgttcaccacctatcaggaccagcagactacagtctccattcaggttttcgaaggcgagaggagtctcacaaaggattgccgccttcttgggaaatttgatctgtctggaattcctccagccccaaggggtacgcctcaaattgaagtgaccttcgaagttgatgccaacggcattctaaatgtgaaggcaga

SEQ ID NO: 112083 - DNA, 237 bp, Glycine max
aagaaagtcttccatagccccccaaaaatgaagagcaccatcttctttgctctctttctcttttgtgccttcaccacctcatacctaccttcagccatcgctgatttcgtgctcgataatgaaggtaaccctcttgaaaatggtggcacatattatatcttgtcagacataacagcatttggtggaataagagcagccccaacgggaaatgaaagatgccctctcactgtggtgcaa

SEQ ID NO: 112084 - DNA, 240 bp, Glycine max
aacttattaacactttccttagttcaatatggggaagcccttcttcactctctctctttcttccctttgcttgctactcttgtcgagtgcatgctttgctattacctccagcaagttcaacgagtgccaactcaacaacctcaacgcgttggaacccgaccaccgcgttgagtccgaaggtggtcttattgaaacatggaactctcaacaccctgagctgcaatgcgccggtgtcactgt

SEQ ID NO: 112085 - DNA, 241 bp, Glycine max
ttgtccttgaatataatactcagcatggctaagcttgttctttccctttgttttctgcttttcagtggctgctgcttcgctttcagtttcagagagcagccacagcaaaacgagtgccagatccaacgcctcaatgccctcaaaccggataaccgtatagagtcagaaggtggcttcattgagacatggaaccctaacaacaagccattccagtgtgccggtgttgccctctctcgctgca

SEQ ID NO: 112086 - DNA, 243 bp, Glycine max
aacactttccttagttcaatatggggaagcccttcttcactctctctctttcttccctttgcttgctactcttgtcgagtgcatgctttgctattacctccagcaagttcaacgagtgccaactcaacaacctcaacgcgttggaacccgaccaccgcgttgagtccgaaggtggtcttattagaaacatggaactctcaacaccctgagctgcaatgcgccggtgtcactgtttccaaacgc

SEQ ID NO: 112087 - DNA, 243 bp, Glycine max
cattcatcttgaaagaagagtttgtgtgtgacaatctttatagttctaaggagggtgcaagagagaactgaatttgctgtgatggcaactcgtagatatgcttttggaagagctgatgaggccactcatccagactccatgagggccactttggctgaatttgtttctactttcatctttgtctttgctggagaaggctctggccttgctttggttaaaatttaccaggattcagctttctca

SEQ ID NO: 112088 - DNA, 246 bp, Glycine max
gttcaatatcctagtataccttaataaataatttaagatactatgatgagagcacggttcccattactgttgctgggacttgttttcctggcttcagtttctgtctcatttggcattgcttactgggaaaaagagaaccccaaacacaacaagtgtctccagagttgcaatagcgagagagactcgtacaggaaccaagcatgccacgctcgttgcaacctccttaaggtggagaaagaagaatgt

SEQ ID NO: 112089 - DNA, 244 bp, Glycine max
aataccaaaatgaccaagcttacaattctcctcatcgctcttctcttcatcgcccacacctgctgcgcctccaaatggcaacagcaccagcaagagagctgccgcgagcagctcaaggggatcaacctcaacccctgtgagcacatcatggagaagatccaagctggccgccgcggcgaggacggcagcgacgaagatcacattctcatcaggaccatgccgggaagaatcaactacatcagga

SEQ ID NO: 112090 - DNA, 76 bp, Glycine max
ataaacaaaagcatcatatgctgatttatttattcatagatggcgctcaagtcatagttaaatagcccgatacttt

SEQ ID NO: 112091 - DNA, 243 bp, Glycine max
tgcagtttggagagattcaggaaaaagttgtattgaaattttcacaagaggaatttcttacagcttggtcaactcaggtgcgtcctacaacaactctgttggctgatgggtgtccatatttgtatgctatggtgcatgatagttcagtgtctacaataccaggtgattttgtcattggtgttaagttgacaaccataaacaatatgtgtgcatatgggctcaatcctggtatttcaggttctc

SEQ ID NO: 112092 - DNA, 239 bp, Glycine max
gtgcctttgctctaatgccacactcgtgactacgaacactgcaggaagagagaaaggcgatggacctcggaacctatgaagtgccagaaggagtggacattctaggaagatacgatgcagagtttgcaaaaatcctcacaaaagacgctttgaaattcgttgctgagctgcaacgtgagttcaggagcgatatcaagcatgcattagagagcagaagagaggcaaagaagaagtacaat

SEQ ID NO: 112093 - DNA, 240 bp, Glycine max
ccctcctcttcacacattttctgtgcgctctaacaaacattctcgttcacactttcagattgtgtgaagatgggggcgggtggccgaactgatgttcctcctgccaacaggaagtcagaggttgaccctttgaagcgggtgccatttgaaaaacctccatttagtctcagccaaatcaagaaggtcattccacctcactgtttccagcgttctgttttccgctcattctcctatgttgtt

SEQ ID NO: 112094 - DNA, 236 bp, Glycine max
gaaggagtcaactctccacttggtgttgcgtcttcgtggtggtatgcagattttcgtgaagactcttacgggtaagactattaccctcgaggtggagagctctgacaccattgacaatgtgaaggccaagattcaggacaaggaaggcatcccaccggaccagcagaggctgatttttgctggcaagcagctcgaggatggaaggaccctcgctgactacaacatccagaaggaat

SEQ ID NO: 112095 - DNA, 240 bp, Glycine max
atcaataccaaaatgaccaagcttacaattctcctcatcgctcttctcttcatcgcccacacctgctgcgcctccaaatggcaacagcaccagcaagagagctgccgcgagcagctcaaggggatcaacctcaacccctgtgagcacatcatggagaagatccaagctggccgccgcggcgaggacggcagcgacgaagatcacattctcatcaggaccatgccgggaagaatcaactac

SEQ ID NO: 112096 - DNA, 181 bp, Glycine max
gataaaccgcgatcacaggttgccgcaccttaaaaccggaaacaaaagcaatcgttacttgatttcaagaatctctcaatttctttctacttctttgtttacgatttcttaagggaaagaaaatcactctctgtgctggccacagacttcgtgaatcattttcttttccacacaacatacg

SEQ ID NO: 112097 - DNA, 238 bp, Glycine max
gcccagtgctctgaatgtcaaagtgaagaaattcaaccaagcgcgggtaaacggcgggagtaactatgactctcttaaggtagccaaatgcctcgtcatctaattagtgacgcgcatgaatggattaacgagattcccactgtccctgtctactatccagcgaaaccacagccaagggaacgggcttggcggaatcagcggggaaagaagaccctgttgagcttgactctagtccgac

SEQ ID NO: 112098 - DNA, 243 bp, Glycine max
tctcaatctaaaattgcacttcccaaaaacacagttggaggaaccatcctgcgtagtgatctattggcaaattttttgacagagggcaattttagagcaagtgttgatttgcagcgcactcatcgtattaaaggaatgattaaaatggtggccacagttggtattcctgagaatacaggtatagcattggcctgtgctatgaatagttcttttagggggcgtgccagttctgatatttacacc

SEQ ID NO: 112099 - DNA, 242 bp, Glycine max
ctgggaaccaagagcaagagtttctaaaatatcagcagcagcagcaaggaggttcccaaagccagaaaggaaagcaacaagaagaagaaaacgaaggaagcaacatattgagtggcttcgcccctgaattcttgaaagaagcgttcggcgtgaacatgcagatagtgagaaacctacaaggtgagaacgaagaggaggatagtggagccattgtgacagtgaaaggaggtctaagagtcaca

SEQ ID NO: 112100 - DNA, 241 bp, Glycine max
cgaccaagccaaggaaagcgtgaacaagaccaggaccaggacgaggacgaagatgaagatgaagatcaacctcgcaagagccgcgaatggagatcgaaaaagacacaacccagaagacctagacaagaagaaccacgtgaaagaggatgcgagacaagaaacggggttgaggaaaatatctgcaccttgaagcttcacgagaacattgctcgcccttcacgcgctgacttctacaacccta

SEQ ID NO: 112101 - DNA, 243 bp, Glycine max
tcaaaccttgctctatactacacagtacacacactagaagaataatggcttccatcctccactactttttagccctctctctttcttgctcttttcttttcttcttatccgactcagtcacccctacaaaaccaataaaccttgttgttctacccgttcaaaatgatggttccacagggctccattgggccaacctccaaaaaagaacccctctaatgcaagtaccagtcctggtggacctca

SEQ ID NO: 112102 - DNA, 240 bp, Glycine max
gtttcttcctatctagcactgaagctcaacaatcctacttgcaaggattcagcaggaacattttagaggcctcctacgataccaaattcgaggagataaacaaggttctgtttagtagagaggaagggcagcagcaaggggagcagaggctgcaagagagcgtgattgtggaaatctcgaaggaacagattcgggcactgagcaaacgtgccaaatctagttcaaggaaaaccatttctt

SEQ ID NO: 112103 - DNA, 233 bp, Glycine max; identical to SEQ ID NO: 102715

SEQ ID NO: 112104 - DNA, 236 bp, Glycine max
gcccatgcagagcattgatacgatcatgcagataatttcagaagctaccatacccgctgcagggacctattctttagaccagtttatggctgataacataatagatgatgacatggatgaattagactccgactttgagcttgatgtagatagcagtggggagatagtgtatgccatataatttaatcatcgtctgcattttagagacagcataatgaaagtacagcatcttaata

SEQ ID NO: 112105 - DNA, 268 bp, Glycine max
  unsure (1)..(268): unsure at all n locations
cgtacgctcgctcttcgttccgctcgatctcgagccgctcgagccgattcggctcgagaaaattcttccaccaagttatgggttcccttctgttgcttcntttctccctcttaggtctctcttctagttccagcatatcaactcatcgttccatattggaccttgacctaaccaagtttaccacacagaaacaggtcccctcactgttccaactatggaagagtgagcatggacgtgtctaccataaccacgaagaagaggcaaagag

SEQ ID NO: 112106 - DNA, 246 bp, Glycine max
ctctccattggtccttaaacactcatcagtcatcaccatggccaagctagttttttccctttgttttctgcttttcagtggctgctgcttcgctttcagttccagagagcagcctcagcaaaacgagtgccagatccaaaaactcaatgccctcaaaccggataaccgtatagagtcagaaggagggctcattgagacatggaaccctaacaacaagccattccagtgtgccggtgttgccctctc

SEQ ID NO: 112107 - DNA, 244 bp, Glycine max
gcgggcgcaggatttcgtgtgtgggttggcgccgaggattaggaggttgcaagagcgcgctgatgagcgagcgcgtaagatgaagaagcatcatggcgttaagttcagttggattttcaataaagaattgcttttgtgaaatttcagttaagacttaagagataagagatagaggtcaacgtgagtcaacaggtttttggctttgtgactattttgagtttttgtttgtaggtggcattttgag

SEQ ID NO: 112108 - DNA, 244 bp, Glycine max
cttccaagtgagacaccagctccactagtcaaatatagagaagaagagttgcataatttaagaggagatggaactggagaacgcaaagagtgggaaaggatctatgattatgatgtctacaatgatttaggtgatccggataaaggtgaaaatcatgcccgtcctgttcttggaggaaatgacacctttccttatcctcgtagggggagaactggtagaaaaccaacaaggaaagatcctaata

SEQ ID NO: 112109 - DNA, 238 bp, Glycine max
atccgctttgtttgcaactcatgggtttataacactaaactttacaaaagcgtgcgcattttctttgccaaccatacatatgtacctagtgagacaccagcaccacttgtggagtacagagaagaagaattgaagagtttaagaggaaatggaacgggagagcgcaaggaatatgataggatctatgattatgatgtctacaatgatttgggcaacccagataagagtgaaaagttag

SEQ ID NO: 112110 - DNA, 240 bp, Glycine max
cctacttgcaaggattcagcaggaacattttagaggcctcctacgataccaaattcgaggagataaacaaggttctgtttagtagagaggaagggcagcagcaaggggagcagaggctgcaagagagcgtgattgtggaaatctcgaaggaacagattcgggcactgagcaaacgtgccaaatctagttcaaggaaaaccatttcttctgaagataaaccttttaacttgagaagccgcg

SEQ ID NO: 112111 - DNA, 238 bp, Glycine max
aaagatcatacatagtagtgttggtgggttgcaaagatgcttgggggtcttctccataggggtcataagataaaagggacagtggtgttgttgcgcaagaatgtgttggacgtgaatagcttaaccagcgttgggggaattattggtcaaggtctcgacttagttggctcaacactcgatactcttactgccttcttgggccgatccgtgtctctccagcttattagtgctaccaaag

SEQ ID NO: 112112 - DNA, 242 bp, Glycine max
cttaaccgcaatgcccttcgtagaccttcctacaccaacggtccctcggaaatctacatacaccaaggtaatggtatttttggcatgatattcccgggttgtcctagcacttatcaagagccgcaagaatctcagcaacgaggacgaagccagaggccccaagaccgtcaccaaaaggtacatcgcttcagagagggtgatttgatcgcagtgcctactggtgttgcatggtggatgtacaa

SEQ ID NO: 112113 - DNA, 236 bp, Glycine max
gttcaatatcctagtataccttaataaataatttaagatactatgatgagagcacggttcccattactgttgctgggacttgttttcctggcttcagtttctgtctcatttggcattgcttactgggaaaaagagaaccccaaacacaacaagtgtctccagagttgcaatagcgagagagactcgtacaggaaccaagcatgccacgctcgttgcaacctccttaaggtggagaa

SEQ ID NO: 112114 - DNA, 238 bp, Glycine max
cttaattattaacacttccttagttcaatatggggaagcccttcactctctctctttcttccctttgcttgctactcttgtcgagtgcatgctttgctattagctccagcaagctcaacgagtgccaactcaacaacctcaacgcgttggaacccgaccaccgcgttgagtccgaaggtggtttgattcaaacatggaactctcaacaccctgagctgaaatgcgccggtgtcactgt

SEQ ID NO: 112115 - DNA, 238 bp, Glycine max
ctttgctattagctccagcaagctcaacgagtgccaactcaacaaactcaacgcgttggaacccgaccaccgcgttgagtccgaaggtggtttgattcaaacatggaactctcaacaccctgagctgaaatgcgccggtgtcactgtttccaaactcaccctcaaccgcaatggcctccacttaccatcttactcaccttatccccggatgatcatcatcgcccaagggaaaggagca

SEQ ID NO: 112116 - DNA, 235 bp, Glycine max
cattggtccttaaacactcatcagtcatcaccatggccaagctagttttttccctttgttttctgcttttcagtggctgctgcttcgctttcagttccagagagcagcctcagcaaaacgagtgccagatccaaaaactcaatgccctcaaaccggataaccgtatagagtcagaaggagggctcattgagacatggaaccctaacaacaagccattccagtgtgccggtgttgc

SEQ ID NO: 112117 - DNA, 228 bp, Glycine max
gttcctcactgaccaagccaccgcgatgagaaccaaactttctttagctatctttttcttttttcacttagccttattttcaaacctagcctttggcaaatgtaaagaaaccgaggtagaagaagaagaccctgagctcgtaacatgcaaacaccaatgccaacagccacagcaatacactgagggtgacaagcgggtatgcttgcaaagatgtgacaggtatcatcg

SEQ ID NO: 112118 - DNA, 238 bp, Glycine max
ttctctccattggtccttaaacactcatcagtcatcaccatggccaagctagttttttccctttgttttctgcttttcagtggctgctgcttcgctttcagttccagagagcagcctcagcaaaacgagtgccagatccaaaaactcaatgccctcaaaccggataaccgtatagagtcagaaggagggctcattgagacatggaaccctaacaacaagccattccagtgtgccggtg

SEQ ID NO: 112119 - DNA, 237 bp, Glycine max
gtataccttaataaataatttaagatactatgatgagagcacggttcccattactgttgctgggacttgttttcctggcttcagtttctgtctcatttggcattgcttactgggaaaaagagaaccccaaacacaacaagtgtctccagagttgcaatagcgagagagactcgtacaggaaccaagcatgccacgctcgttgcaacctccttaaggtggagaaagaagaatgtgaag

SEQ ID NO: 112120 - DNA, 236 bp, Glycine max
agacaccagaggtctcaagatggatggatcaagtcatccctacaatagccccttgtgatgcagcagaaccatggcaactagggtttcaagatgcagcaacacctataatgcaaggaataatagacttacatcacgatatctttttcttcgtcattcagattggagtttttgtatcatgggtcttgcttcgtgctttatggcatttcaggtctaaaatgaatccaatccctcaaaga

SEQ ID NO: 112121 - DNA, 244 bp, Glycine max
ggattcagcaggaacattttagaggcctcctacgataccaaattcgaggagataaacaaggttctgtttagtagagaggaagggcagcagcaaggggagcagaggctgcaagagagcgtgattgtggaaatctcgaaggaacagattcgggcactgagcaaacgtgccaaatctagttcaaggcaaaccatttcttctgaagataaaccttttaacttgagaagccgcgaccccatctactcca

SEQ ID NO: 112122 - DNA, 243 bp, Glycine max
agactcgtacaggaaccaagcatgccacgctcgttgcaacctccttaaggtggagaaagaagaatgtgaagaaggtgaaattccacgaccacgaccacgcccacaacacccggagagggaacctcagcaacccggtgagaaggaggaagacgaagatgagcaaccacgtccaatcccattcccacgcccacaagctcgtcaagaagaagagcacgagcagagagaggaacaggaatggcctcg

SEQ ID NO: 112123 - DNA, 240 bp, Glycine max
ctctccattgtctttgaacactcatcaccatggccaagcttgttctttccctttgtttccttcttttcagtggctgcttcgctctgagagagcaggcacagcaaaatgagtgccagatccaaaagctgaatgccctcaaaccggataaccgtatagagtcggaaggtgggttcattgagacctggaaccctaacaacaagccattccagtgtgccggtgttgccctctctcgctgcaccc

SEQ ID NO: 112124 - DNA, 236 bp, Glycine max
tgtcgcattcgtctcctccagagattcaacaaacgctccccacaacttgagaactttcgagactaccggattgtccagtttcagtcaaaacccaacacaatccttctcccccaccatgctgacgccgatttcctcctctttgtccttagcgggagagccatacttaccttggtgaacaacgacgacagagactcctacaaccttcaccctggcgatgcccagagaatcccagctgg

SEQ ID NO: 112125 - DNA, 235 bp, Glycine max
ggaagggcagcagcaaggggagcagaggctgcaagagagcgtgattgtggaaatctcgaaggaacagattcgggcactgagcaaacgtgccaaatctagttcaaggaaaaccatttcttctgaagataaaccttttaacttgagaagccgcgaccccatctactccaacaagcttggcaagttctttgagatcaccccagagaaaaacccccagcttcgggacttggatatcttc

SEQ ID NO: 112126 - DNA, 230 bp, Glycine max
  unsure (1)..(230): unsure at all n locations
agatatcttgccaagcttgttggactagatggtgtcgnggcttctctagttcaaggaaaaccatttcttctgaagataaaccttttaacttgagaagccgcgaccccatctactccaacaagcttggcaagttctttgagatcaccccagagaaaaacccccagcttcgggacttggatatcttcctcagtattgtggatatcgacgagggagctcttcttctaccacac

SEQ ID NO: 112127 - DNA, 236 bp, Glycine max
atcaaatggcaacagtgagaacaccattgaattttgattctagcaagcagagcttttgtcaattttctattgaccttctcggtggaggaattttagtggacaaaactggagattggatcacacttatacaaaattctccaattagtaacttgttgagagttgctgcttggaagaaaggctgtttaatggtcaagattgtgatgtctgggaatgcagaagtcaaaaggagtgattgg

SEQ ID NO: 112128 - DNA, 244 bp, Glycine max
tcgagctcgagccgccattggtccttaaacactcatcagtcatgaccatggccaagctagttttttgcctttgttttctgcttttcagtggctgctgcttcgctttcagttccagagagcagcctcagtgaaacgagtgccagatccaaaaactcaatgccctcaaaccggataaccgtatagagtcagaaggagggctcattgagacatggaaccctaacaacaagccattccagtgtgccgg

SEQ ID NO: 112129 - DNA, 247 bp, Glycine max
agctcgagccgattcaaaccttgctctatactacacagtacacacactagaagaataatggctaccatcctccactactttttagccctctctctttcttgctcttttcttttcttcttatccgactcagtcacccctacaaaaccaataaaccttgttgttctacccgttcaaaatgatggttccacagggctccattgggccaacctccaaaaaagaacccctctaatgcaagtaccagtcctgg

SEQ ID NO: 112130 - DNA, 257 bp, Glycine max
ctagtataccttaataaataatttaagatactatgatgagagcacggttcccattactgttgctgggacttgttttcctggcttcagtttctgtctcatttggcattgcttactgggaaaaagagaaccccaaacacaacaagtgtctccagagttgcaatagcgagagagactcgtacaggaaccaagcatgccacgctcgttgcaacctccttaaggtggagaaagaagaatgtgaagaaggtgaaattccacga

SEQ ID NO: 112131 - DNA, 252 bp, Glycine max
gttattatcaaataattaattaaattcctcgtggaatcttgttgaagccatgtctacagctggtcaggtcatcaagtgcagagctgcggtggcatgggaagcagggaagccactatcgatagaaaccatagaagtggcaccaccccagaaaggtgaagtgcgtttgaagatcctcttcaactccctttgccgtacagatgtttactggtgggatgctaagggccagactccgctgtttcctcgtatcttagg

SEQ ID NO: 112132 - DNA, 251 bp, Glycine max
cttgaactatatacaagataacctaagttgggttcttggatttggaattccttgtgttgccatgattattgtattgcttgttttcatgcttggaacagtgacctacaggtttaacattcagcagcgtggcaaaagcccctttctcagaattggccgtgtatttgttgctgctataagaaatcgccgatccaccctatcaagcacagctgtcaaagcagaacaatttgagttcctcaacaaagcattgttag

SEQ ID NO: 112133 - DNA, 253 bp, Glycine max
attgacaccaacagcttggagaaccagctcgaccagatgcctaggagattctatcttgctgggaaccaagagcaagagtttctaaaatatcagcagcagcagcaaggaggttcccaaagccagaaaggaaagcaacaagaagaagaaaacgaaggaagcaacatattgagtggcttcgcccctgaattcttgaaagaagcgttcggcgtgaacatgcagatagtgagaaacctacaaggtgagaacgaagagg

SEQ ID NO: 112134 - DNA, 251 bp, Glycine max
gttcaatatcctagtacaccgtattaaagaatttaagatatactatgatgagagcgcggttcccattactgttgctgggagttgttttcctggcatcagtttctgtctcatttggcattgcgtattgggaaaagcagaaccccagtcacaacaagtgcctccgaagttgcaatagcgagaaagactcctacaggaaccaagcatgccacgctcgttgcaacctccttaaggtggaggaagaagaagaatgc

SEQ ID NO: 112135 - DNA, 253 bp, Glycine max
agaacacactcttgtaacttgctgatgcgcaccactctctctttgttctttctcggttcagtgtctctctttgacggtggtgctgtcatcattgacctcagcttgagcagtaaaacatcatcagcactactacggtaccatggctgtgctgcaatctttcgtttcggtccacccagattctcacttccccatacagaacctcccttacggagtcttcaagccccaatccgcttcgcctcctcgtcccggcgtc

SEQ ID NO: 112136 - DNA, 252 bp, Glycine max
ccttagttcaatatggggaagcccttcactctctctctttcttccctttgcttgctactcttgtcgagtgcatgctttgctattagctccagcaagctcaacgagtgccaactcaacaacctcaacgcgttggaacccgaccaccgcgttgagtccgaaggtggtttgattcaaacatggaactctcaacaccctgagctgaaatgcgccggtgtcactgtttccaaactcaccctcaaccgcaatggcctc

SEQ ID NO: 112137 - DNA, 249 bp, Glycine max
attggaatctgaatgcaaacagtgtgatctatgtgactcgaggacaaggaaaggttagagttgtgaactgccaagggaatgcagtgttcgacggtgagcttaggaggggacaattgctggtggtaccacagaacttcgtggtggcggagaagccggagaacaaggattcgaatacatagtattcaagacacaccacaacgcagtcactagctacttgaaggatgtgtttagggcaattccctcagaggt

SEQ ID NO: 112138 - DNA, 255 bp, Glycine max
ctcgagccgctctccattggtccttaaacactcatcagtcatcaccatggccaagctagtattttccctttgttttctgcttttcagtggctgctgcttcgctttcagttccagagagcagcctcagcaaaacgagtgccagatccaaaaactcaatgccctcaaaccggataaccgtatagagtcagaaggagggctcattgagacatggaaccctaacaacaagccattccagtgtgccggtgttgccctctc

SEQ ID NO: 112139 - DNA, 255 bp, Glycine max
attctacatccattgtgatggggctttgtttggtctcatgatgcctttcgtgaaactagctccaaaagttacttttaagaagcctattggcagtgttagtgtttctggccacaaatttgtagggtgtcccatgccttgtggtgtgcagataacaagattggagtatgtaaatgctcttgccagggatgtggaataccttgcttctagggatgccacgatcatgggtagtcggaatggccatgctcccatattcct

SEQ ID NO: 112140 - DNA, 254 bp, Glycine max
cgatcttcgatcttcgtcgctgaaaatgagagagtgcatttcaatccacatcggccaggccgggattcaggttggaaacgcctgctgggagctttactgcctcgaacacggcattcagcctgatgggcagatgccaagtgacaagaccgttggtggaggtgatgatgctttcaacacctgcgtcagtgaaactggggcaggaaagcacgtgccccgcgcgatttttgtagatcttgagcccactgtgattgatg

SEQ ID NO: 112141 - DNA, 253 bp, Glycine max
cttggacgatgcgcatgaacttattgacactgcaatttctactgctttgaaggaaagcaagcctgtttatatcagcataagttgtaaccttcctggaattcctcatccaacttttgctagagaccccgtgccattctttcttgcacctaaggtaagcaatcaagaaggattagaagcagcagtggaagcaacggctgctttactgaacaacgctgtgaagccagtgattgtgggtgggccaaaactaagggta

SEQ ID NO: 112142 - DNA, 249 bp, Glycine max
atttgcagaactttgtttcccaacctccattgcctccgcttctacctcgctaccatgatcattcctgagaagaaccgcaaggagatctgcaaatacctcttccaagagggagtttgctttgcgaagaaggacttcaatttggcgaagaccctgagattgacgtgccgaatctgcaggtgattaagctgatgcagagtttcaagtctcgcgagtatgtgagggagacttttgcttggatgcactattact

SEQ ID NO: 112143 - DNA, 228 bp, Glycine max
ggctcgagaacgaagatagcactggtgatcgatggcagagagcatcctcaaatatcatgtccacacatgtcatcaaggtcgtcacactcgaagcatgataagagtagcccttcataccatagaatcagttccgatttgaagcctggaatggtgtttgttgtccctcccggtcatcccttcgtcaccatagcttccaataaagagaatctcctcatgatttgcttcgag

SEQ ID NO: 112144 - DNA, 252 bp, Glycine max
actagttcaatatcctagtataccttaataaataatttaagatactatgatgagagcacggttcccattactgttgctgggacttgttttcctggcttcagtttctgtctcatttggcattgcttactgggaaaaagagaaccccaaacacaacaagtgtctccagagttgcaatagcgagagagactcgtacaggaaccaagcatgccacgctcgttgcaacctccttaaggtggagaaagaagaatgtga

SEQ ID NO: 112145 - DNA, 251 bp, Glycine max
aagttattatcaaataattaattaaattcctcgtggaatcttgttgaagccatgtctacagctggtcaggtcatcaagtgcagagctgcggtggcatgggaagcagggaagccactatcgatagaaaccatagaagtggcaccaccccagaaaggtgaagtgcgtttgaagatcctcttcaactccctttgccgtacagatgtttactggtgggatgctaagggccagactccgctgtttcctcgtatctt

SEQ ID NO: 112146 - DNA, 254 bp, Glycine max; identical to SEQ ID NO: 111644

SEQ ID NO: 112147 - DNA, 96 bp, Glycine max
agaaacaaaggcttagatgccctttgttaagtgtagaataacgggtatagtaactatgtacccttgtgtaatgagtcactcaagtacctatacggg

SEQ ID NO: 112148 - DNA, 250 bp, Glycine max
aggaaaggttaactaagaagcaatacttcaatggccacccttgttgttcataaccaaacttcttctgctcaagatgctgaggctctccaacaggctttcaaaggatggggggctgatgacaaggccattatagcaatactgggtcacagaaatgttcatcagaggcaagaaatcagaaaagcttatgaggagatttaccaagaggatctcatcaaacgccttgagtccgagatctctggtgactttgaga

SEQ ID NO: 112149 - DNA, 253 bp, Glycine max
cttagcacaatccttcaacaccaacgaggacacagctgagaaacttcggtctccagatgacgaaaggaagcagatcgtgacagtggagggaggcctcagcgttatcagccccaagtggcaagaacaagaagacgaagacgaagatgaagacgaagaatatgaacaaactccctcttatcctcaacgacgaccaagccatggaaagcatgaagatgacgaggacgaggacgaagaagaagatcaacctcgtcct

SEQ ID NO: 112150 - DNA, 254 bp, Glycine max
ttccaacctctcttcaaaaaccaatatggccacgttcgcgtcctccagaggttcaacaaacgctcccaacagcttcagaatctccgagactaccgcattttggagttcaactccaaacccaacacccttcttctcccccaccatgctgacgctgattacctcatcgttatccttaacgggactgccattcttaccttggtgaacaacgacgaccgagactcttacaaccttcaatctggcgatgccctaagagt

SEQ ID NO: 112151 - DNA, 252 bp, Glycine max; identical to SEQ ID NO: 112131

SEQ ID NO: 112152 - DNA, 252 bp, Glycine max
gttttaaatccacaaaatccttttgtgttaaataggtggatggggaaactgactttcccccagggcacttcccgaagtgttaaaagaatgcctcttgctatagggggaggagctggtgcaaagaatgccattctcatgaatatgccaaatgctgttctttcaatgtggagatattttgttggagatctcgtctttgaagtttctaagatgacttctccctacatcaaatgtacagtctctttcttcatagca

SEQ ID NO: 112153 - DNA, 249 bp, Glycine max; identical to SEQ ID NO: 104194

SEQ ID NO: 112154 - DNA, 250 bp, Glycine max
cttcactcaaaactcttctctttcattttcataattcccacacattatggctgagcttcactaccaaccacaacaccaataccccctccgctaccctaacgatccacaccaacaaacccgttcctccacccaccaggtcgtcaaggccgccaccgccgtcacagcgggcggctccctcttgatcctcgcctcgttgatcctcgccgccaccgtcattgccctcaccatcgtcaccccgctgttcgtcatt

SEQ ID NO: 112155 - DNA, 250 bp, Glycine max
gcaaagcaatggctacttcaaagttgaaaacccagaatgtggttgtatctctctccctaaccttaaccttggtactggtgctactgaccagcaaggcaaactcagcggaaactgtttctttcagttggaacaagttcgtgccgaagcaaccaaacatgatcctccaaggagacgctattgtgacctcctcgggaaagttacaactcaataaggttgacgaaaacggcaccccaaaaccctcgtctcttgg

SEQ ID NO: 112156 - DNA, 251 bp, Glycine max
ctcgagccgagatgaagataaacctcgtcctagtcgaccaagccaaggaaagcgtgaacaagaccaggaccaggacgaggacgaagatgaagatgaagatcaacctcgcaagagccgcgaatggagatcgaaaaagacacaacccagaagacctagacaagaagaaccacgtgaaagaggatgcgagacaagaaacggggttgaggaaaatatctgcaccttgaagcttcacgagaacattgctcgccctt

SEQ ID NO: 112157 - DNA, 252 bp, Glycine max
atccgctttgtttgcaactcatgggtttataacactaaactttacaaaagcgtgcgcattttctttgccaaccatacatatgtacctagtgagacaccagcaccacttgtggagtacagagaagaagaattgaagagtttaagaggaaatggaacgggagagcgcaaggaatatgataggatctatgattatgatgtctacaatgatttgggcaacccagataagagtgaaaagttagctcgtccagttctt

SEQ ID NO: 112158 - DNA, 251 bp, Glycine max; identical to SEQ ID NO: 103250

SEQ ID NO: 112159 - DNA, 253 bp, Glycine max
gtattaaagaatttaagatatactatgatgagagcgcggttcccattactgttgctgggagttgttttcctggcatcagtttctgtctcatttggcattgcgtattgggaaaagcagaaccccagtcacaacaagtgcctccgaagttgcaatagcgagaaagactcctacaggaaccaagcatgccacgctcgttgcaacctccttaaggtggaggaagaagaagaatgcgaagaaggtcaaattccacgac

SEQ ID NO: 112160 - DNA, 253 bp, Glycine max
aaacactcatcagtcatcaccatggccaagctagttgtttccctgtgttttctgctgttcagtggctgctgcttcgctttcagttccagagagcagcctcagcaaaacgagtgccagatccaaaaactcaatgccctcaaaccggataaccgtatagagtcagaaggagggctcattgagacatggaaccctaacaacaagccattccagtgtgccggtgttgccctctctcgctgcaccctcaaccgcaacg

SEQ ID NO: 112161 - DNA, 252 bp, Glycine max
aggagacgtactagtgattcctcctggtgttccttactggacctataacactggcgatgaaccagttgttgccatcagtcttcttgacacctccaacttcaacaatcagcttgatcaaaaccccagagtattttaccttgctgggaacccagatatagagcacccagagaccatgcaacaacagcagcagcagaagagtcatggtggacgcaagcaggggcaacaccagcagcaggaggaagaaggtggcag

SEQ ID NO: 112162 - DNA, 249 bp, Glycine max
ccctgaagaagttggatgaatatcaatctgagctccaagaacttcaaaaggaaaagagtgagaggttgcacaaggttcttgaatttgtgagtactgtgcatgatctatgtgctgtccttggtatggacttcttcagtactgcaactgaggttcatccaagtctaaatgactctactggtgttcaatcaaagagcataagtaatgacaccctagcaaggctggctaagaccgtcttaacgctgaaagaag

SEQ ID NO: 112163 - DNA, 247 bp, Glycine max
aggagtctgacatgtgtgcgagtcaacgggcgagtaaacccgtaaggcgcaaggaagctgattggtgggatccccctgtgggttgcaccgccgaccgaccctgatcttctgtgaagggttcgagtgagagcatacctgtcgggacccgaaagatggtgaactatgcctgagcggggcgaagctagaggaaactctggtggaggcccgcagcgatactgacgtgcaaatcgttcgtctgacttgggta

SEQ ID NO: 112164 - DNA, 251 bp, Glycine max
gagcacgagcagagagaggaacaggaatggcctcgcaaggaggaaaaacgcggagaaaagggaagtgaagaggaagatgaggatgaggatgaggaacaagatgaacgtcaattcccattcccacgcccacctcatcagaaggaagagcgaaagcaagaggaagatgaggatgaggagcagcagcgagagagcgaagaaagtgaagattctgagttacgaagacataagaataagaacccttttctcttcgg

SEQ ID NO: 112165 - DNA, 253 bp, Glycine max
ctcgagccgacttgcagcactgttgcatcatcatcttcattgcaaaaccctaaacttcaccatcaaccatgaccacacaagtaccaccacacagtgtccaagtccacacaacaacacaccgctacgaagctggcgtcgtcccccccggagcccgtttcgaaccgccgcgttatgaagccggcgtcaaagcgccctccatttaccattccgagagaggtccaacgacttcccaggtcctcgccgtcctcgccgg

SEQ ID NO: 112166 - DNA, 250 bp, Glycine max
attagggtttttgtcgtagcaggaagaagcagcaatggcgccgaagataacacgcaaggtcagcagaaaccccgaattgataaggggaatcggaaagtactcgaggtcgcagatgtaccacaagaggggcatttgggctatcaaggccaaaaacggtggcgttttacctcgccacgaccccaaacccaaacctgaaactcccactgaaaaaccacccaaattttaccccgctgatgatgtcaagaaaccc

SEQ ID NO: 112167 - DNA, 251 bp, Glycine max
ttttgagcttggttacagggattttttacagtcacccttgcaacctttgatggataatttagaggctcagacttacgagacttttgagagagatgcaatgaaatacattcagtaccaaagagcagttagtaaagcattgctggacagggttcctgatgaagaggcatctgttaaaaccattgtattgatggttgtgggggcagggcgtgggcctcttgtgcgggcttcattacaggctgctgaagaaactg

SEQ ID NO: 112168 - DNA, 253 bp, Glycine max
gctgaagcaaagcaatggctacttcaaagttgaaaacccagaatgtggttgtatctctctccctaaccttaaccttggtactggtgctactgaccagcaaggcaaactcagcggaaactgtttctttcagctggaacaagttcgtgccgaagcaaccaaacatgatcctccaaggagacgctattgtgacctcctcgggaaagttacaactcaataaggttgacgaaaacggcaccccaaaaccctcgtctct

SEQ ID NO: 112169 - DNA, 255 bp, Glycine max
agctcgaccagatgcctaggagattctatcttgctgggaaccaagagcaagagtttctaaaatatcagcagcagcagcaaggaggttcccaaagccagaaaggaaagcaacaagaagaagaaaacgaaggaagcaacatattgagtggcttcgcccctgaattcttgaaagaagcgttcggcgtgaacatgcagatagtgagaaacctacaaggtgagaacgaagaggaggatagtggagccattgtgacagtga

SEQ ID NO: 112170 - DNA, 249 bp, Glycine max
aaaattcttccaccaagttatgggtttccttgtgttgcttcttttctccctcttaggtctctcttctagttccagcatatcaactcatcgttccatattggaccttgacctaaccaagtttaccacacagaaacaggtgtcttcactgttccaactatggaagagtgagcatggacgtgtctaccataaccacgaagaagaggcaaagagacttgagattttcaagaataacttgaactatatcaggga

SEQ ID NO: 112171 - DNA, 250 bp, Glycine max
gaaagaagaaaaagaagcgaaactaaagtcagcattcgaaaaagatgagtagcatcggtacaggttacgatctatcggtcaccactttctcccctgatggccgcgttttccagatcgagtatgccgctaaagccgtcgacaacagcgggactgttattgggatcaagtgcaaagatggggttgtgttgggcgttgagaagcttattccgtcgaaaatgatgcttccgggttccaatagaagaatacactc

SEQ ID NO: 112172 - DNA, 246 bp, Glycine max
gttagatatatgattttattatttctccattttatgcccattggtgttccaagagtaccctttcgaagccctggggaagaagatgcatcttgggttgatatatacaatcgactttatcgagaaagattactttttttaggtcaagaggttgatagtgaaatatcgaatcaactaattagtcttatggtatatcttagtatagaagaagagaataaagatttgtatctgtttataaattctccgggg

SEQ ID NO: 112173 - DNA, 247 bp, Glycine max
cctacttgcaaggattcagcaggaacattttagaggcctcctacgataccaaattcgaggagataaacaaggttctgtttagtagagaggaagggcagcagcaaggggagcagaggctgcaagagagcgtgattgtggaaatctcgaaggaacagattcgggcactgagcaaacgtgccaaatctagttcaaggaaaaccatttcttctgaagataaaccttttaacttgagaagccgcgaccccat

SEQ ID NO: 112174 - DNA, 248 bp, Glycine max
gaccaagccaaggaaagcgtgaacaagaccaggaccaggacgaggacgaagatgaagatgaagatcaacctcgcaagagccgcgaatggagatcgaaaaagacacaacccagaagacctagacaagaagaaccacgtgaaagaggatgcgagacaagaaacggggttgaggaaaatatctgcaccttgaagcttcacgagaacattgctcgcccttcacgcgctgacttctacaaccctaaagctggt

SEQ ID NO: 112175 - DNA, 131 bp, Glycine max
ttagaaggttgtgtcctcaggccaagagcttcgaaaattagcctcacaaaagcaaagatcaaacaaaccaaggacgagaacacgatgttgcttgaacttgcacttggtttattggttttggctctgtttct

SEQ ID NO: 112176 - DNA, 248 bp, Glycine max
agcggtttataagaattgggttttcactgatcaagcactacctgcagatcttatcaagagaggagtggcaattaaggatccatctgccccacatggacttcgacttctgatagaggactacccttatgctgttgatgggctagagatatgggctgcaattaagacatgggtccaagaatatgtgtccttgtactatgcaagagatgatgatgtcaaacctgattctgaactccaacagtggtggaaag

SEQ ID NO: 112177 - DNA, 248 bp, Glycine max
attaacactttccttagttcaatatggggaagcccttcttcactctctctctttcttccctttgcttgctactcttgtcgagtgcatgctttgctattacctccagcaagttcaacgagtgccaactcaacaacctcaacgcgttggaacccgaccaccgcgttgagtccgaaggtggtcttattgaaacatggaactctcaacaccctgagctgcaatgcgccggtgtcactgtttccaaacgcacc

SEQ ID NO: 112178 - DNA, 246 bp, Glycine max
cactttccttagttcaatatggggaagcccttcttcactctctctctttcttccctttgcttgctactcttgtcgagtgcatgctttgctattacctccagcaagttcaacgagtgccaactcaacaacctcaacgcgttggaacccgaccaccgcgttgagtccgaagtggtcttattgaaacatggaactctcaacaccctgagctgcaatgcgccggtgtcactgtttccaaacgcaccctca

SEQ ID NO: 112179 - DNA, 247 bp, Glycine max
cttaattcataattcctcaccttcaaatctccattctgcttcattttctgcaaagaacaaacccctttctgaagaaagaatatagtcttcagctggacaaggatcatttattttgaaagacaagtttgtgtgacaatcttatagttctaagaagggtgcaagtgagagctttgctgcgatggcaacccgtagatattcttttggaagggctgatgaggccactcatccagactccatgagggccact

SEQ ID NO: 112180 - DNA, 249 bp, Glycine max
atgtgataagccagatacctagtcaagtgcaggagcttgcgttccctgggtctgcaaaagatattgagaacctaataaagagccaaagtgagtcctactttgtggatgctcagcctcagcagaaagaggaggggaacaagggaagaaagggtcctttgtcttcaattttgagggctttttactgaataagtatgtagtactaaaatgtatgctgtaatagctcatagtgagcgaggaaagtatcgggct

SEQ ID NO: 112181 - DNA, 251 bp, Glycine max; identical to SEQ ID NO: 111414

SEQ ID NO: 112182 - DNA, 253 bp, Glycine max
ggaagagcgaaagcaagaggaagatgaggatgaggagcagcagcgagagagcgaagaaagtgaagattctgagttacgaagacataagaataagaacccttttctcttcggctctaacaggttcgaaactctcttcaaaaaccaatatggtcgcattcgcgtcctccagaggttcaaccaacgctccccacaacttcagaatctccgagactaccgcattttggagttcaactccaaacccaacaccctcctt

SEQ ID NO: 112183 - DNA, 249 bp, Glycine max
gcagagtagagcagcacagaagagggaaaacggcaccgccgccgtagaagaaaacaaccatggtgcacgtctccttttacaggaactatgggaagacattcaagaagccgcgtcgtccgtacgagaaggagcgtctcgacgcggagttgaagctggttggtgagtacgggcttcggtgcaagagagagctgtggagggtgcagtacgcgctcagccgcatccgcaacaacgcgcggaacctcctcaccc

SEQ ID NO: 112184 - DNA, 259 bp, Glycine max
ctcaagctcaacagtcctacttgcaagggttcagcaagaatattctagaggcctcatacgacaccaaattcgaggagataaacaaggttctgtttggtagagaggaggggcagcaacaaggggaggagaggctgcaagagagtgtgattgtggaaatctcaaagaaacaaattcgggaactgagcaaacatgccaaatctagttcaaggaaaaccatttcttctgaagataaacctttcaacttgagaagccgcgaccc

SEQ ID NO: 112185 - DNA, 233 bp, Glycine max
ggctcgagcggctcgaggaagaaagtgaagaatctgagttacgaagaacataagaataagaacccttttctcttcggctctaacaggttcgaaactctcttcaaaaaccaatatggtcgcattcgcgtcctccagaggttcaaccaacgctccccacaacttcagaatctccgagactaccgcattttggagttcaactccaaacccaacaccctccttctccccaaccatgt

SEQ ID NO: 112186 - DNA, 243 bp, Glycine max
gttcaatatcctagtataccttaataaataatttaagatactatgatgagagcacggttcccattactgttgctgggacttgttttcctggcttcagtttctgtctcatttggcattgcttactgggaaaaagagaaccccaaacacaacaagtgtctccagagttgcaatagcgagagagactcgtacaggaaccaagcatgccacgctcgttgcaacctccttaaggtggagaaagaagaa

SEQ ID NO: 112187 - DNA, 247 bp, Glycine max
attgtctttgaacactcatcaccatggccaagcttgttctttccctttgtttccttcttttcagtggctgcttcgctctgagagagcaggcacagcaaaatgagtgccagatccaaaagctgaatgccctcaaaccggataaccgtatagagtcggaaggtgggttcattgagacctggaaccctaacaacaagccattccagtgtgccggtgttgccctctctcgctgcacccttaaccgcaatgc

SEQ ID NO: 112188 - DNA, 248 bp, Glycine max
cttaaacactcatcagtcatcaccatggccaagctagttttttccctttgttttctgcttttcagtggctgctgcttcgctttcagttccagagagcagcctcagcaaaacgagtgccagatccaaaaactcaatgccctcaaaccggataaccgtatagagtcagaaggagggctcattgagacatggaaccctaacaacaagccattccagtgtgccggtgttgccctctctcgctgcaccctcaa

SEQ ID NO: 112189 - DNA, 247 bp, Glycine max
caaacccgcaaggatcgtaccattacggtatgataaacacgacaaagacgatcatattggcgagttcggctggtcaagtaaatgggaagcaaagatacgcaattaacagcgtgtcttatgttgccccagacacccctcttaagctcgccgattacttcaaaatctccggtgttttccgccccggaagcatatctgacagacccactggtggcggcatttaccttgacacttctgtgttacaagctga

SEQ ID NO: 112190 - DNA, 247 bp, Glycine max; identical to SEQ ID NO: 105284

SEQ ID NO: 112191 - DNA, 247 bp, Glycine max
atcaaatggcaacagtgagaacaccattgaattttgattctagcaagcagagcttttgtcaattttctattgaccttctcggtggaggaattttagtggacaaaactggagattggatcacacttatacaaaattctccaattagtaacttgttgagagttgctgcttggaagaaaggctgtttaatggtcaagattgtgatgtctgggaatgcagcagtcaaaaggagtgattgggcctcattggt

SEQ ID NO: 112192 - DNA, 246 bp, Glycine max
taaagacagaagcggcaaaatcgattctactgagttgagagatgctctactgagtctgggctatgctgtttctcctgtggtattggatttgctcgtctcaaagtttgacaaaactggtggaaaaagcaaggctatagaatatgacaatttcatcgagtgttgtcttactgttaagggactgactgacaaattcaaagaaaaggatactgcgtattctggctctgcaaccttcacctatgaatcgtt

SEQ ID NO: 112193 - DNA, 250 bp, Glycine max
gggaaatgatactacaagccactaggcatgggtctagcaaaggaaacaataatgggaggtggaggccgtgtggccaaagttgaaattcagcagaagaagcctctctcaagggttccaaacacaaagccaccgttcactgttggccaactcaagaaagccattccaccgcactgctttcagcgttccctcctcacttcattgtcctatgttgtttatgacctttcattggctttcattttctacattgcca

SEQ ID NO: 112194 - DNA, 250 bp, Glycine max
caaagcacaaagcaaagctcatccttgagttaaaaaatggcagcagcttcttccatggctctctcatccccatccttggctggcaaggccgtgaagctgggcccatcagccccagaagtgggaagggtgagcatgaggaagaccgtcaccaagcaggtctcctcaggaagcccatggtacggcccagaccgagtcaagtacttgggcccattctctggcgagcccccgtcctacctaaccggtgagttcc

SEQ ID NO: 112195 - DNA, 276 bp, Glycine max
ttcggctcgagagaagaacaagtagttgagaactaagaaggagaagcaaatggcttcctcaatgatctcttccccagctgttaccactgtcaaccgtgccggtgccggcatggttgctccattcactggcctcaagtccatggctggcttccccaccagaaagaccaacaatgacattacctccattgctagcaacggtggaagagtgcaatgcatgcaggtgtggccaccagttggcaagaagaagtttgagactctttcctacctgccagacct

SEQ ID NO: 112196 - DNA, 261 bp, Glycine max
ctcgagccgaatcggctcgagcaacgctacctcagatctgaattcctttgcttttggtagcaatgccgagaacaaccagcggaacttccttgcaggttcgaaagacaatgtgataagccagatacctagtcaagtgcaggagcttgcgttccctgggtctgcaaaagatattgagaacctaataaagagccaaagtgagtcctactttgtggatgctcagcctcagcagaaagaggaggggaacaagggaagaaagggtcc

SEQ ID NO: 112197 - DNA, 257 bp, Glycine max
taaagatgagtttgaagaacaacatggtggtgctaaaggtgtgtttgttgcttcttttccttgtgggggttacagctgcacgcatggaactgagcttcttcaaaagtgatcagtcatcaagttatgatgatgatgagtattcaaaaccatgctgtgatctctgcatgtgcacacgctcaatgcctcctcaatgcagctgtgaagatattaggctgaattcatgccactcagattgtaagagctgtatgtgcacacgc

SEQ ID NO: 112198 - DNA, 258 bp, Glycine max
ggtttctcttcctcccttggagaaaaagaagagccaccgctgcgacgccgttcgtgcatttttgaggtgccgctgtcatgtttgggcgtggtggaccaaggaggagtgataactccaaatattatgatattctcgggatttccaaaaatgccagtgaagatgaaatcaagaaggcctatagaaaggcggctatgaagaaccatccagataagggaggagatcctgaaaagtttaaggagttaggtcaagcatatgaag

SEQ ID NO: 112199 - DNA, 255 bp, Glycine max
gtctttgaacactcatcaccatggccaagcttgttctttccctttgtttccttcttttcagtggctgcttcgctctgagagagcaggcacagcaaaatgagtgccagatccaaaagctgaatgccctcaaaccggataaccgtatagagtcggaaggtgggttcattgagacctggaaccctaacaacaagccattccagtgtgccggtgttgccctctctcgctgcacccttaaccgcaatgcccttcgtagac

SEQ ID NO: 112200 - DNA, 254 bp, Glycine max
gttcaatatcctagtataccttaataaataatttaagatactatgatgagagcacggttcccattactgttgctgggacttgttttcctggcttcagtttctgtctcatttggcattgcttactgggaaaaagagaaccccaaacacaacaagtgtctccagagttgcaatagcgagagagactcgtacaggaaccaagcatgccacgctcgttgcaacctccttaaggtggagaaagaagaatgtgaagaagg

SEQ ID NO: 112201 - DNA, 253 bp, Glycine max
ataaagatgagtttgaagaacaacatggtggtgctaaaggtgtgtttgttgcttcttttccttgtgggggttacagctgcacgcatggaactgagcttcttcaaaagtgatcagtcatcaagttatgatgatgatgagtattcaaaaccatgctgtgatctctgcatgtgcacacgctcaatgcctcctcaatgcagctgtgaagatattaggctgaattcatgccactcagattgtaagagctgtatgtgca

SEQ ID NO: 112202 - DNA, 258 bp, Glycine max
  unsure (1)..(258): unsure at all n locations
cgaaaacngtgttccaaaatccanacacacnnctctctnccncatggcnttgaacaatggcgtccccgccaccggcaccggcctcatcgtcagcttcggtgagatgctcatcgacttcgtccccaccgtctctggcgtgtccctggccgaggcccctggcttcctcaaggaaaacggcgttcgcnccgacggcatnaactttgaccagggcgcacgcaccgccctggccttcgtgacccncacgcgccgacggggagc

SEQ ID NO: 112203 - DNA, 254 bp, Glycine max
gcagaatgtgaagaaggtgaaattccacgaccacgaccacggccacaacacccggagagggaacctcagcaacccggtgagaaggaggaagacgaagatgagcaaccacgtccaatcccattcccacgcccacaacctcgtcaagaagaagagcacgagcagagagaggaacaggaatggcctcgcaaggaggaaaaacgcggagaaaagggaagtgaagaggaagatgaggatgaggatgaggaacaagatga

SEQ ID NO: 112204 - DNA, 255 bp, Glycine max
tgtcactggaattattgaagttggtaatgcagaaatcacagttcttgacagtgatcttggaagtgctgaaacccagaaaaagctagatttggctggaaatgatgccgtttcactctcagctaaccacctgcagaagttgaggttttctttccaattgacaactcctcatggtcatgtagctaagcctcatcaggcgtttttcaagttgagacatgagacaaaggttgaacacatctttgtggttggaaataccgg

SEQ ID NO: 112205 - DNA, 264 bp, Glycine max
tttgcacactcatcaccatggccaagcttgttctttccctttgtttccttcttttcagtggctgcttcgctctgagagagcaggcacagcaaaatgagtgccagatccaaaagctgaatgccctcaaaccggataaccgtatagagtcggaaggtgggttcattgagacctggaaccctaacaacaagccattccagtgtgccggtgttgccctctctcgctgcacccttaaccgcaatgcccttcgtagaccttcctacacca

SEQ ID NO: 112206 - DNA, 261 bp, Glycine max; identical to SEQ ID NO: 103663

SEQ ID NO: 112207 - DNA, 261 bp, Glycine max
agcacaacatcaagggaaagtgaaaaagaaaggtatatttgatcagggatatggcaactcgaagatatgagtttggaaggatgaatgaggctagccacccagactccatcagagctgccttggctgaattcctctccacttgcatctttgtctttgctggagaaggctctgcccttgctttgcgacaaatttacaaggaaccagggtcatcagcgggtgagctagtggtaattgcactagctcatgcatttgctctatttg

SEQ ID NO: 112208 - DNA, 257 bp, Glycine max
cgttggaacccgaccaccgcgttgagtccgaaggtggtttgattcaaacatggaactctcaacaccctgagctgaaatgcgccggtgtcactgtttccaaactcaccctcaaccgcaatggcctccacttgccatcttactcaccttatccccggatgatcatcatcgcccaagggaaaggagcacttggagttgcaattccaggatgtcctgagacgtttgaggagccacaagaacaatcaaacagaagaggctca

SEQ ID NO: 112209 - DNA, 255 bp, Glycine max
cttaaacactcatcagtcatcaccatggccaagctagttttttgcctttgttttctgcttttcagtggctgctgcttcgctttcagttccagagagcagcctcagcaaaacgagtgccagatccaaaaactcaatgccctcaaaccggataaccgtatagagtcagaaggagggctcattgagacatggaaccctaacaacaagccattccagtgtgccggtgttgccctctctcgctgcaccctcaaccgcaac

SEQ ID NO: 112210 - DNA, 254 bp, Glycine max
gacaaaaccctaacccccaaattctccttcagcgattcatctctcttgaatcgaatcgatggcacggatgggcccagggttccgattccaccccaccgacgaagccctggtggtgttctacctgaagcgcaagatgaccggaaacctctcccgctacgaccacatcgccgttgtcgacgtctacaagctcgagccctgggaccttccccctctgtcgaagctgaagacgaaggacttggaatggtacttcttca

SEQ ID NO: 112211 - DNA, 256 bp, Glycine max
ggatgctatcaagacatgggtccatgaatacgttttcttgtactacaaatcagatgacacacttagagaagatcctgaactccaagcctgctggaaagaactcgtagaggtgggtcatggagacaagaaaaatgagccatggtggcctaagatgcaaactcgtgaagagctagttgaagcttgcgctatcatcatatggactgcttcagcacttcatgcagctgttaagtttggacagtatccctatggaggttta

SEQ ID NO: 112212 - DNA, 250 bp, Glycine max
ggctcgaggactggagcaaaagctctccatggtgacatacagcaatcaacacgtgaggttacactgtctggctttaggtctgggaaattcatgacattagttgccacaaatgtggcagctcgaggtcttgatattaatgatgttcagttaattatacagtgtgaacccccacgggatgtagaagcctatatccatcgttctggacgcacaggaagagcaggtaatactggggttgctgttatgctttatg

SEQ ID NO: 112213 - DNA, 250 bp, Glycine max
ctcgagcgctcgagccgttcgttcactcttcttctcttgcggctagggttttagcgcattcttctagatttaaggaagatgggtaaggaaaaggttcacatcagtattgtggttattggccatgttgactctgggaagtccactaccactggccacctgatctacaagcttggaggcattgacaagcgtgttattgagagatttgagaaggaagctgctgagatgaacaagaggtctttcaagtatgcct

SEQ ID NO: 112214 - DNA, 240 bp, Glycine max
gaagcagagacagagcccttactatgacaatctctgtcgccctgtttcagatttgcttccatttattgccaatgggatcagaggtgtcactaccaacccagcgatttttgaaagagctatttcatcctcaaaatgctacgatgatcagttgagggaaatggtcagggccaggaaggacatagaaagtgcttattgggaattggttgtgaaggacatacaggatacttgcaaacttctgga

SEQ ID NO: 112215 - DNA, 254 bp, Glycine max
aataacactcgccatacccgttaacaagcctggtagatttgagagtttcttcctatctagcactgaagctcaacaatcctacttgcaaggattcagcaggaacattttagaggcctcctacgataccaaattcgaggagataaacaaggttctgtttagtagagaggaagggcagcagcaaggggagcagaggctgcaagagagcgtgattgtggaaatctcgaaggaacagattcgggcactgagcaaacgtg

SEQ ID NO: 112216 - DNA, 262 bp, Glycine max
ggattctcttctttattccttttgtaatttcattcattcttaatctttgtgaaaaataatgttcatcgagaattttaaggttgagtgtcctaatgtgaagtacaccgagactgagattcagtccgtgtacaactacgaaaccaccgaacttgttcacgagaacaggaatggcacctatcagtggattgtcaaacccaaatctgtcaaatacgaatttaaaaccaacatccatgttcctaaattaggggtaatgcttgtgggt

SEQ ID NO: 112217 - DNA, 262 bp, Glycine max
aaacaaaaatgtctcacttcggacgttcgggtcccccagacatttccgacacttactctcttctcgttctcaacatcaccttccgtaccaccgccgacgacctattccctctcttcgacaagtacgggaaggtcgtcgacatcttcatccccaaggatcgaagaactggtgagtcaaggggttttgcattcgtgcgttacaagtatgctgatgaggctcagaaggccgttgagaggctcgacgggagaatggttgatggtcg

SEQ ID NO: 112218 - DNA, 260 bp, Glycine max; identical to SEQ ID NO: 111866

SEQ ID NO: 112219 - DNA, 255 bp, Glycine max
ttttcagctggccaatacctttatcaagtgcaataggtcttggtgttctaaatttccttgggtctgtttttggtgatctcactgaatcaatgattaaacgagatgcgggagtgaaagactctggcacactaataccaggccatggcggagtactagacagagcagacagttatttgttcacgggtgctctagcatacaactttgtcaaaacctttttaccagtgtatggagtatgacatgaaacagtggtggtat

SEQ ID NO: 112220 - DNA, 256 bp, Glycine max
ggaacccagatatagagcacccagagaccatgcaacaacagcagcagcagaagagtcatggtggacgcaagcaggggcaacaccagcagcaggaggcagaaggtggcagtgtgctcagtggcttcagcaaacatttcttagcacaatccttcaacaccaacgaggacacagctgagaaacttcggtctccagatgacgaaaggcagcagatcgtgacagtggagggaggcctcagcgttatcagccccaagtggca

SEQ ID NO: 112221 - DNA, 250 bp, Glycine max
cggctcgagcttttcacttcaactctaaaaggttccaaactctcttcaaaaaccaatatggccacgttcgcgtcctccagaggttcaacaaacgctcccaacagcttcagaatctccgagactaccgcattttggagttcaactccaaacccaacacccttcttctcccccaccatgctgacgctgattacctcatcgttatccttaacgggactgccattcttaccttggtgaacaacgacgaccgaga

SEQ ID NO: 112222 - DNA, 249 bp, Glycine max
atcgcccaagggaaaggagcacttggagttgcaattccaggatgtcctgagacgtttgaggagccacaagaacaatcaaacagaagaggctcaaggtcgcagaagcagcagctacaggacagtcaccagaagattcgtcacttcaatgaaggagacgtactcgtgattcctcctggtgttccttactggacctataacactggcgatgaaccagttgttgccatcagtcttcttgacacctctaacttc

SEQ ID NO: 112223 - DNA, 250 bp, Glycine max
gcttttctttttcttgttctttaattttctgattttagcaaattaaaatagtagtgttattggtaggttttggcaaagatgttttcagttccaggggtgtcgggaatgctgaacagaggaggagggcataagataaaagggacagtggtgttgatgaggaagaatgtgttggacttcaacagcgtggctgatcttactaaaggaaatgttgggggactcataggcaccggcctcaacgttgttggctcaa

SEQ ID NO: 112224 - DNA, 250 bp, Glycine max
acaaggatctgtttagtagagaggaagggcagcagcaaggggagcagaggctgcaagagagcgagattgtggaaatctcgaaggaacagattcgggcactgagcaaacgtgccaaatctagttcaaggaaaaccatttcttctgaagataaaccttttaacttgagaagccgcgaccccatctactccaacaagcttggcaagttctatgcgatcaccccagagaaaaacccccagcttcgggacttgga

SEQ ID NO: 112225 - DNA, 253 bp, Glycine max
caaaaccatgcagatacgaacctgccactccatcaccacccaaacccttccacaacttccgtgttcttctagaaaagcccaccaccgccaccttcttccgccgttaaacgctgcggtttccgcggcgccgttcaaagcccggaaggcccactcaatgcctccagaaaagaaagaaattttcaagtccttggagggatgggcctcggagtgggtcctaccgctgctgaagcccgtggagcaatgctggcagcca

SEQ ID NO: 112226 - DNA, 261 bp, Glycine max
gtcagaaggagggctcattgagacatggaaccctaacaacaagccattccagtgtgccggtgttgccctctctcgctgcaccctcaaccgcaacgcccttcgtagaccttcctacaccaacggtcccacggaaatctacatccaacaaggtaagggtatttttggcatgatatacccgggttgtcctagcacatttgaagagcctcaacaacctcaacaaagaggacaaagcagcagaccacaagaccgtcaccagaagat

SEQ ID NO: 112227 - DNA, 256 bp, Glycine max
cttaattattaacacttccttagttcaatatggggaagcccttcactctctctctttcttccctttgcttgctactcttgtcaagtgtctgagcttaagtatgaaggaaattggggtcctttggtcaaccctgagtctcaacaaggctcaccccgtgttaaagtcgcataaatgacaagcatgatggtgtgaggatgaggccatcttatgaaataataacaaataaataaattttgtatgataataaaaagtatgg

SEQ ID NO: 112228 - DNA, 255 bp, Glycine max
acaaggttctgtttagtagagaggaagggcagaagcaaggggagcagaggctgcaagagagcgtgattgtggaaatctcgaaggaacagattcgggcactgagcaaacgtgccaaatctagttcaaggaaaaccatttcttctgaagataaaccttttaacttgagaagccgcgaccccatctactccaacaagcttggcaagttctttgagatcaccccagagaaaaacccccagcttcgggacttggatatct

SEQ ID NO: 112229 - DNA, 254 bp, Glycine max
ggcaaaggagcttccagatgattactttgttgttctggtcggagacatgatcacagaggaagccctgcctacttaccaaacaatgttaaatactttggatggagttcgtgatgaaacaggtgccagccttacttcctgggcaatttggacaagggcatggactgctgaagaaaacagacacggtgatcttcttaacaaatatctttacttgagtggtcgagttgacatgaaacaaattgaaaagacaattcagt

SEQ ID NO: 112230 - DNA, 253 bp, Glycine max
tggtccttaaacactcatcagtcatcaccatggccaagctagttttttccctttgttttctgcttttcagtggctgctgcttcgctttcagttccagagagcagcctcagcaaaacgagtgccagatccaaaaactcaatgccctcaaaccggataaccgtatagagtcagaaggagggctcattgagacatggaaccctaacaacaagccattccagtgtgccggtgttgccctctctcgctgcaccctcaa

SEQ ID NO: 112231 - DNA, 252 bp, Glycine max
  unsure (1)..(252): unsure at all n locations
gtctcacttcaagggcaagtaccatgatgagcttatcgccaatgctgcgtacattggcactcctggaanngggtattcttgctgctgatgagtcaacagggacaattggcaagcgtttggccagcatcagtgtagagaacattgaatccaacaggcgagctcttagggagctgcttttcactgctcctggtgttcttcaatatctcagtggtgtcatcctcnttgaggaaaccctctaccagagcacagctg

SEQ ID NO: 112232 - DNA, 252 bp, Glycine max
gaacaatcaaacagaagaggctcaaggtcgcagaagcagcagctacaggacagtcaccagaagattcgtcacttcaatgaaggagacgtactcgtgattctctcctggtgttccttactggacctataacactggcgatgaaccagttgttgccatcagtcttcttgacacctctaacttcaataaccagcttgatcaaacccctagggtattttaccttgctgggaacccagatatagagtacccagagac

SEQ ID NO: 112233 - DNA, 266 bp, Glycine max
cgcaattcggctcgataagcttggcaagttctttgagatcaccccagagataaacccccagcttcgggtcttggatatcttcctcagtattgtggatatgaacgagggagctcttcttctaccacactccaattcaaaggcgatagtgatactggtaattaatgaaggagatgcaaacattgaacttgttggcctaaaagaacaacaacaggagcagcaacaggaagagcaacctttggaagtgcggaaatatagagccgaattgt

SEQ ID NO: 112234 - DNA, 250 bp, Glycine max
cactgaccaagccatggcgatgagaaccaaactttctttagctatctttttcttttttcttttagccttattttcaaacctagcctttggcaaatgtaaagaaaccgaggtagaagaagaagaccctgagctcgtaacatgcaaacaccaatgccaacagccacagcaatacactgagggtgacaagcgggtatgcttgcaaagatgtgacaggtatcatcgtatgaagcaagagcgagagaaacaaatc

SEQ ID NO: 112235 - DNA, 249 bp, Glycine max
gtcaagtcgtcttacctgctaaggaaggtgttgagagcacaatttggctactagccaaagcttatgtcatcgtaaatgactcttgctaccatcaactcatgagccattggttaaatactcatgcggcgatggagccattcgtcatagcaacacaccgacatcttagcgtgcttcacccaatttacaagcttctgactcctcactatcgtaacaacatgaacatcaacgcacttgccaggcaatctctaa

SEQ ID NO: 112236 - DNA, 249 bp, Glycine max
gtgtcaaggtggtggctgaagcagtctcttgctcacttggatcaatcactgaagtctcctggatccagacttgtgctcatcaaaacccacagtactgtcacggctctcgtggagtgcgtaaaggccattcaagcaacaacagtagtgtttaaccatctgtatgatccggtttcacctgtccgtgatcacaacatccaagaaaaactagtggaacaacgcatatcagtcccaagctactatggagatctg

SEQ ID NO: 112237 - DNA, 250 bp, Glycine max; identical to SEQ ID NO: 111312

SEQ ID NO: 112238 - DNA, 248 bp, Glycine max
aattaagaaaagccatttccatagcagcctaagaagatgaagagcactagcttgttcgctatctttctactttgcgccttcacctcatacctaccttccgccaccgcccaggacgtgctcgacgtggatggcgatccgattcggaacggtttcatatactacgttttgccggcaataagaggaaacggtggcggaatagaacgagccgcactcgggaaagacacttgccctatcactgtagtgcaatc

SEQ ID NO: 112239 - DNA, 146 bp, Glycine max
atttgtccttgaatataatactcagcatggctaagcttgttctttccctttgttttctgcttttcagtggctgctgcttcgctttcagtttcagagagcagccacagcaaaacgagtgccagatccaacgcctcaatgccctcaaa

SEQ ID NO: 112240 - DNA, 260 bp, Glycine max
agaagatgatgatgatgaggaagagcagccacagtgcgtggagacagacaaaggttgccaacgccaaagcaaaaggagcagaaatggcattgatgagaccatttgcacaatgagacttcgccaaaacattggtcagaattcatcacctgacatctacaaccctcaagctggtagcatcacaaccgccaccagccttgacttcccagccctctggcttctcaaactcagtgcccagtatggatcactccgcaagaatgcta

SEQ ID NO: 112241 - DNA, 259 bp, Glycine max
gaaccagctcgaccagatgcctaggagattctatcttgctgggaaccaagagcaagagtttctacagtatcagccacagaagcagcaaggaggtactcaaagccagaaaggaaagcgtcagcaagaagaagaaaacgaaggaggcagcatattgagtggcttcgccccggaattcttggaacatgcgttcgtcgtggacaggcagatagtgagaaagctacaaggtgagaacgaagaggaagagaagggtgccattgtg

SEQ ID NO: 112242 - DNA, 252 bp, Glycine max
atatcctagtacaccgtattaaagaatttaagatatactatgatgagagcgcggttcccattactgttgctgggagttgttttcctggcatcagtttctgtctcatttggcattgcgtattgggaaaagcagaaccccagtcacaacaagtgcctccgaagttgcaatagcgagaaagactcctacaggaaccaagcatgccacgctcgttgcaacctccttacagtggaggaagaagaagaatgcgaagaa

SEQ ID NO: 112243 - DNA, 250 bp, Glycine max
taaaattcttccaccaagttatgggtatccttgtgttgcttcttttctccctcttaggtctctcttctagttccagcatatcaactcatcgttccatattggaccttgacctaaccaagtttaccacacagaaacaggtgtcttcactgttccaactatggaagagtgagcatggacgtgtctaccataaccacgaagaagaggcaaagagacttgagattttcaagaataacttgaactatatcaggga

SEQ ID NO: 112244 - DNA, 246 bp, Glycine max
actctccattgtctttgaacactcatcaccatggccaagcttgttctttccctttgtttccttcttttcagtgagtgcttcgctctgagagagcaggcacagcaaaatgagtgccagatccaaaagctgaatgccctcaaaccggataaccgtatagagtcggaaggtgggttcattgagacctggaaccctaacaacaagccattccagtgtgccggtgttgccctctctcgctgcacccttaac

SEQ ID NO: 112245 - DNA, 175 bp, Glycine max
gaaattttgataaaccgcgatcacaggttgccgcaccttaaaatcggaaataaaagcaatcgttacttgatttcaagaatctctcaatttctttctacttctttgtgtacgttttcttaagggaaagaaaatcactctctgtgctggccacagacttcgtgaatcattttctttt

SEQ ID NO: 112246 - DNA, 249 bp, Glycine max
ccttagttcaatatggggaagcccttcttcactctctctctttcttcccttttgcttgctactcttgtcgagtgcatgctttgctattacctccagcaagttcaacgagtgccaactcaacaacctcaacgcgttggaacccgaccaccgcgttgagtccgaaggtggtcttattgaaacatggaactctcaacaccctgagctgcaatgcgccggtgtcactgtttccaaacgcaccctcaaccgcaa

SEQ ID NO: 112247 - DNA, 118 bp, Glycine max
gatcgtgtacgtaccctacttagtaggcaatggaagcacttagagtgtgcttgtgcatggccttgcctctgttttgagacttttgtaatgttttcgagtttaaatctttgcctttgcg

SEQ ID NO: 112248 - DNA, 248 bp, Glycine max
cttaattattaacacttccttagttcaatatggggaagcccttcactctctctctttcttccctttgcttgctactcttgtcgagtgcatgctttgctattagctccagcaagctcaacgagtgccaactcaacaacctcaacgcgttggaacccgaccaccgcgttgagtccgaaggtggtttgattcaaacatggaactctcaacaccctgagctgaaatgcgccggtgtcactgtttccaaactc

SEQ ID NO: 112249 - DNA, 247 bp, Glycine max
gcgcgagaatttggagtggaaactgacgatggagaacggattcgctcgcatggacgacgaggttcatcgccggagccagagcaaccagaccttcacctgcaggtgtgagctccagactcctcactgcgacgccgtcggatccaccgccgtcgtcgccgtcgtcacgccggacaaaatcgtcgtctctaactgcggcgactcccgcgccgtcctctgccgcaacggcgtcgccatccctctctcctcc

SEQ ID NO: 112250 - DNA, 250 bp, Glycine max
tgaaggtgtggtgaggccatcttatatgaaataatatcaaaatatattttgtgtaataataaaactatggcctatgtatttaccaccctccgacccagcctatgttaatatctgagtggcgttgtacctttgaatcgccttaataaaatgtcagtcttcaagttttgtctttaaaaaaaaaaaaaaaaaaaaaaaaaaaaaaaaaaaaaaaaaaaaaaaaaaaaaaaaaaaaaaaaaaaaaaaaaagaaa

SEQ ID NO: 112251 - DNA, 137 bp, Glycine max
ctcgagccgcaaggtgagcgtgatggttcaaattaatatgttgattatcaacctggttctctcaacaccacagaccaactcataaaggatttggactattacgacattgttttccacatagtagatatgccctatgc

SEQ ID NO: 112252 - DNA, 251 bp, Glycine max
attggtggctggtgatggaaccaaaactcaggcacttgctgtttgccactcagatacttctggaatgaatcatcacatgcttcatgaactcatgggagttgatcctggaactaaccctgtttgccatttccttggaagcaaggccattttatgggtacccaatttatctatggacactgcctatcagactaacgttgttgtttaattagtccatgcatctgcatcttgggcaccataagattgtatataaa

SEQ ID NO: 112253 - DNA, 252 bp, Glycine max
taaaattcttccaccaagttatgggtaccttgtgttgcttcttttctccctcttaggtctctcttctagttccagcatatcaactcatcgttccatattggaccttgacctaaccaagtttaccacacagaaacaggtgtcttcactgttccaactatggaagagtgagcatggacgtgtctaccataaccacgaagaagaggcaaagagacttgagattttcaagaataacttgaactatatcagggacat

SEQ ID NO: 112254 - DNA, 249 bp, Glycine max
agaaaacgaaggaggcagcatattgagtggcttcgccccggaattcttggaacatgcgttcgtcgtggacaggcagatagtgagaaagctacaaggtgagaacgaagaggaagagaagggtgccattgtgacagtgaaaggaggtctcagcgtgataagcccacccacggaagagcagcaacaaagacccgaggaagaggagaagccagattgtgacgagaaagacaaacattgccaaagccaaagcag

SEQ ID NO: 112255 - DNA, 95 bp, Glycine max
gcaacctccttaaggtggagaaagaagaatgtgaagaaggtgaaattccacgcaacagacgatgcccacaacacccggagagggaacctcagcaa

SEQ ID NO: 112256 - DNA, 247 bp, Glycine max
tagaaaaaacccttttctggagaaagaatatagtcttcagctggacaaggatcattcatcttgaaagaagagtttgtgtgtgacaatctttatagttctaaggagggtgcaagagagaactgaatttgctgtgatggcaactcgtagatatgcttttggaagagctgatgaggccactcatccagactccatgagggccactttggctgaatttgtttctactttcatctttgtctttgctggagaa

SEQ ID NO: 112257 - DNA, 245 bp, Glycine max
tgtataccttaataaataatttaagatactatgatgagagcacggttccggttactgttgctgggacttgttttcctggcttcagtttctgtctcatttggcattgcttactgggaaaaagagaaccccaaacacaacaagtgtctccagagttgcaatagcgagagagactcgtacaggaaccaagcatgccacgctcgttgcaacctccttaaggtggagaaagaagaatgtgaagaaggtga

SEQ ID NO: 112258 - DNA, 244 bp, Glycine max
gtagttggttaactcgtcaggctcataacctgaagattgcaggttcgaatcctgcccccgccatgtcttgatttcgaaaagtctgaacttgaaccctagtttccatcaagcagaagcaagacggaccatcttgagggaagagggcagtttccctgatggctatgaatggcgcggtgactatccggaagattttgaaaagctgccaagcaatcaagcaataaaagaaagcgagcatcacaaatat

SEQ ID NO: 112259 - DNA, 146 bp, Glycine max
gttcaatatcctagtataccttaataaataatttaagatactatgatgagagcacggttcccattactgttgctgggacttgttttcctggcttcagtttctgtctcatttggcattgcttactgggaaaaagagtaccccaaaca

SEQ ID NO: 112260 - DNA, 245 bp, Glycine max
cagatgcctaggagattctatcttgctgggaaccaagagcaagagtttctaaaatatcagcagcagcagcaaggaggttcccaaagccagaaaggaaagcaacaagaagaagaaaacgaaggaagcaacatattgagtggcttcgcccctgaattcttgaaagaagcgttcggcgtgaacatgcagatagtgagaaacctacaaggtgagaacgaagaggaggatagtggagccattgtgacagt

SEQ ID NO: 112261 - DNA, 247 bp, Glycine max
agttgcagaccgagctagctagctagcaagcaagcacagagatggaggcaaagcgaggccatgccctcatgtgcttggcacgtgtttcactcttcctctgcgctctaaccctatccgctgctcacggaagcaccacggttcaagacatcgcgagaaagttgaaactcggggacaacgagcttctgcgcacggagaagaagttcaaggttttcatggagaattacgggaggagctactccacagagga

SEQ ID NO: 112262 - DNA, 137 bp, Glycine max
caggttgccgcaccttaaaaccggaaacaaaagcaatcgttacttgatttcaagaatctctcaatttctttctacttctttgtgtacgatttcttaagggaaagaaaatcactctctgtgctggccacagacttcgt

SEQ ID NO: 112263 - DNA, 144 bp, Glycine max
ggacggtagcttcgcgccactggcttttcaaccaagcgcgatgaccaattgtgcgaatcaacggttcctctcgtactaggttgaattactattgcgacactgtcatcagtagggtaaaactaacctgtctcacgacggtctaaa

SEQ ID NO: 112264 - DNA, 260 bp, Glycine max
tctccattggtccttaaacactcatcagtcatcaccatggccaagctagttttttccctttgttttctgcttttcagtggctgctgcttcgctttcagttccagagagcagcctcagctatacgagtgccagatccaaaaactcaatgccctcaaaccggataaccgtatagagtcagaaggagggctcattgagacatggaaccctaacaacaagccattccagtgtgccggtgttgccctctctcgctgcaccctcaa

SEQ ID NO: 112265 - DNA, 252 bp, Glycine max
aaatgaccaagttcacaatcctcctcatctctcttctcttctgcatcgcccacacttgcagcgcctccaaatggcagcaccagcaagatagctgccgcaagcagctccagggggtgaacctcacgccctgcgagaagcacatcatggagaagatccaaggccgcggcgatgacgatgatgatgatgacgacgacaatcacattctcaggaccatgcgggagcgaatcaactacataaggaggaacgaaggaa

SEQ ID NO: 112266 - DNA, 254 bp, Glycine max
cgaagaagaagatcaacctcgtcctgatcaccctccacagcgaccaagcaggcccgaacaacaagaaccacgtggaagaggatgtcagactagaaatggggttgaggaaaatatttgcaccatgaagcttcacgagaacattgctcgcccttcacgtgctgacttctacaacccaaaagctggtcgcattagcaccctcaacagtctcaccctcccagccctccgccaattcggactcagtgcccaatatgttg

SEQ ID NO: 112267 - DNA, 253 bp, Glycine max
gtataccttaataaataatttaagatactatgatgagagcacggttcccattactgttgctgggacttgttttcctggcttcagtttctgtctcatttggcattgcttactgggaaaaagagaaccccaaacacaacaagtgtctccagagttgcaatagcgagagagactcgtacaggaaccaagcatgccacgctcgttgcaacctccttaaggtggagaaagaagaatgtgaagaaggtgaaattccacg

SEQ ID NO: 112268 - DNA, 264 bp, Glycine max
gcttccttggcccgatattgttcacctccctcattactctcatcctcactggcatgatgcagatgttcttccctcttggacctactgcccatgctatctatggtgcaattggtgctatgatattctctggctacattgtgtatgacactgacaacctgatcaagcgtttcacttatgatgagtacattggagcctctgttactctttatcttgacatactcaacctcttcctttccatcttaaggatcctcagggaggcaaata

SEQ ID NO: 112269 - DNA, 255 bp, Glycine max
  unsure (1)..(255): unsure at all n locations
gtgcggtttcctttgttggtgttgctgggaactgttttcctggcatcagtttgtgtctcattaaaggtgagagaggatgagaataaccctttctacttgagaagctctaacagcttccaaactctctttgagaaccaaaacggtcgcattcgtctcctccagagattcaacaaacgctccccacaacttgagacccanncgagactaccggattgtccagtttcagtcaaaacccaacacaatccttctccccca

SEQ ID NO: 112270 - DNA, 255 bp, Glycine max
ctcgagccgctacatacaacaaggtaatggtatttttggcatgatattcccgggttgtcctagcacttatccagagccgcaagaatctcagcaacgaggacgaagccagaggccccaagaccgtcaccaaaaggtacatcgcttcagagagggtgatttgatcgcagtgcctactggtgttgcatggtggatgtacaacaatgaagacactcctgttgttgccgtttctattattgacaccaacagcttggagaa

SEQ ID NO: 112271 - DNA, 248 bp, Glycine max
cttaattattaacacttccttagttcaatatgggcaagcccttcactctctctctttcttccctttgcttgctactcttgtcgagtgcatgctttgctattagctccagcaagctcaacgagcgccaactcaacaacctcaacgcgttggaacccgaccaccgcgttgagtccgaagtgctttgattcaaacatggaactctcaacaccctgagctgaaatgcgccggtgtcactgtttccaaactca

SEQ ID NO: 112272 - DNA, 252 bp, Glycine max
caaaccccgacttctggaagggatgcatttattagataaaaggtcaacacaggctctgcctgttgctttgatgattcatgataactcgtcggatcgcacggcctttgtgccggcgacgcatcattcaaatttctgccctatcaactttcgatggtaggatagtggcctaccatggtggtgacgggtgacggagaattagggttcgattccggagagggagcctgagaaacggctaccacatccaaggaaggc

SEQ ID NO: 112273 - DNA, 255 bp, Glycine max
gtgaaattccacgaccacgaccacagacacaacacccggagagggaacctcagcaacccggtgagaaggcggaagacgacgatgagcaaccacgtccaatcccattcccacgcccacaacctcgtcaagaagaagagcacgagcagagagaggaacaggaatggcctcgcaaggaggaaaaacgcggagaaaagggaagtgaagaggaagatgaggatgaggatgaggaacaagatgaacgtcaattcccattcc

SEQ ID NO: 112274 - DNA, 255 bp, Glycine max
gcaaaattaaagactggtggttctggagggcccttaaaacaacaaggggagaagaaagaaactcctcaagaaagacttaaaagaatcatgaacaagcaactaaacaaacaaattaagaaagatactgctgctgaacttgccaagaaaagggaacaggagcggcagaggcaggaaaagcttgcggaaactagtagattgagtcggtatagacaccacagccgcagccgcagcaggagtttcagccgttcccctcca

SEQ ID NO: 112275 - DNA, 255 bp, Glycine max
gggaagcccttcactctctctctttcttccctttgcttgctactcttgtcgagtgcatgctttgctattagctccagcaagctcaacgagtgccaactcaacaacctcaacgcgttggaacccgaccaccgcgttgagtccgaaggtggtttgattcaaacatggaactctcaacaccctgagctgaaatgcgccggtgtcactgtttccaaactcaccctcaagcgcaatggcctccacttgccatcttactca

SEQ ID NO: 112276 - DNA, 252 bp, Glycine max
cggctcgagtaattattaacacttccttagttcaatatggggaagcccttcactctctctctttcttccctttgcttgctactcttgtcgagtgcatgctttgctattagctccagcaagctcaacgagtgccaactcaacaacctcaacgcgttggaacccgaccaccgcgttgagtccgaacgtggtttgattcaaacatggaactctcaacaccctgagctgaaatgcgccggtgtcactgtttccaaa

SEQ ID NO: 112277 - DNA, 250 bp, Glycine max
cttaaacactcatcagtcatcaccatggccaagctagttttttccctttgttttctgcttttcagtggctgctgcttcgctttcagttccagagagcagcctcagcaaaacgagtgccagatccaaaaactcaatgccctcaaaccggataaccgtatagagtcagaaggagggctcattgagacatggaaccctaacaacaagccattccagtgtgccggtgttgccctctctcgctgcaccctcaacc

SEQ ID NO: 112278 - DNA, 248 bp, Glycine max
ccttaataaataatttaagatactatgatgagagcacggttcccattactgttgctgggacttgttttcctggcttcagtttctgtctcatttggcattgcttactgggaaaaagagaaccccaaacacaacaagtgtctccagagttgcaatagcgagagagactcgtacaggaaccaagcatgccacgctcgttgcaacctccttaaggtggagaaagacgaatgtgaagaaggtgaaattccaca

SEQ ID NO: 112279 - DNA, 250 bp, Glycine max
ggaagacacaacccagaagacctagacaagaagaaccacgtgaaagaggatgcgagagaagaaacggggttgaggaaaatatctgcaccttgaagcttcacgagaacattgctcgcccttcacgcgctgacttctacaaccctaaagctggtcgcattagtaccctcaacagcctcaccctcccagccctccgccaattccaactcagtgcccaatatgttgtcctctacaagaatggaatttactctcc

SEQ ID NO: 112280 - DNA, 248 bp, Glycine max
ctctctggtactcagaagtttgagttgccaaaagaggatgttagcatagcagatgtattccaagctgttgatgctgccaagagaaacttcaccgtttctgcatggggtctagttgacaccacattggaagatgtcttcattaaggttgcgcgtgaggctcaggcatttgacaccttgtcataactgtcatacaaaataaattctgctcaaccaaatcagtaaataaataaactgctactctatgctaa

SEQ ID NO: 112281 - DNA, 252 bp, Glycine max
ctcgagccggacaaatccgtgaaggaccttgttctgttgctgttcgagactgctcttctcacttctggtttcagccttgacgaacccaacacttttggaaacaggatccacagaatgttgaagcttggactgagcatcgacgaggatgcagctgaagctgatgctgatatgcccccactggaggaggaggctgaagctgatgctgagggcagcaaaatggaggaggttgattaaacttttatatcatgcgga

SEQ ID NO: 112282 - DNA, 251 bp, Glycine max
tcgagcttttcacttcaactctacaaggttccaaactctcttcaaaaaccaatatggccacgttcgcgtcctccagaggttcaacaaacgctcccaacagcttcagaatctccgagactaccgcattttggagttcaactccaaacccaacacccttcttctcccccaccatgctgacgctgattacctcatcgttatccttaacgggactgccattcttaccttggtgaacaacgacgaccgagactctt

SEQ ID NO: 112283 - DNA, 254 bp, Glycine max
tggggaagcccttcttcactctctctctttcttccctttgcttgctactcttgtcgagtgcatgctttgctattacctccagcaagttcaacgagtgccaactcaacaacctcaacgcgttggaacccgaccaccgcgttgagtccgaacgtggtcttattgaaacatggaactctcaacaccctgagctgcaatgcgccggtgtcactgtttccaaacgcaccctcaagcccaacggcctccacttgccatct

SEQ ID NO: 112284 - DNA, 113 bp, Glycine max
ggagtctgacatgtgtgcgagtcaacgggcgagtaaacccgtaaggcgcaaggaagctgattggtgggatccccctgtgggttgcaccgccgaccgaccctgatcttctgtga

SEQ ID NO: 112285 - DNA, 256 bp, Glycine max
gcaaactcattgttgaacgcattgccagaggaagtgattcagcacacttttaacctaaagagccagcaggccaggcaggtgaagaacaacaaccctttcagcttcctggttccacctcaggagtctcagaggagagctgtggcttagagagccctttttgcatgtgctaccacacttttgtccttttgggctctagctagtgctggtagcagtaaataagaatgaataaaagagacaaaggcttagatgccctttg

SEQ ID NO: 112286 - DNA, 251 bp, Glycine max
tgggaaacaaaactacccttttgcttttgctctttgttctttgccatggagtggccacaacaacaatggccttccatgatgatgagggtggtgataaaaagtcaccaaaaagtttgtttttgatgagcaactccacgagggttttcaagactgatgcaggggaaatgcgtgtgctgaaaagccatggtggtaggatattttataggcacatgcacattggcttcatctctatggaaccaaagtccttgttt

SEQ ID NO: 112287 - DNA, 249 bp, Glycine max
gtaccacagaacttcgtggtggcggagaagccggagaacaaggattcgaatacatagtattcaagacacaccacaacgcagtcactagctacttgaaggatgtgtttagggcaattccctcagaggttcttgcccattcttacaaccttcgacagagtcaagtgtctgagcttaagtatgaaggaaattggggtcctttggtcaaccctgagtctcaacaaggctcaccccgtgttaaagtcgcataaa

SEQ ID NO: 112288 - DNA, 252 bp, Glycine max
agagcacgagcagagagagggacaggaatggcctcgcaaggaggaaaaacgcggagaaaagggaagtgaagaggaagatgaggatgaggatgaggaacaagatgaacgtcaattcccattcccacgcccacctcatcagaaggaagagcgaaagcaagaggaagatgaggatgaggagcagcagcgagagagcgaagaaagtgaagattctgagttacgaagacataagaataagaacccttttctcttcgg

SEQ ID NO: 112289 - DNA, 250 bp, Glycine max
agagaatggctcccaagggtttaacctttctggctgtgttaatatgcgtttcagcactgtcactgagtccttctgttgcgggggaagggcaaaataatggccttgttatgaacttctacaaggaatcatgccctcaggctgaagacatcatcacagaacaagtcaagcttctctacaagcgccacaagaacactgctttctcctggctcaggaacatcttccatgactgtgctgttcagagttgtgatgc

SEQ ID NO: 112290 - DNA, 248 bp, Glycine max
ggagtacccagagaccatgcaacaacaacaacagcagaaaagtcatggtggacgcaagcaggggcaacaccagcaggaggaagaggaagaaggtggcagcgtgctcagtggcttcagcaaacacttcttggcacaatccttcaacaccaacgaggacatagctgagaaacttcagtctccagacgacgaaaggaagcagatcgtgacagtggaaggaggtctcagcgttatcagccccaagtggcaag

SEQ ID NO: 112291 - DNA, 247 bp, Glycine max
ctagtataccttaataaataatttaagatactatgatgagagcacggttcccattactgttgctgggacttgttttcctggcttcagtttctgtctcatttggcattgcttactgggaaaaagagaaccccaaacacaacaagtgtctccagagttgcaatagcgagagagactcgtacaggaaccaagcatgccacgctcgttgcaacctccttaaggtggagacagaagaatgtgaagaaggtga

SEQ ID NO: 112292 - DNA, 249 bp, Glycine max
gggaaatgatactacaagccactaggcatgggtctagcaaaggaaacaataatgggaggtggaggccgtgtggccaaagttgaaattcagcagaagaagcctctctcaagggttccaaacacaaagccacccctcactgttggccaactcaagaaagccattccaccgcactgctttcagcgttccctcctcacttcattgtcctatgttgtttatgacctttcattggctttcattttctacattgcc

SEQ ID NO: 112293 - DNA, 252 bp, Glycine max
atatcctagtataccttaataaataatttaagatactatgatgagagcacggttcccattactgttgctgggacttgttttcctggcttcagtttctgtctcatttggcattgcttactgggaaaaagagaaccccaaacacaacaagtgtctccagagttgcaatagcgagagagactcgtacaggaaccaagcatgccacgctcgttgcaacctccttaaggtggagaaagaagaatgtgaagaaggtga

SEQ ID NO: 112294 - DNA, 250 bp, Glycine max
cgaaatgaccaagttcacaatcctcctcatctctcttctcttctgcatcgcccacacttgcagcgcctccaaatggcagcaccagcaagatagctgccgcaagcagctccagggggtgaacctcacgccctgcgagaagcacatcatggagaagatccaaggccgcggcgatgacgatgatgatgatgacgacgacaatcacattctcaggaccatgcggggaagaatcaactacataaggaggaacgaa

SEQ ID NO: 112295 - DNA, 246 bp, Glycine max
aggagtctgacatgtgtgcgagtcaacgggcgagtaaacccgtaaggcgcaaggaagctgattggtgggatccccctgtgggttgcaccgccgaccgaccctgatcttctgtgaagggttcgagtgagagcatacctgtcgggacccgaaagatggtgaactatgcctgagcggggcgaagcacgaggaaactctggtggaggcccgcagcgatactgacgtgcaaatcgttcgtctgacttgggt

SEQ ID NO: 112296 - DNA, 246 bp, Glycine max
tttaatttcaattcatttgataaccttattatttgtcaaagaaatcataggattatctgattcgtccaaaaaaggcatgataataacttttttttgtataacaggattgttagttactcgttgggttttttcaggccatttaccgtttagtgatttatatgaatcattaatatttctttcatggactttttccattttttatatggttccttgcttcaacaaatctaaaaactactatttaaatac

SEQ ID NO: 112297 - DNA, 246 bp, Glycine max
ctttttcttgttctttaattttctgattttagcaaattaaaatagtagtgttattggtaggttttggcaaagatgttttcagttccaggggtgtcgggaatcctgaacagaggaggagggcataagataaaagggacagtggtgttgatgatcaagaatgtgttggacttcaacagcgtggctgatcttactacaggaaatgtttctgggactcataggcaccggcctcaacgttgttggctcaac

SEQ ID NO: 112298 - DNA, 249 bp, Glycine max
cttaattattaacacttccttagttcaatatggggaagcccttcactctctctctttcttccctttgcttgctactcttgtcgagtgcatgctttgctattagctccagcaagctcaacgagtgccaactcaacaacctcaacgcgttggaacccgaccaccgcgttgagtccgaaggtggtttgattcaaacatggaactctcaacaccctgagctgaaatgcgccggtgtcactgtttccaaactca

SEQ ID NO: 112299 - DNA, 248 bp, Glycine max
cgatatcctagtataccttaataaataatttaagatactatgatgagagcacggttcccattactgttgctgggacttgttttcctggcttcagtttctgtctcatttggcattgcttactgggaaaaagagaaccccaaacacaacaagtgtctccagagttgcaatagcgagagagactcgtacaggaaccaagcatgccacgctcgttgcaacctccttacggtggagaaagaagaatgtgaaga

SEQ ID NO: 112300 - DNA, 247 bp, Glycine max
ctagtataccttaataaataatttaagatactatgatgagagcacggttcccattactgttgctgggacttgttttcctggcttcagtttctgtctcatttggcattgcttactgggaaaaagagaaccccaaacacaacaagtgtctccagagttgcaatagcgagagagactcgtacaggaaccaagcatgccacgctcgttgcaacctccttaaggtggagaaagaagaatgtgaagaaggtga

SEQ ID NO: 112301 - DNA, 247 bp, Glycine max
atacatagtagtgttggtgggttgcaaagatgcttgggggtcttctccataggggtcataagataaaagggacagtggtgttgatgcgcaagaatgtgttggacgtgaatagcgtaaccagcgttgggggaattattggtcaaggtctcgacttagttggctcaacactcgatactcttactgccttcttgggccgatccgtgtctctccagctcattagtgctacgcaagctgatgccaacggaaa

SEQ ID NO: 112302 - DNA, 247 bp, Glycine max
gagatggagaggtgtgacaaggtgatgaaccaacgcaacatgcatgattgtgctaaaacaggtcctggctatccttcacccctggcagccatgtctggtcccaaagagactctcctttatgtcactgctatctactcaggaacaggaagggataagcctgactttctggccacagtggatgtggatccaagctctccaacgtattcaaaagttatccataggttacctgtaccttatttaggtgatg

SEQ ID NO: 112303 - DNA, 247 bp, Glycine max
ggggaagcccttcttcactctctctctttcttccctttgcttgctactcttgtcgagtgcatgctttgctattacctccagcaagttcaacgagtgccaactcaacaacctcaacgcgttggaacccgaccaccgcgttgagtccgaaggtggtcttattgaaacatggaactctcaacaccctgagctgcaatgcgccggtgtcactgtttccaaacgcaccctcaagcgcaacggcctccacttg

SEQ ID NO: 112304 - DNA, 249 bp, Glycine max
ctgtttccaaacgcaccctcaacggcaacggcctccacttgccaacttactcaccttatccccaaatgatcattgtcgttcaagggaagggagcaattggatttgcatttccgggatgtcctgagacgtttgagaagccacaacagcaatcaagcagaagaggctcaaggtcgcagcagcaactacaagacagtcaccagaagattcgtcacttcaatgaaggagacgtactagtgattcctcctggtg

SEQ ID NO: 112305 - DNA, 256 bp, Glycine max
cggctcgagcttttcacttcaactctagaaggttccaaactctcttcaaaaacgagtatggccacgttcgcgtcctccagaggttcaacaaacgctcccaacagcttcagaatctccgagactaccgcattttggagttcaactccaaacccaacacccttcttgcccgccaccatgctgacgctgattacctcatcgttatccttaacgggactgccattcttaccttggtgaacaacgacgaccgagactctta

SEQ ID NO: 112306 - DNA, 214 bp, Glycine max
gttcaatatcctagtacaccgtattagagaatttaagatatactatgatgagagcgcggttcccattactgttgctgggagttgttttcctggcatcagtttctgtctcatttggcattgcgtattgggaaaagcagaaccccagtcacaacaagtgcctccgaagttgcaatagcgagaaagactcctacaggatacaagcatgccacgctcg

SEQ ID NO: 112307 - DNA, 248 bp, Glycine max
cttaattattaacacttccttagttcaatatggggaagcccttcactctctctctttcttccctttgcttgctactcttgtcgagtgcatgctttgctattagctccagcaagctcaacgagtgccaactcaacaacctcaacgcgttggaacccgaccaccgcgttgagtccgaaggtggtttgattcaaacatggaactctcaacaccctgagctgacatgcgccggtgtcactgtttccaaactc

SEQ ID NO: 112308 - DNA, 249 bp, Glycine max
aagcagaactctcatcgcaacgtcaaaagttacacgcagaacctgcaacttctcgaagacttgcgcttcgccaccgccgccaccaaaatcaaggccactcccgacggcgagtacatcattgcttccggcatctatccgccgcaagtcaaagtctacgaggtcagggagctaggcttgaagttcgaacgccacttggattccgagatcgttgattttcaggttctgtcagacgactattcaaaacttgca

SEQ ID NO: 112309 - DNA, 248 bp, Glycine max
tgaacactcatcaccatggccaagcttgttctttccctttgtttccttcttttcagtggctgcttcgctctgagagagcaggcacagcaaaatgagtgccagatccaaaagctgaatgccctcaaaccggataaccgtatagagtcggaaggtgggttcattgagacctggaaccctaacaacaagccattccagtgtgccggtgttgccctctctcgctgcacccttaaccgcaatgcccttcgtag

SEQ ID NO: 112310 - DNA, 248 bp, Glycine max
atggaactctcaacaccctgggctgcaatgcgccggtgtcactgtttccaaacgcaccctcaacggcaacggcctccacttgccatcttactcaccttatccccaaatgatcattgtcgttcaagggaagggagcaattggatttgcatttccgggatgtcctgagacgtttgagaagccacaacagcaatcaagcagaagaggctcaaggtcgcagcagcaactacaagacagtcaccagaagattc

SEQ ID NO: 112311 - DNA, 247 bp, Glycine max
gttggaatctgaatgcaaacagtgtgatctatgtgactcgaggacaaggaaaggttagagttgtgaactgccaagggaatgcagtgttcgacggtgagcttaggaggggacaattgctggtggtaccacagaacttcgtggtggcggagcaagccggagaacaaggattcgaatacatagtattcaagacacaccacaacgcagtcactagctacttgaaggatgtgtttagggcaattccctcaga

SEQ ID NO: 112312 - DNA, 244 bp, Glycine max
cttaattattaacacttccttagttcaatatggggaagcccttcactctctctctttcttccctttgcttgctactcttgtcgagtgcatgctttgctattagctccagcaagctcaacgagtgccaactcaacaacctcaacgcgttggaacccgaccaccgcgttgagtccgaaggtggtttgattcaaacatggaactctcaacaccctgagctgaaatgcgccggtgtcactgtttccaa

SEQ ID NO: 112313 - DNA, 247 bp, Glycine max
ctcgagccggaatggctcccaagggtttaacctttctggctgtgttaatatgcgtttcagcactgtcactgagtccttctgttgcgggggaagggcaaaataatggccttgttatgaacttctacaaggaatcatgccctcaggctgaagacatcatcacagaacaagtcaagcttctctacaagcgccacaagaacactgctttctcctggctcaggaacatcttccatgactgtgctgttcagag

SEQ ID NO: 112314 - DNA, 246 bp, Glycine max
  unsure (1)..(246): unsure at all n locations
caggaaccaagcatgccacgctcgttgcaacctccttaaggtggagaaagaagaatgtgaagaaggtgaaattccacgaccacgaccacacacacaacacccggagagggaacctcagcaacccggtgagaaggaggaagacgaagatgagcaaccacgtccaatcccattcccacccccacaanctcgtcaagaagaagagcacgagcagagagaggaacaggaatggcctcgcaaggaggaaaa

SEQ ID NO: 112315 - DNA, 247 bp, Glycine max
ggcaatcttctctccacgcccttcttgggtaaccgtctgaagtgcagcaatggcagatggattgcattcgcagcatccatcggtagttcagaagttatctggacagtcttatcttgtgtccaggcttgctcctaatcactccagaaactgttctaccactggtagttacttcaatggaggtttgcagtcttcaggtttggttccagtcacggcacacgcgccggctgagaaaggggtgtctggattt

SEQ ID NO: 112316 - DNA, 244 bp, Glycine max
tctctccattgtctttgaacactcatcaccatggccaagcttgttctttccctttgtttccttcttttcagtggctgcttcgctctgagagagcaggcacagcaaaatgagtgccagatccaaaagctgaatgccctcaaaccggataaccgtatagagtcggaaggtgggttcattgagacctggaaccctaacaacaagccattccagtgtgccggtgttgccctctctcgctgcaccctta

SEQ ID NO: 112317 - DNA, 247 bp, Glycine max
gaaagtcttccatagccccccaaaaatgaagagcaccatcttctttgctctctttctcttttgtgccttcaccacctcatacctaccttcagccatcgctgatttcgtgctcgataatgaaggtaaccctcttgaaaatggtggcacatattatatcttgtcagacataacagcatttggtggaataagagcagccccaacgggaaatgaaagatgccctctcactgtggtgcaatctcgcaatgag

SEQ ID NO: 112318 - DNA, 250 bp, Glycine max
ggaatgaccaagttcacaatcctcctcatctctcttctcttctgcatcgcccacacttgcagcgcctccaaatggcagcaccagcaagatagctgccgcaagcagctccagggggtgaacctcacgccctgcgagaagcacatcatggagaagatccaaggccgcggcgatgacgatgatgatgatgacgacgacaatcacattctcaggaccatgcggggaagaatcaactacataaggaggaacgaag

SEQ ID NO: 112319 - DNA, 248 bp, Glycine max
gtcattttagctttctcttccttcataatttctcacctttcaaatctccattcagcttcattttctgcatagaaaaaacccttttctggagaaagaatatagtcttcagctggacaaggatcattcatcttgaaagaagagtttgtgtgtgacaatctttatagttctaaggagggtgcaagagagaactgaatttgctgtgatggcaactcgtagatatgcttttggaagagctgatgaggccactc

SEQ ID NO: 112320 - DNA, 243 bp, Glycine max
aacactttccttagttcaatatggggaagcccttcttcactctctctctttcttccctttgcttgctactcttgtcgagtgcatgctttgctattacctccagcaagttcaacgagtgccaactcaacaacctcaacgcgttggaacccgaccaccgcgttgagtccgaagtggtcttattgaaacatggaactctcaacaccctgagctgcaatgcgccggtgtcactgtttccaaacgcac

SEQ ID NO: 112321 - DNA, 243 bp, Glycine max
gttcaatatcctagtataccttaataagtattttaagatactatgatgagagcacggttcccattactgttgctggcacttgttttcctggcttcagtttctgtctcatttggcattgcttactgggaaaaagagaaccccaaacacaacaagtgtctccagagttgcaatagcgagagagactcgtacaggaaccaagcatgccacgctcgttgcaacctccttaaggtggagaaagaagaa

SEQ ID NO: 112322 - DNA, 244 bp, Glycine max
tgccatttgcacaatgagacttcgccaaaacattggtcagaattcatcacctgacatctacaaccctcaagctggtagcatcacaaccgccaccagccttgacttcccagccctctggcttctcaaactcagtgcccagtatggatcactccgcaagaatgctatgttcgtgccacactacaccctgaacgcgaacagcataatatacgcattgaatgggcgggcattggtacaagtggtgaat

SEQ ID NO: 112323 - DNA, 243 bp, Glycine max
caatatcctagtacaccgtattaaagaatttaagatatactatgatgagagcgcggttcccattactgttgctgggagttgttttcctggcatcagtttctgtctcatttggcattgcgtattgggaaaagcagaaccccagtcacaacaagtgcctccgaagttgcaatagcgagaaagactcctacaggaaccaagcatgccacgctcgttgcaacctccttaaggtggaggaagaagaag

SEQ ID NO: 112324 - DNA, 184 bp, Glycine max
gttgtgactcgttcttcttcgccgttatcttcttcttttgttgtttgtgtgtttgttttttctctcacctgaaaatgtcttgctgcggtcgtaactgtggttgcggaagcgcctgcaagtgcggcaacggctgcggaggctgcaagatgtacccagacttgagctacaccgagtcaaccaccac

SEQ ID NO: 112325 - DNA, 244 bp, Glycine max
gttctgcaagtgaaggaattattattagtgttagccctaaacttcaccttcaaccatgaccacagtgccaccacacagtgtccaagtgcacacaacaacacaccgctacgaagccggcgtcgtcccgccggctcgttttgaggcgccgcgttacgaagccggcatcctcctgctcctggcaggactgaccctggctggaactctcaccgggctggtggtggcaacaccgctcttcatcatcttc

SEQ ID NO: 112326 - DNA, 245 bp, Glycine max
agtgtctttgaacactcatcaccatggccaagcttgttctttccctttgtttccttcttttcagtgagtgcttcgctctgagagagcaggcacagcaaaatgagtgccagatccaaaagctgaatgccctcaaaccggataaccgtatagagtcggaaggtgggttcattgagacctggaaccctaacaacaagccattccagtgtgccggtgttgccctctctcgctgcacccttaaccgcaat

SEQ ID NO: 112327 - DNA, 242 bp, Glycine max
gtcttctcttgcggctaggtttagcgcagttcttctagatttaaggaagatgggtaaggaaaaggttcacatcagtattgtggtcattggccatgtcgactctgggaaatccactaccactggtcacctgatttacaagcttggaggcattgacaagcgtgttattgagaggtttgagaaggaagctgctgagatgaacaagaggtctttcaagtatgcctgggtgctggacaaacttaagg

SEQ ID NO: 112328 - DNA, 245 bp, Glycine max
ccgattgctagaatggaatttcgatgctcagtcatctcttttaccattctcttctctcttgctcttgcaggagagagccatgtccatgcatcgctacctgaggaagattattgggaagctgtttggccaaacactcccattcccactgcactgcgagagcttctaaagcctctccctgcaggtgttgccatcgatgaactccctaagcaaattgatgatacacagtacccaaaaacattcttcta

SEQ ID NO: 112329 - DNA, 241 bp, Glycine max
cttaattattgacacttccttagttcaatatggggaagcccttcaatctctctctttcttccctttgcttgctactcttgtcgagtgcatgctttgctattagctccagcaagctcaacgagtgccaactcaacaacctcaacgcgttggaacccgaccaccgcgttgagtccgaaggtggtttgattcaaacatggaactctcaacaccctgagctgaaatgcgccggtgtcactgtttc

SEQ ID NO: 112330 - DNA, 249 bp, Glycine max
gtgcggtttcctttgttggtgttgctgggaactgttttcctggcatcagtttgtgtctcattaaaggtgagagaggatgagaataaccctttctacttgagaagctctaacagcttccaaactctctttgagaaccaaaacggtcgcattcgtctcctccagagattcagacaaacgctccccacaacttgagaaccttcgagactaccggattgtccagtttcagtcaaaacccaacacaatccttct

SEQ ID NO: 112331 - DNA, 249 bp, Glycine max
agagagtcttccatagccccccaaaaatgaagagcaccatcttctttggtctctttctcttttgtgccttcaccacctcatacctaccttcagccatcgctgatttcgtgctcgataatgaaggtaaccctcttgaaaatggtggcacatattatatcttgtcagacataacagcatttggtggaataagagcagccccaacgggaaatgaaagatgccctctcactgtggtgcaatctcgcaatgagc

SEQ ID NO: 112332 - DNA, 276 bp, Glycine max
cacgagcagagagaggaacaggaatggcctcgcaaggaggaaaaacgcggagaaaagggaagtgaagaggaagatgaggatgaggatgaggaacaagatgaacgtcaattcccattcccacgcccacctcatcagaaggaagagcgaaagcaagaggaagatgaggatgaggagcagcagcgagagagcgaagaaagtgaagattctgagttacgaagacataagaataagaacccttttctcttcggctctaacaggttcgaaactctcttcaaa

SEQ ID NO: 112333 - DNA, 267 bp, Glycine max
cggctcgaggaaaatcattccaatacacatggcttccgaaaggcaagcgttgatgcttattctcttaacaacattcttcttcaccataaagccttcacaggccagtactactggtggcataacaatctactggggccaaaacattgacgacggcaccttgacttccacatgcgacactggacacttcgagattgtcaacctagctttcctcaatgcgtttggttgcggcataactccatcatggaacttcgctggccactgtgggga

SEQ ID NO: 112334 - DNA, 264 bp, Glycine max
cgcagaagaagaaaatggagaaggagctcattaacttggctactatgtgcaggtttggacccatgatccagtgcgacttgtcctccgatgactaagaagttaaaagcaatgttgtcacttgtacgtactaacacatgatgtgatagtttatgctagctagctataacataagctgtctctgagtgtgttgtatattaataaagatcatcactggtgaatggtgatcgtgtacgtaccctacttagtaggcaatggaagcactta

SEQ ID NO: 112335 - DNA, 264 bp, Glycine max
caatatcctagtataccttaataaataatttaagatactatgatgagagcacggttcccattactgttgctgggacttgttttcctggcttcagtttctgtctcatttggcattgcttactgggaaaaagagaaccccaaacacaacaagtgtctccagagttgcaatagcgagagagactcgtacaggaaccaagcatgccacgctcgttgcaacctccttaaggtggagaaagaagaatgtgaagaaggtgaaattccacga

SEQ ID NO: 112336 - DNA, 264 bp, Glycine max; identical to SEQ ID NO: 111144

SEQ ID NO: 112337 - DNA, 259 bp, Glycine max
  unsure (1)..(259): unsure at all n locations
ggtttagtcgtgactcttccaatgacgagaactcattccctaccagcggagtaccttataatcaggtttcttttgaaggagatgctgggaagtcttctgaaagacgcggttatggtggaccacgaggtccttaccnnnnnnnnnnnnnnnnnnnnnnnnnnttcagcaatggtgaaactggtgaagctgaagaaggacgacctcgaagagcatttgatcgtcgcatgggactggacgaggaaatgaattcaaacgtgaa

SEQ ID NO: 112338 - DNA, 260 bp, Glycine max
gagttccctccacgaagcaagctagatagccaagtctatggtgatcatactagtcaaataaccaaagaacacctagagcccaacttagaagggctcactgtagatgaggcaattcaaaacaagagattgttcctactagatcatcatgacccaatcatgccatatttgaggcgaataaatgcaacctccacaaaggcttatgctaccagaaccatccttttcctgaaaaatgacggaactttaagaccacttgccataga

SEQ ID NO: 112339 - DNA, 260 bp, Glycine max
caaacttaattattaacacttccttagttcaatatggcgaagcccttcactctctctctttcttccctttgcttgctactcttgtcgagtgcatgctttgctattagctccagcaagctcaacgagcgccaactcaacaacctcaacgcgttggaacccgaccaccgcgttgagtccgaaggtggtttgattcaaacatggaactctcaacaccctgagctgaaatgcgccggtgtcactgtttccaaactcaccctcaa

SEQ ID NO: 112340 - DNA, 259 bp, Glycine max
caaacacatttctagattcacgcttccaccatttcacacacttaacaatataaacaaagcaaatggcacctactaccaccgtacctattggtaccctcccctccggttccgtcaccggacgcttagcctccgtctacagtgaggtccaaaagacgcgcgtggaccacgcgctccctctcccctccgtcctcaagcatcccttcaccattctcgacggtcctccaagctccgccgccggaaatccagacgagatcgcgaa

SEQ ID NO: 112341 - DNA, 261 bp, Glycine max
gtaacgactgccccgctgtctccgacatggacccggtgaaattgaattctccgtgaagatgcggagtaccaacggctagacggtaagaccccgtgcaccttaactatagcttcgcagtgacaaccttgatcgaatgtgtaggataggtgggaggtgatgacacagaacgaccaatcctgaaagaccactctttcgtctaaggatgcctaaccgccgcaccgaaaattcgggggggggcgggacactgcgaggtgggtagtt

SEQ ID NO: 112342 - DNA, 270 bp, Glycine max
tcctacgtggtgttaattttattcagattcctaccactgtgatggcccaggtcgattcttcagttggtggcaaaactgggatcaatcaccgccttgggaagaacctgattggtgccttttaccaacctcagtgtgtgctaatagacacggacacattaaatacgttgccggatagggaactggcatcagggcttgcagaggttataaagtatgggctcattagggatgcagagttttttgagtggcaagagaaaaatatgcacttattac

SEQ ID NO: 112343 - DNA, 268 bp, Glycine max
gaacaatggcgggtagggtttcgacgtgcttcttcttcgtgtttgctctttctctccttcttccttttcagatctccgctgaggaatcatcggagaaagagttcgtactcacattggatcactctaactttcacgacactgtcagcaagcacgatttcatcgttgtcgagttctacgctccatggtgtggccactgtaagaagcttgctcccgagtatgagaaagctgcttctatcttgagtagtcatgatcctccggttgttttggc

SEQ ID NO: 112344 - DNA, 259 bp, Glycine max
ctctccctttcacctttcttcatagcctaccacttttctgctttcatctactctcacttctcttcacacactgagacacagaaagagagaaaaataaagggtgtgatgggtgtcttactgagtgttttctttttataatgaacaaagaactgcacaccctcttcttcaccgaagaagaagatggcaattcagcaccacaatgaccaactagagcataatgaaaatgtctcatctgtccttgatgccctttactgtgacg

SEQ ID NO: 112345 - DNA, 266 bp, Glycine max
cgggaccttcggggcctcttccccgggcgtcgaacagtcaactcagaactggtacggacaaggggaatccgactgtttaattaaaacaaagcattgcgatggtccctgcggatgttgacgcaatgtgatttctgcccagtgctctgaatgtcaaagtgaagaaattcaaccaagcgcgggtaaacggcgggagtaactatgactctcttaaggtagccaaatgcctcgtcatctaattagtgacgcgcatgaatggattaacgaga

SEQ ID NO: 112346 - DNA, 254 bp, Glycine max
cttattaacactttccttagttcaatatggggaagcccttcttcactctctctctttcttcccttttcttgctactcttgtcgagtgcatgctttgctattacctccagcaagttcaacgaataccaactcaacaacctctacgcgttggaacccgaccaccgcgttgagtccgaaggtggtcttattgaaacatggaactctcaacaccctgagctgcaatgcgccggtgtcactgtttccaaacgcaccctc

SEQ ID NO: 112347 - DNA, 262 bp, Glycine max
ctttccctctctaataagggttcctctttccttctctagcacaatttacaatctcaatggctggaatttgctgtggtgttgttggagaaggtgacactccggctccactcgagcccactcctcgcccctccaggcgccggagtttggacatcttacctttaaaatatatcgccgacatgcccatgccgccgccggagggtttacggaagcgtcccaagctcaacctcagggactgcgataacgcaattgaaaattgcgacga

SEQ ID NO: 112348 - DNA, 262 bp, Glycine max; identical to SEQ ID NO: 111589

SEQ ID NO: 112349 - DNA, 258 bp, Glycine max
gagtgatcccacactagcacaacagcatctagtcaaagtccacacaacaacaaaaaagaaaaattgttaccacacacaatcataaccaaacaccctcaataaatgcctcaggtgaaaagaagaagattgtgggggtgttctacaaagggaatgaatatgctaaattgaatccaaattttgttggatgtgttgaaggtgcattgggaatacgtgagtggctggaatcacagggtcatcagtacattgtcactgatgaca

SEQ ID NO: 112350 - DNA, 257 bp, Glycine max
ctagtacaccgtattaaagaatttaagatatactatgatgagagcgcggttcccattactgttgctgggagttgttttcctggcatcagtttctgtctcatttggcattgcgtattgggaaaagcagaaccccagtcacaacaagtgcttccgaagttgctatagcgagaaagactcctactggaaccaagcgtgccacgctcgttgcaacctccttaaggtggaggaagaagaagatgcgaagaaggtcaattcca

SEQ ID NO: 112351 - DNA, 260 bp, Glycine max
agctcgagcgaatcggctcgagattatgcccaaaatgtaaagggagaggttcaaaaagtgggactgctggtaggtgttttagatgcaaaggcactggtatgaaaattacaagaaggcagattggactaggcatgattcaacaaatgcaacatgtctgtcctgactgcagaggatctggtgaggtcattaacgagagagataaatgtcctctgtgcaaaggaaacaaggtttcccaggaaaagaaggtgctggaagtgcat

SEQ ID NO: 112352 - DNA, 261 bp, Glycine max
cagctttgaacactcatcaccatggccaagcttgttctttccctttgtttccttcttctcagtggctgcttcgctctgagagagcaggcacagcaaaatgagtgccagatccaaaagctgaatgccctcaaaccggataaccgtatagagtcggaaggtgggttcattgagacctggaaccctaacaacaagccattccagtgtgccggtgttgccctctctcgctgcacccttaaccgcaatgcccttcgtagaccttcc

SEQ ID NO: 112353 - DNA, 259 bp, Glycine max
aacactttccttagttcaatatggggaagcccttcttcactctctctctttcttccctttgcttgctactcttgtcgagtgcatgctttgctattacctccagcaagttcaacgagtgccaactcaacaacctcaacgcgttggaacccgaccaccgcgttgagtccgaaggtggtcttattgaaacatggaactctcaacaccctgagctgcaatgcgccggtgtcactgtttccaaacgcaccctcaaccgcaacgg

SEQ ID NO: 112354 - DNA, 266 bp, Glycine max
gttcaatatcctagtataccttaataaataatttaagatactatgatgagagcacggttcccattactgttgctgggacttgttttcctggcttcagtttctgtctcatttggcattgcttactgggaaaaagagaaccccaaacacaacaagtgtctccagagttgcaatagcgagagagactcgtacaggaaccaagcatgccacgctcgttgcgacctccttaaggtggagaaagaagaatgtgaagaaggtgaaattccacg

SEQ ID NO: 112355 - DNA, 271 bp, Glycine max
ctttctaatctcattctccttctgttcaaacactctctctcatggcatcagataagaagattaggatcggcatcaacgggtttggaaggattggccgtttggtggccagggttgcccttcaaaggaatgatgttgaacttgttgctgtcaacgatcctttcatcaccactgattacatgacatacatgttcaagtacgacaccgttcatggccagtggaagcattttgatgtgaaggtgaaggactctaagacccttctctttggtgagaa

SEQ ID NO: 112356 - DNA, 270 bp, Glycine max
cttgcagtcgcagaggaaaaccctagctagtagtctcagttcgtttgagagagaaaaaatggcagagggtctcgttctccgcggaaccatgcgcgcccacaccgacgtcgtgacggcgattgccactcccatcgacaactccgacatgatcgtgacggcgtcgcgcgacaaatccatcattctctggcacctcaccaaggaggacaagacctacggtgtcccccgccgccgcctcaccggacattctcacttcgtccaggacgtcgtcct

SEQ ID NO: 112357 - DNA, 266 bp, Glycine max
  unsure (1)..(266): unsure at all n locations
ggagcaagacaaagagagccaagaaagtgaaggttctgagtctcaaagagaaccacgaagacataagaataagaacccttttcacttcaactctaaaaggttccaaactctcttcaaaaaccaatatggccacgttcgcgtcctccagaggttcaacaaacgctcccaacagcttcagaatctccgagactaccgcattttggagttcaactccaaacccaacacccttcttctcccccaccatgctgacgctgnattactcatcg

SEQ ID NO: 112358 - DNA, 261 bp, Glycine max
cttggtccttaaacactcatcagtcatcaccatggccaagctagttttttccctttgttttctgcttttcagtggctgctgcttcgctttcagttccagagagcagcctcagcaaaacgagtgccagatccaaaaactcaatgccctcaaaccggataaccgtatagagtcagaaggagggctcattgagacatggaaccctaacaacaagccattccagtgtgccggtgttgccctctctcgctgcaccctcaaccgcaa

SEQ ID NO: 112359 - DNA, 264 bp, Glycine max
ctcgagccgatatcctagtacaccgtattaaagaatttaagatatactatgatgagagcgcggttcccattactgttgctgggagttgttttcctggcatcagtttctgtctcatttggcattgcgtattgggaaaagcagaaccccagtcacaacaagtgcctccaaagttgcaatagcgagaaagactcctacaggaaccaagcatgccacgctcgttgcaacctccttaaggtggaggaagaagaagaatgcgaagaaggt

SEQ ID NO: 112360 - DNA, 261 bp, Glycine max
tggcaacccaagcctctctcttaaccccacccctctccggtctcaaagccagcgaccgcgcctccgtgccatggaagcaaaactccagcctctccttctccagcccgaagcccctcaagttctccagaacaatcagagcagcagccgccgacgagaccacagaggcaccagcaaaagtagaggctgcaccggtcgggttcaccccaccagaacttgacccaaacaccccttccccgatcttcgggggcagcaccggcgggc

SEQ ID NO: 112361 - DNA, 237 bp, Glycine max
aagaaaatggaagcaccagaaactttctttgagagcttgccctaccagtttgacagttcatcttgttgggcaagctctcaaagaaaatggaagcaccagaaactttgagagcttgccctacaaggtgaaccctcaaactggttacattgattacgataagctcgagagcccggcgcttgattttcgccccaagatacttatttgtggtggcagctcctaccctcgagagtgggatta

SEQ ID NO: 112362 - DNA, 255 bp, Glycine max
cagaattctcaacctcaaggttcacagaatgagaatgatccaaataatacaactatctttgttggtaatttggatcctaatgtcactgatgatcatctgaggcaagttttcagccagtatggagaattagtgcatgtgaagattccagcaggcaagcgatgtgggtttgtccaattcgcagacaggagctgtgccgaagaggcacttcgggtgttgaatgggaccctgttgggtggtcaaaatgttcgtctttca

SEQ ID NO: 112363 - DNA, 258 bp, Glycine max
gcgccggtgtcactgtttccaaacgcaccctcaactgcaacggcctccacttgccatcttactcaccttatccccaaatgatcattgtcgttcaagggaagggagcaattggatttgcatttccgggatgtcctgagacgtttgagaagccacaacagcaatcaagcagaagaggctcaaggtcgcagcagcaactacaagacagtcaccagaagattcgtcacttcaatgaaggagacgtactagtgattcctcctg

SEQ ID NO: 112364 - DNA, 260 bp, Glycine max
atttgtccttgaatataatactcagcatggctaagcttgttctttccctttgttttctgcttttcagtggctgctgcttcgctttcagtttcagagagcagccacagcaaaacgagtgccagatccaacgcctcaatgccctcaaaccggataaccgtatagagtcagaaggtggcttcattgagacatggaaccctaacaacaagccattccagtgtgccggtgttgccctctctcgctgcaccctcaaccgcaacgcc

SEQ ID NO: 112365 - DNA, 260 bp, Glycine max
ttcgtcatcaaatcagtggcttgtaagacctgttttagaaactcatggatgggatcatgatgtgggttatgaagggttgaatgtagaaagattgttcgttgtcaaggaaaagattcctttatctttctccggtcaggttactaaagataaaaaggatgctaatgttcagatggaaatatccagttcagttaagcatgggaaagggaaagcaacttcattaggttttgatttgcaaactgtggggaaggacttggcttata

SEQ ID NO: 112366 - DNA, 264 bp, Glycine max
gaggaaaaagaggattggagggtcgccacgtttagcaacaaccaaaccctctctactctttcttcttctcttcgctagggttttagcttcttcctcttcacttcgttcttctggcctctacaatgagcaacgacaaggacaccttcaacgtcgctgatctcacttccgctctcaacgaggactatagagcagaccttgtcaatgctctcaagagcaagatacagagtttggctggacagcattctgatattctagagtctctgt

SEQ ID NO: 112367 - DNA, 269 bp, Glycine max
attattaacacttccttagttcaatatggggaagcccttcactctctctctttcttccctttgcttgctactcttgtcgagtgcatgctttgctattagctccagcaagctcaacgagtgccaactcaacaacctcaacgcgttggaacccgaccaccgcgttgagtccgaaggtggtttgattcaaacatggaactctcaacaccctgagctgaaatgcgccggtgtcactgtttccaaactcaccctcaaccgcaatggcctccact

SEQ ID NO: 112368 - DNA, 267 bp, Glycine max
caagaatggaatttactctccacattggaatctgaatgcaaacagtgtgatctatgtgactcgaggacaaggaaaggttagagttgtgaactgccaagggaatgcagtgttcgacggtgagcttaggaggggacaattgctggtggtaccacagaacttcgtggtggcggagcaagccggagaacaaggattcgaatacatagtattcaagacacaccacaacgcaatcactagctacttgaaggatgtgtttagggcaattccctc

SEQ ID NO: 112369 - DNA, 265 bp, Glycine max
cacttccttagttcaatatggggaagcccttcactctctctctttcttccctttgcttgctactcttgtcgagtgcatgctttgctattagctccagcaagctcaacgagtgccaactcaacaacctcaacgcgttggaacccgaccaccgcgttgagtccgaaggtggtttgattcaaacatggaactctcaacaccctgagctgaaatgcgccggtgtcactgtttccaaactcaccctcaaccgcaatggcctccacttgcc

SEQ ID NO: 112370 - DNA, 265 bp, Glycine max
acaagatgaacgtgaacacccacgcccacaccaacctcatcaaaaggaagaggaaaagcacgaatggcaacacaagcaggaaaagcaccaaggaaaggaaagtgaagaagaagaagaagaccaagacgaggatgaggagcaagacaaagagagccaagaaagtgaaggttctgagtctcaaagagaaccgaagacataagaataagaacccttttcacttcaactctaaaaggttccaaactctcttcaaaaaccaatatggcca

SEQ ID NO: 112371 - DNA, 260 bp, Glycine max
gcgtatgtggatgatcacctactgtgtgaaatcgaaggtaaccacctcactcacgccgctatcatcggccaagacggaagcgtttgggctcagagcaccaacttccctcagttcaaacctgaggaaataactgccatcaataatgactttaatgagcctggatcacttgctccaactggattgtatatcggtggcaccaaatacatggtcatccagggtgagcctggtgctgtcattcgagggaagaagggtcctggtgg

SEQ ID NO: 112372 - DNA, 259 bp, Glycine max
ggcgaggaggaggacgaagatgaagataaacctcgtcctagtcgaccaagccaaggaaagcgtgaacaagaccaggaccaggacgaggacgaagatgaagatgaagatcaacctcgcaagagccgcgaatggagatcgaaaaagacacaacccagaagacctagacaagaagaaccacgtgaaagaggatgcgagacaagaaacggggttgaggaaaatatctgcaccttgaagcttcacgagaacattgctcgccctt

SEQ ID NO: 112373 - DNA, 257 bp, Glycine max
ggaaggattaactttcagactattacaccaaagtttcagacccttattgacctttctgttatagaaatcttgtcaaggcatgcatctgatgaggtgtaccttggggagagggacaatccaaattggacatctgatacaagagcgttagaggcttttaaaaggtttggaaataaactggcacaaattgagaataaactctcagagagaaacaacgatgagaaactgagaaaccgttgtggaccagttcaaatgcctta

SEQ ID NO: 112374 - DNA, 255 bp, Glycine max
gcaaaggattctacccgccgctcgatgggaattgcgcttaattattaacacttccttagttcaatatggggaagcccttcactctctctctttcttccctttgcttgctactcttgtcgagtgcatgctttgctattagctccagcaagctcaacgagtgccaactcaacaacctcaacgcgttggaacccgaccaccgcgttgagtccgaagtggtttgattcaaacatggaactctcaacaccctgagctgaa

SEQ ID NO: 112375 - DNA, 257 bp, Glycine max
caatttcttattttactatgttcaactctatgtattcctctatccgtagagtacattgaatgtacagaaatggctataacagagtttctgttattcatattaacagctactctaggaggaatgtttttatgcggcgctaacgatttaataactatctttgtagctctagaatgtttcagtttatgttcctatctactatctggatataccaagaaagatgtacggtctaatgaggctactatgaaatatttactcat

SEQ ID NO: 112376 - DNA, 259 bp, Glycine max
cacaagtaccaccacacagtgtccaagtccacacaacaacacacagaaacgaagctggcgtcgtcccccccggagcccgtttcgaaccgccgcgttatgaagccggcgtcaaagcgccctccatttaccattccgagagaggtccaacgacttcccaggtcctcgccgtcctcgccggcctcccggtcggtggcatcctgctcctcctggcgggattgaccctggcaggaaccctcaccggactggcagttgccacgcc

SEQ ID NO: 112377 - DNA, 262 bp, Glycine max
gttcaatatcctagtataccttaataaataatttaagatactatgatgagagcacggttcccattactgttgctgggacttgttttcctggcttcagtttctgtctcatttgtcattgcttactgggaaaaagagaaccccaaacacaacaagtgtctccagagttgcaatagcgagagagactcgtacaggaaccaagcatgccacgctcgttgcaacctccttaaggtggagaaagaagaatgtgaatgaggtgaaattc

SEQ ID NO: 112378 - DNA, 269 bp, Glycine max
gagagagagagagagagagagagagagagaatgggagggtgggctatcgcggtgcatggtggcgctggtgtcgaccctaatctcccactcgagcgccaagaagaagcgaaacaacttctcacgcgctgtctcaatcttggaatctctgctctaaattctaatcttcccgccatagatgtcgtcgaacttgtggtgagggaattggaaacggatccgctgttcaattcgggccgtggatctgccctgacagaaaaaggaacggtggagat

SEQ ID NO: 112379 - DNA, 264 bp, Glycine max
cattggtccttaaacactcatcagtcatcaccatggccaagctagttttttccctttgttttctgcttttcagtggctgctgcttcgctttcagttccagagagcagcctcagcaaaacgagtgccagatccaaaaactcaatgccctcaaaccggataaccgtatagagtcagaaggagggctcattgagacatggaaccctaacaacaagccattccagtgtgccggtgttgccctctctcgctgcaccctcaaccgcaacg

SEQ ID NO: 112380 - DNA, 257 bp, Glycine max
aaagattcgatccaattgaaattttaaaaatgactgggataaacttaagaattcaattattgaaattgaataagtaaacaatttaattggattggtcgaatggtatcaaaaaaatggagtactaactcccatttcttatttattattgaattaaccgatcaacttgctttgttatcgaacattcctttttgatttcaaaaattttccggaaaaaatttgaatctatttttatatgcgaatcaatcctactacttctg

SEQ ID NO: 112381 - DNA, 261 bp, Glycine max
taagctttcaagagacaaactgttttgaaaaatgggatccaaggttgttgcatacgttgcccttctcctctccatcaacattcttttcatttccatggttagctccagcagccactacgatccacagccccaaccttcttacgtcactgctcttattacacgacctagttgtccggatctgagtgtttgcctcaatattttaggcgggtatctaggaaccgtggatgattgttgtgccctcatcggtggccttggtgacat

SEQ ID NO: 112382 - DNA, 260 bp, Glycine max
cctagtataccttaataaataatttaagatactatgatgagagcacggttcccattactgttgctgggacttgttttcctggcttcagtttctgtctcatttggcattgcttactgggaaaaagagaaccccaaacacaacaagtgtctccagagttgcaatagcgagagagactcgtacaggaaccaagcatgccacgctcgttgcaacctccttaaggtggagaaagaagaatgtgaagaaggtgaaattccacgacc

SEQ ID NO: 112383 - DNA, 260 bp, Glycine max
caaattcttccaccaagttatgggtataattatgttgcttcttttctccctcttaggtctctcttctagttccagcatatcaactcatcgttccatattggaccttgacctaaccaagtttaccacacagaaacaggtgtcttcactgttccaactatggaagagtgagcatggacgtgtctaccataaccacgaagaagaggcaaagagacttgagattttcaagaataacttgaactatatcagggacatgaatgcaa

SEQ ID NO: 112384 - DNA, 254 bp, Glycine max
taaaattcttccaccaagttataaaaagaaaaatgttgcttcttttctccctcttaggtctctcttctagttccagcatatcaactcatcgttccatattggaccttgacctaaccaagtttaccacacagaaacaggtgtcttcactgttccaactatggaagagtgagcatggacgtgtctaccataaccacgaagaagaggcaaagagacttgagattttcaagaataacttgaactatatcagggacatg

SEQ ID NO: 112385 - DNA, 256 bp, Glycine max
caatatcctagtataccttaataaataatttaagatactatgatgagagcacggttcccattactgttgctgggacttgttttcctggcttcagtttctgtctcatttggcattgcttactgggaaaacgagaaccccaaacacaacaagtgtctccagagttgcaatagcgagagagactcgtacaggaaccaagcatgccacgctcgttgcaacctccttaaggtggagaaagaagaatgtgaagaaggtgaat

SEQ ID NO: 112386 - DNA, 252 bp, Glycine max
ctatcctagtataccttaataaataatttaagatactatgatgagagcacggttcccattactgttgctgggacttgttttcctggcttcagtttctgtctcatttggcattgcttactgggaaaaagagaaccccaaacacaacaagtgtctccagagttgcaatagcgagagagactcgtacaggaaccaagcatgccacgctcgttgcaacctccttaaggtggagaaagaagaatgtgaagaaggtga

SEQ ID NO: 112387 - DNA, 254 bp, Glycine max
agaaaaacccccagcttcgggacttggatatcttcctcagtattgtggatatgaacgagggagctcttcttctaccacacttcaattcaaaggcgatagtgatactggtaattaatgaaggagatgcaaacattgaacttgttggcctaaaagaacaacaacaggagcagcaacaggaagagcaacctttggaagtgcggaaatatagagccgaattgtctgaacaagatatatttgtaatcccagcaggttat

SEQ ID NO: 112388 - DNA, 256 bp, Glycine max
gtttagtagagaggaagggcagcagcaaggggagcagaggctgcaagagagcgtgattgtggaaatctcgaaggaacagattcgggcactgagcaaacgtgccaaatctagttcaaggaaaaccatttcttctgaagataaaccttttaacttgagaagccgcgaccccatctactccaacaagcttggcaagttctttgagatcaccccagagaaaaacccccagcttcgggacttggatatcttcctcagtatt

SEQ ID NO: 112389 - DNA, 259 bp, Glycine max
gcaaggcaaactcagcggaaactgtttctttcagctggaacaagttcgtgccgaagcaaccaaacatgatcctccaaggagacgctattgtgacctcctcgggaaagttacaactcaataaggttgacgaaaacggcaccccaaaaccctcgtctcttggtcgcgccctctactccacccccatccacatttgggacaaagaaaccggtagcgttgccagcttcgccgcttccttcaacttcaccttctatgcccctga

SEQ ID NO: 112390 - DNA, 255 bp, Glycine max
catatcctagtataccttaataaataatttaagttactatgatgagaacacggttcccattactgttgctgggacttgtttacctggcttcagtttctgtctcatttggcattgcttactgggaaaaagagaaccccaaacacaacaagtgtctccagagttgcaatagcgagagagactcgtacaggaaccaagcatgccacgctcgttgcaacctccttaaggtggagaaagaagatgtgaagaggtgaattc

SEQ ID NO: 112391 - DNA, 262 bp, Glycine max
tccaaacccaacaccctccttctccccaaccatgctgacgctgattacctcatcgttatccttaacgggactgccattctttccttggtgaacaacgacgacagagactcctacagacttcaatctggtgatgccctgagagtcccctcaggaaccacatactatgtggtcaaccctgacaacaacgaaaatctcagattaataacactcgccatacccgttaacaagcctggtagatttgagagtttcttcctatctagca

SEQ ID NO: 112392 - DNA, 260 bp, Glycine max
caaacttattaacactttccttagttcaatatggggaagcccttcttcactctctctctttcttccctttgcttgctactcttgtcgagtgcatgctttgctattacctccagcaagttcaacgagtgccaactcaacaacctcaacgcgttggaacccgaccaccgcgttgagtccgaaggtggtcttattgaaacatggaactctcaacaccctgagctgcaatgcgccggtgtcactgtttccaaacgcaccctcaa

SEQ ID NO: 112393 - DNA, 264 bp, Glycine max
gcagcagcaaggaggttcccaaagccagaaaggaaagcaacaagaagaagaaaacgaaggaagcaacatattgagtggcttcgcccctgaattcttgaaagaagcgttcggcgtgaacatgcagatagtgagaaacctacaaggtgagaacgaagaggaggatagtggagccattgtgacagtgaaaggaggtctaagagtcacagctccagccatgaggaagccacagcaagaagaagatgatgatgatgaggaagagcagcc

SEQ ID NO: 112394 - DNA, 257 bp, Glycine max
atcctagtataccttaataaataatttaagatactatgatgagagcacggttcccattactgttgctgggacttgttttcctggcttcagtttctgtctcatttggcattgcttactgggaaaaagagaaccccaaacacaacaagtgtctccagagttgcaatagcgagagagactcgtacaggaaccaagcatgccacgctcgttgcaacctccttaaggtggagaaagaagaatgtgaagaaggtgaaattcca

SEQ ID NO: 112395 - DNA, 257 bp, Glycine max
gcaaagcgcggccatgccctcatgtgcttggcacgtgtttcactcttcctctgcgctctaaccctatccgctgctcacggaagcaccacggttcaagacatcgcgagacagttgaaactcggggacaacgagcttctgcgcacggagaagaagttcaaggttttcatggagaattacgggaggagctactccacagaggaggagtatttgcgccgtttggggattttcgcccagaacatggtcagagcggcggacat

SEQ ID NO: 112396 - DNA, 256 bp, Glycine max
gttcaatatcctagtataccttaataaataatttaagatactatgatgagagcacggttcccattactgttgctgggacttgttttcctggcttcagtttctgtctcatttggcattgcttactgggaaaaagagaaccccaaacacaacaagtgtctccagagttgcaatagcgagagagactcgtacaggaaccaagcatgccacgctcgttgcaacctccttaaggtggagaagaagaatgtgaagaggtgaa

SEQ ID NO: 112397 - DNA, 253 bp, Glycine max
gttatgggtttccttgtgttgcttcttttctccctcttaggtctctcttctagttccagcatatcaactcatcgttccatattggaccttgacctaaccaagtttaccacacagaaacaggtgtcttcactgttccaactatggaagagtgagcatggacgtgtctaccataaccacgaagaagaggcaaagagacttgagattttcaagaataacttgaactatatcagggacatgaatgcaaacagaaaat

SEQ ID NO: 112398 - DNA, 257 bp, Glycine max
ctcgagccgctcgagccgattcggctcgagttaattattaacacttccttagttcaatatggggaagcccgtcactctctctctttcttccctttgcttgctactcttgtcgagtgcatgctttgctattagctccagcaagctcaacgagtgccaactcaacaacctcaacgcgttggaacccgaccaccgcgttgagtccgaaggtggtttgattcaaacatggaactctcaacaccctgagctgaaatgcgccg

SEQ ID NO: 112399 - DNA, 258 bp, Glycine max
ctcgttggtggtgccggtgatatcaagcttaccaaagatggcaacactctcttgaaagagatgcaaatccaaaacccgacggcgattatgatcgctagaacggctgtggcgcaggatgacgctagtggtgatggcaccacttccactgtcatcttcattcgcgagcttatgaaacaatcggaacgttacattgatgaaggtatgcatcctcgtgtgttggttgatggttttgatattgcaaagcgagcaactctgcaa

SEQ ID NO: 112400 - DNA, 258 bp, Glycine max
ccgagaacaaccagaggaacttcctcgcaggttcgcaagacaatgtgataagccagatacctagtcaagtgcaggagcttgcattccctgggtctgcacaagctgttgagaagctattaaagaaccaaagagaatcctactttgtggatgctcagcctaagaagaaagaggaggggaataagggaagaaagggtcctttgtcttcaattttgagggctttttactgaataagtatgtactaaaatgtatgctgtaata

SEQ ID NO: 112401 - DNA, 259 bp, Glycine max
gaccaagccatggcgatgagaaccaaactttctttagctatctttttcttttttcttttagccttattttcaaacctagcctttggcaaatgtaaagaaaccgaggtagaagaagaagaccctgagctcgtaacatgcaaacaccaatgccaacagccacagcaatacactgagggtgacaagcgggtatgcttgcaaagatgtgacaggtatcatcgtatgaagcaagagcgagagaaacaaatccaagaggaaactc

SEQ ID NO: 112402 - DNA, 262 bp, Glycine max
gtcatggtcacggactcatgattcaccatgaccataaccacattatatcctccacggcaccttcaaatggcatacctaccatgcagcaggaggaggatcatggacttggaagctacaagaaagtagttcggtacagagaatgcctgaagaaccatgcagcagccatgggagggaatgccactgatgggtgtggtgagttcatgccaagtggagaagaagggaccatagaggcactgaactgctctgcctgtcattgccacag

SEQ ID NO: 112403 - DNA, 263 bp, Glycine max
cccaaccatgctgacgctgattacctcatcgttatccttaacgggactgccattctttccttggtgaacaacgacgacagagactcctacagacttcaatctggtgatgccctgagagtcccctcaggaaccacatactatgtggtcaaccctgacaacaacgaaaatctcagattaataacactcgccatacccgttaacaagcctggtagatttgagagtttcttcctatctagcactgaagctcaacaatcctacttgca

SEQ ID NO: 112404 - DNA, 258 bp, Glycine max
agacaacaaaacagaatgggtgtggtggtgatcgacggcagcaccgtgcgcgacttcgtgaacgacgaggcggccttcgcgaagagcgtggacgagcagttcggggtgctggacctcaacaacgacggcgtcctctcgcgctcggagctccgcacggccttcgagtccatgcgcctcatcgagacgcacttcggcatcgacgtcgccacgccgccggatcagctcgcgaactctacgactccatcttcgacaagttcg

SEQ ID NO: 112405 - DNA, 257 bp, Glycine max
cggctcgagctcgagcgaatcggctcgagaccaaaatgaccaagcttacaatgctcctcatacctctactcttcatcgcccacacctgctgcgcctccaaatggcaacagcaccagcaagagagctgccgcgagcagctcaaggggatcaacctcaacccctgtgagcacatcatggagaagatccaagctggccgccgcggcgaggacggcagcgacgaagatcacattctcatcaggaccatgccgggaagaatc

SEQ ID NO: 112406 - DNA, 259 bp, Glycine max
cggctcgagtgcaatgttcgtgccacactacaacctgaacgcgaacagcataatatacgcattgaatggacgggcattgatacaagtggtgaattgcaacggtgagagagtgtttgatggagagctgcaagagggacgggtgctgatcgtgccacaaaactttgtggtggctgcaagatcacagagtgacaacttcgagtatgtgtcattcaagaccaatgatacacccatgatcggcactcttgcaggggcaaactca

SEQ ID NO: 112407 - DNA, 258 bp, Glycine max
cactcatcagtcatcaccatggccaagctagttttttccctttgttttctgcttttcagtggctgctgcttcgctttcagttccagagagcagcctcagcaaaacgagtgccagatccaaaaactcaatgccctcaaaccggataaccgtatagagtcagaaggagggctcattgagacatggaaccctaacaacaagccattccagtgtgccggtgttgccctctctcgctgcaccctcaaccgcaacgcccttcgt

SEQ ID NO: 112408 - DNA, 259 bp, Glycine max
cctcgctctatttctcagtctctgtgtttgcggctgaggattccgaacgagtgaccttcttcgtttctcgcaaagtttaagtaatcatgggtaaggaaaaggttcacatcaacattgtcgtcattggacatgtcgactctgggaagtcaactaccactggtcacttgatctacaagcttggaggtattgacaagcgtgtgattgagaggttcgagaaggaggctgccgagatgaacaagaggtcattcaagtatgcctg

SEQ ID NO: 112409 - DNA, 259 bp, Glycine max
ggctcgaggcaagggttcggcaccaccgggaacaagacgatgcagatgatggagattgcggcgttcctcggacacgtcggcagcaagacctcttgtggttatggagtggctaccggaggacctttggcctggggtctttgttacaaccatgaaatgagtcctatgcagtcatactgtgatgactacttcaaactcacatacccctgtacacctggtgctgagtactatggtcgtggagctattcccattttctggaact

SEQ ID NO: 112410 - DNA, 264 bp, Glycine max
gtaagcatggagtcctcaaagatctatgcttacctcttcctctgcatgatctttctctcttccgccactcccattctcggttgtggctactgtggcaaaccccccaaaaagcacaagcctggtaaaacaccaaagacacccaaaacacccgttgttaagccaccagtcaccatccctcccattaatgttcctcccgttgttcttccaccaatagtgaagcccccaggtattctccctccaattccaattattaacccaccaacc

SEQ ID NO: 112411 - DNA, 263 bp, Glycine max
tatcctagtacaccgtattatagaatttaagatatactatgatgagagcgcggttcccattactgttgctgggagttgttttcctggcatcagtttctgtctcatttggcattgcgtattgggaaaagcagaaccccagtcacaacaagtgcctccgaagttgcaatagcgagaaagactcctacaggaaccaagcatgccacgctcgttgcaacctccttaaggtggaggaagaagaagaatgcgaagaaggtcaaattcca

SEQ ID NO: 112412 - DNA, 265 bp, Glycine max
gtcgagccgattcggctcgagctctccattggtccttaaacaagcatcagtcatcaccatggccaagctagttttttcagtttgttttctgcttttcagtggctgctgcttcgctttcagttccagagagcagcctcagcataacgagtgccagatccaaaaactcaatgccctcaaaccggataaccgtatagagtcagaaggagggctcattgagacatggaaccctaacaacaagccattccagtgtgccggtgttgccctc

SEQ ID NO: 112413 - DNA, 260 bp, Glycine max
ccatccttcgaccttccgaattccaacgatttcgatgggtttgtgaaagaagctattcagatggtgaagcccgcgaagggtactacgactcttgcttttatatttaaggagggtgttatggtagctgctgattctcgagctagcatgggaggatatatatcatcgcagtctgtgaagaagattattgaaattaatccgtatatgcttgggacaatggctggaggtgctgctgattgtcagttttggcacaggaatcttgg

SEQ ID NO: 112414 - DNA, 259 bp, Glycine max
tgccgatcagaaacatcgccgtcggaaggcctgaagaggcgactcaccccgacacgttgaaggcggctttggctgagttcatctcaaccttcatcttcgtgttcgccggctcaggctccggcatcgcctacaacaagctcaccgacaacggcgctgccacccctgccggcctcatctccgcctccatcgcccatgcattcgccctcttcgtcgccgtctccgtcggcgccaacatctccggcggccacgtcaaccccgc

SEQ ID NO: 112415 - DNA, 258 bp, Glycine max
ggggaagcccttcttcactctctctctttcttccctttgcttgctactcttgtcgagtgcatgctttgctattacctccagcaagttcaacgagtgccaactcaacaacctcaacgcgttggaacccgaccaccgcgttgagtccgaaggtggtcttattgaaacatggaactctcaacaccctgagctgcaatgcgccggtgtcactgtttccagacgcaccctcaaccgcaacggcctccacttgccatcttactc

SEQ ID NO: 112416 - DNA, 260 bp, Glycine max
ggaagagcacgagcagaaggaggaacacgaatggcatcgcaaggaggaaaaacacggaggaaagggaagtgaagaggaacaagatgaacgtgaacacccacgcccacaccaacctcatcaaaaggaagaggaaaagcacgaatggcaacacaagcaggaaaagcaccaaggaaaggaaagtgaagaagaagaagaagaccaagacgaggatgaggagcaagacaaagagagccaagaaagtgaaggttctgagtctcaaa

SEQ ID NO: 112417 - DNA, 261 bp, Glycine max
actcgagccgaatcggctcgagaaaaagtttccactaacaaattattaaaatgtagaggaagaaccttcaaatatgatatagttggtgctggtacacattcttcagaaaattttcctgaaaaggaagatcaagaaaaacccaaaaagattgatgccagattgagacaaagaatagatcctcaatacaatgaggttcaggctcagatggaaacaaatttgtttaaattgtctcttgatgatgttgaaactcctaaaggttcc

SEQ ID NO: 112418 - DNA, 260 bp, Glycine max
aagatgagtttgaagaacaacatggtggtgcttaaggtgtgtttgttgcttcttttccttgtgggggttacagctgcacgcatggaactgagcttcttcaaaagtgatcagtcatcaagttatgatgatgatgagtattcaaaaccatgctgtgatctctgcatgtgcacacgctcaatgcctcctcaatgcagctgtgaagatattaggctgaattcatgccactcagattgtaagagctgtatgtgcacacgctcaca

SEQ ID NO: 112419 - DNA, 258 bp, Glycine max
gcagaattgctctcttgcaaattggatactgttactggccaatattatcctgagtgggctccaattaattgtcgagttcatcgacaaccaattcacatcactgaaggaaattatgtcagaaagcaagatgtcagcattgaatatgatgcatgcacaatcccaaatgattgtggttcattagttgttgccaaggttggaaaccacaaacagattgttggtttccatgttgctggaagcaaaggaagactgggatatgct

SEQ ID NO: 112420 - DNA, 259 bp, Glycine max
attaacacttccttagttcaatatggggaagcccttcactctctctctttcttccctttgcttgctactcttgtcgagtgcatgctttgctattagctccagcaagctcaacgagtgccaactcaacaacctcaacgcgttggaacccgaccaccgcgttgagtccgaaggtggtttgattcaaacatggaactctcaacaccctgagctgaaatgcgccggtgtcactgtttccaaactcaccctcaaccgcaatggc

SEQ ID NO: 112421 - DNA, 261 bp, Glycine max
tctctccattggtccttaaacactcatcagtcatcaccatggccaagctagttttttccctttgttttctgcttttcagtggctgctgcttcgctttcagttccagagagcagcctcagcaaaacgagtgccagatccaaaaactcaatgccctcaaaccggataaccgtatagagtcagaaggagggctcattgagacatggaaccctaacaacaagccattccagtgtgccggtgttgccctctctcgctgcaccctca

SEQ ID NO: 112422 - DNA, 261 bp, Glycine max
cactaactagtgcccaaaaggacaaaagtgtgcgtagaataaataagaacgaataaaacaacaaaggctttgctgccctttgttaagtataaaataacgggtaatgtaattgtacccttgtgtaatgagtcactcaagtacctatgcgggaaaatcataaattaaaagagaaatttcaatgaaaaaaaaaaaaaaaaacaaaaaaaaaaaggggggccccccgattatggaccccttcccccggggatttattccgggccg

SEQ ID NO: 112423 - DNA, 254 bp, Glycine max
attgtctttgaacactcatcaccatggccaagcttgttctttccctttgtttccttcttttcagtggctgcttcgctctgagagagcaggcacagcaaaatgagtgccagatccaaaagctgaatgccctcaaaccggataaccgtatagagtcggaaggtgggttcattgagacctggaatactaacaacaagccattccagtgtgcaggtgatgccctctctcgctgcacccttaaccgcaatgcccttcgt

SEQ ID NO: 112424 - DNA, 266 bp, Glycine max
atatcctagtacaccgtattaaagaatttaagatatactatgatgagagcgcggttcccattactgttgctgggagttgttttcctggcatcagtttctgtctcatttggcattgcgtattgggaaaagcagaaccccagtcacaacaagtgcctccgaagttgcaatagcgagaaagactcctacaggaaccaagcatgccacgctcgttgcaacctccttaaggtggaggaagaagaagaatgcgaagaaggtcaaattccacg

SEQ ID NO: 112425 - DNA, 258 bp, Glycine max
ccaactcaacaacctcaacgcgttggaacccgaccaccgcgttgagtccgaaggtggtttgattcaaacatggaactctcaacaccctgagctgaaatgcgccggtgtcactgtttacaaactcaccctcaaccgcaatggcctccacttgccatcttactcaccttatccccggatgatcatcatcgcccaagggaaaggagcacttggagttgcaattccaggatgtcctgagacgtttgaggagccacaagaaca

SEQ ID NO: 112426 - DNA, 251 bp, Glycine max
aaataatttaagatactatgatgagagcacggttcccattactgttgctgggacttgttttcctggcttcagtttctgtctcatttggcattgcttactgggaaaaagagaaccccaaacacaacaagtgtctccagagttgcaatagcgagagagactcgtacaggaaccaagcatgccacgctcgttgcaacctccttaaggtggagaaagaagaatgtgaagaaggtgaaattccacgaccacgacca

SEQ ID NO: 112427 - DNA, 256 bp, Glycine max
cacacacaaaccctcccctcacactctccaaaccctagcggcactacacacgttatctctctctctctctctctctctccctctctccttccccaagatgtcgagcgccgatcccgagcaccgagaagaggaggaggcacccgccgtcggcgacgacgaggacaccggagcacacgtcgctcccatcgtcaagctcgaggaggttgctgtcaccaccggcgaggaggacgaagatgcaatcctagatctcaaatcg

SEQ ID NO: 112428 - DNA, 259 bp, Glycine max
ctctccattgtctttgaacactcatcaccatggccaagcttgtactttccctttgtttccttcttttcagtggctgcttcgctctgagagagcaggcacagcaaaatgagtgccagatccaaaagctgaatgccctcaaaccggataaccgtatagagtcggaaggtgggttcattgagacctggaaccctaacaacaagccattccagtgtgccggtgttgccctctctcgctgcacccttaaccgcaatgcccttcg

SEQ ID NO: 112429 - DNA, 254 bp, Glycine max
tctctccattggtccttaaacactcatcagtcatcaccatggccaagctagttttttccctttgttttctgcttttcagtggctgctgcttcgctttcagttccagagagcagcctcagcaaaacgagtgccagatccaaaaactcaatgccctcaaaccggataaccgtatagagtcagaaggagggctcattgagacatggaaccctaacaacaagccattccagtgtgccggtgttgccctctctcgctgc

SEQ ID NO: 112430 - DNA, 166 bp, Glycine max
aaattttgataaaccgcgatcacaggttgccgcaccttaaaaccggaaacaaaagcaatcgttacttgatttcaagaatctctcaatttctttctacttctttgtgtacgatttcttaagggaaagaaaatcactctctgtgctggccacagacttcgtgaatcat

SEQ ID NO: 112431 - DNA, 253 bp, Glycine max
aactcagtgaaagagaatccgaggcgaagagaagagaaaaattaagatggaggggaaggagcaggatgtgtcgctgggagcgaacaagttcccggagagacagccgattgggacggcggcgcagagccaagacgacggcaaggactaccaggagccggcgccggcgccactggttgacccgacggagtttacgtcatggtccttttacagagcagggatagcagagtttgtggccacttttctgtttctatac

SEQ ID NO: 112432 - DNA, 168 bp, Glycine max
ggtgtggtgaggccatcttatatgaaataatatcaaaatatattttgtgtaataataaaactatggcctatgtatttaccaccctccgacccagcctatgttaatatctgagtggcgttgtacctttgaatcgccttaataaaatgtcagtcttcaagttttgtcttt

SEQ ID NO: 112433 - DNA, 261 bp, Glycine max
caaaggttgccaacgccaaagcaaaaggagcagaaatggcattgatgagaccatttgcacaatgagacttcgccaaaacattggtcagaattcatcacctgacatctacaaccctcaagctggtagcatcacaaccgccaccagccttgacttcccagccctctggcttctcaaactcagtgcccagtatggatcactccgcaagaatgctatgttcgtgccacactacaccctgaacgcgaacagcataatatacgcatt

SEQ ID NO: 112434 - DNA, 254 bp, Glycine max
cgaagaaggtcaaattccacgaccacgaccacgttacccggagagggaacgtcagcaacacggtgagaaggaggaagacgaaggtgagcagccacgtccattcccattcccacgcccacgccaacctcatcaagaggaagagcacgagcagaaggaggaacacgaatggcatcgcaaggaggaaaaacacggaggaaagggaagtgaagaggaacaagatgaacgtgaacacccacgcccacaccaacctcatc

SEQ ID NO: 112435 - DNA, 252 bp, Glycine max; identical to SEQ ID NO: 112293

SEQ ID NO: 112436 - DNA, 255 bp, Glycine max
attggaatctgaatgcaaacagtgtgatctatgtgactcgaggacaaggaaaggttagagttgtgaactgccaagggaatgcagtgttcgacggtgagcttaggaggggacaattgctggtggtaccacagaacttcgtggtggcggagcaagccggagaacaaggattcgaatacatagtattcaagacacaccacaacgcagtcactagctacttgaaggatgtgtttagggcaattccctcagaggttcttg

SEQ ID NO: 112437 - DNA, 254 bp, Glycine max
aacaaaactacccttttgcttttgctctttgttctttgccatggagtggccacaacaacaatggccttccatgatgatgagggtggtgataaaaagtcaccaaaaagtttgtttttgatgagcaactccacgagggttttcaagactgatgcaggggaaatgcgtgtgctgaaaagccatggtggtaggatattttataggcacatgcacattggcttcatctctatggaaccaaagtccttgtttgttcctca

SEQ ID NO: 112438 - DNA, 255 bp, Glycine max
tgaaatcgaagaactcctttacagctcagtggagaatgaagaacacatatgtgtgctgaaggaccgcagcaagccaattatcttcaccatggcaaggttggatcgagtgaagaacatcacaggacttgtggagtggtacggtaagaacgcgaactgagggagctggtgaaccttgtggttgttgctggagacaggaggaaggagtcaaaggacttggaagaaaaggccgagatgaagaagatgtacggcctgatc

SEQ ID NO: 112439 - DNA, 258 bp, Glycine max; identical to SEQ ID NO: 111374

SEQ ID NO: 112440 - DNA, 255 bp, Glycine max
gctacttcaaagttgaaaacccagaatgtggttgtatctctctgcctaaccttaaccttggtactggtgctactgaccagcaaggcaaactcagcggaaactgtttctttcagctggaacaagttcgtgccgaagcaaccaaacatgatcctccaaggagacgctattgtgacctcctcgggaaagttacaactcaataaggttgacgaaaacggcaccccaaaaccctcgtctcttggtcgcgccctctactcc

SEQ ID NO: 112441 - DNA, 258 bp, Glycine max
ataaaattcttccaccaagttatggagcgacttgtgttgcttcttttctccctcttaggtctctcttctagttccagcatatcaactcatcgttccatattggaccttgacctaaccaagtttaccacacagaaacaggtgtcttcactgttccaactatggaagagtgagcatggacgtgtctaccataaccacgaagaagaggcaaagagacttgagattttcaagaataacttgaactatatcagggacatgaat

SEQ ID NO: 112442 - DNA, 253 bp, Glycine max
gcccgggcattgagaaggaaggacgctttcagaggcgaaaggccatggggagataccgtctgtgatccatggatctccgatcgggaaaccgtatccaagctccgcggctagtctgcgctctttggacttttaaaacttagcgaactgaaacatcttagtagctaaaggaaggaaaatcaatttatatcatgttccataaatcatagtgaacgttcaaaaaaaaaaaaaaaaaaaaaaaaaaaaaagggggggc

SEQ ID NO: 112443 - DNA, 256 bp, Glycine max
cacactttccttagttcaatatggggaagcccttcttcactctctctctttcttccctttgcttgctactcttgtcgagtgcatgctttgctattacctccagcaagttcaacgagtgccaactcaacaacctcaacgcgttggaacccgaccaccgcgttgagtccgaaggtggtcttattgaaacatggaactctcaacaccctgagctgcaatgcgccggtgtcactgtttccaaacgcaccctcaaccgcaa

SEQ ID NO: 112444 - DNA, 253 bp, Glycine max
caagttatgggtttccttgtgttgcttcttttctccctcttaggtctctcttctagttccagcatatcaactcatcgttccatattggaccttgacctaaccaagtttaccacacagaaacaggtgtcttcactgttccaactatggaagagtgagcatggacgtgtctaccataaccacgaagaagaggcaaagagacttgagattttcaagaataacttgaactatatcagggacatgaatgcaaacagaa

SEQ ID NO: 112445 - DNA, 254 bp, Glycine max
gcagaaagcaagctcatcctagagttttagaaatggcagcagcctcctccatggctctctcttccccatccttggctggcaaggccgtgaagctgggcccatcagcccccgaagtcgggagggtcagcatgaggaagaccgtcaccaagcaggcctcctccggaagcccatggtacggcccagaccgcgtcaagtacttgggcccattctctggcgagcccccgtcctacctcactggcgagttcccaggtgac

SEQ ID NO: 112446 - DNA, 256 bp, Glycine max
ccgaggtaagaggcttagcaaggagaatcatcgtagaaaagaagaaagagtttcaagagaaagaaactctggacaccttggatctgttatcacggtttttgtgctctggccactccgacgaagagttcgttatggatattatcataagcttcattttagcggggagggacactacctccgcggcgctaacgtggttcttctggctgatttccaagcacccgaaagtggaggaggaggtggttaaggaggttatgga

SEQ ID NO: 112447 - DNA, 260 bp, Glycine max
  unsure (1)..(260): unsure at all n locations
cgaagaaggtcaaattccacgaccacgaccacattacncggagagggaacgtcagcaacacggtgagaaggaggaagacgaaggtgagcagccacgtccattcccattcccacgcccacgccaacctcatcaagaggaagagcacgagcagaaggaggaacacgaatggcatcgcaaggaggaaaaacacggaggaaagggaagtgaagaggaacaagatgaacgtgaacacccacgcccacaccaacctcatcaaaagg

SEQ ID NO: 112448 - DNA, 254 bp, Glycine max
cttaattattaacacttccttagttcaatatgggcaagcccttcactctctctctttcttccctttgcttgctactcttgtcgagtgcatgctttgctattagctccagcaagctcaacgagtgccaactcaacaacctcaacgcgttggaacccgaccaccgcgttgagtccgaaggtggtttgattcaaacatggaactctcaacaccctgagctgaaatgcgccggtgtcactgtttccaaactcgacctc

SEQ ID NO: 112449 - DNA, 255 bp, Glycine max
cggcaaacggacggcgggcgcacgcgtcgcttctagcccggattctgacttagaggcgttcagtcataatccaacgcacggtagcttcgcgccactggcttttcaaccaagcgcgatgaccaattgtgcgaatcaacggttcctctcgtactaggttgaattactattgcgacactgtcatcagtagggtaaaactaacctgtctcacgacggtctaaacccagctcacgttccctattggtgggtgaacaatcc

SEQ ID NO: 112450 - DNA, 256 bp, Glycine max
  unsure (1)..(256): unsure at all n locations
cttaattattaacacttccttagttcaatatggggaagcccttcactctctctctttcttccctttgcttgctactcttgtcgagtgcatgctttgctattagctccagcaagctcaacgagtgccaactcaacaacctcaacgcgttggaacccgaccaccgcgttgagtccgaaggtggtttgattcaaacatggaactctcaacaccctgagctgaaatgcgccggtgtcactgtttccanactcaccctcaa

SEQ ID NO: 112451 - DNA, 250 bp, Glycine max
ctcgagccggttcaatatcctagtataccttaataaataatttaagatactatgatgagaacacggttcccattactgttgctgggacttgttttcctggcttcagtttctgtctcatttggcattgcttactgggaaaaagagaaccccaaacacaacaagtgtctccagagttgcaatagcgagagagactcgtacaggaaccaagcatgccacgctcgttgcaacctccttaaggtggagaaagaag

SEQ ID NO: 112452 - DNA, 255 bp, Glycine max
caacccagcacaaaaatggagacccacaaaaatggagaaccaacaaccggcacctatctccgtgacactgctacatctgctatccaaaacttcgctcccatcaacaaaatccaccaacatctctgcgcgtttcacttttactcatatgacatgagccggcaagtggaggcacaccatttttgcgcgcaccagaacgaggagatgaggcagtgccttatctacgacagccccgagaagaaagccaggctcataggg

SEQ ID NO: 112453 - DNA, 254 bp, Glycine max
atgcttgtctcaaagattaagccatgcatgtgtaagtatgaactaattcagactgtgaaactgcgaatggctcattaaatcagttatagtttgtttgatggtatctactactcggataaccgtagtaattctagagctaatacgtgcaacaaaccccgacttctggaagggatgcatttattagataaaaggtcaacacaggctctgcctgttgctttgatgattcatgataactcgtcggatcgcacggcctt

SEQ ID NO: 112454 - DNA, 252 bp, Glycine max
gttcaatatcctagtataccttaataaataatttaagatactatgatgagagcacggttcccattactgttgctgggacttgttttcctggcttcagtttctgtctcatatggcattgcttactgggaaaaagagaaccccaaacacaacaagtgtctccagagttgcaatagcgagagagactcgtacaggaaccaagcatgccacgctcgttgcaacctccttaaggtggagaaagaagaatgtgaagaa

SEQ ID NO: 112455 - DNA, 116 bp, Glycine max
gatcatacatagtagtgttggtgggttgcaaagatgcttgggggtcttctccataagggtcataagataaaagggacagtgatgttgatgcgcaagaatgtgttggacgtgaataa

SEQ ID NO: 112456 - DNA, 253 bp, Glycine max
ggggaaatgatactacaagccactaggcatgggtctagcaaaggaaacaataatgggaggtggaggccgtgtggccaaagttgaaattcagcagaagaagcctctctcaagggttccaaacacaaagccaccgttcactgttggccaactcaagaaagccattccaccgcactgctttcagcgttccctcctcacttcattgtcctatgttgtttatgacctttcattggctttcattttctacattgccacc

SEQ ID NO: 112457 - DNA, 254 bp, Glycine max
ctttctcttttgtgccttcaccacctcatacctaccttcagccaacgctgatttcgtgctcgataatgaaggtaaccctcttgaaaatggtggcacatattatatcttgtcagacataacagcatttggtggaataagagcagccccaacgggaaatgaaagatgccctctcactgtggtgcaatctcgcaatgagctcgacaaagggattggaacaatcatctcgtccccatatcgaatccgttttatcgccg

SEQ ID NO: 112458 - DNA, 250 bp, Glycine max
  unsure (1)..(250): unsure at all n locations
ctagaacctggagacatgatacacataccagcaggcacaccactgtacatcgttaacagagatgagaatgagaagctcctccttgccatgctccatatacctgtctctactcctggaaaatttgaggaatttttcgggcctggaggacgagacccagaatcggtcctctcagcattcagctggaatgtgctgcaagctgcgctccaanaccccaaaggaaagttagaaaggctttttaatcaacagaacg

SEQ ID NO: 112459 - DNA, 250 bp, Glycine max
actcatcagtcatcaccatggccaagctagttttttccctttgttttctgcttttcagtggctgctgcttcgctttcagttccagagagcagcctcagaaaaacgagtgccagatccaaaaactcaatgccctcaaaccggataaccgtatagagtcagaaggagggctcattgagacatggaaccctaacaacaagccattccagtgtgccggtgttgccctctctcgctgcaccctcaaccgcaacgc

SEQ ID NO: 112460 - DNA, 254 bp, Glycine max
ctcgagccgctcgagccgattcggctcgaggttcaatatcctagtataccttaataaataatcttaagatacatgatgagagcacggttcccattactgttgctgggacttgttttcctggcttcagtttctgtctcatttggcattgcttactgggaaaaagagaaccccaaacacaacaagtgtctccagagttgcaatagcgagagagactcgtacaggaaccaagcatgccacgctcgttgcaacctcct

SEQ ID NO: 112461 - DNA, 252 bp, Glycine max
tataccttaataaataatttaagatactatgatgagagcacggttcccattactgttgctgggacttgttttcctggcttcagtttctgtctcatttggcattgcttactgggaaaaagagaaccccaaacacaacaagtgtctccagagttgcaatagcgagagagactcgtacaggaaccaagcatgccacgctcgttgcaacctccttaaggtggagaaagaagaatgtgaagaaggtgaaattccacg

SEQ ID NO: 112462 - DNA, 255 bp, Glycine max
gtcgcagaagcagcagctacaggaccgtcaccagaagattcgtcacttcaatgaaggagacgtactcgtgattcctcctggtgttccttactggacctataacactggcgatgaaccagttgttgccatcagtcttcttgacacctctaacttcaataaccagcttgatcaaacccctagggtattttaccttgctgggaacccagatatagagtacccagagaccatgcaacaacaacaacagcagaaaagtca

SEQ ID NO: 112463 - DNA, 252 bp, Glycine max
ctctccattggtccttaaacactcatcagtcatcaccatggccaagctagttttttccctttgttttctgcttttcagtggctgctgcttcgctttcagttccagagagcagcctcagcaaaacgagtgccagatccaaaaactcaatgccctcaaaccggataaccgtatagagtcagaaggagggctcattgagacatggaaccctaacaacaagccattccagtgtgccggtgttgccctctctcgctg

SEQ ID NO: 112464 - DNA, 251 bp, Glycine max
ttaacactttccttagttcaatatggggaagcccttcttcactctctctctttcttccctttgcttgctactcttgtcgagtgcatgctttgctattacctccagcaagttcaacgagtgccaactcaacaacctcaacgcgttggaacccgaccaccgcgttgagtccgaaggtggtcttattgaaacatggaactctcaacaccctgagctgcaatgcgccggtgtcactgtttccaaacgcaccctca

SEQ ID NO: 112465 - DNA, 249 bp, Glycine max; identical to SEQ ID NO: 112298

SEQ ID NO: 112466 - DNA, 248 bp, Glycine max
cattggtccttaaacactcatcagtcatcaccatggccaagctagttttttccctttgttttctgcttttcagtggctgctgcttcgctttcagttccagagagcagcctcagcaaaacgagtgccagatccaaaaactcaatgccctcaaaccggataaccgtatagagtcagaaggagggctcattgagacatggaaccctaacaacaagccattccagtgtgccggtgttgccctctctcgctgc

SEQ ID NO: 112467 - DNA, 257 bp, Glycine max
  unsure (1)..(257): unsure at all n locations
gctttggtggtggtggtagttcccgaggtagaagacagaagcatggtgaagatgtggtgcattctttaaaggtttccttggaggacgtctataacggcacaacaaagaaactatctctttctagaaacgtattctgctcaaaatgtaaagggaaaggttcaaaaagtggaacagctggtaggtgttttggatgccaaggcactggtatgaaaattacaagaaggcagattggactnaggcatgattcacaaatgcaa

SEQ ID NO: 112468 - DNA, 260 bp, Glycine max
gttaaggatttgaagcgtggttatgttgcctcaaactcaaaggatgaccctgcaaaggaggctgctaacttcacagcccaagtcatcatcatgaaccaccctggtcagattggaaatggctatgcccctgtcctcgactgccacacttctcacattgctgtcaagtttgctgaactcatgaccaagattgacaggcgatccggcaaagagcttgagaaggagcccaagtttttgaagaacggtgatgctgagtttgttaa

SEQ ID NO: 112469 - DNA, 93 bp, Glycine max
ttcaatatcctagtacaccgtattaaagaatttaagatatactatgatgagagcgcggttcccattactgttgctgggagttgtttccctggc

SEQ ID NO: 112470 - DNA, 223 bp, Glycine max
aaaatgagccatggtggcctaagatgcaaactcgtgaagagctagttgaagcttgcgctatcatcatatggactgcttcagcacttcatgcagctgttaattttggacagtatccctatggaggtttaatcttaaaccgtccaactcttagtaggcgattcatgcctgagaaaggttctgctgagtatgaggacttgggaaggatccccagaaggcttacttg

SEQ ID NO: 112471 - DNA, 103 bp, Glycine max
cttattaacactttccttagttcaatatggggaagcccttcttcactctctctctttcttccctttgcttgctactcttgtcgagtgcatgctttgctattac

SEQ ID NO: 112472 - DNA, 102 bp, Glycine max
caacaagtgtctccagagttgcaatagcgagagagactcgtacaggaaccaagcatgccacgctcgttgcaacctccttaaggtggagaaagaagaatgtga

SEQ ID NO: 112473 - DNA, 102 bp, Glycine max
cttaattattaacacttccttagttcaatatggggaagcccttcactctctctctttcttccctttgcttgctactcttgtcgagtgcatgctttgctatta

SEQ ID NO: 112474 - DNA, 250 bp, Glycine max
gtaacaatctggaaatgcaagaagcttatcttgtcaatctcgtaaatgtgttacgagaattgtatttgcacagtccagaggaagctcgccaattgagaaggaaagctctttctcgtattgaatggctgcaaaaagctgatgtgcctaccatagcacagattgaagaattccattcgatgcagaggatgatgaatgctcctgattcaaatgataatattgatctgctgttgagcattgattcgttgggttt

SEQ ID NO: 112475 - DNA, 249 bp, Glycine max; identical to SEQ ID NO: 111711

SEQ ID NO: 112476 - DNA, 131 bp, Glycine max
tgaaattttgataaaccgcgatcacaggttgccgcaccttaaaaccggaaacaaaagcaatcgttacttgatttcaagaatctctcaatttctttctacttctttgtgtacgatttcttaagggaaagaaa

SEQ ID NO: 112477 - DNA, 248 bp, Glycine max
ccaagtttaccacacagaaacaggtgtcttcactgttccaactatggaagagtgagcatggacgtgtctaccataaccacgaagaagaggcaaagagacttgagattttcaagaataacttgaactatatcagggacatgaatgcaaacagaaaatcaccccattctcatcgtttaggattgaacaagtttgctgacatcactcctcaagagttcagcaaaaagtacttgcaagctcccaaggatgtg

SEQ ID NO: 112478 - DNA, 149 bp, Glycine max
aaatcattccaatacacatggcttccgaaaggcaagcgttgatgcttattctcttaacaacattcttcttcaccataaagccttcacaggccagtactactggtggcataacaatctactggggccaaaacattgacgacggcaccttg

SEQ ID NO: 112479 - DNA, 240 bp, Glycine max
gaggaaaggaaacaagaagaggaggggtttttgttttggtgattgaattggggatttagtgattgtgtacggtaacaatgaatttcaagatggattccgatagagcgaagctgttcgtaggaggcatttctcgcgacaccaccgaagacgttctcaaactccacttcgccaagtacggcgtcgtttccgactccacaatatccgtagaccgcaccacccgaagccctagaggttttggct

SEQ ID NO: 112480 - DNA, 240 bp, Glycine max
cattgtctttgaacactcatcaccatggccaagcttgttctttccctttgtttccttcttttcagtggctgcttcgctctgagagagcaggcacagcaaaatgagtgccagatccaaaagctgaatgccctcaaaccggataaccgtatagagtcggaaggtgggttcattgagacctggaaccctaacaacaagccattccagtgtgccggtgttgccctctctcgctgcacccttaac

SEQ ID NO: 112481 - DNA, 241 bp, Glycine max
ctgtccacagcaagctgaggatgacaaatgtggggatattgggattagtattgatcatgatgatggaaccaggcgtttggtggtgtctaagaacaaaccgttagtggttcagtttcaaaaacttgataaagaatcactggccaagaaaaatcatggcctttctcgcagtgagtgagacacaagtgtgagagtactaaataaatgctttggttgtacgaaatcattacactaaataaaataa

SEQ ID NO: 112482 - DNA, 94 bp, Glycine max
cggctcgaggttttttttgttcctcactgaccaagccatggcgatgagaaccaaactttctttagctatctttttcttttttcttttagcctta

SEQ ID NO: 112483 - DNA, 93 bp, Glycine max
aaacggtcgcattcgtctcctccagagattcaacaaacgctccccacaacttgagaaccttcgagactaccggattgtccagtttcagtcaaa

SEQ ID NO: 112484 - DNA, 93 bp, Glycine max
gttcacaatcctcctcatctctcttctcttctgcatcgcccacacttgcagcgcctccaaatggcagcaccagcaagatagctgccgcaagca

SEQ ID NO: 112485 - DNA, 253 bp, Glycine max
tggccaccgtaatcgacggcaaagcgttgcgcaaatcatccgatctgaaatcgccgacgaggtgcgcctgctctctcaaaaatacggcaaggttccgggactagcagttgtgatagtagggaacagaaaggattcacaaagctacgtgggaatgaagagaaaggcatgcgccgaattgggaatcaaatccttcgatgtggaccttcccgaacaagtctcccaagctgaactaataaaacaagttcacgagttg

SEQ ID NO: 112486 - DNA, 253 bp, Glycine max
atttggcattgcttactgggaaaaagagaaccccaaacacaacaagtgtctccagagttgcaatagcgagagagactcgtacaggaaccaagcatgccacgctcgttgcaacctccttaaggtggagaaagaagaatgtgaagaaggtgaaattccacgaccacgaccacgaccacaacacccggagagggaacctcagcaacccggtgagaaggaggaagacgaagatgagcaaccacgtccaatcccattc

SEQ ID NO: 112487 - DNA, 253 bp, Glycine max
gcagtttcaaagagaggatttgggattgggaaggcgagggattgcgctgcgtctcttcctcttctctttcgattcatccctcattcataatcttccaatccaacaacctcagcctcacactcacacatacacacatctgaacgcgtatcgtccctcccatggcttcaaagcgcatcctcaaggagctcaaggacttgcagaaagacccaccaacttcttgcagcgctggtccagtagctgaggacatgttcca

SEQ ID NO: 112488 - DNA, 251 bp, Glycine max
acgagagtcggaagcactactctcttcgccgcttgctctctctctctcgctctttcagctttgactttggtggaaactaaagactagtcaaaatggtgaagttcacagctgaagagctgcgtcgcattatggactataagcataatatccgtaatatgtctgtcattgctcatgttgatcacggaaaatcaaccctgactgattctcttgtggctgctgctggtattattgctcaagaagttgcaggtgat

SEQ ID NO: 112489 - DNA, 248 bp, Glycine max
aaattcttccaccaagttatgggtttccttgtgttgcttcttttctccctcttaggtctctcttctagttccagcatatcaactcatcgttccatattggaccttgacctaaccaagtttaccacacagaaacaggtgtcttcactgttccaactatggaagagtgagcatggacgtgtctaccataaccacgaagaagaggcaaagagacttgagattttcaagaataacttgaactatatcaggga

SEQ ID NO: 112490 - DNA, 242 bp, Glycine max
caccgtattaaagaatttaagatatactatgatgagagcgcggttcccattactgttgctgggagttgttttcctggcatcagtttctgtctcatttggcattgcgtattgggaaaagcagaaccccagtcacaacaagtgcctccgaagttgcaatagcgagaaagactcctacaggaaccaagcatgccacgctcgttgcaacctcctataggtggagggaagaagaagaatgcgaagaa

SEQ ID NO: 112491 - DNA, 223 bp, Glycine max
acgaaatgggccgtggacagctggaagtcaaagacagccctgcagctgcccgaatacccgagccaggaggagctggagtccgtcctcaaaaccctcgaggcttttcctccaatcgtcttcgccggtgaggccaggacattggaggagcatctcgccgaggccgccatgggaaatgccttcctcctccagggcggagactgtgctgagagcttcaaggagtcat

SEQ ID NO: 112492 - DNA, 241 bp, Glycine max
ctccatttgtccttgaatataatactcagcatggctaagcttgttctttccctttgttttctgcttttcagtggctgctgcttcgctttcagtttcagagagcagccacagcaaaacgagtgccagatccaacgcctcaatgccctcaaaccggataaccgtatagagtcagaaggtggcttcattgagacatggaaccctaacaacaagccattccagtgtgccggtgttgccctctctc

SEQ ID NO: 112493 - DNA, 223 bp, Glycine max
ctatcttgctgggaaccaagagcaagagtttctaaaatatcagcaagagcaaggaggtcatcaaagccagaaaggaaagcatcagcaagaagaagaaaacgaaggaggcagcatattgagtggcttcaccctggaattcttggaacatgcattcagcgtggacaagcagatagcgaaaaacctacaaggagagaacgaaggggaagacaggggagcattgtga

SEQ ID NO: 112494 - DNA, 242 bp, Glycine max
gagctccatatcaaggtcaagaacttaagctgaggagaggtgttgatattgtcattggcacaccaggccgtgtgaaggatcatattgagaagggaaatattgacctgagccaactaaagtttcgtgtccttgatgaagccgatgaaatgctgaggatgggttttgttgaagatgttgaaatgattctaggcaaggtagaaaatgttaataaagttcagacacttcttttcagtgctactttg

SEQ ID NO: 112495 - DNA, 135 bp, Glycine max
atagcaaaatgaccaagttcacaatcctcctcatctctcttctcttctgcatcgcccacacttgcagcgcctccaaatggcagcaccagcaagatagctgccgcaagcagctccagggggtgacctcaaggcctg

SEQ ID NO: 112496 - DNA, 254 bp, Glycine max
cttaattattaacacttccttagttcaatatggggaagcccttcactctctctctttctaccctttgcttgctactcttgtcgagtgcatgctttgctattagctccagcaagctcaacgagtgccaactcaacaacctcaacgcgttggaacccgaccaccgcgttgagtccgaaggtggtttgattcaaacatggaactctcaacaccctgagctgaaatgcgccggtgtcactgtttccaaactcaccctc

SEQ ID NO: 112497 - DNA, 249 bp, Glycine max
gttcacaatcctcctcatctctcttctcttctgcatcgcccacacttgcagcgcctccaaatggcagcaccagcaagatagctgccgcaagcagctccagggggtgaacctcacgccctgcgagaagcacatcatggagaagatccaaggccgcggcgatgacgatgatgatgatgacgacgacaatcacattctcaggaccatgcggggaagaatcaactacataaggaggaacgaaggaaaagacga

SEQ ID NO: 112498 - DNA, 251 bp, Glycine max
ccgcgaccccatctactccaacaagcttggcaagttctttgagatcaccccagagaaaaacccccagcttcgggacttggatatcttcctcagtattgtggatatgaacgagggagctcttcttctaccacacttcaattcaaaggcgatagtgatactggtaattaatgaaggagatgcaaacattgaacttgttggcctaaaagaacaacaacaggagcagcaacaggaagagcaacctttggaagtgc

SEQ ID NO: 112499 - DNA, 249 bp, Glycine max
cttcttctcttgcggctagggttttagcgcagcttcttctagatataaggaagatgggtaaggaaaaggttcacatcagtattgtggtcattggccatgtcgactctgggaaatccactaccactggtcacctgatttacaagcttggaggcattgacaagcgtgttattgagaggtttgagaaggaagctgctgagatgaacaagaggtctttcaagtatgcctgggtgctggacaaacttaaggctg

SEQ ID NO: 112500 - DNA, 246 bp, Glycine max
tgataacttgattagtgttcatgaatatgtcaagccttactttagtggttctaaattgaaaagctttctagctggtcataatatcaccattactgatggtattgacaaaactagtgcaactttgcagtttagaaagttagcagattgtgactttctcaagagaaactttaagcagatgtcgaatgtcttgtgggtggctcctgaggacaaggcgagtttatggtcacaacttcattatgtttcgtg

SEQ ID NO: 112501 - DNA, 245 bp, Glycine max
gggaaatttttcctttgatattaaatctcgctctagattggaaaaagtttcctctacaaaagcacaatttgttagtggaaaaaccttcaaatatgatataattggtgctggttcacattcttcagaaaattttcctgaaaaggaagatcaagaaaaacccaaaaagattgatgccagattgagacaaagaatagatcctcaatacaatgaggttcaggctcagatggaaacaaatttgtttaaat

SEQ ID NO: 112502 - DNA, 232 bp, Glycine max
ctttgaacactcatcaccatggccaagcttgttctttccctttgattccttcttttcagtggctgcttcgctctgagagagcaggcacagcaaaatgagtgccagatccaaaagctgaatgccctcaaaccggataaccgtatagagtcggaaggtgggttcattgagacctggaaccctaacaacaagccatccacgtgtgctcggtgttgccctctctcgctgcaccctt

SEQ ID NO: 112503 - DNA, 239 bp, Glycine max
ctcgagccgttgtctttgaacactcatcaccatggccaagcttgttctttccctttgtttccttcttttcagtggctgcttcgctctgagagagcaggcacagcaaaatgagtgccagatccaaaagctgaatgccctcaaaccggataaccgtatagagtcggaaggtgggttcattgagacctggaaccctaacaacaagccattccagtgtgccggtgttgccctctctcgctgca

SEQ ID NO: 112504 - DNA, 236 bp, Glycine max
acttattaacactttccttagttcaatatggggaagcccttcttcactctctctctttcttccctttgcttgctactcttgtcgagtgcatgctttgctattacctccagcaagttcaacgagtgccaactcaacaacctcaacgcgttggaacccgaccaccgcgttgagtccgaaggtggtcttattgaaacatggaactctcaacaccctgagctgcaatgcgccggtgtcac

SEQ ID NO: 112505 - DNA, 238 bp, Glycine max
attggtccttaaacactcatcagtcatcaccatggccaagctagttttttccctttgttttctgcttttcagtggctgctgcttcgctttcagttccagagagcagcctcagcaaaacgagtgccagatccaaaaactcaatgccctcaaaccggataaccgtatagagtcagaaggagggctcattgagacatggaaccctaacaacaagccattccagtgtgccggtgttgccctc

SEQ ID NO: 112506 - DNA, 240 bp, Glycine max
ctttgaacactcatcaccatggccaagcttgttctttccctttacttccttcttttcagtggctgcttcgctctgagagagcaggcacagcaaaatgagtgccagatccaaaagctgaatgccctcaaaccggataaccgtatagagtcggaaggtgggttcattgagacctggaaccctaacaacaagccattccagtgtgccggtgttgccctctctcgctgcacccttaaccgcaat

SEQ ID NO: 112507 - DNA, 90 bp, Glycine max
tgaaatcaaggatcttatggatgcagcagatattgataatagtgggacaatagactatggtgaattcattgctgctacagtccacttaaa

SEQ ID NO: 112508 - DNA, 253 bp, Glycine max
gttcgcacgccttgttcggtgaagtgagtagtgagtgctgaatcgaatcgaatcgattctccgaacatggcggcgagcgatcgcacagtgttgcaattctcttcatcatcttcttcttcttcgcagagcttgtccgcgaaggtccaccctctggtcatcttcaacatctgcgattgctatgttcgacgccctgaccaagccgaccgcgtcatcggaaccctactcggctccgtccttcccgacggaaccgtcg

SEQ ID NO: 112509 - DNA, 198 bp, Glycine max
ctagttctagatcgcgagccgccgtcgggctcattgagacatggaaccctaacaacaagccattccagtgtgccggtgttgccctctctcgctgcacccacaaccgcaacgcccttcgtagaccttcctacaccaacggtccccaggaaatctacatccaacaaggtaagggtatttttggcatgatatacccgggtt

SEQ ID NO: 112510 - DNA, 246 bp, Glycine max
gttcaatatcctagtacaccgtattaaagaatttaagatatactatgatgagagcgcggttcccattactgttgctgggagttgttttcctggcatcagtttctgtctcatttggcattgcgtattgggaaaagcagaaccccagtcacaacaagtgcctccgaagttgcaatagcgagaaagactcctacaggaaccaagcatgccacgctcgttgcaacctccttaaggtggaggaagaagaag

SEQ ID NO: 112511 - DNA, 241 bp, Glycine max
ggtccttaaacactcatcagtcatcaccatggccaagctagttttttccctttgttttctgcttttcagtggctgctgcttcgctttcagttccagagagcagcctcagcaaaacgagtgccagatccaaaaactcaatgccctcaaaccggataaccgtatagagtcagaaggagggctcattgagacatggaaccctaacaacaagccattcagtgtgcccggtgttgccctctctcgc

SEQ ID NO: 112512 - DNA, 238 bp, Glycine max
cactaccaattgtcttgctcccctcgccaaggttatcaacgaccgatttggaattgtggagggtcttatgaccactgttcatgccatcacagctactcagaagactgttgatggtccatcaaacaaggactggaggggtggaagagctgcttccttcaatataattcccagcagcactggagctgctaaggctgtaggaaaagttcttccagcactgaatggtaaattgactggcatg

SEQ ID NO: 112513 - DNA, 91 bp, Glycine max
cttattaacactttccttagttcaatatggggaagcccttcttcactctctctctttcttccctttgcttgctactcttgtcgagtgcatg

SEQ ID NO: 112514 - DNA, 239 bp, Glycine max
tacaattgattggtttatttcctctcaggaatgtgttcccaggacctattgtgttttaaatccacaaaatccttttgtgttaaataggtggatggggaaactgactttcccccagggcacttcccgaagtgttaaaagaatgcctctttctatagggggaggagctggtgcaaagaatgccattctcatgaatatgccaaatgctgttctttcaatgtggagatattttgttggagatc

SEQ ID NO: 112515 - DNA, 171 bp, Glycine max
cactgagattcagcccttgtcgctttgattcgtctgcaaaggattctacccgctaacactttccttagttcaatatggggaagcccttcttcactctctctctttcttccctttgcttgctactcttgtcgagtgcatctttgctattacctccagcaagttcaacgagtg

SEQ ID NO: 112516 - DNA, 84 bp, Glycine max
ctcgagccgatatatactatgatgagagtgcggtttcctttgttggtgttgctgggaactgttttcctggcatcagtttgtgtc

SEQ ID NO: 112517 - DNA, 193 bp, Glycine max
ctcgagccgctcttcttctcttgcggctagggttttagcgcagttacttctagatttaaggaagatgggtaaggaaaaggttcacatcagtattgtggttattggccatgttgactctgggaagtccactaccactggccacctgatctacaagcttggaggcattgacaagcgtgttattgagagatttgag

SEQ ID NO: 112518 - DNA, 245 bp, Glycine max
gttcaatatcctagtataccttaataaataatttaagatactatgatgagagcacggttcccattactgttgctgggacttgttttcctggcttcagtttctgtctcatttggcattgcttactgggaaaaagagaaccccaaacacaacaagtgtctccagagttgcaatagcgagagagactcgtacaggaaccaagcatgccacgctcgttgcaacctccttaaggtggagaaagaagatgt

SEQ ID NO: 112519 - DNA, 248 bp, Glycine max
ggagaaccagctcgaccagatgcctaggagattctatcttgctgggaaccaagagcaagagtttctaaaatatcagcagcagcagcaaggaggttcccaaagccagaaaggaaagcaacaagaagaagaaaacgaaggaagcaacatattgagtggcttcgcccctgaattcttgaaagaagcgttcggcgtgaacatgcagatagtgagaaacctacaaggtgagaacgaagaggaggatagtggag

SEQ ID NO: 112520 - DNA, 242 bp, Glycine max
cggctcgagattggtccttaaacactcatcagtcatcaccatggccaagctagttttttccctttgttttctgcttttcagtggctgctgcttcgctttcagttccagagagcagcctcagcaaaacgagtgccagatccaaaaactcaatgccctcaaaccggataaccgtatagagtcagaaggagggctcattgagacatggaaccctaacaacaagccattccagtgtgccggtgttg

SEQ ID NO: 112521 - DNA, 240 bp, Glycine max
ctcgcccttcacgtgctgacttctacaacccaaaagctggtcgcattagcaccctcaacagtctcaccctcccagccctccgccaattcggactcagtgcccaatatgttgtcctctacaggaatggaatttactctccacattggaacttgaacgcgaacagtgtgatctatgtgactcgagggaaaggaagagttagagtggtgaactgccaagggaatgcagtgttcgacggtgagc

SEQ ID NO: 112522 - DNA, 229 bp, Glycine max
cgggatcagcacaagattgcaaaatgaagttcaacattgcaaatcccaccactgggtgccagaagaagctggaaatcgatgacgacctgaagcttcgagcattttgggacaagaggatctcccaggaggttcttggtgatgctctgggtgaggagtttaaaggaaaggtttcaaaatcacggttgggtgtgacaaacaaggattccctatgaagcagggagtgctgacc

SEQ ID NO: 112523 - DNA, 235 bp, Glycine max
aagcaaagcaatggctacttcaaagttgaaaacccagaatgtggttgtatctctctccctaaccttaaccttggtactggtgctactgaccagcaaggcaaactcagcggaaactgtttctttcagctggaacaagttcgtgccgaagcaaccaaacatgatcctccaaggagacgctattgtgacctcctcgggaaagttacaactcattaaggttgacgaaaactgcacccca

SEQ ID NO: 112524 - DNA, 131 bp, Glycine max
tttgaacactcatcaccatggccaagcttgttctttccctttgtttccttcttttcagtggctgcttcgctctgagagagcaggcacagcaaaatgagtgccagatccaaaagctgaatgccctcaaaccg

SEQ ID NO: 112525 - DNA, 236 bp, Glycine max; identical to SEQ ID NO: 112113

SEQ ID NO: 112526 - DNA, 239 bp, Glycine max
ccatggccaagctagttttttccctttgttttctgcttttcagtggctgctgcttcgctttcagttccagagagcagcctcagcaaaacgagtgccagatccaaaaactcaatgccctcaaaccggataaccgtatagagtcagaaggagggctcattgagacatggaaccctaacaacaagccattccagtgtgccggtgttgccctctctcgctgcaccctcaaccgcaacgccctt

SEQ ID NO: 112527 - DNA, 132 bp, Glycine max
gcatcatctcaaagaaattaagagagtgttcattgttcctcactgaccaagccatggcgatgagaaccaaactttctttagctatctgtttctattttctgttagccttattatcaaacctagcctttggca

SEQ ID NO: 112528 - DNA, 88 bp, Glycine max
gaagaagatgggtttgaagaacaacatggtggtgctaaaggtgtgtttggtgctacttttccttgtggggggtactactagtgccaac

SEQ ID NO: 112529 - DNA, 250 bp, Glycine max
aaactttcgaaagattttatccaattgaaattttaaaaatgactgggataaacttaagaactcaattattgaaattgaataagtaaacaatttaattggattggtcgaatggtatcaaaaaaatggagtactaactcccatttcttatttattattgaattaaccgatcaacttgctttgttatcgaacatttctttttgatttcaaaaattttccggaaaaaatttgaatctatttttatatgcgaatc

SEQ ID NO: 112530 - DNA, 244 bp, Glycine max
ctcgggaaaaggattggctctgagggctgggcacgggggtcccagtcccgaacccgtcggctgtcggtggactgctcgagctgcttccgcggcgagagcgggtcgtcgcgtgccggtcgggggacggattgggaacgggcccttcggggcctcttccccgggcgtcgaacagtcaactcagaactggtacggacaaggggaatccgactgtttaattaaaacaaagcattgcgatggtccctgc

SEQ ID NO: 112531 - DNA, 243 bp, Glycine max; identical to SEQ ID NO: 111750

SEQ ID NO: 112532 - DNA, 236 bp, Glycine max
ctctctctctccttctcgctctttcagctttgacttttgttggaaactaaggcctaatcaaaatggtgaagttcacagctgaagagctacgtcgtattatggactataagcataatatccgtaatatgtctgtcattgctcatgttgatcacggaaaatcaacctcactggttctcttggggggctgctggttggtattattgctcaagaagttgccggtgatgtccgtatgactg

SEQ ID NO: 112533 - DNA, 236 bp, Glycine max
  unsure (1)..(236): unsure at all n locations
aacttattaacactttccttagttcaatatgngggaagcccttcttcactctctctctttcttccctttgcttgctactcttgtcgagtgcatgctttgctattacctccagcaagttcaacgagtgccaactcaacaacctcaacgcgttggaacccgaccaccgcgttgagtccgaaggtggtcttattgaaacatggaactctcaacaccctgagctgcaatgcgccggtgtc

SEQ ID NO: 112534 - DNA, 240 bp, Glycine max
ctccattgtctttgaacactcatcaccatggccaagcttgttctatccctttgtttccttcttttcagtggctgcttcgctctgagagagcaggcacagcaaaatgagtgccagatccaaaagctgaatgccctcaaaccggataaccgtatagagtcggaaggtgggttcattgagacctggaaccctaacaacaagccattccagtgtgccggtgttgccctctctcgctgcaccctt

SEQ ID NO: 112535 - DNA, 263 bp, Glycine max
aacttattaacactttccttagttcactatggggaagcccttcttcactctctctctttcttccctttgcttgctactcttgtcgagtgcatgctttgctattacctccagcaagttcaacgagtgccaactcaacacctcaacgcgttggaacccgaccaccgcgttgagtccgaaggtggtcttattgaaacatggaactctcaacaccctgagctgcaatgcgccggtgtcactgtttccaaacgcaccctcaaacggca

SEQ ID NO: 112536 - DNA, 285 bp, Glycine max
agagaatggctcccaagggtttaacctttctggctgtgttaatatgcgtttcagcactgtcactgagtccttctgttgcgggggaagggcaaaataatggccttgttatgaacttctacaaggaatcatgccctcatggctgtaagacatgcatcacaggaacaagtgcaagctatctgctacaatgcgccacatagaacactagctattctacctgagctgcagggaacatgcttccgatgacttgtgctgttgcagagttgctgatggcttcactagttgctg

SEQ ID NO: 112537 - DNA, 263 bp, Glycine max
gatatacccgggttgtcctagcacatttgaagagcctcaacaacctcaacaaagaggacaaagcagcagaccacaagaccgtcaccagaagatctataacttcagagagggtgatttgatcgcagtgcctactggtgttgcatggtggatgtagaacaatgaagacactcctgttgttgccgtttctattattgacaccaacagcttggagaaccagctcgaccagatgcctaggagattctatcttgctgggaaccaagagc

SEQ ID NO: 112538 - DNA, 264 bp, Glycine max
ctgacatctacaagcctcaagccggtagcgtcacaaccgccaccagccttgacttcccagccctctcgtggctcagactcagtgctgagtttggatctctccgcaagaatgcaatgttcgtgccacactacaagctgaacgcgaacagcataatatacgcattgaatggacgggcattgatacaagtggtgaattgcaacggtgagagagtgtttgatggagagctgcaagagggacgggtgctgatcgtgccagaaaactttg

SEQ ID NO: 112539 - DNA, 264 bp, Glycine max
gagatgcgccggtgtcactgtttccaaactcaccctcaaccgcaatggcctccacttgccatcttactcaccttatccccggatgatcatcatcgcccaagggaaaggagcacttggagttgcaattccaggatgtccgagacgtttgaggagccacaagaacaatcaaacagaagaggctcaaggtcgcagaagcagcagctacaggacagtcaccagaagattcgtcacttcaatgaaggagacgtactcgtgattcctcct

SEQ ID NO: 112540 - DNA, 252 bp, Glycine max
ctagttcaatatcctagtataccttaataaataatttaagatactatgatgagagcacggttcccattactgttgctgggacttgttttcctggcttcagtttctgtctcatttggcattgcttactgggaaaaagaaaccccaaacacaacaagtgtctccagaggtgcaatagcgagagaggctcgtacagggaccaagcatgccaagctcggtggaaactccttaaggtggcgaaagaaggatggtgaa

SEQ ID NO: 112541 - DNA, 265 bp, Glycine max
gtgaagaaggtgaaattccacgaccacgaccacgaccacaacacccggagagggaacctcagcaacccgatgagaaggaggaagacgaagatgagcaaccacgtcgcaatcccattcccacgcccacaacctcgtcaagaagaagagcacgagcagagagaggaacaggaatggcctcgcaaggaggaaaaacgcggagaaaagggaagtgaagaggaagatgaggatgaggatgaggaacaagatgaacgtcaattcccattcc

SEQ ID NO: 112542 - DNA, 257 bp, Glycine max
ggagaccccagactccaagccatttcccaagccatcagagtcgtccctcacttccccaaacatggaataatgttccaagacataacgacattgctgttggatcacaaggcgtttaaagacaccgtcgacatttttgcgatcgttacagagacatgcacatttccgtagttgctggaattgaggcaagggggttcatgtttggtccctcaattgcgttgggcattggtgcaaagtttgttcctttacgcaaaccacgg

SEQ ID NO: 112543 - DNA, 259 bp, Glycine max
aacttattaacactttccttagttcaatatggggaagcccttcttcactctctctctttcttccctttgcttgctactcttgtcgagtgcatgctttgctattacctccagcaagttcaacgagtgccaactcaaaacctcaacgcgttggaacccgaccaccgcgttgagtccgaaggtggtcttattgaaacatggaactctcaacaccctgagctgcaatgcgccggtgtcactgtttccaaacgcaccctcaacc

SEQ ID NO: 112544 - DNA, 261 bp, Glycine max
  unsure (1)..(261): unsure at all n locations
gcgtctganaccgcttctcggtcgagttccgcggctgattcgtacattgggagcttgataagcttgacctgctaagagtgagatcagatacgaaggcattctctacaacatcaacaccgaagagtccagtattggcctcagaaatgtgcgatcttttggaacagaaggnaganaaaaggatggcccacaaattcctncaggtgacaaggtttatgngtatatacttttccgtgggactgacatcaangatttanaggttaa

SEQ ID NO: 112545 - DNA, 101 bp, Glycine max
gggagcaattggatttgcatttccgggatgtcctgagacgtttgagaagccacaacagcaatcaagcagaagaggctcaaggtcgcagcagcaactacaag

SEQ ID NO: 112546 - DNA, 97 bp, Glycine max
tgagaaacctacaaggtgagaacgaagaggaggatagtggagccattgtgacagtgaaaggaggtctaagagtcacagctccagccatgaggaagcc

SEQ ID NO: 112547 - DNA, 254 bp, Glycine max
gtctttgaacactcatcaccatggccaagcttgttctttccctttgtatccttcttttcagtggctgcttcgctctgagagagcaggcacagcaaaatgagtgccagatccaaaagctgaatgccctcaaaccggataaccgtatagagtcggaaggtgggttcattgagacctggaaccctaacaacaagccattccagtgtgccggtgttgccctctctcgctgcacccttaaccgcaatgcccttcgtaga

SEQ ID NO: 112548 - DNA, 100 bp, Glycine max
gtcatatgcttgtctcaaagattaagccatgcatgtgtaagtatgaactaattcagactgtgaaactgcgaatggctcattaaatcagttatagtttgtt

SEQ ID NO: 112549 - DNA, 263 bp, Glycine max
ctccattgtctttgaacactcatcaccatggccaagcttgttctagtccctttgtttccttcttttcagtggctgcttcgctctgagagagcaggcacagcaaaatgagtgccagatccaaaagctgaatgccctcaaccggataaccgtatagagtcggaaggtgggttcattgagacctggaaccctaacaacaagccattccagtgtgccggtgttgccctctctcgctgcacccttaaccgcaatgcccttcgtagacc

SEQ ID NO: 112550 - DNA, 263 bp, Glycine max
gtctttgaacactcatcaccatggccaagcttgttctttccctttgtttccttcttttcagtggctgcttcgctctgagagagcaggcacagcaaaatgagtgccagatccaaaagctgaatggcctcaaaccggataccgtatagagtcggaaggtgggttcattgagacctggaaccctaacaacaagccattccagtgtgccggtgttgccctctctcgctgcacccttaaccgcaatgcccttcgtagaccttcctaca

SEQ ID NO: 112551 - DNA, 260 bp, Glycine max
gttgttaccacacacaaccataaccatagaccctcaataaatgcctcaggtgaaaagaagaaaattgtgggggtgttctacaaagggaatgagtatgctaaattgaaccccaatttcgtggggtgtgttgaaggagcttgggtatacgtgagtggctggaatcacagggtcatcagtacattgtcactgatgacaaagaaggaccagattctgaacttgagaaacacattccagatgcccatgtcatcatatctactcca

SEQ ID NO: 112552 - DNA, 276 bp, Glycine max
acgacgacagagactcctacagacttcaatctggtgatgccctgagagtcccctcaggaaccacatactatgtggtcaaccctgacaacaacgaaaatctcagattaataacactcgccatacccgttaacaagcctggtagatttgagagtttatctcctatctagcactgcaagctcaacaatacctacttgccaaggagttcagcagggaacatttgtaagaggcctcctaacgaataccaaattacgaaggagatgaaacaagggttctgtt

SEQ ID NO: 112553 - DNA, 260 bp, Glycine max
aaaaagatcatacatagtagtgttggtgggttgcaaagatgcttgggggtcttctccataggggtcataagataaaagggacagtggtgttgatgcgcaagaatgtgttggacgtgaatagcgtaaccagcgttgggggaattattggtcaaggtctcgacttagttggctcaacactcgatactcttactgccttcttgggccgatccgtgtctctccagcttattagtgctaccaaagctgatgccaacggaaaaggg

SEQ ID NO: 112554 - DNA, 258 bp, Glycine max
ctcgagccgcaacaatgaagacactcctgttgttgccgtttctattattgacaccaacagcttggagaaccagctcgaccagatgcctaggagattctatcttactgggaaccaagaacaagagtttctaaaatatcagcagcaagagcaaggaggttcccaaagccagaaaggaaagcaacaagaagatgaaaacgaaggaagcaacatattgagtggctttggccctgaattcttgaaagaagcgttcggcgtgaa

SEQ ID NO: 112555 - DNA, 256 bp, Glycine max
gttcaatatcctagtataccttaataaataatttaagatactatgatgagagcacggttcccattactgttgctgggacttgttttcctggcttcagtttctgtctcatttggcattgcttactgggaaaaagagaccccaaacacaacaagtgtctccagagttgcaatagcgagagagactcgtacaggaaccatgcatgccacgctcgttgcaacctccttaaggtggagaaagaagaatgtgaagaaggtga

SEQ ID NO: 112556 - DNA, 99 bp, Glycine max
gagattttgataaaccgcgatcacaggttgccgcaccgtaaaaccggaaacaaaagcaatcgttacttgatttcaagaatctctcaatttctttctact

SEQ ID NO: 112557 - DNA, 111 bp, Glycine max
gaagaagatgggtttgaagaacaacatggtggtgctaaaggtgtgtttggtgctactattccttgtagggggtactactaatgccaacttgaggctgagtaagcttggcct

SEQ ID NO: 112558 - DNA, 255 bp, Glycine max
gtctttgaacactcatcagcatggccaagcttgttctttccctcagtttccttcttttcagtggctgcttcgctctgagagagcaggcacagcaaaatgagtgccagatccaaaagctgaatgccctcaaaccggtaaccgtatagagtcggaaggtgggttcattgagacctggaaccctaacaacaagccattccagtgtgccgatgttgccctctctcgctgcacccttaaccgcaatgcccttcgtagacc

SEQ ID NO: 112559 - DNA, 261 bp, Glycine max
ggagaaccagctcgaccagatgcctaggagattctatcttgctgggaaccaagagcaagagtgtctacaatatcagcagcagcagcaaggaggttcccaaagccagaaaggtaagcaacaagaagcagaaaacgaggtagcaacatattgagtggcttcgcccctgaattctagaaagaagcgttcggcgtgaacatgcagatagtgagaaacctacaaggtgagaacgatgaggaggatagtggagccatgtgacagtga

SEQ ID NO: 112560 - DNA, 98 bp, Glycine max
cctggcccttgcactctgcgtactgcattagcacgctatgctgatctcttgaaccccccacgaaaggctgctttagttgctttagctgctcatgcttc

SEQ ID NO: 112561 - DNA, 97 bp, Glycine max
cggctcgagccgtcaccagaagatctataacttcagagagggtgatttgatcgcagtgcctactagtgttgcatggtagatgtacaacaatgatgtc

SEQ ID NO: 112562 - DNA, 257 bp, Glycine max
caatatcctagtacaccgtattaaagaatttaagatatactatgatgagagcgcggttcccattactgttgctgggagttgttttcctggcatcagtttctgtctcatttggcattgcgtattgggaaaagcagaacccagtcagaacaagtgcctccgaagttgcaatagcgagaaagactcctacaggaaccaagcatgccaggctcgttgcaacctccttaaggtggaggtagaagaagaatgcgaagaaggtc

SEQ ID NO: 112563 - DNA, 258 bp, Glycine max
ctctccattggtccttaaacactcatcagtcatcaccatggccaagctagttttttccctttgttttctgcttttcagtggctgctgcttcgctttcagttcgagagagcagcctcagcaaaacgagtgccagatcaaaaactcaatgccctcaaaccggataaccgtatagagtcagaaggagggctcattgagacatggaaccctaacaacaagccattccagtgtgccggtgttgccctctctcgctgcaccctc

SEQ ID NO: 112564 - DNA, 224 bp, Glycine max
ggctcgaggtcgcagaagcagcagctacaggtcagtcaccagaagattcgtcacttcaatgaaggaggtgtactcgtgattcctcctggcagttccatactcgagctataagactggcgatgaaccagttgttgccatcagtcttcttgacacctctaactgcaataacgagcttgatcaaacccctagggtagtttaccttgctgggataccagatatagagt

SEQ ID NO: 112565 - DNA, 96 bp, Glycine max
atcctagtacaccgtattaaagaatttaggatatactatgatgagagcgcggttcccattactgttgctgggagttgttttcctggcatcagtttc

SEQ ID NO: 112566 - DNA, 96 bp, Glycine max
ctggggatctggtttcttacactgctgaagaaggtgtaaggatactgggagagggaaagttcttggtgtcggatagctttcctggaaatgaaagga

SEQ ID NO: 112567 - DNA, 193 bp, Glycine max
taaaattcttccaccaagttatgggtttccttgtgttgcttctaggctccctcttaggtctctcttctagttccagcatatcaactcatcgttcgatattggaccttgacctaacgaagttttaccacacaggacaggtgtcttcactggtccaactatggaatgatgagcatggacgtgtctaccataacca

SEQ ID NO: 112568 - DNA, 264 bp, Glycine max
gcgagtcaacgggcgagtaaacccgtaaggcgcaaggaagctgattggtgggatccccctgtgggttgcaccgccgaccgaccctgatcttctgtgaagggttcgagtgagagcatacctgtcgggacccgaaagatggtgaactatgcctgagcggggcgaagcagtaggaaactctggtggaggcccgcagcgatactgacgtgcaaatcgttcgtctgacttgggtataggggcgaaagactaatgcgaaccgtctagtag

SEQ ID NO: 112569 - DNA, 99 bp, Glycine max
gcagaattcgggttctcaagaagttcactgaaaaatccaagcttcttcagggcattgcgaacttccgtttggccattttggaagctagagcacacacgt

SEQ ID NO: 112570 - DNA, 259 bp, Glycine max
atatcctagtacaccgtattaaagaatttaagatatactatgatgagagcgcggttcgcattactgttgctgggagttgttttcctggcatcagtttctgtctcatttggcattgcgtattgggaaaagcagaaccgagtcacaagaagtgcctccgaagttgcaatagcgagaaagactcctacaggaaccaagcatgccacgctcgttgcaacctccttaaggtggaggaagatgaagaatgcgaagtaggtcttat

SEQ ID NO: 112571 - DNA, 257 bp, Glycine max
cttattcttggtctataatgtgctgatttgagcacattaaaatagcagtgtgattggcaggttttggcaaagatgttctcagttccaggggtgtcgggaatcctgaacagaggaggagggcataagagacaagggcagtggtgttgatgaggaagaatgtgttggacttcaacagcgtggctgatcttactaaaggaaatgttgggggactcataggcaccggcctcaacgttgttggctcaacacttgataacctc

SEQ ID NO: 112572 - DNA, 264 bp, Glycine max
ctcaaaggaattgaggaaaaacttgcaaggaagaacaatgatcaaagtctctccaatcgacttgggccggttcaactgccatacactttgctccatcctaacagtgaggaagggttgacttgcagggggattcctaatagcatctctatctaagggagcatgtggtctactttaattacagtactgtacctaccttccaataaaaaagatgcaaggctagagatccaataaatcttgcatcctatctaatgtttcaattatctt

SEQ ID NO: 112573 - DNA, 260 bp, Glycine max
tcctgccagtagtcatatgcttgtctcaaagattaagccatgcatgtgtaagtatgaactaattcagactgtgaaactgcgaatggctcattaaatcagttatagtttgtttgatggtatctactactcggataacgtagtaattctagagctaatacgtgcaacaaaccccgacttctggaagggatgcatttattagataaaaggtcaacacaggctctgcctgttgctttgatgattcatgataactcgtcggatcg

SEQ ID NO: 112574 - DNA, 95 bp, Glycine max
aaataatttaagatactatgatgagagcacggttcccattactgttgctgggacttgttttcctggcttcagtttctgtctcatttggcattgct

SEQ ID NO: 112575 - DNA, 259 bp, Glycine max
taaacactcatcagtcatcaccatggccaagctagttttttccctttgttttctgcttttcagtggctgctgcttcgctttcagttccagagagcagcctcagcaaaacgagtgccagatccaaaaactcaatgcccacaaaccggataaccgtatagagtcagaaggagggctcattgagacatggaaccctaacaacaagccattccagtgtgccggtgttgccctactctcgctgcaccctcaaccgcaacgccct

SEQ ID NO: 112576 - DNA, 214 bp, Glycine max
caaataattaattaaattcctcgtggaatcttgttgaagccatgtctacagctggtcaggtcatcaagtgcagagctgcggtggcatgggaagcagggaagccactatcgatagaaaccatagaagtggcaccacccagaaaggtgaagtgcgtttgaagatcctcttcaactccctattgccgtacagatgtttactggtgggatgctaaggg

SEQ ID NO: 112577 - DNA, 257 bp, Glycine max
caagctggtagcatcacaaccgccaccagccttgacttcccagccctctggcttctcaaactcagtgcccagtatggatcactccgcaagaatgctatgttcgtgccacactacaccctgaacgcgaacagcaaatatacgcattgaatgggcgggcattggtacaagtggtgaattgcaatggtgagagagtgtttgatggagagctgcaagagggaggggtgctgatcgttccacaaaactttgcggtggctgca

SEQ ID NO: 112578 - DNA, 254 bp, Glycine max
aaagagttggcttcaaagactcaatctcatgcttacctttaccaacatcacccagagatctatgagtactattcactacaactcacatgcaacgaagatagcactggtgatcgatggcagagggcatcttcaatatcatgtccacacatgtcatcaaggtcgtcacactcgaagcatgataagagtagcccttcataccatagaatcagttccgatttgaagcctggaatggtgtttgttgtccctcccggtca

SEQ ID NO: 112579 - DNA, 259 bp, Glycine max
attggtccttaaacactcatcagtcatcaccatggccaagctagttttttccctttgttttctgcttttcagtggctgctgcttcgctttcagttccagagagcagcctcagcaaaacgagtgccagatccaaaactcaatgccctcaaaccggataaccgtatagagtcagaaggagggctcattgagacatggaaccctaacaacaagccattccagtgtgccggtgttgccctctctcgctgcaccctcaaccgca

SEQ ID NO: 112580 - DNA, 259 bp, Glycine max
tctctccattgtctttgaacactcatcaccatggccaagcttgttctttccctgtgtttcctatcttttcagtggctgcttcgctctgagagagcaggcacagcaaaatgagtgccagatccaaaagctgaatgcctcaaaccggataagcgtatagagtcggaaggtgggttcattgagacctggaaccctaacaacaagccattccagtgtgccggtgttgccctcactcgctgcacccttaaccgcaatgcccttc

SEQ ID NO: 112581 - DNA, 257 bp, Glycine max
ataaaattcttccaccaagttatgggtttccttgtgttgcttcttatctccctcttaggtctctcttctagttccagcatatcaactcatcgttccatattggaccttgacctaaccaagtttaccacacagaaacaggtgtcttcactgttccaactatggaagagtgagcatggacgtgtctaccataaccacgaagaagaggctaagagacttgagattttcaagaataacttgaactatatcagggacatgaa

SEQ ID NO: 112582 - DNA, 258 bp, Glycine max
ctcaatctcatgcttacctttaccaacatcacccagagatctatgagtactattcactacaactcacatgcaacgaagatagcactggtgatcgatggcagagggcatcttcaaatatcatgtccacacatgtatcaaggtcgtcacactcgaagcatgataagagtagcccttcataccatagaatcagttccgatttgaagcctggaatggtgtttgttgtccctcccggtcatcccttcgtcaccatagcttcca

SEQ ID NO: 112583 - DNA, 256 bp, Glycine max
attgtctttgaacactcatcaccatggccaagcttgttctttccctttgtttccttcttttcagtggctgcttcgctctgagagagcaggcacagcaaaatgagtgccagatccaaaagctgaatgccctcaaccggataaccgtatagagtcggaaggtgggttcattgagacctggaaccctaacaacaagccattccagtgtgccggtgttgccctctctcgctgcacccttaaccgcaatgcccttcgtaga

SEQ ID NO: 112584 - DNA, 95 bp, Glycine max
cactcatcagtcatcaccatggccaagctagttttttccctttgttttctgcttttcagtggctgctgcttcgctttcagttccagagagcagcc

SEQ ID NO: 112585 - DNA, 255 bp, Glycine max
gcaaggtttccgatcgagggtctatcattggtcttgaatgacacatactcaaagttatcgcattgccagaggaagtgattcagcacacttttaacctaaagagccagcaggccaggcaggtgaagaacaacaccctttcagcttcctggttccacctcaggagtctcagaggagagctgtggcttagagagccctttttgcatgtgctaccacacttttgtccttttgggctctagctagtgctggtagcagtaa

SEQ ID NO: 112586 - DNA, 253 bp, Glycine max
ctctccattgtctttgaacactcatcaccatggccaagcttgttctttccctttgtttccttcttttcagtggctgcttcgctctgagagagcaggcacagcaaaatgagtgccagatccaaaagctgaatccctcaaaccggataaccgtatagagtcggaaggtgggttcattgagacctggaaccctaacaacaagccattccagtgtgccggtgttgccctctctcgctgcacccttaaccgcaatgcc

SEQ ID NO: 112587 - DNA, 93 bp, Glycine max
tgaagatgaacaaattccctctcaccctcctcgccgaccaagccatggaaagcgtgaacaagacgaggacgaggacgaagatgaagataaacc

SEQ ID NO: 112588 - DNA, 242 bp, Glycine max
cttattaacactttccttagttcaatatggggaagcccttcttcactctctctctttcttccctttgcttgctactcttgtcgagtgcatgctttgctattacctccagcaagttcaacgagtgccaactcaacacctcaacgcgttggaacccgaccaccgcgttgagtccgaagtggtcttattgatacatggaactctcaacaccctgagctgaaatgcgcgggtgtcactgttccaaa

SEQ ID NO: 112589 - DNA, 258 bp, Glycine max
aatcataaaattcttccaccaagttatgggtttccttgtgttgcttcttttctccctcttaggtctctcttctagttccagcatatcaactcatcgttccatattggaccttgacctaaccaagtttaccacaagaaacaggtgtcttcactgttccaactatggaagagtgagcatggacgtgtctacgataaccacgaagtagaggcaaagagacttgagattttcaagaataacttgaactatatcagggacatg

SEQ ID NO: 112590 - DNA, 257 bp, Glycine max
attgaatcgactaaaaaatgaaatgaatcatttcatattgatagtattgctatgcttagtgtgcgactcgttagttttttagaacggttccaatttaacaaatttataaaccggttcatcgtataaatgaattataaagaactaataaccaacgcatcgcttcggattacctagatctaaagaactagccaatacaaaaaaatatataaaaatagatatattatagcaactgaactattgtgaagctcaaaagaaca

SEQ ID NO: 112591 - DNA, 258 bp, Glycine max
gttatccagttgtggtcaacgctacctcacttcaatacaaaggcgatagtgatactggtaattaatgtaggagttgctaacattgaacttgttggcctaaaagaacaacaacaggagcagcaacaggaagtgcacctttggaagtgcggaaatatagagccgaattgtctgaacatgatatatgtgtaatcccagcaggttatccagttgtggtcaacgctacctcaaatctgaatttctatgctattggtattaatg

SEQ ID NO: 112592 - DNA, 259 bp, Glycine max
tcggggttgatttacttaccaatcgatttgaacaagccaaacaatttggggtcactgattttgtgaacccgaaagatcacaacaaaccagttcaagaggtcattgctgaaatgactaatggaggagtagatcgtgctattgaatgcacaggaagcatccaagcatcaatctcggcatttgaatgcactcatgatggttggggtactgctgtccttgttagtgtgccaaagaaggatgcagaattcaaaactcatcctat

SEQ ID NO: 112593 - DNA, 257 bp, Glycine max
ttccttttgtaatttcattcattcttaatctttgtgaaaaataatgttcatcgagaattttaaggttgagtgtcctaatgtgaagtacaccgagactgagattcagtccgtgtacaactacgaaaccaccgaattgttcacgagaacaggaatggcacctatcagtggattgtcaaacccaaatctgtcaaatacgaatttaaaaccaacatccatgttcctaaattaggggtaatgcttgtgggttggggtggaaa

SEQ ID NO: 112594 - DNA, 257 bp, Glycine max
ctttgaacactcatcaccatggccaagcttgttctttccctttgtatccttcttttcagtggctgcttcgctctgagagagcaggcacagcaaaatgagtgccagatccaaaagctgaatgccctcaaaccgataaccgtatagagtcggaaggtgggttcattgagacctggaaccctaacaacaagccattccagtgtgccggtgttgccctctctcgctgcacccttaaccgcaatgcccttcgtagaccttcc

SEQ ID NO: 112595 - DNA, 255 bp, Glycine max
gaaaacccagaatgtggttgtatctctctccctaaccttaaccttggtactggtgctactgaccagcaaggcaaactcagcggaaactgtttctttcagctggaacaagttcgtgccgaagcaaccaaactgatcctccaaggagacgctattgtgacctcctcgggaaagttacaactcaataaggttgacgaaaacggcaccccaaaaccctcgtctcttggtcgcgccctctactccacccccatccacatt

SEQ ID NO: 112596 - DNA, 258 bp, Glycine max
gatctatccactcacctgcctcttcctcacccctttctccatctaacgagtaaggaaaaatggcgcgtaagaagatcagagagtatgactcaaagaggttgttgaaggagcactttaagagactttctggcaggagttgccgatcaagtctgcacaaattactgcatcaactgatttcactgagctacaagagaaggacccctggctttcatcttctaaattggttgtgaaacctgacatgttatttggaaagcgtgg

SEQ ID NO: 112597 - DNA, 260 bp, Glycine max
cgcatcgcaccttcaacttaacctattccacttgtaatcgtaactgctttgctagaagaagagacaaagtgtgtctgtgtgtgtgagagagagagcaatggctggctcgtgggcacgccgttctctgattgtttagccatcatttccttcggatgtctatttgcgatttccattgctaaggaggaagccaccaagttagggacggtcatcggcattgatcttggaacaacctattcatgtgtcggtgtttacaagaatgg

SEQ ID NO: 112598 - DNA, 255 bp, Glycine max
  unsure (1)..(255): unsure at all n locations
tcaatatcctagtacaccgtattaaagaatttaagatatactatgatgagagcgcggttcccattactgttgctgggagttgttttcctggcatcagtttctgtctcatttggcattgcgtattgggaaaagcagaaccccagtcacaacaagtgcctccgaagttgcaatagcgagaagacatcgtcaggaaccaagcantccacgcatgattcaaccatcatatagctgaggaagaagaagaattcgaagaag

SEQ ID NO: 112599 - DNA, 246 bp, Glycine max
  unsure (1)..(246): unsure at all n locations
aatctgtggaatcaaaggggcaagctgagaagtgtgccaagagaaagaggaagaaccagtatcgcggaatccgccagcgtccatggggaaagtgggctgctgagattcgcgacccaagaaagggggttcgtgtttggcttggaactttcagcactgctgaagaagctgcaagagcttcgatgctgaagcaaggaggaatcgatgcaagaaagccaaggggtaattcccatantagccatcaggcgc

SEQ ID NO: 112600 - DNA, 230 bp, Glycine max
  unsure (1)..(230): unsure at all n locations
ggagaagctgttcttcgaacatttagtgggactggagcgggaatggatgtcgttgtttccagtgtcaaggcctatattgctgcactaaacaagatgttgggtttcaaggaaacatctccatctgctgaaaaaagttcagnttcatcanttaagagtttagaanttgcgntgcagtctggaatacagncgtgtgtgtacaaccacaaagaggaagacaaagnntcagcagc

SEQ ID NO: 112601 - DNA, 236 bp, Glycine max
  unsure (1)..(236): unsure at all n locations
agagggtctcaaagttggtattgtgagcaatgccgagtatcgatatcaagatgtgattcttccagctttgggtttaaacgagggatctgagtgggactttggtgtgttttccggccttgaaggcgtcgagaaaccaaacccgaaaagttantagagtgcacattagagggccggaanantgtaccagtaagaagcgatgcacacctgggacagcangtgcaaagactatgatccag

SEQ ID NO: 112602 - DNA, 219 bp, Glycine max
  unsure (1)..(219): unsure at all n locations
gcgtaaaactgtttctcttctggaagaatatttcaatgtccggcttttggacgaggcattacagtgtgtggaggaactaaaagctccagcttattaccctgagtttgtcaaggaagctatttcccttgctctagantaaagntcgccaatcgcctaaccatntgccaaacgtattanatctgtccatcaagaagangctctcagccagagacagatgga

SEQ ID NO: 112603 - DNA, 195 bp, Glycine max
  unsure (1)..(195): unsure at all n locations
caacgatattctgtgttgcgattatgctagttttgatggtttgattaccaagcaagttatgagcaagatggcagaaatgataaacagtctttgtggtggtgatgaaaaattgatgcgtgaaaggacgcacctgcatattgcattntgatcaaggantgcaagtttnataaaaaggtgtttagggctatagtgtaa

SEQ ID NO: 112604 - DNA, 161 bp, Glycine max
  unsure (1)..(161): unsure at all n locations
aaaaaggtgtcatcacccaagtaaagtaccaagggggctgtggaagcggttgggcgttttctgccacgggagccatagaagcagcacatgcaatagcaacaggagaccttgttagcctttctgaacaagaacacgnagacatngntgaagaaagcgaagga

SEQ ID NO: 112605 - DNA, 227 bp, Glycine max
  unsure (1)..(227): unsure at all n locations
cttaattattaacacttccttagttcaatatggggaagcccttcactctctctctttcttccctttgcttgctactcttgtcgagtgcatgctttgctattagctccagcaagctcaacgagtgccaactcaacaacctcaacgcgattgaacccgaccaccgcgattagatcaagggtgnttgactcaaacantgaacactcaacacccagtgcagtaaagtgccg

SEQ ID NO: 112606 - DNA, 255 bp, Glycine max
cgagagctccaagtgggccatttttggtaagcagaactggcgatgcgggatgaaccggaagctgggttacggtgcccaactgcgcgctaacctagaccccacaaagggtgttggtcgattaagacagcaggacggtggtcatggaagtcgaaatccgctaaggagtgtgtaaactcacctgccgaattaacgtgccccgaaaactgaatgcgcgtaagcgcgcgaccttgtcccggccgacggggcaaggaccag

SEQ ID NO: 112607 - DNA, 255 bp, Glycine max
tgcttactgggaaaaagagaaccccaaacacaacaagtgtctccagagttgcaatagcgagagagactcgtacaggaaccaagcatgccacgctcgttgcaacctccttaaggtggagaaagaagaatgtgaagaaggtgaaattccacgaccacgaccacgaccacaacaccggagagggaacctcagcaacccggtgagaaggaggaagacgaagatgagcaaccacgtccaaatcccatcccacgcccacaa

SEQ ID NO: 112608 - DNA, 250 bp, Glycine max
acttattaacactttccttagttcaatatggggaagcccttcttcactctctctctttcttccctttgcttgctactcttgtcgagtgcatgctttgctattacctccagcaagttcaacgagtgccaactcaacaacctcaacgcgttggaacccgaccaccgcgttgagtcgaaggtggtcttattgaaacatggaactctcaacaccctgagctgcaatgcgccggtgtcactgtttcaaacgcacc

SEQ ID NO: 112609 - DNA, 255 bp, Glycine max
gcttttactccagaggttgaaaccttttaactgtaatcttctgtattttgatcgacttaggatcgatcctgaattggagaaagagattggagcaaaatttgaggaggaccttgatgcaatgcttccaaagtgtgatgtaattgttatcaacacccctctcactgagcagacaagggattgtttgacaaaaatagaattgcgaagtgcaagaaaggtgtcttgattgttacaatgctcaggggcaattcggacacc

SEQ ID NO: 112610 - DNA, 265 bp, Glycine max
ctctgcacccaccattactcagcactgccactcttcaatcacactaatggctgtcaccttctcagatcctcacaccgaagagggcatcaaatccctcgatcaattcctttctgggaaaacctatatctctggggatcaattgacaaaggatgatatcaaagtgtatgcagctgttgtggaaagccaggagactcttttcctaatgctgctaagtggtacgatgccgtctcttctcaacttgctccaagcttccctgggcacgctc

SEQ ID NO: 112611 - DNA, 259 bp, Glycine max
  unsure (1)..(259): unsure at all n locations
atttgtccttgaatataatactcagcatggctaagcttgttctttccctttgttttctgcttttcagtggctgctgcttcgctttcagtttcagagagcagccacagcaaaacgagtgccagatccaacgcctcaatgccctcaaaccggataaccgtatagagtcagaaggtggttcattgagacactgaacccttacaacaagccagtccagngntccggagattcccacacacgcatgcaccataaccgcaacgcc

SEQ ID NO: 112612 - DNA, 255 bp, Glycine max
  unsure (1)..(255): unsure at all n locations
gaattgttgtaactttttgattcctaaattctctaaaattcgaaattctaatttcgttaggggaaagagattgtttgtgtgtgagtgagtatggctggaaaaggcgagggtcctgctatcggaatcgatttgggaacgacgtactcttgcgtcggcgtgtggcaacacgatcgtgtgaaaatatagccaacgagcagggnaacagaacgaccccaatcatagatgcattcaccgacacagaacggntgtactgcg

SEQ ID NO: 112613 - DNA, 238 bp, Glycine max
  unsure (1)..(238): unsure at all n locations
gacagaatatttatatactactctgatcatggaggtcctggaatacttgggatgccaaacatgccatacctttatgccatggattttattgatgtcttgaagaagaaacatgcatctggaagtaacaaggagactgttatanacgaggaagcattctaaagntggagcgttnttaggggantactccataggaacataanatctatgtcacaacagtaactaatgctacaagagaaag

SEQ ID NO: 112614 - DNA, 203 bp, Glycine max
  unsure (1)..(203): unsure at all n locations
tctctccattgtctttgaacactcatcaccatggccaagcttgttctttccctttgtttccttcttttcagtggctgcttcgctctgagagagcaggcacagcaaaatgagtgccagatccaaaagcataantcccataaaccggaataccgaactgagacggaaggcgtggatctatagaccagtaacccaatcaacaagcc

SEQ ID NO: 112615 - DNA, 246 bp, Glycine max
  unsure (1)..(246): unsure at all n locations
gaaccagctcgaccagatgcctaggagattctatcttgctgggaaccaagagcaagagtttctacagtatcagccacagaagcagcaaggaggtactcaaagccagaaaggaaagcgtcagcaagaagaagaaaacgaaggaggcagcattntgagntgcatcgccccggaantctgtgaacaagtgnacgacgaggacaggcaganatngagaaagcaactaggggataacgaagaggaagagaa

SEQ ID NO: 112616 - DNA, 229 bp, Glycine max
  unsure (1)..(229): unsure at all n locations
cttaattattaacacttccttagttcaatatggggaagcccttcactctctctctttcttccctttgcttgctactcttgtcgagtgcatgctttgctattagctccagcaagctcaacgagtgccaactcaacaaccttaacgcgtttgaacccgaccaccgcgatgtagtctcaagagtgnatgagacaaacangtaacactctacacccagtgcagataagctccg

SEQ ID NO: 112617 - DNA, 253 bp, Glycine max
  unsure (1)..(253): unsure at all n locations
aacttattaacactttccttagttcaatatggggaagcccttcttcactctctctctttcttccctttgcttgctactcttgtcgagtgcatgctttgctattacctccagcaagttcaacgagtgccaacacaacaaccataacgcgattgaacccgaccaccgcgattagacgaaggtggncttatagtaacaagtaacactctacacccagtgcagctaagctccggtgacactgctccatacgcaccac

SEQ ID NO: 112618 - DNA, 254 bp, Glycine max
  unsure (1)..(254): unsure at all n locations
ggaaccacatactatgtggtcaaccctgacaacaacgaaaatctcagattaataacactcgccatacccgttaacaagcctggtagatttgagagtttcttcctatctagcactgaagctcaacaagtcctacttcaaggactcagcaggaacantttagaggccatcnacgaaccaaagtcgaggaganaaacaagggactgtgtatnatagaggaagggcagcagcaaggggagcagaggcagtaagagagc

SEQ ID NO: 112619 - DNA, 186 bp, Glycine max
  unsure (1)..(186): unsure at all n locations
gaacactcatcaccatggccaagcttgttctttccctttgtttccttcttttcagtggctgcttcgctctgagagagcaggcacagcaaaatgagtgccagatccaaaagctgaatgccctcaaaccggataaccgtatagagtcggaaggctgggttcatgagaccatgacccnaacaacaagcc

SEQ ID NO: 112620 - DNA, 227 bp, Glycine max
cttaattattaacacttccttagttcaatatggggaagcccttcactctctctctttcttccctttgcttgctactcttgtcgagtgcatgctttgctattagctccagcaagctcaacgagtgccaactcaacaacctcaacgcgttggaacccgaccaccgcgttgagtcgaaggtgcgtttgatcaaacatggaacactcaacacccatgagctgaaatcgccg

SEQ ID NO: 112621 - DNA, 251 bp, Glycine max
  unsure (1)..(251): unsure at all n locations
cttattaacactttccttagttcaatatggggaagcccttcttcactctctctctttcttccctttgcttgctactcttgtcgagtgcatgctttgctattacctccagcaagttcaacgagtgccaactcaacaacctcaacgcgttggaacccgaccaccgcgttgagtcgaaggtggatcttattgaaacatggaacatctcaacaccctgagctgcaatcgccggngatacatntttcaaacgcacc

SEQ ID NO: 112622 - DNA, 259 bp, Glycine max
tgaagagcaccatcttttttgctctctttctcttttgtgccttcaccacctcatacctaccttcagccatcgctgatttcgtgctcgataatgaaggtaaccctcttgaaaatggtggcacatattatatcttgtcagacataacagcatttggtggaataagagcagccccacgggaaatgaaagatgccctctcactgtggtgcaatctcgcaatgagctcgacaaagggattggaacaatcatctcgtccccatat

SEQ ID NO: 112623 - DNA, 259 bp, Glycine max
atcagattcatgctcttccagacacatttggtcgccttgataatttaatcaagctcaacttggagcaaaatcctcttgaattgccaccaatggagattgtaaatcaaggggttgaagccataaagacttttatggccaagaggtggcttgatatattgttggaggaagaaaggaaagcaaccaagaaatgcaagaaccagaacagggtggttggttaacacgaagcacctcctggttgaagaatgtttctggaaatgta

SEQ ID NO: 112624 - DNA, 265 bp, Glycine max
cgttgacgatggcgtttcgggtgcgaagcctgacctccgctctctctttcttctctctctcttgtccatcgcttccgccaatgtcttcttcgaagagcgtttcgatgacgggtgggaaaatcgatgggttaaatcagattggaaaaaagatgagaacgtggctggggagtggaacacacctctggtcaatggaatggagacgctaatgacaaaggtattcaaaccagtgaggattacagattctatgctatttcagctgagccct

SEQ ID NO: 112625 - DNA, 267 bp, Glycine max
cactttccttagttcaatatggggaagcccttcttcactctctctctttcttccctttgcttgctactcttgtcgagtgcatgctttgctattacctccagcaagttcaacgagtgccaactcaacaacctcaacgcgttggaacccgaccaccgcgttgagtccgaaggtggtcttatgaaacatggaactctcaacaccctgagctgcaatgcgccggtgtcactgtttccaaacgcaccctcaaccgcaacggcctccacttgc

SEQ ID NO: 112626 - DNA, 231 bp, Glycine max
ctcgagccgattcggctcgagtggtccttaaacactcatcagtcgtcaccatggccaagctcgttttttccctttgttttctgcttttcagtggctgctgcttcgctttcagttccagagagcagcctcagcaaaacgagtgccagatccaaaaactcaatgccctcaaaccggataaccgtatgagacagaaggagggcatcattagacattgaacccctacaacaagcc

SEQ ID NO: 112627 - DNA, 193 bp, Glycine max
aaattatggaattctctgtaagagctgcggaactaacaactctattagaaagtagaattaccaacttttacactaattttcaagtggatgagatcggtcgagtggtctccgttggagatgggattgcacgtgtttatggattgaacgagattcaagctggggaaatggttgaattgccagcggatgtaaagga

SEQ ID NO: 112628 - DNA, 187 bp, Glycine max
ctcgagccgcaaatcccggggaagttgtgaagcctgattcatacaaggctataaatgatgagggaatgcccatgtatcagaggccattcatgaaggggaaactttacattcacttcactgtggatgtttccagatcacgtaacccataataagttaaggccattgaggcagtatctcaccaaagcca

SEQ ID NO: 112629 - DNA, 244 bp, Glycine max
  unsure (1)..(244): unsure at all n locations
gtaatggtatttttggcatgatattcccgggttgtcctagcacttatcaagagccgcaagaatctcagcaacgaggacgaagccagaggccccaagaccgtcaccaaaaggtacatcgcttcagagagggctgatttaacgcagntccntcatgatnttcantgctgantnacacaantaagacacactagtggtatccggatctatgatgtacaccaacagcantgtagaacagcacgtccag

SEQ ID NO: 112630 - DNA, 200 bp, Glycine max
  unsure (1)..(200): unsure at all n locations
ccattgtctttgaacactcatcaccatggccaagcttgttctttccctttgtttccttcttttcagtggctgcttcgctctgagagagcaggcacagcaaaatgagtgccagatccaaaagctgaatgcccacaaaccggagtaccgaantgagacggaaggctggatctaatagaccagtgaaccaaacaacaagccaa

SEQ ID NO: 112631 - DNA, 230 bp, Glycine max
  unsure (1)..(230): unsure at all n locations
gttctacatagcatctcctttaccaccattctagatatcagagaactttgcagctctcttaggtttttaaaaaacaccacgcaaacagcaagatggccacttccgacagtaacatgctactaaattatgttccagtttatgtgatgcacccacacggagatgncaangntgcaangnttttgaagacccagactgccgttaagaacagcacattcagcatcgagcagtgg

SEQ ID NO: 112632 - DNA, 260 bp, Glycine max
agcagaacgaggagaagcagaaggagcaaaagcaatggcgccgaagaagccgagaaccacgacaaggaaccctgatttggttagggggattggcaagtattcgaggtcgcagatgtaccacaagaggggcatctgggccatcaaggccaaaaacggtggcgttttgccccgccacgatcccaagcccaagcccgaggccccggcccagaagccgcccaagttctaccccgcggacgatgttaagaagcccctcgtcaaca

SEQ ID NO: 112633 - DNA, 262 bp, Glycine max
aactaactaagaaagtcttccatagccccccaaaaatgaagagcaccatcttctttgctctctttctcttttgtgccttcaccacctcatacctaccttcagccatcgctgatttcgtgctcgataatgaaggtaaccctcttgaaaatggtggcacatattatatcttgtcagcataacagcatttggtggaataagagcagccccaacgggaaatgaaagatgccctctcactgtggtgcaatctcgcaatgagctcgaa

SEQ ID NO: 112634 - DNA, 263 bp, Glycine max
aagaactctatcgtaccgatggtcaacacatcctcaagtttccacaacctcacgtcgttcaagtgagtcagtctgcatggatgactgatgaagaatttgctagagagatgattgctggtgtaaatccctgcgtaattcgtggtcttgaagagttccctccaaaaagtaatctggatctgcaatctatggtgatcaaagcagtaagataacagcagattcccttgatctagatgggtacacaatggacgaggcacttggtagtc

SEQ ID NO: 112635 - DNA, 240 bp, Glycine max
  unsure (1)..(240): unsure at all n locations
agaagacgaagacgaagatgaagacgaagaatatgaacaaactccctcttatcctccacgacgaccaagccatggaaagcatgaagatgacgaggacgaggacgaagaagaagatcaacctcgtcctgatcaccctccacagcgaccaagcaggcccgaacaacaagaaccacgtggaagaggnattcagacgtagaaatggggttaggaaaatatttcaccantaagcattacgagaac

SEQ ID NO: 112636 - DNA, 229 bp, Glycine max
  unsure (1)..(229): unsure at all n locations
ctcgagccgaatcggctcgagcgtgataaaaccacccacggacgaccagcaacaaagaccccaggaagaggaagaagaagaacgaggatgagaagccacagtgcaagggtaaagacaaacactgccaacgcccccgaggaagccaaagcaaaagcagaagaaatggcattgacgaaccatagtcaccantagacatcgccacaacagttgccagacatcaataccatac

SEQ ID NO: 112637 - DNA, 259 bp, Glycine max
  unsure (1)..(259): unsure at all n locations
atttgtccttgaatataatactcagcatggctaagcttgttctttccctttgttttctgcttttcagtggctgctgcttcgctttcagtttcagagagcagccacagcaaaacgagtgccagagccaacgccatcaatcccataaaccggagtaccgnantgagacagaaggtgcatcagtgtagacantgaacccaatcaacaagccagaccagtgtgtcggagatgcccactctcgttgctaccacatccgcaacgc

SEQ ID NO: 112638 - DNA, 171 bp, Glycine max
ctcgagccgaaaaaagatcatacatagtagtgttggtgggttgcacagatgcttgggggtattctccataggggtcataagataaaagggacagtggtgttgatgcgcaagaatgtgttggacgtgaacagcgataccagcgattggggaacttcttgacaaggatacgac

SEQ ID NO: 112639 - DNA, 176 bp, Glycine max
  unsure (1)..(176): unsure at all n locations
cttaattattaacacttccttagttcaatatggggaagcccttcactctctctctttcttccctttgcttgctactcttgtcgagtgcatgctttgctattagctccagcaagctcaacgagtgccaacataacaaccttaacgcgnttgaacccgaccaccgcgttgtagccgaa

SEQ ID NO: 112640 - DNA, 165 bp, Glycine max
  unsure (1)..(165): unsure at all n locations
ccaatttctggtctaatgggtgcaaacatgaaaacaagagtggataaaagtgtttgtcgatggtggaacgggccttgcttatttgaggcacttgacgctattgaagttccactgcgagatcccaaaggatccttcaggantccgtgtantgacaaagtcaaagac

SEQ ID NO: 112641 - DNA, 220 bp, Glycine max
  unsure (1)..(220): unsure at all n locations
ctggtcgatatccaacaaggaaagatcagaattctgagaagccaggcgaagtttatgttccaagagatgaaaattttggtcacttgaagtcctcggattttcttgcatatggaataaaatctttatctcaatatgtcttaccggcgatcgaatctgttttcgatttacatcacgccaaagtagntttagtgcgttcaagactttcgtgaccatcacgaag

SEQ ID NO: 112642 - DNA, 254 bp, Glycine max
  unsure (1)..(254): unsure at all n locations
attaccgttcagaacgaagacagttccaaagatgagtacagagtttggaatcctttccgttcgaagttggccgctgccatccttggtggtgttgacaacatatggattaaacctggtgccagagtcctttacctaggagctgcttccggcaccactgtttctacgtacagactgttatggcccaacatgagctgatgantcagntgagntttcccagagaagntgacgngacattgacaantctgcaaagacga

SEQ ID NO: 112643 - DNA, 254 bp, Glycine max
attcaaacatggaactctcaacaccctgagctgaaatgcgccggtgtcactgtttccaaactcaccctcaaccgcaatggcctccacttgccatcttactcaccttatccccggatgatcatcatcgcccaagggaaaggagcacttggagttgcaattccaggatgtccgagacgtttgaggagccacaagaacaatcaaacagaagaggcataaggacgcagaagcagcagcgtcaggacagactacagaag

SEQ ID NO: 112644 - DNA, 228 bp, Glycine max
cttaattattaacacttccttagttcaatatggggaagcccttcactctctctctttcttccctttgcttgctactcttgtcgagtgcatgctttgctattagctccagcaagctcaacgagtgccaactcaacaacctcaacgcgttggaacccgaccaccgcgttgagccgaaggtggatttgagtcaaacatggaacactcaacacccatagcagtaaatcgccg

SEQ ID NO: 112645 - DNA, 255 bp, Glycine max
ctcgcaagcaaaaagaaagaatcccaggcgaggagaaagatggaggggaaggagcaggatgtgtcgttgggagcgaacaagttccccgagagacagccgattgggacggcggcgcagagccaagacgacggcaaggactaccaggagccggcgccggcgccgctggttgaccgacggagtttacgtcatggtcgttttacagagcagggatagcagagtttgtggccacttttctgtttctctacatcaccgtct

SEQ ID NO: 112646 - DNA, 261 bp, Glycine max
ttcaaacttaattattaacacttccttagttcaatatggggaagcccttcactctctctctttcttccctttgcttgctactcttgtcgagtgcatgctttgctattagctccagcaagctcaacgagtgccaactcaacaacctcaacgcgttggaacccgaccaccgcgtgagtccgaaggtggtttgattcacacatggaactctcaacaccctgagctgaaatgcgccggtgtcactgtttccaaactcaccctcac

SEQ ID NO: 112647 - DNA, 261 bp, Glycine max
gatcattctgcgcaggtaagacagagagaaagaactgacctcagcggcggcggcggcggcaacagaagaacaaccaccaccacacacaatgggtcgcgtgagaacaaaaacggtgaagaaatcctcccgccaggtgattgagcgttactactcgcgcatgaccctcgacttccaacaaacaaaaagcttctcgaagaagtggccatcatcccttccaagaggctgcggaacaagatcgcgggtttctccacgcatctcatg

SEQ ID NO: 112648 - DNA, 264 bp, Glycine max
gaagatgggtttgaagaacaacatggtggtgctaaaggtgtgtttggtgctacttttccttgtggggggtactactagtgccaacttgaggctgagtaagcttggcctgctcatgaaaagtgatcatcatcaacactcaaatgatgatgagtcttcaaaaccatgctgtgatcaagcgcatgcacaaagtcaaaccctcctcaatgccgctgttcagatatgaggctgaattcgtgccattcagcttgcaaatcttgtatttgc

SEQ ID NO: 112649 - DNA, 240 bp, Glycine max
gttcaatatcctagtataccttaataaataatttaagatactatgatgagagcacggttcccattactgttgctgggacttgttttcctggcttcagtttctgtctcatttggcattgcttactgggaaaaagagaaccccaaacacaacaagtgtctccagagttgcaatacgagagagacttgtacaggaaccaagcgatccacgcatgattcaaccactcttaggctgagaaagaag

SEQ ID NO: 112650 - DNA, 202 bp, Glycine max
agagttttaaaaatggcagcagcctcctccatggctctctcttccccatccttggctggcaaggccgtgaagctgggcccatcagcccccgaagtcgggagggtcagcatgaggaagaccgtcaccaagcaggcctcctccggaagcccatggtacggcccagaccgcgttagatcgttggcccaatcacatgcgagccccc

SEQ ID NO: 112651 - DNA, 246 bp, Glycine max
  unsure (1)..(246): unsure at all n locations
gttcaatatcctagtacaccgtattaaagaatttaagatatactatgatgagagcgcggttcccattactgttgctgggagttgttttcctggcatcagtttctgtctcatttggcattgcgtattgggaaaagcagaaccccagncacaacaagcgccatcgaagatgtanagcgagaaagacactaacaggaaccaagcangtcacgcactaagctaacacctaatagtggaggaagaagaaga

SEQ ID NO: 112652 - DNA, 210 bp, Glycine max
  unsure (1)..(210): unsure at all n locations
ggtccttaaacactcatcagtcatcaccatggccaagctagttttttccctttgttttctgcttttcagtggctgctgcttcgctttcagttccagagagcagcctcagcaaaacgagtgccagagtcaaaaacataactcccataaaccggagtaccgnantgagnctagaggagggcactntgtgacangtgaaccaatcaacaagcc

SEQ ID NO: 112653 - DNA, 236 bp, Glycine max
  unsure (1)..(236): unsure at all n locations
tctcgagccgattcggctcgaggttcaatatcctagtacaccgtattcaagaatttaagatatcactatgatgagagcgcggttcccattactgttgctgggagttgttttcctggcatcagtttctgatctcatttgcgattcgaaattggaaaagcagaaccccagacaaacaagagtcactgaagnagcaatatcgagaaagacactaataggaaccaagcaagctacgcacg

SEQ ID NO: 112654 - DNA, 248 bp, Glycine max
  unsure (1)..(248): unsure at all n locations
gaagcaaagcaatggctacttcaaagttgaaaacccagaatgtggttgtatctctctccctaaccttaaccttggtactggtgctactgaccagcaaggcaaactcagcggaaactgtttctttcagctggaacaagttcgtgccgaagcaaccaaacattaatcataaggagacgcnantgngaccatcacgggaaagntacaacataantaggattacgaaaacggcaccccaaaacccacgactc

SEQ ID NO: 112655 - DNA, 219 bp, Glycine max
  unsure (1)..(219): unsure at all n locations
agcatttgctgctgtaacttctggaaaaataaatcttccaggggataaaatattgggtttggcaaattttttcctgggaattggaatcccaggagatgccaaggacttcttcaatcaagttgaatcattagctcttctagagaacaacagctgtttccatcccattgtactatcactccatcctcggnttagtcagtaatcaaaaaagagtagcataag

SEQ ID NO: 112656 - DNA, 219 bp, Glycine max
gcaagttttggaggatccaatattgatccaacggcttgggaggacaagaagtgccctggtgaatctcgtttccctgctcaggtatatatcatctcatctccaatcaaattaattttattatatctatgcacaaattatgctaatattaattttataaatttaattaaatgtactgatgctgtaaaagtaaagttttatattgtcctcaaagtaaagttt

SEQ ID NO: 112657 - DNA, 246 bp, Glycine max
  unsure (1)..(246): unsure at all n locations
atctaattctgcaaaaatggcaagcaataaggagtctaagttcccagcacagagccagaaaactcagccaggaaaagaacatgtaatgaatccactcccacaagccacaaatcctgatcacaaggccgccaataaactccagggaaaggtggcgttggtgacaggaggtactcaggaattggcagagcggttatcctgtgcttcgcaaaagagggatcaaccgtggccatttacatcgnaaagggc

SEQ ID NO: 112658 - DNA, 256 bp, Glycine max
atacatagtagtgttggtgggttgcaaagatgcttgggggtcttctccataggggtcataagataaaagggacagtggtgttgatgcgcaagaatgtgttggacgtgaatagcgtaaccagcgttgggggaattattggtcaaggtctcgacttagttggctcaacactgatactcttactgccttcttgggccgatccgtgtctctccagcttattagtgctaccaaagctgatgccaacggaaaagggaaactg

SEQ ID NO: 112659 - DNA, 255 bp, Glycine max
ctagtataccttaataaataatttaagatactatgatgagagcacggttcccattactgttgctgggacttgttttcctggcttcagtttctgtctcatttggcattgcttactgggaaaaagagaaccccaaacacaacaagtgtctccagagttgcaatagcgagagaactcgtacaggaaccaagcatgccacgctcgttgcaacctccttaaggtggagaaagaagaatgtgaagaaggtgaaattcacga

SEQ ID NO: 112660 - DNA, 263 bp, Glycine max
tgcagaccgagctagctagctagcaagcaagcacagagatggaggcaaagcgaggccatgccctcatgtgcttggcacgtgtttcactcttcctctgcgctctaaccctatccgctgctcacggaagcaccacggttcaagacatcgcgagaaagttgaaactcggggacaacagcttctgcgcacggagaagaagttcaaggttttcatggagaattacgggaggagctactccacagaggaggagtatttgcgccgttggg

SEQ ID NO: 112661 - DNA, 263 bp, Glycine max
gttcaatatcctagtataccttaataaataatttaagatactatgatgagagcacggttcccattactgttgctgggacttgttttcctggcttcagtttctgtctcatttggcattgcttactgggaaaaagagaaccccaaacacaacaagtgtctccagagttgcaatagcagagagactcgtacaggaaccaagcatgccacgctcgttgcaacctccttaaggtggagaaagaagaatgtgaagaaggtgaaattccg

SEQ ID NO: 112662 - DNA, 210 bp, Glycine max
  unsure (1)..(210): unsure at all n locations
ggcttatggaggtggagggtttgcaattagttaccctttggcagtggcattggagagaatgcaggataagtgccttcagaggtaccctgcattgtttggctcagatgataggatccaggcttgtatggcagagcttggtgtccctctcactaaggagattggctttcacgntttangatgantgcaacgagntttgacatcaagcagcac

SEQ ID NO: 112663 - DNA, 228 bp, Glycine max
ttctagatcgcgagcggccgctcgccccaaacacaacaagtgtctccagagttgcaatagcgagagagactcgtacaggaaccaagcatgccacgctcgttgcaacctccttaaggtggagaaagaagacattgaagaaggataaagtccacgaccacgaccacgatcacacacccggagagggaaccactagcaaccggagagaaggaggaagacgaagacgatcaa

SEQ ID NO: 112664 - DNA, 193 bp, Glycine max
  unsure (1)..(193): unsure at all n locations
gtaagataacagcagattcccttgatctagatgggtacacaatggacgaggcacttggtagtcgaaggttatttatgttagattaccatgatatcttcatgccatatgtgaggcagataaatcagctgaacttctccaagacatantcgacaaggacgaaccatttttgagagaagacgtgaacataaagcca

SEQ ID NO: 112665 - DNA, 160 bp, Glycine max
aacagaagaggctcaaggtcgcagaagcagcagctacaggacagtcaccagaagattcgtcacttcaatgaaggagacgtactcgtgattcctcctggtgttccttactggacctataacactggcgatgaaccagtttgtgccatcagtcttcttgaca

SEQ ID NO: 112666 - DNA, 222 bp, Glycine max
tgaacactcatcaccatggccaagcttgttctttccctttgtttccttcttttcagtggctgcttcgctctgagagagcaggcacagcaaaatgagtgccagatccaaaagctgaatgccctcaaaccggataaccgtatagagtcggaaggtgggttcattgagactggaaccctaacaacaagccattccagtgtgccggtgatgccctctctcgctgca

SEQ ID NO: 112667 - DNA, 212 bp, Glycine max
cattggtccttaaacactcatcagtcatcaccatggccaagctagttttttccctttgttttctgcttttcagtggctgctgcttcgctttcagttccagagagcagcctcagcaaaacgagtgccagatccaaaaactcaatgccctcaaaccggataaccgtataggtcagaaggagggctcattgagacattgaaccctaacaacaagc

SEQ ID NO: 112668 - DNA, 242 bp, Glycine max
gttcctcactgaccaagccatggcgatgagaaccaaactttctttagctatctttttcttttttcttttagccttattttcaaacctagcctttggcaaatgtaaagaaaccgaggtagaagaagaagaccctgagctcgtaacatgcaaacaccaatgcaacagccacagcaatacactgagggtgacaagcgggtatgctgcaaagagtttacaggtatcatcgtataagcaagagcgag

SEQ ID NO: 112669 - DNA, 263 bp, Glycine max
  unsure (1)..(263): unsure at all n locations
cgctcgagccgaatcggctcgagcgttctacatagcatctcctttaccaccattctagatatcacagaactttgcagctctctatangtttttaaaaaacaccacgcaaacagcaagatggccacttccgacagtaacatgctactaaattatgttccagtttatgtgatgctccactcggagttgtcaatgttgacaatgtttttgaagacccagatggccttaaagaacagctcttgcagcttcgagcttgcgggtgtacg

SEQ ID NO: 112670 - DNA, 258 bp, Glycine max
cttctcccccaccatgctgacgctgattacctcatcgttatccttaacgggactgccattcttaccttggtgaacaacgacgaccgagactcttacaaccttcaatctggcgatgccctaagagtccctgcaggaaccacatactatgtggttaaccctgacaacgacgagaatctcagaatgataacactcgccatacccgttaacaaacccggtagatttgagagtttcttcctatctagcactcaagctcaacag

SEQ ID NO: 112671 - DNA, 236 bp, Glycine max
aaaggattctacccgccgctcgatgggaattgcgcttcaaggcgtctcgtagggctaatccgcctcacgagggtcaccaacggcacgtgcctttggggggccgaggcccctaactgctggtcggcaaacggactgcgggcgcacgcgtcacttctagcccggattctgacttaaggcgtacagtcataatccaacgcacggtagcttcgcgccactggctttccaaccaagcgcga

SEQ ID NO: 112672 - DNA, 257 bp, Glycine max
ataatctctaaagtccgaatcatctcattctcatcaagttattatcaaataattaattaaatcctcgtggaatcttgttgaagccatgtctacagctggtcaggtcatcaagtgcagagctgcggtggcatgggaagcagggaagccactatcgatagaaaccatagaagtggcaccaccccagaaaggtgaagtgcgtttgaagatcctcttcaactccctttgccgtacagatgtttactggtgggatgctaagg

SEQ ID NO: 112673 - DNA, 254 bp, Glycine max
cttaattattaacacttccttagttcaatatggggaagcccttcactctctctctttctaccctttgcttgctactcttgtcgagtgcatgctttgctattagctccagcaagctcaacgagtgccaactcaacaacctcaacgcgttggaacccgaccaccgcgttgagtccgaaggtggtttgattcaaacatggaactctcaacaccctgagctgaaagcgccggtgtcactgtttccaaactcaccctca

SEQ ID NO: 112674 - DNA, 248 bp, Glycine max
cttaattattaacacttccttagttcaatatggggaagcccttcactctctctctttctccctttgcttgctactcttgtcgagtgcatgctttgctattagctccagcaagctcaacgagtgccaactcaacaacctcaacgcgttggaacccgaccaccgcgttgagtccgaaggtggtttgattcaaacatggaactctcaacaccctgagctgaatgcgccggtgtcactgtttccaaactcac

SEQ ID NO: 112675 - DNA, 250 bp, Glycine max
ctccattggtccttaaacactcatcagtcatcaccatggccaagctagttttttcccttgttttctgcttttcagtggctgctgcttcgctttcagttccagagagcagcctcagcaaaacgagtgccagatccaaaaactcaatgccctcaaaccggataaccgtatagagtcagaaggagggctcattgagacatggaaccctaacaacaagccatccagtgtgccggtgttgccctctctcgctgca

SEQ ID NO: 112676 - DNA, 249 bp, Glycine max
ttcaaaccttgctctatactacacagtacacacactagaagaataatggcttccatcctccactactttttagccctctctctttcttgctcttttcttttcttcttatccgactcagtcacccctacaaaaccaataaaccttgttgttctacccgttcaaaatgatggttccacagggctccattgggccaacctccaaaaaagaacccctctaatgcaagtaccagtcctggtggacctcaatgga

SEQ ID NO: 112677 - DNA, 251 bp, Glycine max
taaaattcttccaccaagttatgggtttccttgtgttgcttcttttctccctcttacgtctctcttctagttccagcatatcaactcatcgttccatattggaccttgacctaaccaagtttaccacacagaaacaggtgtcttcactgttccaactatggaagagtgagcatggacgtgtctaccataaccacgaagaagaggcaaagagacttgagttttcaagaataacttgaactatatcagggaca

SEQ ID NO: 112678 - DNA, 246 bp, Glycine max
cgcgaacagcataatatacgcattgaatggacgggcattgatacaagtggtgaattgcaacggtgagagagtgtttgatggagagctgcaagagggacgggtgctgatcgtgccacaaaactttgtggtggctgcaagatcacagagtgacaacttcgagtatgtgtcattcaagaccaatgatacacccatgatcggcactcttgcaggggcaactcattgttgaacgcattaccagaggaagtg

SEQ ID NO: 112679 - DNA, 243 bp, Glycine max
attgtctttgaacactcatcaccatggccaagcttgttctttccctttgttccttcttttcagtggctgcttcgctctgagagagcaggcacagcaaaatgagtgccagatccaaaagctgaatgccctcaaaccggataaccgtatagagtcggaaggtgggttcattgagacctggaaccctaacaacaagccattccagtgtgccgggttgccctctctcgctgcacccttaaccgcaat

SEQ ID NO: 112680 - DNA, 242 bp, Glycine max
agaaaaaagagaagaagatgggtttgaagaacaacatggtggtgctaaagtgtgtttggtgctacttttccttgtggggggtactactagtgccaacttgaggctgagtaagcttggcctgctcatgaaaagtgatcatcatcaacactcaaatgatgatgagtcttcaaaaccatgctgtgatcaatgcgcatgcacaaagtcaaaccctctcaatgccgctgttcagatatgaggctgaa

SEQ ID NO: 112681 - DNA, 243 bp, Glycine max
caacaatcaaagcgtgtcgaatcgcaaaatatcaaatcacaatcaacagtgactacgtttcgttcctctccttcgtttcgtcttcgatcttcggtttcattctgcgtttgttcacatcatggccaccgcttcagtggcatttaagtccagggaggaccaccgcaagcagattgagttggaggaggcgcgtaaagcagggcttgcgccggctgactcgatgaagatggaaaggaaatcaatcct

SEQ ID NO: 112682 - DNA, 253 bp, Glycine max
gttgtcctagcacttatcaagagccgcaagaatctcagcaacgaggacgaagccagagccccaagaccgtcaccaaaaggtacatcgcttcagagagggtgatttgatcgcagtgcctactggtgttgcatggtggatgtacaacaatgaagacactcctgttgttgccgtttctattattgacaccaacagcttggagaaccagctcgaccagatgcctaggagattctatcttgctgggaaccaagagcaa

SEQ ID NO: 112683 - DNA, 251 bp, Glycine max
cttcagttcggtggagggagggagccgtagcagcggaagctctagcttgggtagcgatcacaatggcgagaggattaaagaagcatctgaagaggcttaatgccccaaagcattggatgcttgacaaactgggtggtgcatttgctcctaagccctcatctggaccacacaaatcgagggaatgcctgccactcatactcattttgcgaaaccggctgaagtatgctctaacataccgtgaagtcattgct

SEQ ID NO: 112684 - DNA, 247 bp, Glycine max
gtggtgactgtgctctgctctcatctcattcatattcatttcaatggcaactcaagtcaagtcattacctgcaaagctgcggtggcctgggaacccaacaagcccttaaccgtccaagacgttcaggttgctccgcctcaggccggcgaggtccgtgtccaaatcctcttcaccgctctctgccacaccgatgcttacacttggggcggcaaggatccgaagtctcttcccctgtattctcggccag

SEQ ID NO: 112685 - DNA, 250 bp, Glycine max
taaaattcttccaccaagttatgggtttccttgtgttgcttcttttctccctcttaggtctctcttctagttccagcatatcaactcatcgttccatattggaccttgacctaaccaagtttaccacacagaaacaggtgtcttcactgttccaactatggaagagtgagcatggacgtgtctaccataaccacgaagaagaggcaaagagacttgagattttcaagaataacttgaactatatcaggga

SEQ ID NO: 112686 - DNA, 245 bp, Glycine max
ctctccattggtccttaaacactcatcagtcatcaccatggccaagctagtttttccctttgttttctgcttttcagtggctgctgcttcgctttcagttccagagagcagcctcagcaaaacgagtgccagatccaaaaactcaatgccctcaaaccggataaccgtatagagtcagaaggagggctcattgagacatggaaccctaacaacagccattccagtgtgccggtgttgccctctct

SEQ ID NO: 112687 - DNA, 246 bp, Glycine max
gatacactaactacacccttgagaccctgcaaagtggcaagcgtcagtgcaaagcgccttgcaaaaggagctcggtttgcctgtccgtgaggatgttccgttacttggattcattggaaggctggatcaacagaaaggcattgatctcatagccgaagcaattccttggatagtgggccaggatgtgcagacatattgctgatgccatcaagatttgagccatgtggattgaatcaactctatgcc

SEQ ID NO: 112688 - DNA, 246 bp, Glycine max
acttattaacactttccttagttcaatatggggaagcccttcttcactctctctcttcttccctttgcttgctactcttgtcgagtgcatgctttgctattacctccagcaagttcaacgagtgccaactcaacaacctcaacgcgttggaacccgaccaccgcgttgagtccgaagtggtcttattgaaacatggaactctcaacaccctgagtgcaatgcgccggtgtcactgtttccaaacgc

SEQ ID NO: 112689 - DNA, 241 bp, Glycine max
ctcgagccgtgcttgttcttgaaagctgtccatctcaaactatagacctctttctgtctggaaatattccagcagatatggtgagctcatatttgaagaagcattctccaaacatgcaagctaggtacttggagcttatgcttgcaatgaatgagaatgcagtatctggcaatttgcagaatgaaatggtgcacatctatctttctgaatacttgattggtatgctgatttaagtgctcaa

SEQ ID NO: 112690 - DNA, 242 bp, Glycine max
attaacactttccttagttcaatatggggaagcccttcttcactctctcctttcttccctttgcttgctactcttgtcgagtgcatgctttgctattacctccagcaagttcaacgagtgccaactcaacaacctcaacgcgttggaacccgaccaccgcgttgagtccgaaggtggtcttattgaaacatggaactctcaacaccctgagctgcaatgcgccggtgtcactgtttccaaac

SEQ ID NO: 112691 - DNA, 242 bp, Glycine max
cctcctccctgtatatgtgttggaacacctcggtggatggctccagaggtatgcggactatgtataaaaaaaactcctatggattggaagctgacatttggtcgtttggatgcttgcttttggagatgctgactctgcaaattccatattctggactttcagattcacacttccttgatagtctgcagatgggtaaacgaccacaattgactgatgagctgagagtattgagttcaatgaat

SEQ ID NO: 112692 - DNA, 244 bp, Glycine max
ctcgagccgattcggctcagtgatttgatcgcagtgcctactagtgttgatggtggatcgtacaacaatgaagacacacctgttgttgccgtttctattattgacaccaacagcttggagaaccagctcgaccagatgcctaggagattctatcttgctgggaaccaagagcaagagtttctaaaatatcagcagcagcagcaaggaggttccaaagccagaaaggaaagcaacaagaagaaga

SEQ ID NO: 112693 - DNA, 247 bp, Glycine max
cgcaccgcaaacaaacagtgagccatggccgtcggaaagaacaagcgcatctcaaagggaaaaagggtggcaagaagaaggcagctgatccctttgccaagaaggattggtatgacattaaggccccttctctttttcaagtgaaaaatgttggcaaaaccctcgtctctcgtacgcagggtaccaagattgcttctgaaggacttaaacatagatgtttgaggtctccttggctgatcttcaaggg

SEQ ID NO: 112694 - DNA, 254 bp, Glycine max
ttcccaacgcagcagcagcggcagcttcatctgtttttctgcatcggcgtgaacatggcgacgtacgctgcgatgaagcccaataagcctggcttggaggagtcccaagaacagatccacaagataaggatcaccctttcctccaagcacgtcaaaaatctcgagaaggtttgtggggacttggttcgtggtgcaaaggataagaggctcagggttaagggacctgtcaggatgcccactaaggttcttcacat

SEQ ID NO: 112695 - DNA, 255 bp, Glycine max
aacggatatggtcgtttaactgaagttggtcctgacgatgatgaaaagagttggcttcaagactcaatctcatgcttacctttaccaacatcacccagagatctatgagtactattcactacaactcacatgcaacgaagatagcactggtgatcgatggcagagggcatcttcaaatatcatgtccacacatgtcatcaaggtcgtcacactcgaagcatgatagagtagccttcatacatagaatcattccga

SEQ ID NO: 112696 - DNA, 256 bp, Glycine max
gggagggtcagcatgaggaagaccgtcaccaagcaggcctcctccggaagcccatggtacggcccagaccgcgtcaagtacttgggcccattctctggcgagcccccgtcctacctcactggcgagttcccaggtgactacggctgggacactgctgggctttcggccgacccagaaaccttcgccagaaaccgtgagctcgaagtgatccactccaggtgggccatgctcggggccttgggctgcgtcttccccg

SEQ ID NO: 112697 - DNA, 251 bp, Glycine max
atccgtctctggttgaaagccatgagcatgatggctgcgtatttgcgtgtacccaatccacgcccattactccgcaatctcccacagctacgaggaccaaatgcagaaatctgaaaacctcttgctccgttaatgccgccaaaattccaatgccccctctaaaccctaaagacgccttcctctccaagctcgcttccatcgctgcctcttcccccgacacgctcctcaacactcccaaaaactccgacacc

SEQ ID NO: 112698 - DNA, 249 bp, Glycine max
aagagaatggctcccaagggtttaacctttctaggctgtgttaatcatgcgtttcacactgtcactgagtccttctgttgcgggggaagggcaaaataatggccttgttatgaacttctacaaggaatcatgccctcaggctgaagacatcatcacagaacaagtcaagcttctctacaagcgccacaagaacactgctttctcctggctcaggaaatcttccatgactgtgctgttcagagttgtgat

SEQ ID NO: 112699 - DNA, 249 bp, Glycine max
gaaagcaagaggaagatgaggatgaggagcagcagcgagagagcgaagaaagtgagattctgagttacgaagacataagaataagaacccttttctcttcggctctaacaggttcgaaactctcttcaaaaaccaatatggtcgcattcgcgtcctccagaggttcaaccaacgctccccacaacttcagaatctccgagactaccgcattttggagttcaactccaaacccaacaccctccttctccc

SEQ ID NO: 112700 - DNA, 244 bp, Glycine max
attgtctttgaacactcatcaccatggccaagcttgttctttccctttgtgtcttcttttcagtggctgcttcgctctgagagagcaggcacagcaaaatgagtgccagatccaaaagctgaatgccctcaaaccggataaccgtatagagtcggaaggtgggttcattgagacctggaaccctaacaacaagccattccagtgtgccggtgtgccctctctcgctgcacccttaaccgcaatg

SEQ ID NO: 112701 - DNA, 244 bp, Glycine max
gatgagagtgcggtttcctttgttggtgttgctgggaactgttttcctggcacagtttgtgtctcattaaaggtgagagaggatgagaataaccctttctacttgagaagctctaacagcttccaaactctctttgagaaccaaaacggtcgcattcgtctcctccagagattcaacaaacgctccccacaacttgagaaccttcgagactacggattgtccagtttcagtcaaaacccaacac

SEQ ID NO: 112702 - DNA, 247 bp, Glycine max
ctccattggtccttaaacactcatcagtcatcaccatggccaagctagtttttccctttgttttctgcttttcagtggctgctgcttcgctttcagttccagagagcagcctcagcaaaacgagtgccagatccaaaaactcaatgccctcaaaccggataaccgtatagagtcagaaggagggctcattgagacatggaaccctaacaacaagcattccagtgtgccggtgttgccctctctcgct

SEQ ID NO: 112703 - DNA, 246 bp, Glycine max
ccttgcaagtccagagatgactagaaaggtttgtagcagaagtcgttggtgtcaaacaacgacactgtcctggctgtgagcgtgtgcacatacagctcttacaatctgagtggcatgaattcagcctaatatcttcacagctgcattgaggaggcattgagcgtgtgcacatgcagagatcacagcatggttttgaatactcatcatcatcatacttgatgactgatcacttttgaagaagctcag

SEQ ID NO: 112704 - DNA, 247 bp, Glycine max
gttaaaaggtttatcttcagaagccgcgaccccatctactccaacaagcttggcaattctttgagatcaccccagagaaaaacccccagcttcgggacttggatatcttcctcagtattgtggatatgaacgagggagctcttcttctaccacacttcaattcaaaggcgatagtgatactggtaattaatgaaggagatgcaaacattgaacttgttggcctaaaagaacaacaacaggagcagca

SEQ ID NO: 112705 - DNA, 252 bp, Glycine max
ttcgcatctttctctcttctctctccacccaaaccctaactcccgaccctgttccccctcgtatccgtcatgaaaggaggaaagtccaagaccgaatctaagagagccgatcccaaacttgctgtgaataagaagggagccgccaccaaggctaggaaacccgccggcaaggggaaggcagcgaaagaccctaacaagccaaagaggcctccaagtgcttcttcgttttcatggaggagttcaggaaggtat

SEQ ID NO: 112706 - DNA, 248 bp, Glycine max
tagtagtgttggtgggttgcaaagatgcttgggggtcttctccataggggtcataagtaaaagggacagtggtgttgatgcgcaagaatgtgttggacgtgaatagcgtaaccagcgttgggggaattattggtcaaggtctcgacttagttggctcaacactcgatactcttactgccttcttgggccgatccgtgtctctccagcttattagtgctacaaagctgatgccaacggaaaagggaaac

SEQ ID NO: 112707 - DNA, 260 bp, Glycine max
caccaacctcatcaaaaggaagaggaaaagcacgaatggcaacacaagcaggaaaagcaccaggaaaggaaagtgaagaagaagaagaagaccaagacgaggatgaggagcaagacaaagagagccaagaaagtgaaggttctgagtctcaaagagaaccacgaagacataagaataagaacccttttcacttcaactctaaaaggttccaaactctcttcaaaaaccatatggccacgttcgcgtcctccagaggttca

SEQ ID NO: 112708 - DNA, 249 bp, Glycine max
cttaattattaacacttccttagttcaatatggggaagcccttcactctctctcttcttccctttgcttgctactcttgtcgagtgcatgctttgctattagctccagcaagctcaacgagtgccaactcaacaacctcaacgcgttggaacccgaccaccgcgttgagtccgaaggtggtttgattcaaacatggaactctcaacaccctgagctgaaatgcgccggtgtcactgtttccaaactcac

SEQ ID NO: 112709 - DNA, 248 bp, Glycine max
ctagtacaccgtattaaagaatttaagatatactatgatgagagcgcggttccattactgttgctgggagttgttttcctggcatcagtttctgtctcatttggcattgcgtattgggaaaagcagaaccccagtcacaacaagtgcctccgaagttgcaatagcgagatagactcctacaggaaccaagcatgccacgctcgttgcaacctccttaaggtggaggaagaagaagaatgcgaagaagg

SEQ ID NO: 112710 - DNA, 192 bp, Glycine max
atcgcaagctaggattgtttttggccttgttgccctagtgattcttgctgtttctttgtattgtttaggttaccaacacttcatttggctgcttgtttcgatgaagcagtgctcctccatattttgtttaccctaaatattatatgctcttttactttgtttaaaagtaattgcagtttttgtcttagtttg

SEQ ID NO: 112711 - DNA, 243 bp, Glycine max
gatcatacatagtagtgttggtgggttgcaaagatgcttgggggtcttctcctaggggtcataagataaaagggacagtggtgttgatgcgcaagaatgtgttggacgtgaatagcgtaaccagcgttgggggaattattggtcaaggtctcgacttagttggctcaacactcgatactcttactgccttcttgggccgatccgtgtctctcagcttattagtgctaccaaagctgatgccaa

SEQ ID NO: 112712 - DNA, 243 bp, Glycine max
atatcctagtacaccgtattaaagaatttaagatatactatgatgagagcgggttcccattactgttgctgggagttgttttcctggcatcagtttctgtctcatttggcattgcgtattgggaaaagcagaaccccagtcacaacaagtgcctccgaagttgcaatagcgagaaagactcctacaggaaccaagcatgccacgctcgttgcaacctccttaaggtggaggaagaagaagaat

SEQ ID NO: 112713 - DNA, 241 bp, Glycine max
ctcttcttctaccacacttcaattcaaaggcgatagtgatactggtaattatgaaggagatgcaaacattgaacttgttggcctaaaagaacaacaacaggagcagcaacaggaagagcaacctttggaagtgcggaaatatagagccgaattgtctgaacaagatatatttgtaatcccagcaggttatccagttgtggtcaacgctactcaaatctgaatttctttgctattggtatta

SEQ ID NO: 112714 - DNA, 245 bp, Glycine max
caacgtgtgcgcttttcttctctttacccgttgaaacatccttagttttcaattctgaaatcttgattctgaattcatcacaatgaattcgtcaactacagtgaggaagttgcaggtggtgtcccctgttcctgcggacatagacattgcaaactccgttgaaccagttcatatctcccagattgccaaagagctcaaccttagtcccaatcactatgacctttacggtaaatacaaggctaagg

SEQ ID NO: 112715 - DNA, 245 bp, Glycine max
gttatatttgttcctcactgaccaagccatggcgatgagaaccaaactttctttagctatctttttcgtatctctgttagccttattttcaaacctagcctttggcaaatgtaaagaaaccgaggtagaagaagaagaccctgagctcgtaacatgcaaacaccaatgccaacagccacagcgatacactgagggtgacaagcgggtatgcttcaaagatgtgacaggtatcatcgtatgaagca

SEQ ID NO: 112716 - DNA, 250 bp, Glycine max
gttcaatatcctagtataccttaataaataatttaagatactatgatgagagcacgttcccattactgttgctgggacttgttttcctggcttcagtttctgtctcatttggcattgcttactgggaaaaagagaaccccaaacacaacaagtgtctccagagttgcaatagcgagagagactcgtacaggaaccaagcatgccacgctcgttgcaactccttaaggtggagaaagaagaatgtgaagaa

SEQ ID NO: 112717 - DNA, 251 bp, Glycine max
gcctaatgaacaatcaaggatggaaattcttaagattcatgctgctggtatcgctagcatggtgaaatagactatgaagctgttgtgaagcttgcagagggatttaatggggctgatcttcgaaatgtctgcacagaagctggaatggcagcaattcgtgcagagcgtgattatgtgatccatgaagattttatgaaggctgttaggaaactgaacgaggcaaagaaacttgaatccagtgcgcactacag

SEQ ID NO: 112718 - DNA, 252 bp, Glycine max
cgcgaacagtgtgatctatgtgactcgagggaaaggaagagttagagtggtgaactgcaagggaatgcagtgttcgacggtgagctaaggaggggacaattgctagtggtgccgcagaactttgtggtggctgagcaagggggagaacaaggattggaatacgtagtgttcaagacacaccacaacgccgtgagcagctacattaaggatgtgtttagggcatcccttcggaggttctttccaattcttaca

SEQ ID NO: 112719 - DNA, 258 bp, Glycine max
gttcaatatcctagtataccttaataaataatttaagatactatgatgagagcacggttccattactgttgctgggacttgttttcctggcttcagtttctgtctcatttggcattgcttactgggaaaaagagaaccccaaacacaacaagtgtctccagagttgcaatagcgagagagactcgtacaggaaccaagcatgccacgctcgttgcaacctccttaaggtggagaaagaagaatgtgaagaaggtgaaa

SEQ ID NO: 112720 - DNA, 255 bp, Glycine max
gccatgcatgtgtaagtatgaactagttcagactgtgaaactgcgaatggctcattaatcagttatagtttgtttgatggtatctactactcggataaccgtagtaattctagagctaatacgtgcaacaaaccccgacttctggaagggatgcatttattagataaaaggtcaacacaggctctgcctgttgctttgatgattcatgataactcgtcggatcgcacggcctttgtgccggcgacgcatcattca

SEQ ID NO: 112721 - DNA, 248 bp, Glycine max
aattaataaagatgagtttgaagaacaacatggtggtgctaaaggtgtgtttgtgcttcttttccttgtgggggttacagctgcacgcatggaactgagcttcttcaaaagtgatcagtcatcaagttatgatgatgatgagtattcaaaaccatgctgtgatctctgcatgtgcacacgctcaatgcctcctcaatgcagctgtgaagatattagctgaattcatgccactcagattgtaagagctg

SEQ ID NO: 112722 - DNA, 236 bp, Glycine max
ctggggaatcgcatgacgtgctttcttggtcttttgcttccaatttgccacagctagcagtaacattgatcctttggatcttacaagctttgtgttgcatgaggccatctaaatgtgacagatcgaaggaagaaagtgtaataagacgactctcactactcgatcgctagtgattgtcattgttatatataataatgttatctttcacaaaaaaaaataatctaaaatacagaaaa

SEQ ID NO: 112723 - DNA, 240 bp, Glycine max
cggctcgagatcgagccgattcggctcgaaggctacctttttggaaggttcactacttcatacccaactttgggagcaggccaatctgcattcaaaattaattttgaatgggatgatgggagtggaattcctggagcattttatatcaagaattttatgcaaactgagtttttccttgtgagtttgactcttgaagacattccaaacctggaagcatccactttgtttgcaattcgtgga

SEQ ID NO: 112724 - DNA, 241 bp, Glycine max
gttcaatatcctagtataccttaataaataatttaagatactatgatgagagacggttcccattactgttgctgggacttgttttcctggcttcagtttctgtctcatttggcattgcttactgggaaaaagagaaccccaaacacaacaagtgtctccagagttgcaatagcgagagagactcgtacaggaaccaagcatgccacgctcgttgcaacctccttaaggtggagaaagaaga

SEQ ID NO: 112725 - DNA, 247 bp, Glycine max
taaaattcttccaccaagttatgggtttccttgtgttgcttcttttctccctctaggtctctcttctagttccagcatatcaactcatcgttccatattggaccttgacctaaccaagtttaccacacagaaacaggtgtcttcactgttccaactatggaagagtgagcatggacgtgtctaccataaccacgaagaagaggcaaagagacttgagattttcaagaataacttgaactatatcagg

SEQ ID NO: 112726 - DNA, 251 bp, Glycine max
cttaattattaacacttccttagttcaatatggggaagcccctacactctctctcttcttccctttgcttgctactcttgtcgagtgcatgctttgctattagctccagcaagctcaacgagtgccaactcaacaacctcaacgcgttggaacccgaccaccgcgttgagtccgaaggtggtttgattcaaacatggaactctcaacaccctgagctgaaatgcgccggtgtcactgtttccaaactcacc

SEQ ID NO: 112727 - DNA, 253 bp, Glycine max
atgcttttggttgatacttatcataccaatcctgaaaatgcagttcgtagtattttggttgcgcctttcataggcggaaggcccattcgggtggttacatttccgaataccatcgtgcagcttgaatcagacatgaattcaaggttccagcttttgagtaccactaccactggtgatttggttcaaggaaaagatctcgcaatggttaaagttactgtagatgtgctgctgtcggcttgacatcaagttacac

SEQ ID NO: 112728 - DNA, 246 bp, Glycine max
gtttccttgtgttgcttcttttctccctcttaggtctctcttctagttccacatatcaactcatcgctccatattggaccttgacctaaccaagtttaccacacagaaacaggtgtcttcactgttccaactatggaagagtgagcatggacgtgtctaccataaccacgaagaagaggcaaagagacttgagattttcaagaataacttgatctatatcagggacatgaatgcaaacagaaaatc

SEQ ID NO: 112729 - DNA, 225 bp, Glycine max
ggagcgtggtcgtcgcgctgatgcgtgagaggtttagaacaatcaagaaaggtgtgcatgtggctgaagatcacggggaatgtattaagcttcagagactctttaaattaaattttctgtattttgtgttatatgttactagttctttaaattagccagatggagtttatgtgtatctaaatgcagggatgctaatggaataaaatggccattgtattgttagct

SEQ ID NO: 112730 - DNA, 246 bp, Glycine max
gagagtttcaagaatggggagcgaagaggagaagggtgaattctacttgcgatactacgtgggccacaagggcaagttcgggcacgagtttctggagttcgagttcagacccgatggcaagctccgctacgcgaacaactccaactacaaaaacgacaccatcatccgcaaggaggtttacctcaaccctgccgttttgcgtgagtgccgccgtatcatcgccgagagcgaaatcatgaaggaaga

SEQ ID NO: 112731 - DNA, 243 bp, Glycine max
ctcgagccgcaacgccaattccattcagatcacagtcccttcaattcctactgcagcatactgtgtgcaacaaagccctaaaatggaggggactgtcttcactcctgcactgcaagaaattgagcatgtaaagtctgatcaaggagaaattctgagcaagcctttcttggatgcgtgcaagcacatattgcctgtaatagataagtttggagctgctatggcccttgttaaatctgacatagg

SEQ ID NO: 112732 - DNA, 238 bp, Glycine max
gcatgatattcccgggttgtcctagcacttatcaagaaccgcaagaatctcagcaacgaggacgaagccagaggccccaagaccgtcaccaataggtacatcgcttcagagaaggtgatttgatcgcagtgcctactggtgttgcatggtggatgtacaacaatgaagacactcctgtagtagccgtttctattattgacaccaacagctggagaaccagctcgaccagatgcctagg

SEQ ID NO: 112733 - DNA, 242 bp, Glycine max
attgtctttgaacactcatcaccatggccaagcttgttctttccctttgttccttcttttcagtggctgcttcgctctgagagagcaggcacagcaaaatgagtgccagatccaaaagctgaatgccctcaaaccggataaccgtatagagtcggaaggtgggttcattgagacctggaaccctaacaacaagccattccagtgtgccggtgttgccctctctcgctgcacccttaaccgca

SEQ ID NO: 112734 - DNA, 242 bp, Glycine max
tggtccttaaacactcatcagtcatcaccatggccaagctagttttttcctttgttttctgcttttcagtggctgctgcttcgctttcagttccagagagcagcctcagcaaaacgagtgccagatccaaaaactcaatgccctcaaaccggataaccgtatagagtcagaaggagggctcattgagacatggaaccctaacaacaagccttccagtgtgccggtgttgccctctctcgctg

SEQ ID NO: 112735 - DNA, 242 bp, Glycine max
catattggttgcagcagaatgtgctcccttcgtcaaaacaggtggtcttggagatgttgctggatcattacctaaggctttggctaggcgtggacacagagttatggttgtagtacctcggtatagtcattatgctgacgcacaagatataggagtatggaaacgatacaaagtagatggtcaggacatggaagtaacatatttccactctatattgatggtgttgacttcgtttttattga

SEQ ID NO: 112736 - DNA, 243 bp, Glycine max
aacttattaacactttccttagttcaatatggggaagcccttcttcactctctctctttcttccctttgcttgctactcttgtcgagtgcatgctttgctattacctccagcaagttcaacgagtgccaactcaacaacctcaacgcgttggaacccgaccaccgcgttgagtccgaaggtggtcttattgaaacatggaactctcaacacctgagctgcaatgcgccggtgtcactgtttcc

SEQ ID NO: 112737 - DNA, 255 bp, Glycine max
gctgacgctgattacctcatcgttatccttaacgggactgccattctttccttggtgaacaacgacgacagagactcctacagacttcaatctggtgatgccctgagagtcccctcaggaaccacatactatgtggtcaaccctgacaacaacgaaaatctcagattaataacactcgccatacccgttaacaagcctggtagatttgagagtttcttcctatctagcactgaagctcaacaatcctacttgcaa

SEQ ID NO: 112738 - DNA, 254 bp, Glycine max
cgagggcattcctcctccttatgacaagaccaagaggatggttgtccctgatgctctcaaggtgttgaggcttcagaagggacacaaatactgtcatctgggccaattgtcatctgaggttggatggaactactatgataccatcagggaacttgagaagaaaaggaaggagagagcacaattgtgttatgagaggaagaagcagcttgccaaattgagggtgaaagctgagaaggttgcagaggagaagcttg

SEQ ID NO: 112739 - DNA, 250 bp, Glycine max
ctcaccatggccaagcttgttctttccctttgtttccttcttttcagtggctgcttcgctctgagagagcaggcacagcaaaatgagtgccagatccaaaagctgaatgccctcaaaccggataaccgtatagagtcggaaggtgggttcattgagacctggaaccctaacaacaagccattccagtgtgccggtgttgccctctctcgctgcacccttaaccgcaatgcccttcgtagaccttcctaca

SEQ ID NO: 112740 - DNA, 248 bp, Glycine max
ggttcacgaagaaacaccaatccgctccgagagctagaagaaatcaacgatgcctcgctatgatgataaatatggtaatacccgcctctatgttggacggttgtcttcgaggactcgttcccgtgacctggagcgtgtcttcagcagatatggaagagttcgaggcgtagatatgaagaatgatttcgcctttgttgaatttagtgatcctcgagatgctgatgatgctagatacaacctggatggtc

SEQ ID NO: 112741 - DNA, 249 bp, Glycine max
ctcacgcagtcgcagtgagtgaaaaggaaaaccctaattgcggtattctcagtgccttcgagagaaagaaaaaatggcagataatcttgttctccgtggcaccatgcgcgcccacaccgacgttgtgacggcgattgccactcccatcgacaactccgacatgatcgtcaccgcctcacgcgacaaatccatcatcctctggcatcttaccaaggaggacaagacttacggtgtcccccgccgccgcct

SEQ ID NO: 112742 - DNA, 248 bp, Glycine max
tgagagagccatggaagaagctgctgccatccccatccttggctggcaaggccgtgaagctgggcccatcagccccagaagtgggaagggtgagcatgaggaagaccgtcaccaagcaggtctcctcaggaagcccatggtacggcccagaccgagtcaagtacttgggcccattctctggcgagcccccgtcctacctaaccggtgagttcccaggcgactacggctgggacactgctgggctttcc

SEQ ID NO: 112743 - DNA, 246 bp, Glycine max
cgctggcattgcaggtcttctcaaaacatatcatcctacttggagtccagcagctatcagatcagctattatgacaacagctacaacactagataacaccaatcaaccgatgcgcaatgcatttcataaggtagcaactccattcgagtatggtgccgtacacattcagcctaaccttgcaatagacactggactcgtttacgatttacgcaccaccgactacttgatcttcttatgtgcttctgg

SEQ ID NO: 112744 - DNA, 250 bp, Glycine max
ggcatgcttcttgagatggaccagactgaagttctgcatttgctcgagtcgccagaagccctgaaagcaaaggtggcggaggcaatggacgtcctaagaaatgttgctcagcaacaggctggcggtactgcggatcagctggcttcattatctcttaatgacaaccttgtttcttaaggtttatattttggatttatttagtgacgatgggttgttattttcggcactggctctgatacagtttcaggtt

SEQ ID NO: 112745 - DNA, 251 bp, Glycine max
cttgtctttgaacactcatcaccatggccaagcttgttctttccctttgtttccttcttttcagtggctgcttcgctctgagagagcaggcacagcaaaatgagtgccagatccaaaagctgaatgccctcaaaccggataaccgtatagagtcggaaggtgggttcattgagaccttgaaccctaacaacaagccattccagtgtgccggtgttgccctctctcgctgcacccttaaccgcaatgccctt

SEQ ID NO: 112746 - DNA, 246 bp, Glycine max
tcagtggaatgattctttcccgtgctcccaagcaatgtaattttgtagaatggcgaggacataaagttgtttataaaaggtatgctagtctctatttctgcatgtgcattgatcaagatgacaatgaattagaagtccttgaaataattcatcattttgtggagattcttgaccggtattttggcagtgtctgtgaactggacttaatattcaactttcacaaggcctactatatactagatgaaa

SEQ ID NO: 112747 - DNA, 249 bp, Glycine max
cgcagatcgtgacagtggagggaggcctcagcgttatcagccccaagtggcaagaacaagaagacgaagacgaagatgaagacgaagaatatgaacaaactccctcttatcctccacgacgaccaagccattgaaagcatgaagatgacgaggacgaggacgaagaagaagatcaacctcgtcctgatcaccctccacagcgaccaagcaggcccgaacaacaagaaccacgtggaagaggatgtcaga

SEQ ID NO: 112748 - DNA, 84 bp, Glycine max
gggctccattgggccaacctccaaaaaagaacccctctaatgcaagtaccagtcctggtggacctcaatggaaatcacttgtgg

SEQ ID NO: 112749 - DNA, 246 bp, Glycine max
ctcgagcgtaaaattcttccaccaagttatgggtttccttgtgttgcttcttttctccctcttaggtctctcttctagttccagcatatcaactcatcgttccatattggaccttgacctaaccaagtttaccacacagaaacaggtgtcttcactgttccaactatggaagagtgagcatggacgtgtctaccataaccacgaagaagaggcaaagagacttgagattttcaagaataacttgaa

SEQ ID NO: 112750 - DNA, 248 bp, Glycine max
gtcttccatagccccccaaaaatgaagagcaccatcttctttgctctctttctcttttgtgccttcaccacctcatacctaccttcagccatcgctgatttcgtgctcgataatgaaggtaaccctcttgaaaatggtggcacatattatatcttgtcagacataacagcatttggtggaataagagcagccccaacgggaaatgaaagatgccctctcactgtggtgcaatctcgcaatgagctcga

SEQ ID NO: 112751 - DNA, 251 bp, Glycine max
catcccgatttcgaacccgacgagtactacaccggcggcgaaaagagtgggatgcttgttcgagatcctaccagaggaaacagcaacaacaacaacagtgtggatgatatctttgatcaagcgaggcaggttgctgttgatgcacctccggagaatcctcgaagctcgtcgaggtcgggaagttttagtggcacggcgaggttgctctctggagagagattgccatctgctgctgctgctgctcctgctcc

SEQ ID NO: 112752 - DNA, 244 bp, Glycine max
ccttcaaatatgatataattggtgctggttcacattcttcagaaaattttcctgaaaaggaagatcaagaaaaacccaaaaagattgatgccagattgagacaaagaatagatcctcaatacaatgaggttcaggctcagatggaaacaaatttgtttaaattgtctcttgatgatgttgaaactcctaaaggttccatgttggatcttaaaatttctcaatctaaaattgcacttcccaaaaa

SEQ ID NO: 112753 - DNA, 247 bp, Glycine max
ggcactgtggcagaagtcttaggagtgtaaaacagagacgcaaaatgaagacgattctatcgtccgagaccatgaatattcccgacggcgtgagcatcaaggttcacgctaaggttatcgaggttgagggccctcgtggaaaactcgtgcgagacttccaccatctgaacttggacttccaacttattaccgacgatggcggtaaaaggaagctcaagattgattcttggtttggttctcgtaaaac

SEQ ID NO: 112754 - DNA, 172 bp, Glycine max
ctgggaaccaagagcaagagtttctaaaatatcagcaagagcaaggaggtcatcaaagccagaaaggaaagcatcagcaagaagaagaaaacgaaggaggcagcatattgagtggcttcaccctggaattcttggaacatgcattcagcgtggacaagcagatagcgaaaaa

SEQ ID NO: 112755 - DNA, 247 bp, Glycine max
ctaaagagggcaccttttgatctttttgacactaagaagaagcctaacaacatcaaactgtatgtccgccgtgttttcatcatggacaactgtgaggagttgatgccagaatatcttagctttgttaagggtattgtggattctgaggatcttcctctcaacatttctaccgaaatgctgcagcagaacaagatcctgaaagtcatcaggaagaacttggtcaagaagtgcattgagatgttctttg

SEQ ID NO: 112756 - DNA, 249 bp, Glycine max
gtttcaatttacaatgcaagactgccaatgatacaaaggtaacattataatgtgtctgatgcaagattagaacagcatgttgagagaggggttgcagatggccttcttattagttgtgtgtcttcttgttgcaatctttgggctcttattatggatgctggaactggttttacagctcaagtttacaagttgtcaacctttttcttgcacaaggaatggataatggagcagtgggataaaaacttttac

SEQ ID NO: 112757 - DNA, 249 bp, Glycine max
ggggaaggtattctgtggaaatgtctgctgtagtttacaaggattgggtttttacagatcaagcattgcctgctgatcttataaaaagaggaatggcaattgaggatccatcgtgccctcatggcattcgccttgtgatagaggactacccttatgctgttgatggacttgagatatgggatgctatcaagacatgggtccatgaatacgttttcttgtactacaaatcagatgacacacttagagaag

SEQ ID NO: 112758 - DNA, 246 bp, Glycine max
ccttgctcaaaatgttcggggacttccaaaaggatactccagcagagcgtaatgttagattcggtgttagagaacacggaatgggagctatctgcaacggcattgctcttcacagccctggactgattccatattgtgcaaccttctttgtattcactgactacatgagaggtgccataaggctttctgcgctgtctgaggctggggttatttatgtcatgacccatgattcaataggacttggag

SEQ ID NO: 112759 - DNA, 247 bp, Glycine max
acaagatctccatatctgttcccagaagcttgtttgtaagagtggcttccggtgaacagaaattccctcctcaacaacaacaaacacagcctgggaaggagcatgctatgactccagtaccccaattcactagccctgactacaagccttcaaataaacttcaagggaagattgcattagtcactgggggtgattctgggattggacgagcggtgtgtaactcgtatgccttagaacgtgctaccgt

SEQ ID NO: 112760 - DNA, 168 bp, Glycine max
ggcacgcttgtcactgctcattttcgcgttctgcgccgtcgccgtcgccgtcgccgtcgcgggctcctccttcgatgatgccaaccctatccgtttagcgtcggacttggagtcgcaggtgctggacgtgatcggacagagccgccacgctctctccttcgcccgctt

SEQ ID NO: 112761 - DNA, 245 bp, Glycine max
ctgaacttctacaaggaatcatgccctcaggctgaagacatcatcacagaacaagtcaagcttctctacaagcgccacaagaacactgctttctcctggctcaggaacatcttccatgactgtgctgttcagagttgtgatgcttcactgttgctggactccacaagaaggagcttgtctgagaaggaaacagatagaagctttgggttgagaaatttcaggtacattgagaccatcaaagaagc

SEQ ID NO: 112762 - DNA, 251 bp, Glycine max
tgttcaatatcctagtataccttaataaataatttaagatactatgatgagagcacggttcccattactgttgctgggacttgttttcctggcttcagtttctgtctcatttggcattgcttactgggaaaaagagaaccccaaacacaacaagtgtctccagagttgcaatagcgagagagactcgtacaggaaccaagcatgccacgctcgttgcaacctccttaaggtggagaaagaagaatgtgaag

SEQ ID NO: 112763 - DNA, 247 bp, Glycine max
gaggaagatgaggatgaggatgaggaacaagatgaacgtcaattcccattcccacgcccacctcatcagaaggaagagcgaaagaagaggaagatgaggatgaggagcagcagcgagagagcgaagaaagtgaagattctgagttacgaagacacaagaataagaacccttttctcttcggctctaacaggttcgaaactctcttcaaaaaccaatatggtcgcattcgcgtcctccagaggttcaa

SEQ ID NO: 112764 - DNA, 248 bp, Glycine max
caattaataaagatgagtttgaagaacaacatggtggtgctaaaggtgtgtttgttgcttcttttccttgtgggggttacagctgcacgcatggaactgagcttcttcaaaagtgatcagtcatcaagttatgatgatgatgagtattcaaaaccatgctgtgatctctgcatgtgcacacgctcaatgcctcctcaatgcagctgtgaagatattaggctgaattcatgccactcagattgtaagag

SEQ ID NO: 112765 - DNA, 248 bp, Glycine max
ctctcgagcgattcggctcaggggatctgaaccatctaatactcagccaccatgagcggtgtgacatgttgtcttcgtttccctgggcaactcaactcagatcttcgcaaacttgctgtgaatctcattcccttccctcgtctgcactttttcatggtgggttttgccccactcacatctcgtggttcccaacagtacagagctcttactgtacccgaattgacccaacaaatgtgggatgctaagaa

SEQ ID NO: 112766 - DNA, 246 bp, Glycine max
ctcgagcgcagtatcgttgagaaataaggggaaaaaatggtgtcgctgaaactgcagaagcggctggccgcaagcgtgctcaagtgtggcagaggaaaggtgtggcttgaccccaatgaagttcaacgaaatctccatggccaattctcggcaaaacatcaggaagttggttaaggatgggtttatcatcaggaagccaaccaagattcactcacgctcgcgtgctcgtaggatgaaggaggcaaa

SEQ ID NO: 112767 - DNA, 247 bp, Glycine max
ctttgaacactcatcaccatggccaagcttgttcgttcccattgtctccttcttttcagcggctgcttcgctctgagagagcacgcacagcaaaatgagtgccagatccaaaagctgaatgccctcaaaccggataaccgtatagagtcggaaggtgggttcactgagacctggaaccctaacaacaagccattccagtgtgccggtgttgccctctctcgctgtacccttaaccgcaatgctcttc

SEQ ID NO: 112768 - DNA, 248 bp, Glycine max
ctcaaatcctctgagagaaaaaaaaattagggttttgcatttcgggtcagacagactcagacatgggaggaggcaatgcccagaagtcaaagatggctcgcgagaagaacctcgagaagcagagggctgccgctaagggaagccagttggattcaaacaagaaagccatgtctattcagtgcaaggtgtgcatgcaaacatttatatgcaccacatcagaagtgaagtgcaaggagcatgctgaagcc

SEQ ID NO: 112769 - DNA, 248 bp, Glycine max; identical to SEQ ID NO: 112248

SEQ ID NO: 112770 - DNA, 245 bp, Glycine max
cgaggttttgacgcaacacactttcactgagaaaggatctctatctaccaaggagcagaataaaacccttctctctggtaagtgaataagagaatggcttcagatcggaaacttcacactttcgaggaggtggcaaagcacgaccagaccaaggattgctggctcatcatttctggcaaggtgtatgatgtcacccctttcatggaggatcatcccggaggtgatgaggttttgttatctgcaac

SEQ ID NO: 112771 - DNA, 247 bp, Glycine max
tgtgaaccttcaagagcttgctgctcgaacgaaaaactacagtggtgcagaacttgaaggtgttgtgaaaagtgctgtctcatatgctttaaatagacaattgagtctagaggatctcactaagccagtagaggaagagaacattaaggttacaatggatgactttttgaatgcactccacgaagttacttccgcatttggagcttcaactgatgatcttgaaagatgcagactccatggcatggtt

SEQ ID NO: 112772 - DNA, 81 bp, Glycine max
tcgcactagcttcactttatgttgtttcagctgtgtgtcaacaagtcatgtaagagacttcactatgttgttttctctttc

SEQ ID NO: 112773 - DNA, 243 bp, Glycine max
ggtttatagaagtggtggtgcagatcctgatggagataatcctggtgatctttatgttactatcaaggtcagggacgatcctgtcttccgtagagaaggatctaatattcatgtagatgctatcttaagtatcactcaggcaattttgggtggaaccattcaggtcccaactcctactggagatgttgttctaaagattcgtcctggcacccaacctggtcagaaggtggttctgaaaaagaa

SEQ ID NO: 112774 - DNA, 248 bp, Glycine max
gccccctggtgcccgtgcctatgttggtcttactgggcttactgtggctgaacacttccgtgatgctgaagggcaagatgtgcttcttttcgtagacaacattttccgttttacccaagctaactcagaggtgtctgctttgcttggtcgtatcccatctgctgttggttaccaaccaaccttgtctactgatcttggagctcttcaagagcgtattacaacaaccaagaagggttcaattacctctg

SEQ ID NO: 112775 - DNA, 248 bp, Glycine max
caataattcaattcattttcaattaggtcttgctctagcctctttaggggttattacttccttggtagctcaacacatgtactctttacccgcttatgcatttatagcgcaagactttactactcaagctgcattatatactcatcatcaatatatagcgggcttcattatgacaggggcttttgctcatggagctatattttttattagagattataatccagaacagaatgaagataatgtcttag

SEQ ID NO: 112776 - DNA, 246 bp, Glycine max
ctgtgctctgctctcatctcattcatattcatttcaatggcaactcaaggtcaagtcattacctgcaaagctgcggtggcctgggaacccaacaagcccttaaccgtccaagacgttcaggttgctccgcctcaggccggcgaggtccgtgtccaaatcctcttcaccgctctctgccacaccgatgcttacacttggggcggcaaggatcccgaaggtctcttcccctgtattctcggccacgaa

SEQ ID NO: 112777 - DNA, 247 bp, Glycine max
gtgccaaatctagttcaaggaaaaccatttcttctgaagataaaccttttaacttgagaagccgcgaccccatctactccaacaagcttggcaagttctttgagatcaccccagagaaaaacccccagcttcgggacttggatatcttcctcagtattgtggatatgaacgagggagctcttcttctaccacacttgcaattcaaaggcgatagtgatactggtaattaatgaaggagatgcaaaca

SEQ ID NO: 112778 - DNA, 243 bp, Glycine max
gctctttgttctttgccatggagtggccacaacaacaatggccttccatgatgatgagggtggcgataacaagtcaccacaaagtttgcgtttgatgagcaactccacgagggtattcaagactgatgcaggggcaatgcgtgtgctgaaaagccatggtggtatgatatctcataggcacatgcacattggcttcatctctatggaaccacagtccttgcatgttcctcagtacctcgactc

SEQ ID NO: 112779 - DNA, 243 bp, Glycine max
aaatcctcaaattcgatttgtaccaaattttcttcacaaaatgtctggtcgtgggaaaggtggcaagggtttgggaaagggaggtgccaagaggcacagaaaagttcttcgtgataacattcaaggtatcacgaaacctgcgattcgtaggttagcgagaagaggtggcgttaagaggatcagtggtttgatctatgaggaaaccagaggagttctgaagattttcttggagaacgtgattcg

SEQ ID NO: 112780 - DNA, 246 bp, Glycine max
agcaaggcactgcatggaggcgagtatcctccactcagcgaaccggatattggagttttacttgtcaaactctcagcgggatccatgttggcacctcatgtgaatccaatatcagatgagtataccatagtgctgagtggttatggtgaactgcatatagggtatccaaacggaagcaaagcaatgaaaactaaaatcaaacaaggggacgtgtttgttgtgccaagatacttccccttctgtcaa

SEQ ID NO: 112781 - DNA, 247 bp, Glycine max
ctggaatttcgatgctcagtcatctcttttaccattctcttctctctagctcttgcaggagagagccatgtccatgcatcgctacctgaggaatattattgggaagctgtgtggccaaacactcacattcccactgcactgcgagagcttcaacagcctctccctgcacgtgttgagatcaatgaactccctaagcaaattgatgatacacagtaccctcaaacattcttctataacgaagagcttc

SEQ ID NO: 112782 - DNA, 249 bp, Glycine max
gcagctcgatgacggccgcaccctcgccgactacaacatccagcaggaatcaacccttgacctcgtcctccgtctccgtggtggcatgcagatcttcgttaagaccctcaccggcaagactattaccgtagaagtcgaaagctccgacaccatcgacaacgtcaaggctaagattcaggacaaggagggaatccccccagaccagcagaggctgatcttcgccgggacgcagctcgaggacggacgcac

SEQ ID NO: 112783 - DNA, 246 bp, Glycine max
ctgtcaacttcgcggtgtgagtgagacggagagtgctatgcaatcgtcttctcttctcggagcttggctttgcttatcgattctctctcctctcgtttctctaattccaaggtttgtataagatggcagatgccgaggatattcaaccccttgtttgcgacaatggaactggaatggtcaaggcaggatttgctggtgacgatgctcctagggctgtctttcccagtattgttggccgacctcgac

SEQ ID NO: 112784 - DNA, 233 bp, Glycine max
gtatgctggaaaggagggtgtttcagctctgacattcttgccgcaattgaaagggcaatattggacaacgtgaatgttctttctttatctctcggtggtggcatttctgattattacagagacagtgtcgctattggagctttttcagcgatggagaaagggattttggtttcatgctccgctgggaactcgggtccgggtccctacagtctctccaatgtggctccatggat

SEQ ID NO: 112785 - DNA, 249 bp, Glycine max
caataattccttcacttgcagaacttagttctctgttgcatcatcatcatcttcattagtgttagccctaaacttcaccttcaaccatgaccacagtgccaccacacagtgtccaagtgcacacaacaacacaccgctacgaagccggcgtcgtcccgccggctcgttttgaggcgccgcgttacgaagccggcatcaaggcgccctcttccatttaccattccgagagaggtccgacgacctctcagg

SEQ ID NO: 112786 - DNA, 249 bp, Glycine max
cgtgaaagaggatgcgagacaagaaacggggttgaggaaaatatctgcaccttgaagcttcacgagaacattgctcgcccttcacgcgctgacttctacaaccctaaagctggtcgcattagtaccctcaacagcctcaccctcccagccctccgccaattccaactcagtgcccaatatgttgtcctctacaagaatggaatttactctccacattggaatctgaatgcaaacagtgtgatctatgtg

SEQ ID NO: 112787 - DNA, 244 bp, Glycine max
cggctcgagctcgaggacaaggaaaggttagagttgtgaactgccaagggaatgcagtgttcgacggtgagcttaggaggggacaattgctggtggtaccacagaacttcgtggtggcggacaagccggagaacaaggattcgaatacatagtattcaagacacaccacaacgcagtcactagctacttgaaggatgtgtttagggcaattccctcagaggttcttgcccattcttacaacctt

SEQ ID NO: 112788 - DNA, 243 bp, Glycine max
gttattctctctccgagcttcactctcttcgcctctgccaaagggagtaaaatggggtcctcctcccttctgggtcgtgttctctttgcctcccttttcatcctcactgcatggcagatgtttaatgaatttcatgccaatggtggacccatctcgaaagacttgattcccaaactcactgtggtgaagaaaaatttgtcctctaaattgggggtagcactaccagatattgatgcccggcaa

SEQ ID NO: 112789 - DNA, 84 bp, Glycine max
cattttcagaagcctctttgggaatcaaatccgaagcatgatgcattgtggcgagcattgtctcggtctaccgtcctacgcgtt

SEQ ID NO: 112790 - DNA, 247 bp, Glycine max
attgtctttgaacactcatcaccatggccaagcctgttcttaccctttgtgtcctttgtcagtggctgcgtcgctctgagagagcaggcacagcaaaatgagtgccagatccatgagctgaatgccctcaaaccggataaccgtatagagtcggaaggtgggttcattgagacctggaaccctaacaacaagtcattccagtgtgccggtgttgctctctctcgctgcacccttaaccgcaatgccc

SEQ ID NO: 112791 - DNA, 246 bp, Glycine max
ctcgagcgagcaaaatgaccaagttcacaatcctcctcatctctcttctcttctgcatcgcccacacttgcagcgcctccaaatggcagcaccagcaagatagctgccgcaagcagctccagggggtgaacctcacgccctgcgagaagcacatcatggagaagatccaaggccgcggcgatgacgatgatgatgatgacgacgacaatcacattctcaggaccatgcggggaagaatcaactaca

SEQ ID NO: 112792 - DNA, 248 bp, Glycine max
ctttgaacactcatcaccatggccaagcttgttctttccctttgtttccttcttttcagtggctgcttcgctctgagagagcaggcacagcaaaatgagtgccagatccaaaagctgaatgccctcaaaccggataaccgtatagagtcggaaggtgggttcattgagacctggaaccctaacaacaagccattccagtgtgccggtgttgccctctctcgctgcacccttaaccgcaatgcccttcg

SEQ ID NO: 112793 - DNA, 242 bp, Glycine max
ccagtatggatcactccgcaagaatgctatgttcgtgccacactacaccctgaacgcgaacagcataatatacgcattgaatgggcgggcattggtacaagtggtgaattgcaatggtgagagatgtttgatggagagctgcaagagggaggggtgctgatcgttccacaaaactttgcggtggctgcaaaatcccagagcgataactttgagtatgtgtcattcaagaccaatgatagacc

SEQ ID NO: 112794 - DNA, 240 bp, Glycine max
agaatggctcccaagggtttaacctttctggctgtgttaatatgcgtttcagcactgtcactgagtccttctgttgcgggggaagggcaaaataatggccttgttatgaacttctacaaggaatctgccctcaggctgaagacatcatcacagaacaagtcaagcttctctacaagcgccacaagaacactgctttctcctggctcaggaacatcttccatgactgtgctgttcagagtt

SEQ ID NO: 112795 - DNA, 138 bp, Glycine max
aggaaatctacatccaacaaggtaagggtatttttggcatgatatacccgggttgtcctagcacatttgaagagcgtcaacaacctcaacaaagaggacaaagcagcagaccactagaccgtcacagaagatctataa

SEQ ID NO: 112796 - DNA, 241 bp, Glycine max
actcctcctccttcttcttcttcttccctggcatcggatccagatccaaatccagtttaacaaagaaaatgcagtacaagaacctgggccgatcgggactgaaggtgagccagctctcctacgggggtgggtgagcttcggtaaccagctagacgtgaaggaggccaaggccctcctccagtgctgccgcgaccacggcgtgaacttcttcgacaacgccgaggtctacgccaacggccgc

SEQ ID NO: 112797 - DNA, 239 bp, Glycine max
tgcagctgttggaattatcaagaccaagcgcactattcaatttgttgactggtgccccaccgggttcaagtgtggaatcaattaccagcctccgactgttgttccaggtggtgatcttgccaaggtcagagggccgtgtgcatgatctccaattccaccagtgttgttgaggtcttctctcgcatcgaccacaaatttgacctcatgtatgccaagagggcgttcgttcattggtatgt

SEQ ID NO: 112798 - DNA, 240 bp, Glycine max
gttgtgcatccatcgttaagctagtggcgatcggatccagctacagcatagagatcaaggaaggaaggaaggaagatgttgggtgttataaggcacaagagtattcgccctgccttgtccgcaatcagacacttgtcttctgcagctaaagagattactgtcagggaggctctgaactccgcactcgatgaggaaatgtcagctgatcctaaagtgttcttgatgggtgaagaggttggg

SEQ ID NO: 112799 - DNA, 244 bp, Glycine max
cacacttttaacctaaagagccagcaggccaggcaggtgaagaacaacaaccctttcagcttcctggttccacctcaggagtctcagaggagagctgtggcttagagagccctttttgcatgtgctccacacttttgtccttttgggctctagctagtgctggtagcagtaaataagcatgaataaaagaaacataggcttagatgccctttgttaagtgtagagtaacgggtatagtaactat

SEQ ID NO: 112800 - DNA, 245 bp, Glycine max
gcaaaggttgcctgtaacacagaattaaaggatctcaaatccattttccctcgtgttaaggatggagacgttccttatatatgcttagatcttgtatacgaatatacattgctcgttgatggatttgcatagatccgcagcaagagattacgttggtgaggcaagttgagtatcaagattctctcgtggaagcagcatggccactaggcagtgccatagaagccatatcatcattacctaaattt

SEQ ID NO: 112801 - DNA, 139 bp, Glycine max
gagtgatcggtgttcacttgatccttcataagtcgtcatcatcatcatcatcatcaccgttgattgaagaagatgccgatcagaaacatcgccatcggaaggcctgaagaggctactcaccccgaacgttgaaggcggg

SEQ ID NO: 112802 - DNA, 240 bp, Glycine max
cactcattctggaaggtaaggacgtggttgcacgtgccaaaacaggttcgggaaagacactcgcgtaccttctcccgttgcttcagaaactgtttactgctaactctgatcggaagaaactcgcgcaaatgcttttgttcttgttcctactcgcgaactaagtcaacaggtatatgcggaagtgaagtctctggttgaattatgcagagttcagctgaaagttgtgcagttgaatagtaa

SEQ ID NO: 112803 - DNA, 239 bp, Glycine max
ctatttttcaagtaacttaaggtttcaaacctaggaagttggaagtcatggcagcaacattgatggcagcaacaacaagttctggtactcttaaagcaactcctttccttggccaaggcaagggtccaatgccaatgctcttagggatgttgtctccatgggaactgggaagtacaccatgggcaatgatttgtggtatggaccagacagagtgaaatacttgggacccttctcagctc

SEQ ID NO: 112804 - DNA, 239 bp, Glycine max
ctcaaactcagtgcccagtatggatcactccgcaagaatgctatgttcgtgccacactacaccctgaacgcgaacagcataatatacgcattgaatgggcgggcattggtacaagtggtgaattgaatggtgagagagtgtttgatggagagctgcaagagggaggggtgctgatcgttccacaaaactttgcggtggctgcaaaatcccagagcgataactttgagtatgtgtcattc

SEQ ID NO: 112805 - DNA, 241 bp, Glycine max
caccgtcgtagccgctgagcacggaatcgcgctccttgcagccatggccaggaacgtcgctcatgccgatgcgtccgtcaaaaccgggaaatggcagaggaataactatgttggagtttccttggtagggaacacacttgcggtgttgggatttgggaaggttggttctgaagttgctcgtcgtgccaagggacgtggtatgaatgtcattgcgcatgacccgtatgctcctgcagaccgt

SEQ ID NO: 112806 - DNA, 247 bp, Glycine max
caaattagttcattctctttgcgcagttccctacctctcctgtcaagatgcagatcttcgtcaagagcctcaccggaaagagcatcacccttgaggtggaaagctctaacaccatcgacaacgtcaagccaagatccacgacaaggaaggaattcccccggatcagcaacgtctcatcttcgccggaaagcagctcgaggacggccgtacgctcgctgactacaacatccagaaggagtcaaccctt

SEQ ID NO: 112807 - DNA, 244 bp, Glycine max
aacaggagcagcaacaggaagagcaacctttggaagtgcggaaatatagagccgaattgtctgaacaagatatatttgtaatcccagcaggttatccagttgtggtcaacgctacctcaaatctgatttctttgctattggtattaatgccgagaacaaccagaggaacttcctcgcaggttcgcaagacaatgtgataagccagatacctagtcaagtgcaggagcttgcattccctgggtct

SEQ ID NO: 112808 - DNA, 242 bp, Glycine max
gtagaacgctgctgccgaaacccttccggaaccctaaggtaagtgagtaatcagtggttgagaatggtggagaaggcgaagggtagaaaggaggaggtggttacacgtgagtacaccattaacctcacaagcgcctccatggctgcacatttaagaagaaagctcctaaagctattaaggagataaggaaatttgcccaaaaggccatggggaccaatgatgtgagggtggatgtgaagttg

SEQ ID NO: 112809 - DNA, 238 bp, Glycine max
aaggaatgctctgacatactttctgccgaggagtttgctattctgcttgctaagcactttgtatcattttaccagaaggttactggtgctattgtgaatattgtggaaaaaccatgggagcgtgcactgtggatggtcaacctcatgaacatggtttcaaacttgggtctgagaagcatacaacagaggcgatagtacaaaagtctggttcacttcagttgacttctggtattgaagg

SEQ ID NO: 112810 - DNA, 238 bp, Glycine max
caattttgaggcttttccccacaagctggtgcagtttggagagattcaggaaaaagttgtattgaaattttcacaagaggaatttcttacagcttggtcaactcaggtgcgtcctacaacaacttgttggctgatgggtgtccatatttgtatgctatggtgcatgatagttcagtgtctacaataccaggcgattttgtcattggtgttaagttgacaaccataaacaatatgtgtg

SEQ ID NO: 112811 - DNA, 109 bp, Glycine max
caatatcctagtataccttagtaaataatttaagatactatgatgagagcacggttcccattactgttgctgggacttgttttcctggcttcagtttctgtctcatttg

SEQ ID NO: 112812 - DNA, 211 bp, Glycine max
gtaatagaaacctctcagcccctctccgatcaaatggccaccgtaatcgacggcaaagccgttgcgcaaaccatccgatctgaaatcgccgacgaggtgcgccagctctctcaaaaatacggcaagttccgggattagcggtggtgatagtagggaacagaaaagattcacagagctatgttggaatgaagagaaaggcatgcgctgaatt

SEQ ID NO: 112813 - DNA, 241 bp, Glycine max
gattaatgaaggagatgcaaacattgaacttgttggcattaaagaacaacaacagaagcagaaacaggaagaggaacctttggaagtgcaaaggtacagagctgaattgtctgaagacgatgtattgtaattccagcagcttatccatttgtcgtcaacgctacctcaaacctcaatttccttgcttttggtatcaatgctgagaacaaccagaggaacttccttgcaggcgagaaagaca

SEQ ID NO: 112814 - DNA, 239 bp, Glycine max
actagttctagtggcttcatcaccgccatttttctgtggatctccacctagcagggcttcaaaccctgtgatccaagatgagcaatttggtagtaatggtaatgagagttttggttcattttcctggcacccccttcaccatcttcctcagcaagaggctgtgttaggatgaagtttggtcacaccccagcagcagtgaggattgaaggttttgattgcctcagcagggataggcgcaa

SEQ ID NO: 112815 - DNA, 239 bp, Glycine max
ccttagttcaatatggggaagcccttcactctctctctttcttccctttgcttgctactcttgtcgagtgcatgctttgctattagctccagcaagctcaacgagtgccaactcaacaacctcaagcgttggaacccgaccaccgcgttgagtccgaaggtggtttgattcaaacatggaactctcaacaccctgagctgaaatgcgccggtgtcactgtttccaaactcaccctcaac

SEQ ID NO: 112816 - DNA, 240 bp, Glycine max
gcaaagcaatggctacttcaaagttgaaaacccagaatgtggttgtatctctctccctaaccttaaccttggtactggtgctactgaccatcaaggcaaactcagcggaaactgtttctttcagtggaacaagttcgtgccgaagcaaccaaacatgatcctccaaggagacgctattgtgacctcctcgggaaagttacaactcaataaggttgacgaaaacggcaccccaaaaccctc

SEQ ID NO: 112817 - DNA, 243 bp, Glycine max
gtttccttgtgttgcttcttttctccctcttaggtctctcttctagttccagcatatcaactcatcgttccatattggaccttgacctaaccaagtttaccagacagaaacaggtgtcttcactgtccaactatggaagagtgagcatggacgtgtctaccataaccacgaagaagaggcaaagagacttgagattttcaagaataacttgaactatatcagggacatgaatgcatacagata

SEQ ID NO: 112818 - DNA, 237 bp, Glycine max
aacaggagcagcaacaggaagagcaacctttggaagtgcggaaatatagagccgaattgtctgaacaagatatatttgtaatcccagcaggttatccagttgtggtcaacgtcacctcaaatctgatttctttgctattggtattaatgccgagaacaaccagaggaacttcctcgcaggttcgcaagctaatgtgataagccagatacctagtcaagtgcaggagcttgcattccc

SEQ ID NO: 112819 - DNA, 230 bp, Glycine max
cacaaggcagaaagcaagctcatcctagagttttaaaaatggcagcagcctcctccatggctctctcttccccatccttggctggcaaggccgtgaagctgggcccatcagcccccgaagtcggagggtcagcatgaggaagaccgtcaccaagcaggcctcctccggaagcccatggtacggcccagaccgcgtcaagtacttgggcccattctctggcgagcccccgt

SEQ ID NO: 112820 - DNA, 236 bp, Glycine max
tgctgcgtttgtgctgttcctggttgcttctggctttttgttctctgggggctgtggtgtggctgccattgctgctttatcttggatttacaactacgtttctgggaaccagcctgcgggtctgacacccttgactatgcaaaagggtaccttactgataaggcaagggatgtgaaggagagggcaaaggattatggaagttatgctcagggtagaattaatgaggccacacaagg

SEQ ID NO: 112821 - DNA, 243 bp, Glycine max
caaatcttagccgccattgatttttcctcttccatttctcttactttctcagcctttttcgattacccatttggttatttcgccctaatggctcttgctccatccaaagtttccaccttttctggttttctcccaaacccagtgttgggggtgctcagaaaaacccaacttgctctgtttctctgagctttttgaatgagaaacttggaagcagaaaccttagggtttgtgcctcaacggtgc

SEQ ID NO: 112822 - DNA, 233 bp, Glycine max
gaaacataccgaatgagagcatcaaactcttcttcttcgatttccattgcgaacgttactttttcttcttctttctcttcattttcttcgctcttcgatcttcgtccggggactgctccgaataccaccaccaccactcgccgatggccacgatcggaggcttacacgactcccaaggctctcaaaacagcgtcgaaaccgaagccctcgctcgattcgccgtagacgaacac

SEQ ID NO: 112823 - DNA, 235 bp, Glycine max
caacaaggtgaggagaggctgcaagagagtgtgattgtggaaatctcaaagaaacaaattcgggaactgagcaaacatgccaaatctagttcaaggaaaaccatttcttctgaagataaaccttcaacttgagaagccgcgaccccatctattccaacaagcttggcaagttgtgtgagattaccccagagaaaaaccctcagcttcgggacttggatgtcttcctcagtgttgt

SEQ ID NO: 112824 - DNA, 237 bp, Glycine max
ctcgagccgctcgagccgcttcgctggccactgtggggactggaacccttgttccatactagaaccccacttacaatactgccagcagaaaggtgtcaaagtcttcctttccctcggtggtgctaaggaacctactccctctgctcacccgaggacgcaaaagaagttgccaattacctttatcaaaacttcctcagtggcaaacccggtccacttggaagtgtaacactggaaggc

SEQ ID NO: 112825 - DNA, 240 bp, Glycine max
caaaccctaactcttgcgctccgccatttttcgtagctgctgttcttgcgcgtgaacaagcctcaggtaagccaaaaccatggttaagcataacaatgttatcccaaacggacacttccgtaagactggcagaactatgtgaagacttggttcaatcagccagcacggaagacaaggagacgattggctcgtcagaagaaagctgtgaagatattccccagacctacggctggacctctc

SEQ ID NO: 112826 - DNA, 237 bp, Glycine max
gaaaaacccccagcttcgggacttggatatcttcctcagtattgtggatatgaacgagggagctcttcttctaccacacttcaattcaaaggcgatagtgatactggtaattaatgaaggagtgcaaacattgaacttgttggcctaaaagaacaacaacaggagcagcaacaggaagagcaacctttggaagtgcggaaatatagagccgaattgtctgaacaagatatatttgta

SEQ ID NO: 112827 - DNA, 237 bp, Glycine max
atgcccatcattcttcagtctgcccttgtttccaatctctacttcatctcccagctgctccaccgtaagtacagcggaaacttcttcgtagatctattgggaaaatggaaggaatctgaatacggaggtggtcagtctgttcctgttggtggcattgcatactatatcactgcaccatccagcttagctgatatggcagccaatcctttccatgctctgttctatcttgtgtttatg

SEQ ID NO: 112828 - DNA, 106 bp, Glycine max
ggcgatagcgatactggtaattaatgaaggagatgcaaacattgaacttgctggcctaaaagaacaacaacaggagcagcaacaggcagagcaacctttggaagtg

SEQ ID NO: 112829 - DNA, 265 bp, Glycine max
ctaagaaccaaccattgatttggtacaagacaacctttgctgctccatccggcagtgatccagttgcaattgacttcacggggatgggaaaaggtgaggcttgggtgaatgggcaaagcatcggacgatactggcctacatatgtggcttcagatgctggttgcacggactcatgcaattatagaggaccttacagtgcatccaaatgtcgcaggaattgtggaaagccatcacagacactataccatgtaccgcgatcgtggtt

SEQ ID NO: 112830 - DNA, 243 bp, Glycine max
tttgaacactcatcaccatggccaagcttgttctttccctttgtttccttcttttcagtggctgcttcgctctgagagagcaggcacagcaaaatgagtgccagatccaaaagctgaatgccctcaaacgggataaccgtatagagtcggaaggtgggttcattgagacctggaaccctaacaacaagccattccagtgtgccggtgttgccctctctcgctgcaccctaaacggcattgccc

SEQ ID NO: 112831 - DNA, 260 bp, Glycine max
ccttagttcaatatggggaagcccttcttcactctctctcttacttccctatgcttgctactcttgtcgagtgcatgctttgctattacctccagcaagtacaacgagtgccaactcaacaacctcaacgcgttggaacccgaccaccgcgttgagtccgaagtggtctatattgatacatggaactctcaacaccctgagctgcaatgcgccggtgtcactgtctccacacgcagcctcaaccgcaacgggatccactt

SEQ ID NO: 112832 - DNA, 273 bp, Glycine max
ggtgagtgaaaatggcggtacccttgctctccaagaagatcgtgaagaagcgcgtcaagaagtttatacgcccccagagtgatcgcaagatctccgtcaagccaagctggcgcagacccaagggtattgattctcgtgtcaggagaaagttcaaaggatgcactttgatgcccaacattggttatggctcagacaagaaaacccgccattatctaccaaatggtttcaagaaatttgtcgtgcacaatgtgaaagacctggaacttctcatga

SEQ ID NO: 112833 - DNA, 270 bp, Glycine max
ctttccctcactttctcgctccccaaacgcccctctctctcctccaatggccgaccagctcaccgacgaccagatcgccgagttcaaggaggccttcagcctcttcgacaaggacggcgatggttgcattactaccaaggaacttgggactgttatgaggtcacttggtcaaaacccaactgaggcagaactgcaggatatgataaacgaggttgatgctgatggcaacggaaccatcgatttcccagagttcctcaacctgatggctcg

SEQ ID NO: 112834 - DNA, 270 bp, Glycine max
gctgccgcaagcagctccagggggtgaacctcacgccctgcgagaagcacatcatggagaagatccaaggccgcggcgatgacgatgatgatgatgacgacgacaatcacattctcaggaccatgcggggaagaatcaactacataaggaggaacgaaggaaaagacgaagacgaagaagaagaaggacacatgcagaagtgctgcacagaaatgagcgagctgagaagccccaaatgccagtgcaaagcgctgcagaagataatggaga

SEQ ID NO: 112835 - DNA, 268 bp, Glycine max
gtgaacttgaaggatgctgtggatgggaccataagcttccatgacaaagtaaggaacaggatttacaagctcaatgatcagacagcaaagctttttgtgagaccaagaggttggcatctacctgaagcacatattctgattgatggtgaacctgcaactggttgccttgttgattttggcctcaacttctaccacaaccactcagcattcgggcgcactcaaggtgcggctttggccctttactttaatctccccaaaatggagcatt

SEQ ID NO: 112836 - DNA, 267 bp, Glycine max
gaatgaccgtgtggttggtcatgattccaaatacaattgtcacttgatggaaaagattgaagctgagaatttgctgcatagagctttcagtgtattcctgttcaactctaagtatgagttgcttcttcagcaacgatctgcaaccaaggtaacattccctcttgtgtggacaaacacctgttgcagccatccactgtaccgtgaatctgagcttattgatgagaatgcccttggagtaagaaatgcagctcagaggaagcttttgga

SEQ ID NO: 112837 - DNA, 268 bp, Glycine max
cttgatcaaaaccccagagtattttaccttgctgattgttgaacttggaggtgtcaagaagactgatggcaacaactggttcatcgccagtgttataggtccaacttcaacaatcagcttgatcaaaaccccagagtattttaccttgctgggaacccagatatagagcacccagagaccatgcaacaacagcagcagcattcgagtcatggtggacgcaagcaggggcaacaccagcagcaggaggaagaaggtggcagtgtgctca

SEQ ID NO: 112838 - DNA, 270 bp, Glycine max
gcaatggctacttcaaagttgaaaacccagaatgtggttgtatctctctccctaaccttaaccttggtactggtgctactgaccagcaaggcaaactcagcggaaactgtttctttcagctggaacaagttcgtgccgaagcaaccaaacatgatcctccaaggagacgctattgtgacctcctacgggaaagttacaactcaataaggttgacgaaaacggcaccccaaaaccctcgtctcttggtcgcgccctctactccacccccat

SEQ ID NO: 112839 - DNA, 273 bp, Glycine max
cgctcgagccgaatcggctcgagcggctcgaggagagatgctattgactttggccttgctcgcttatcactctcatggtgtacgcaagaacatgaataacttggtcctatctcttgttcctaaattcgcaaaactgcaaactctaatcctccgtcaagacaagcctcaactagaggataatgctgttgagactattgcaaaatgctgtcatgaactgcagatcctggacctcagcaaaagtttcaagctaactgatcgttcactctatgagct

SEQ ID NO: 112840 - DNA, 266 bp, Glycine max
ggagggagccgtaacatcggaagctctagcttgggtatcgaatcacaatggcgagaggattagagacgcatctgaagaggcttaatgccccagagcattggatgcttgacacactgggtggtgcatttgctcctaagccctcatctggactacacagatcgagggatttcctgccactcatactcattttgcgacaccggctgaagtatgctccaacatatcgtgaagtcattgctattctgctgcagcgacatgtccttgtagat

SEQ ID NO: 112841 - DNA, 267 bp, Glycine max
cgttctagatcgcgggcggccgcccggatctagaactagtggtgatccatgggcgatgggccatgcttggagcactaggatgcatcaccccagcggtgctagagaagtggttgagagtggacttcaaggcgccagtgtggttcaaagctggagcccaaatattctccgaaggtgggcttgactatttgggaaacccaaaccttgtccatgcacaaagcatcctggcagtgctgggcttccaagttatcctaatgggccttgttgaag

SEQ ID NO: 112842 - DNA, 265 bp, Glycine max
ggaccaaacagcatccgcggcacgacggtaaccctccaacaacaacacttccgctgcgaaaaatgtctctggtggcgaacgtggatttccagcacattctgcgtgtgctgaacaccaacgtggatgggaagcagaagataatgttcgcaatgacctccatcaagggtattggaaggagattcgccaacatcgcttgcaagaaggctgatgttgacatgaacaaaagggctggtgagttgactgctgctgagttggatagtgtgat

SEQ ID NO: 112843 - DNA, 270 bp, Glycine max
cttaacaacagcacaaagcgggttactgtctgttcaagctaccatctctctctctctttcttagtgcctccttgccagaagttaaaatggcccaagaaactttcctattcacatctgaatcagtgaacgaggggcaccctgacaagctctgtgaccagatctccgatgctgtgctcgatgcatgcttggagcaggaccctgacagcaaggttgcctgtgaaacctgcaccaagaccaacatggtgatggttttcggagagatcacaacca

SEQ ID NO: 112844 - DNA, 267 bp, Glycine max
cgtcttttgggcaccattcctcagtccatttcacagcaaactgtttggaatcaaatggcaacagtgagaacaccattgaattttgattctagcaagcagagcttttgtcaattttctattgaccttctcggtggaggaatgttagtggacaaaactggagattggatcacacttatacaaaattctccaattagtaacttgttgagagttgctgcttggaagaaaggctgtttaatggtcaagattgtgatgtctgggaatgcagca

SEQ ID NO: 112845 - DNA, 267 bp, Glycine max
gctaccctgaggcttctcttctcttctcttctctgtcgtgagtcaccatggtgagggttagtgtgctgaacgatgctctgaagcgcatgtacaatgctgagaaaaggggaaagcgccaagtcatgattaggccatcctccaaagtcattatcaaattccttttggtgatgcaaaagcacggatacatcggagagtttgagtatgttgatgaccacagggctggtaaaatcgtggttgaattgaacggtagactgaacaagtgtgggg

SEQ ID NO: 112846 - DNA, 261 bp, Glycine max
  unsure (1)..(261): unsure at all n locations
gcttgggggtcttctccataggggtcatgagaccanaagggcagtggtgttgatgcgcaagagcgggttggacgagaatagcgtaaccagcgttcgggggaattattggccaaggtctcgacttagttgggccaacactcgatactcttactgcgttcttgggccgatccgtgtctctccagcttatgagtgctaccaaagctgatgccaacggaaaagggacacttggaaaggctacctttttggaaggtatcagacttc

SEQ ID NO: 112847 - DNA, 268 bp, Glycine max
ggaaacgttcgggctggtctgcaagcgatggctccggctgcagagcacagaaaggaagaagctcgccgcacgtgcgggccctcacatgctccggaaaatggccgataggttcacacgcttggtcgaattggacctcgctcagtccgtctctcgttccttctatcctggcgtcaccgattccgacctcgccgtcatcgccactgccttcacttgcttgaagatcctcaatttgcataattgtaaaggaattacagatgctggaatgaag

SEQ ID NO: 112848 - DNA, 267 bp, Glycine max
ttccatccatttaattccacacaacctcgcacacctaagtctcagtttcaatccctttactattaccgttacaacatccttcaaaaatccctctctcatttacccttgtttgtgtacagtagtagcagagtgagactaggtatcatcgatggcagggtacaagggcgatgacgattacgattacctcttcaagctggttctcatcggcgattccggtgtcggctagtccaacctgctttcgcgcttcacgaggatcgagttcaattt

SEQ ID NO: 112849 - DNA, 268 bp, Glycine max
ctcgagccgattgtaaagatggtatttttcttgaattggttttaactcaacagaggttagagaaacatccacacaaggtaggctatctttacaatcctttctgctggcagacttatggtgaattgaaaactccaacagtcccaccaattgattgtctacaaatcgggaagccaacaaacaatcggattcagacagatcatgatttatgttgatcagatatgaattcaaaattcaaatgcttagcttgctagctaaagtatgtatattg

SEQ ID NO: 112850 - DNA, 270 bp, Glycine max
caaaacactcataacacaaagcacaaagcaaagctcatccttgagttaaaaaatggcagcagcttcttccatggctctctcatccccatccttggctggcaaggccgtgaagctgggcccatcagccccagaagtgggaagggtgagcatgaggaagaccgtcaccaagcaggtctcctcaggaagcccatggtacggcccagaccgagtcaagtacttgggcccattctctggcgagcccccgtcctacctaaccggtgagttcccagg

SEQ ID NO: 112851 - DNA, 270 bp, Glycine max
tggccaccgtaatcgacggcaaagccgttgcgcaaatcatccgatctgaaatcgccgacgaggtgcgcctgctctctcaaaaatacggcaaggttccgggactagcagttgtgatagtagggaacagaaaggattcacaaagctacgtgggaatgaagagaaaggcatgcgccgaattgggaatcaaatccttcgatgtggaccttcccgaacaagtctcccaagctgaactaataaaacaagttcacgagttgaatgttaaccctgatg

SEQ ID NO: 112852 - DNA, 267 bp, Glycine max
cgtctgttgagggtaacttatcaagtttgggaacaaataaaactggagagagaagacgtgccaaagcagagaaaactatcactttgcaagttcttagacaatattttgctggaagccttcaagatgctgccaagaatattggtgtttgtactacaactttgaaaaggatctgccggcaacatgggataaagcgttggccttctcgaaagatcaaaaaggttggtcactctctacaaaaacttcaacttgtcatcaactcagttcaag

SEQ ID NO: 112853 - DNA, 266 bp, Glycine max
ggcagaaagcaagctcatcctagagttttaaaaatggcagcagcctcctccatggctctctcttccccatccttggctggcaaggccgtgaagctgggcccatcagcccccgaagtcgggagggtcagcatgaggaagttcgtcaccaagcaggcctcctccggaagcccatggtacggcccagaccgcgtcaagtacttgggcccattctctggcgagcccccgtcctacctcactggcgagttcccaggtgactacggctggga

SEQ ID NO: 112854 - DNA, 263 bp, Glycine max
ccggaaatcgctcacatgtacaaaactgaccgggccaagtatgatgccactgcacgcagctggacccagaagtatgccatgggctgatttgtgtttagataatgtatattgaaatggatggcatctatgaaaacttttgtgggtttgcttttctcttcctgtttttctggggtaagcattatgtttgttatgaggggatagggaagggcggtgtcttaatttgataaaaataactatgttcaacaaccactgtgatgttttta

SEQ ID NO: 112855 - DNA, 266 bp, Glycine max
ctcgagccgcgagataactagaaacagtgtgatgaaaatgaaggtccttgttttcttcgtatgctacaattttggtagcatggcaatgccatgcgtacgatatgttccctctccgaatgaacactggctatggtgcccgtactccggaggtgaaatgcgcaagttggaggcttgctgtggaagcacacaacatctttggctttgagaccattcctgaagagtgcgttgaagcaacaaaggaatacatccatggcgaacaatataga

SEQ ID NO: 112856 - DNA, 263 bp, Glycine max
ggcaaagagacttgagattttcaagaataacttgaactatatcagggacatttttgcaaacagaaaatcaccccattctcatcgtttaggattgaacaagtttgctgacattactcctcaagagttcagcaaaaagtacttgcaagctcccaaggatgtgtcgcagcaaatcaaaatggccaacaagaaaatgaagacggaacaatattcttgtgaccatccacctgcatcatgggattggaggcaaaaaggtgtcatcaccc

SEQ ID NO: 112857 - DNA, 268 bp, Glycine max
ctaagagcacattcacgtatgaggacgttggcacgcgcaactgatcggcttctctgatgccaacctccttggacaaggaggatttggatatgtgcacagaggaattcttcccaacggcaaggaggtggcagtgaagcaattgaaggctggaagcgggcaaggggagcgtgaattccaagctgaagttgagatacttagccgtgtccatcacaagcatcttgtttctttggttggatactgcatcactgggtcccagaggctgcttgtt

SEQ ID NO: 112858 - DNA, 268 bp, Glycine max
ggaggagggaattgttgcattggagttcgacaggaagtccacgttattgtgtaaacaagaggatgagaaccttgacatagtcaagattgacaaaactcgatcaagtgttgagaagttggagtctgatttaataagcctaaggcagtgcatcagtgaaacaacttcatcaattttggaaatgatagatgaggagcttttgccccagctggttgcattaactgcggggttgacacaaatgtggaggacaatgcatgagtcccataaagcc

SEQ ID NO: 112859 - DNA, 266 bp, Glycine max
atgcaacggccacacacacccttagtcgcctgaaaacgattgttgttgcagggcaaacacaaagatccgggtcgacccgtcgcagatccgatccaaataagaaagatgaatattttcaggttagccggagacatgacccatttggccagcgtcctcgtcctcctcctcaagatccacaccatcaaatcctgcgccggtgtctcattgaaaactcaagaactctatgcactcgtttttgcttgtcgctacttagatatctttactta

SEQ ID NO: 112860 - DNA, 268 bp, Glycine max
ttctaccttcacttcgcacatctcgaaccctctctttccggcaactaggttaaagttcatcaatggcaggtcgtggcaaaaccctaggatccagcgccgccaagaaggccacctcaaggagcagcaaagccggcctccaattccccgtcggccgtatcgcccgtttcctcaaggccggaaaatacgccgagcgcgtcggcgccggtgctcccgtttacctcgccgctgtcctcgaatatctcgcagccgaggttttggagttggctgg

SEQ ID NO: 112861 - DNA, 267 bp, Glycine max
ctttcactcttcttcgtctcaaacctcttcgttccttcgattcattccatttcttccaaaatggccaaagacccagttcgcgttctcgtcactggagccgcagggcaaattggatatgctcttgtccctatgattgctaggggagtgatgctgggtcctgaccagcccgtgatcctccacatgcttgacattcctccagcagcagagtccttgaatggggttaaaatggaattggtggatgctgcattccctcttcttaaaggtgtt

SEQ ID NO: 112862 - DNA, 267 bp, Glycine max
gcagatgataaacgtgcagaacaagaactcttcatattttgtcgagtggattcccaacaatgtcaagtcgagcgtgtgtgacattgctcctagagggttctccatggcgtccacattcattggaaactcgacctcgattcaggagatgttcaggagggtgagtgagcagttcacggccatgtttaggaggaaggctttcttgcattggtacaccggggaaggcatggacgagatggagttcacagaggcagagagcaacatgaacga

SEQ ID NO: 112863 - DNA, 265 bp, Glycine max
ctctagcacacaaaacttgctatagcagtaagctataactcatttgaggctctgtgagaattgagagatggctaaagatgttgaggttcaagagcaaggaggagagtactctgccaaagactaccatgaccctcctccagcacctttgttcgacccagaggagctcacacagtggtccttctatagagccctcatcgctgagttcatagcaacccttctcttcctttatgtcactgtgctcaccattattggctacaaaaggcag

SEQ ID NO: 112864 - DNA, 265 bp, Glycine max
cgacttcttccaccaagttatgggtctccttgtgttgcttcttttctccctcttaggactctcttctagttccatcatatcaactcatcgttccatattggaccttgacctaaccaagtttaccacacagtaacaggtgtcttcactgttccaactatggaacagtgagcatggacgtgtctaccataaccacgacgaagaggcaaagagacttgagattttcaagaataacttgacactatatcagggacatgaatgcgaacag

SEQ ID NO: 112865 - DNA, 264 bp, Glycine max; identical to SEQ ID NO: 104035

SEQ ID NO: 112866 - DNA, 265 bp, Glycine max
aaaaaatcacgagtatcaaaaagaaatatttatccagttgaggcatgattgattgagaaagaatgattccctccgaacagaaagagacgtcccttcatgtaggagccttgaagaattcattcgattgagttgtggttggttgttgaccaagaaagacatttcttgtacttttgggcattgcttctcttacgaaatctctagttggatgaaaatagcgctcctaaatgaaagcctttttcttatatacgaaaccgccagtggacag

SEQ ID NO: 112867 - DNA, 265 bp, Glycine max
ggaggatagtggagccattgtgacagtgaaaggaggtctaagagtcacagctccagccatgaggaagccacagcaagaagaagatgatgatgatgaggaagagcagccacagtgcgtggagacagacaaaggttgccaacgccaaagcaacaggagcagaaatggcattgatgagaccatttgcacaatgagacttcgccaaaacattggtcagaattcatcacctgacatctacaaccctcaagctggtagcatcacaaccgcc

SEQ ID NO: 112868 - DNA, 252 bp, Glycine max
ggctcgagatttgcttctattgatagcccacccgttccgaagagtacaaaactgcatcgaataatacaagccactaggcatgggtctagcaaaggaaacaacaatgggaggtagaggtcgtgtggccaaagtggaagttcaagggaagaagcctctctcaagggttccaaacacaaagccaccattcactgttggccaactcaagaaagcaattccaccacactgctttcagcgctccctcctcacttcatt

SEQ ID NO: 112869 - DNA, 266 bp, Glycine max
  unsure (1)..(266): unsure at all n locations
actggaccgactgccccttcgcccatccgggtgaaaaggcacgccgccgtgacccacggcggtatcactactcaggaacagtctgtcctgagtatccccgcggngggtgcagccgtggcgatgcatgcgaatacgcccatggctgttcgaatgctggatgcacccttccaggtacagaacggaggcctgtaaggatggcaggaatgcaanccgaaaggtgtgttttttcgcacacacccctcnccnagctgagaattttgccggta

SEQ ID NO: 112870 - DNA, 264 bp, Glycine max
gaactagttcaatatcctagtataccttaatgaataatttaagatactatgatgagagcacggttcccattactgttgctgggacttgttttcctggcttcagtttctgtctcatttggcattgcttactgggaaaaagagaaccccaaacacaacaagtgtctccagagttgcaatagcgagagagactcgtacaggaaccaagcatgccacgctcgttgcaacctccttaaggtggagaaagaagaatgtgaagaaggtgaa

SEQ ID NO: 112871 - DNA, 246 bp, Glycine max
ctcgagccgtccaatttgatcctgctcccaggagaggagaacctgatgtcacccgtagaacgcctgattacttcttatgatgttgctgctgctgcatatcatactggggtcgcagttacatctcattctgcacaaatttcaagtagtttgtgcatcctcatcctcgttgatgagattactgtaaggacttaaaatctttgggtatgcacaccaaacttttttggtgattgcccaataccgtactaa

SEQ ID NO: 112872 - DNA, 264 bp, Glycine max
gtgattgtggaaattgcttgtgtgctttcagctgacgaggtcttggcagtgaagcgtgcctatcacaaccgttacaagagatctttgggagaagatgtggctactaataccactggtgatattcgccagctgttggttgggttggtgacagcatataggtatgatggtgatgaggtcaatgcaaaattggccaaaactgaagctgatattcttcatgaatctatcaaggagaaaaagggcaaccatgaagaagccatcaggatc

SEQ ID NO: 112873 - DNA, 261 bp, Glycine max
tcttcacttttaagttaaatagtttttcattgtttcatttaatctacaatggctgcttcaacaatggctctctcttcatcatcattggctggccaagctatcaagcttgccccctccacccctcagcttggtgttggaagggttagcatgaggaaaacagcctccaagactgtttcttctggaagcccatggtacggcccagaccgtgtcaagtacttgggcccattctctggtgagcccccatcctacctcactggtgaa

SEQ ID NO: 112874 - DNA, 256 bp, Glycine max
tagaaacagtgtgatgtaaatgaaggtccttgttttcttcgttgctacaattttggtagcatggcaatgccatgcgtacgatatgttccctctccgaatgaacactggctatggtgcgcgtactccggaggtgaaatgcgcaagttggaggcttgctgcggaagcacacatcatctttggctttgagaccattcctgaagagtgcgttgaagctacaaagtgctacatccatggcgaacaatatagatcagactcc

SEQ ID NO: 112875 - DNA, 266 bp, Glycine max
attctctccattgtctttgaacacccatcaccatggccaagcttgttctttccctttgtttccttcttttcagtggctgcttcgctctgagagagcaggcacagcaaaatgagtgccagatccaaaagctgaatgccctcaaaccggataaccgtatagagtcggaaggtgggttcattgagacctggaaccctaacaacaagccattccagtgtgccggtgttgccctctctcgctgcacccttaaccgcaatgcccttcgtaga

SEQ ID NO: 112876 - DNA, 265 bp, Glycine max
cggctcgaggttcaatatcctagtacaccgtattaaagaatttaagatatactatgatgagaacgcggttcccattactgttgctgggagttgttttcctggcatcagtttctgtctcatttggcattgcgtattgggaaaagcagaaccccagtcacaacaagtgcctccgaagttgcaatagcgagaaagactcctacaggaaccaagcatgccacgctcgttgcaacctccttaaggtggaggaagaagaagaatgcgaaga

SEQ ID NO: 112877 - DNA, 263 bp, Glycine max
cctcgagccgattcggctcgagaacttagttcattctctttgcgacgttccctacctctcacttcaagatgcagatcttcgccaagaccctcaccggaaagaccatcacccttgaggtggaaagctctgacaccatcgacaacgtcaaggccaagatccccgacaaggaaggaattcccccggatcagcaacgtctcatcttcgccggaaagcagctcgaggacggacgtaacctcgcggactacaacatccagaaggagtca

SEQ ID NO: 112878 - DNA, 265 bp, Glycine max
cgaggtacaggttgaactaagttacctatactattctggatacaatggaactaatcaaaaagatccacagaattctggggcctatatcttccgtccaaatggcacacatcccataaaccatgaaaaaaaggttccattgactgttttgcatggacctgtgctagatgaagtgcaccaacaaatcaatccatggatatatcagattaccagactatacaaaggaaaggagcatgttgaagtggagtttattgttggccctatacca

SEQ ID NO: 112879 - DNA, 218 bp, Glycine max
caagcttttgcttgtgccagctctacgtataggcaggggaattgttgcggtccaaggatatggcaccaatgatgctcctgccctacatgaggcagatattggtctttctatgggcatctcggaactgaagttgcaaaaggaagctcagatattatagatctagacgaacactttgcatcagtagtacagggtgtacggctggggcgctctgtatatgc

SEQ ID NO: 112880 - DNA, 258 bp, Glycine max
gagccaggaaccaaagaatatggtgaacttaccagtaatcatcaaaaggcttatttgagaacaattacaggaaagactgaggcccttgtggacctaacagtgatagagatattgtcaaggcatgcttctgatgaggtctaccttggacagagggacaatccaaattggaccgttttggagggagagatagaacaaaggggaatttcaatggcgtcaagggtttctctgaaggcgaaggggaagagttcacagggatcg

SEQ ID NO: 112881 - DNA, 252 bp, Glycine max
cacctgagcagattgaagctgatattcagcgtccaaagtattttagccctagcgaagtgttgagtatggcatcatagataaggttatatacaatgataggggcagtgaagatcgtggagttgtttctgaccttaaaaaggcacggcttatttgacagttggaatttaaattgccattttcttggagttcaggtacatcttgagtcattattgtattaaacggttgttgcaacttcaaaattgatttaatgtt

SEQ ID NO: 112882 - DNA, 248 bp, Glycine max
cgcaaaaatggcacctgcaacactgtctctgtctctcctcctcctgttctcactcagcatcgccgtaaccgttagatcgagcgactacgactacgattgtgtgtaactgcatacgttagaaccggttcggtgttgaagggcggaacggactctaagatcgggctgaagctgtacgacaagtacggctactacatctacattaaaaacctcgaagcatggggcggcttgatgggcaagggctacgacta

SEQ ID NO: 112883 - DNA, 256 bp, Glycine max
gaagtgctttacaaagatcagcactacaccaagactcctgaagaagctgcagccatatccattctggcagggttggatttgaactgtggaagatttcttggccaatacacagaaggtgctgtcaagcaagggcttatagatgaagcatccattaacaatgctgtcgccaacaacttcgccacgttgatgcgtctaggattctttgatggtgatccaagaaagcaaccttatggaaaccttggtccaaaagatgtct

SEQ ID NO: 112884 - DNA, 260 bp, Glycine max
gaagaaaggaagaaaggtggagtgagtgaattcaaaaagatcacccaccatggggaggcctccttgctgtgacaaagttggcatcaagaaaggtccatggacacctgaggaggatatcatccttgtctcttacatccaagaacatggtccaggaaattggagatcagtgcctactaatactgggttatcaaggtgcagcaaaagttgcaggcttagatggacaaattacctcaggccaggaatcaagagagggaacttca

SEQ ID NO: 112885 - DNA, 119 bp, Glycine max
cgaagacataagaataagaacccttttctcttcggctataacaggttcgaaactctcttcaaaaaccaatatggtcgcattcgcgtcctccagaggttcaaccaacgctccaacaacat

SEQ ID NO: 112886 - DNA, 256 bp, Glycine max
gttttgtgccagagtataaagcaagtagctgcactaaaaagccaactgcagctgatgtcccatgcaatgtatagcagcattccttttcagggtatttcactagttactatgatattaagcgagccagatacagaagcactttggagaaaagagataaaggtcatggctaaacggattcaaactatgcgaactaccttgcggcattgtcttgagaacttgcattcatctttcaattgggagcacataactgatcagg

SEQ ID NO: 112887 - DNA, 132 bp, Glycine max
accgtatagagtcagaaggagggctcattgagacatggaaccctaacaacaagccattccagtgtaccggtgttgccctctctcgctgcaccctcaaccgcaacgccttcgtagaccttcctaaaccaatgg

SEQ ID NO: 112888 - DNA, 255 bp, Glycine max
  unsure (1)..(255): unsure at all n locations
cctacctctttttcttctctctcaacaacttcaccttcttcctcctcgatcatgtctcacttcaagggcaagtaccatgatgancttatcgccantgctgcgtacattggactcctggaaanggtattcttgctgctgntgagtcaacanggacaattggcaagcgtttggccagcatcagtgtagagaacatngantccaacaggcgagctcttaggganctgcttttcactgctcctggtgttcttcaatatc

SEQ ID NO: 112889 - DNA, 256 bp, Glycine max
ctcgagcgccacagtacccgttgttaagccaccagtcacaatccctcccattgttaatccaccagtcacaatccctcccattgttaatccaccagtgacagttccacccgttgtgcttccaccaatagtgaagcccccgggttttctccctccaattcttaacccaccaagtacaccaacaccgtcgccggggaagggagggaacactccatgtccaccaccaaagtctcctgcacaggctacatgccccattgac

SEQ ID NO: 112890 - DNA, 251 bp, Glycine max
caaccaacgctccccacaacttcagaatttccgagactaccgcattttggagttcaactccaaacccaacaccctccttctccccaaccatgctgacgctgattacctcacgttatccttaacgggactgccattctttccttggtgaacaacgacgacagagactcctacagacttcaatctggtgatgccctgagagtcccctcaggaaccacatactatgtggtcaaccctgacaacaacgagaatct

SEQ ID NO: 112891 - DNA, 255 bp, Glycine max
tggtaatgctgatatggctttgagactgtatgatcgtgcaaaagcagagaaatggcatgttgacacggtggtgttctcggggttgattaagatgcatgggatgtcagggactatgatggatgcttgaatgtttacaatgacttgaaggttcttggtgcaaagccgaacttggtaacgtataatgctctgttgtatgccatggggagagctaagagggccagggatgccaaggctatatatgaggagatgataaat

SEQ ID NO: 112892 - DNA, 252 bp, Glycine max
gccacagtgcaagggtaaagacaaacactgccaacgcccccgaggaagccaaagcaaaagcagaagaaatggcattgacgagaccatatgcaccatgagacttcgccaaacattggccagacttcatcacctgacatctacaaccctcaagccggtagcgtcacaaccgccaccagccttgacttcccagccctctcgtggctcagactcagtgctgagtttggatctctccgcaagaatgcaatgttcgtg

SEQ ID NO: 112893 - DNA, 255 bp, Glycine max
cggctcgagtccagaggttcaacaaacgctcccaacagcttcagaatctccgagactaccgcattttggagttcaactccaaacccaacacccttcttctcccccatcatctgacgctgattacctcatcgttatccttaacgctcctgccattcttaccttggtgaacaacgacgaccgagactcttacaaccttcaatctggcgatgccctaagagtccctgcaggaaccacatactaatgtggttaaccctg

SEQ ID NO: 112894 - DNA, 252 bp, Glycine max
ctcgagcgaaaattcttccaccaagttatgggtatacttgtgttgcttcttttctccatcttaggtctctcttctagttccagcatatcaactcatcgttccatattggacactgacttaactgaagtttaccacacagaaacaggtgtcttcactgttccaactatggaagagtgagcatggacgtgtctaccataaccacgaagaagaggcaaagagacttgagattttcaagaataacttgaactatat

SEQ ID NO: 112895 - DNA, 263 bp, Glycine max
  unsure (1)..(263): unsure at all n locations
agcacatccctacacagtggcatgccttgtggatgggtgcaattcagatcttagcaatngtagagattatccataggcgccataaggtgtgtgagctccattccangaccccagaggtcacaattggtggcttcaagcaaaggttctgccaacaatgtagcaggttccattcgctggagcaatttgatgaaagaaaaagaagctgcagaaaacgtttagatggacacaatagaaggagaaganagccccagccagaacctctc

SEQ ID NO: 112896 - DNA, 237 bp, Glycine max
gagactagagcggagatagcaatctcatctcattcatttcaatggcaactcaaggtcaagtcattacctgcaaagctgcggtggcctgggaacccaacaagcccttaactgtccacgacgttcaggtggctccgcctcaggccggcgaggtccgtgtccaaatcctcttcaccgctctctgccacaccgatgcttacacttggggcggcaaggatcccgagagtctcttcccctgta

SEQ ID NO: 112897 - DNA, 255 bp, Glycine max
catatacagaagatgctgtctggtgaaactgctgtaattgctgagacaggggattcctggtttaactgccaaaagctgaaattgccaaagggatgtgggtatgagttccaaatgcaatatggttcaattggatggtctgttggtgctactcttggttatgctcaggctgttcctgagaagcgagtgattgcctgcattggtgatggaagttttcaggtgactgcccaagatgtatcaacaatgttgcggtgtggg

SEQ ID NO: 112898 - DNA, 252 bp, Glycine max
tctcgagccgaatcggctcgagtggcaacagtgagaacaccatagcattttgattctagatagcagagcttttgtcaattttctattgaccttctcggtggaggaatttagtggacaaaactggagattggatcacacttatacaaaattctccaattagtaacttgttgagagttgctgcttggaagaaaggctgtttaatggtcaagattgtgatgtctgggaatgcagcagtcaaaaggagtgattggg

SEQ ID NO: 112899 - DNA, 254 bp, Glycine max
catcatcaaagaacaagtcaagcttctctacaagcgccacaagaacactgctttctcctggctcagaaacatcttccatgactgtgctgttcagagttgtgatgcttcactgttgctggactccacaagaaggagcttgtctgagaaggacacagatagaagctttgggttgagaaatttcaggtacattgagaccatcagagcagctttggaaagggaatgcacacgagttgttacctgtgctgatatcctcg

SEQ ID NO: 112900 - DNA, 253 bp, Glycine max
ttccgatttgaagcctggaatggtgtttgttgtccctcccggtcatccattcgtcaccatagcttccaataaagagaatctcctcatgatttgcttcgaggttaacgctcgagacaacaagaagtttacatttgcagggaaggacaacattgtgagttctctggacaacgttgctaaggagcttgcctttaactatccttctgagatggtgaacggagtattcgaccgaaaggagagtttctttttccctttt

SEQ ID NO: 112901 - DNA, 252 bp, Glycine max
ttttcatgacaacagtgaaagcgaatgtctcagtcgggtcgggtggagcgttgggattgggcaaccagtggaaagcctgcaccatcttggccagcaacaaatttatatgcaaaatccccagagtccacgctggacaaatcctcctccctacaccaaatggcatcatcctcacccctttggtccccgtcacgtcaacctcaaccccatccccactcataaacctctctggtctgaactcattcggatcctccc

SEQ ID NO: 112902 - DNA, 253 bp, Glycine max
cgctacctcaaatctgaatttctttgctattggtattaatgccgagaacaaccagaggaacttcctcgcaggttcgcaagacaatgtgataagccagatacctagtcgagtgcaggagcttgcattccctgggtctgcacaagctgttgagaagctattaaagaaccaaagagaatcctactttgtggatgctcagcctaagaagaaagaggaggggaataagggaagaaagggtcctttgtcttcaattttg

SEQ ID NO: 112903 - DNA, 256 bp, Glycine max
gcaaaaaactttggagtcactgagtttataaatccaaatgaacatgataaaccaatccagcaggtcataattgatcgcacagatggtggagttgattatagctttgagtgtattggaaatgtctccgtgatgagagctgcgttggaatgctgccacaagggctgggggacgtcagttattgtaggtgttgcagcatcagggcaggaaatatcaacccgtcctttccagttggtgagtggacgagtctggaaaggaa

SEQ ID NO: 112904 - DNA, 256 bp, Glycine max
cgcacgaatatcttgttgtttggagcgatccgagaaaaactctgtaaacatgttggtttaccaggacctccttacaggtgatgagcttctctctgactccttccgttacaggaaattgagaatggaatgctgtgggaagttgaggggaagtgggttgttaaaggagcagttgatgaatgaattggtgcaaacccttctgctgagggtggaggagaagatgagggagttgatgatgcagctgttaaggttgttgaca

SEQ ID NO: 112905 - DNA, 265 bp, Glycine max
cttaattattaacacttccttagttcaatatcggggaagccctacactctctctctttcttccctttgcttgctactcttgtcgagtgcatgctttgctattagctccagcaactcaacgagtgccaactcaacaacctcaacgcgttggaacccgaccaccgcgttgagtccgaaggtggtttgattcaaacatggaactctcaacaccctgagctgaaatgcgccggtgtcactgtttccaaactcaccctcaaccgcaatgg

SEQ ID NO: 112906 - DNA, 254 bp, Glycine max
cttgtgcaccttccttccttgttcaaaagggtcttcctagaaacactcaaggtgtggctgggttaggccatgcaccaatttctcttccaaaccaactcgcttcccacttgtgcctacaacgccaattcaccacttgcctttctcgctaccctacttcaaagggtgctataatattcggggatgcacctaactacatgcgacagtttcaaaaccaagatattttccacgatttggccttcatcccattaaccatc

SEQ ID NO: 112907 - DNA, 254 bp, Glycine max
atcatttcactcagccgctgcgaggcgaacagagagacccgaagccagatttcaagatgaagttcaacattgcgaatcccaccactggttgtcagaagaagctggagatcgatgatgacctgaagctacgagcattttgggacaagaggatctcacaagaggttgttggtgatgctctgggtgaggaattcaaaggctatgtcttcaaaattactggaggttgcgacaagcaaggatttccaatgaagcaagga

SEQ ID NO: 112908 - DNA, 248 bp, Glycine max
cattggtccttaaacactcatcagtcatcaccatggccaagctagttttttccctttgttttctgcttttcagtggctgctgcttcgctttcagttccagagagcagctcagcaaaacgagtgccatgtccaaaaactcaatgccctcaaaccggataaccgtatagagtcagaaggagggctcattgagacatggaaccctaacaacaagccattccagtgtgccggtgttgccctctctcgctgca

SEQ ID NO: 112909 - DNA, 242 bp, Glycine max
  unsure (1)..(242): unsure at all n locations
cttccatagccccccaaaaatgaagagcaccatcttctttgcgctctttctcttttgtgccttcaccacctcatacctaccttcagccatcgctgatttcgtgctcataatgaaggtaaccctcttgaaaatggtggcacatattcatatctatgtcatgacattaacatgcagtttggtgtgaatagagatgcagtccaccaacggggaaatgcaaagatagccctnctacnnactgtggt

SEQ ID NO: 112910 - DNA, 246 bp, Glycine max
gggcattgatacaagtggtgaattgcaacggtgagagagtgtttgatggagagctgcaagagggacgggtgctgatcgtgccacaaaactttgtggtggctgcaaatcacagagtgacaacttcgagtatgtgtcattcaagaccaatgatacacccatgatcggcactcttgcaggggcaaactcattgttgaacgcattaccagaggaagtgattcagcacactttcaacctaaaaagccagca

SEQ ID NO: 112911 - DNA, 253 bp, Glycine max
gcctcaaccttgcaacccaacacaaccaaaattcgctacttgttaagggctgcactataccagaatgtctcagggaagaggcagtgcatctttgcctattgtggtcatgtggtttcactactgtgccttttggaacgtgctaacgcagcaacttactccgttggaggacctgggggatggaccttcaacactaatgcttggcccaatggaaaaagattcagagctggtgatatcctaatcttcaactatgact

SEQ ID NO: 112912 - DNA, 244 bp, Glycine max
gagtaagcgtgcatggatgactgatgaagaatttgcaagagaaatgcttgctggtgtaaatccagacttgattcgttggcttaaggagttccatccaaggagcaagctcgatagccaagtctatggtgatcatactagtcagataagcacagagcacctagagcccaacttagaagggctcactgtagatgaggcaattcaggacaagagattgttgctactagatcatcgtgacccaatcatg

SEQ ID NO: 112913 - DNA, 212 bp, Glycine max
gcaaagaatgctattctcatgaacatgccaaatgctgttctttcaatgtggagatattttgttggagatctcgtctttgaagtttgcaagatgacttctccctacattacatgtacagtctctttcttcatagcatttggaaatttggctgatgacaccatcaattttgaggcctttccccacaagctgataatcaaaggagaaattcagga

SEQ ID NO: 112914 - DNA, 258 bp, Glycine max
gttttccttgtttcccctattattattcacgctctcacaaaatcatggcattctctagtgctttgattctgtggtcgttgctagcaatcaacatggccctgccaaccctcgcaaccgtctacaccgtgggagatacttcaggttgggcaattggtactgattatagcacttggactggcgacaagatcttttcagtgggtgatagtctcgcgttcaactatgggagctgggcacacagtggatgaagttaaagagagc

SEQ ID NO: 112915 - DNA, 255 bp, Glycine max
aacaaagtattattgcacagttattgatgcgcctggacatagggatttcattaagaatatgattactgggacatcccaagctgactgtgctgttcttatcattgattcgaccactggtggttttgaagctggtatttccaaggatggacagactcgtgaacatgctctgctttcattcacccttggtgtgaaacagatgatttgctgctgtaacaaaatggatgctactacacccaagtattccaaggccaggta

SEQ ID NO: 112916 - DNA, 251 bp, Glycine max
tcgagatatctagacacagtgtgatgaaaatgaaggtccttgttttcttcgttgctacaattctggtagcatggcaatgccatgcgtacgatatgttccctctccgatgaacactggctatggtgcccgtactccggaggtgaaatgcgcaagttggaagcttgctgtggaagcacacaacatctttggctttgagaccattcctgaagagtgcgttgaagcaacaaaggaatacatccatggcgaacaat

SEQ ID NO: 112917 - DNA, 252 bp, Glycine max
cacggtcaattggatataggagaatgacatgtgtcaatgctgcagacaatgttgtagagcttcaagccaaggtgacaaccaagtgtttctttgatgtagaagttgggggtgaacctgtgggcaggattgttttgggcctatttggagaggttgttcctaaaaccgttgaaaatttccgtgctttgtgcacaggtgagaaaggatatggttacaaaggaagctccttccatcgtataatcaaagatttcatga

SEQ ID NO: 112918 - DNA, 253 bp, Glycine max
aaagaaagaaggttgtcactgatctgactcgtgataattttcagagtggtgagtggaaggaacttgagttcaaggagtacaattatagtgctaaaggtcaacctcttgagggtggcagtcttcatccattgctgaaggtacgtgctcagctgaaacagattttcctctgcatgggatttgaggagatgccaacaaataattttgttgagagcagcttctggaactttgatgccttgttccagccccaacaaca

SEQ ID NO: 112919 - DNA, 251 bp, Glycine max; identical to SEQ ID NO: 104060

SEQ ID NO: 112920 - DNA, 224 bp, Glycine max
gaaggaatctgattccttcatcagttgtgtatgattaagttatgtatttggagtggctgaatgtacttgtatttgtcattaataaaccatgtttgtgtaaaaaaaaaaaaaaaaaaaaaaaaaaaaaaaaaaaaaaaaaaaaaaaaaaaaaaaaaaaaaaaaaaaggaggaccccacaccctaacaacaagccaccccaggatattgttcatggactctttcac

SEQ ID NO: 112921 - DNA, 254 bp, Glycine max
ttttattggtgaaaataaagttgctattgttggagttttcccgaaattttctggagaggagtttgacaacttttctgccttagcagagaagttgcgttctgattatgctttggtcacactctgaatgccaaactccttccaagaggagagtcatcagtttctgggcccgtagttaggctgttcaagccattcgatgaactttttgttgacttccaggatttcaatgtggaagctctagagaagtttgttgagga

SEQ ID NO: 112922 - DNA, 252 bp, Glycine max
ctcgagcgttctgatattagagggagcattaatgtgttgttgtgatgtggtttatatggggaaattaaataaatgatgtatgtacctcttgcctatgtaggtttgtgtgttttgtaatatagtctagctttggttattaagtagtagggacgttcgttcgtgtctcaaaaaaaaggggtactaccactctgtagtgtatatggatgctggaaatcaatgtgttttgtatttgttcacttccattgttgaatt

SEQ ID NO: 112923 - DNA, 263 bp, Glycine max
atacccccaactaacaataattccttcacttgcagaacttagttctctgttgcatcatcatcatcttcattagtgttagccctaaacttcaccttcaaccatgaccacagtgccaccacacagtgtccaagtgcacacaacaacacaccgctacgaagccggcgtcgtcccgccggctcgttttgaggcgccgcgttacgacgccggcatcaaggcgccctcttccatttaccattccgagagaggtccgacgacctctcagg

SEQ ID NO: 112924 - DNA, 229 bp, Glycine max
  unsure (1)..(229): unsure at all n locations
cactcatcagtcatcaccatggccaagctagttttttccctntgttttctgcttttcagtggctgctgcttcgctttcagttccagagagcagcctcagcaaaacgagtgccagatccaaaaactcaatgccctcaaaccggataaccgtatagagtcagaaggagggctcattgagacatggaaccctaacaacaagccattccagtgtgccggtgttgccctctctc

SEQ ID NO: 112925 - DNA, 230 bp, Glycine max
  unsure (1)..(230): unsure at all n locations
accgaatgagagcatcaaactcttcttcttcgatttccattgcgaacgnttactttttcttcttctttctcttcattttcttcgctcttcgatcttcgtccggggactgctccgaataccaccaccaccactcgccgatggccacgatcggaggcttatacgactcccaaggctctcaaaacagcgtcgaaaccgaagccctcgctcgattcgccgtagacgaacacaac

SEQ ID NO: 112926 - DNA, 229 bp, Glycine max
ctcgagcgaatcggctcaggttcaatatcctagtataccttaataaataatttaagatactatgatgagagcacggttcccattactgttgctgggacttgttttcctggcttcagtttctgtctcatttggcattgcttactgggaaaaagagaaccccaaacacaacaagtgtctccagagttgcaatagcgagagagactcgtacaggaaccaagcatgccacgct

SEQ ID NO: 112927 - DNA, 231 bp, Glycine max
atccgttaaacgtaaccatagatcagggctttttcatgaattacttcagatccgttaaacaactgccttgtttgttgattctattgccgtggattagggtttttattcacgagattgcttcagatccgtacttaagattacgtaatggattttgattctgatttatctgtgattgttgactcgacagatgcagatcttcgtcaagaccctcaccggcaagaccatcaccct

SEQ ID NO: 112928 - DNA, 228 bp, Glycine max
cggctcgagcttattaacactttccttagttcaatatggggaagcccttcttcactctctctctttcttccctttgcttgctactcttgtcgagtgcatgctttactattacctccagcaagatcaacgagtgccaactcaacaacctcaacgcgtaggaacccgaccaccgcgttgagtccgaaggtggtcttattgaaacatggaactctcaacaccctgagctgc

SEQ ID NO: 112929 - DNA, 234 bp, Glycine max
agggattgccactgatgatgattatccttacagagctaaagagggtagatgcaaaggcaataagatacaagacaaggttacaattgacggatatgaaactctaataatgtcagatgagagtacagaatcagagacagagcaagcgttcttaagcgccatccttgagcaaccaattagtgtctccattgatgcaaaagattttcatttatacaccgggggaatttatgatggaga

SEQ ID NO: 112930 - DNA, 228 bp, Glycine max
caatatcctagtataccttaataaataatttaagatactatgatgagagcacggttcccattactgttgctgggacttgttttcctggcttcagtttctgtctcatttggcattgcttactgggaaaaagagaaccccaaacacaacaagtgtctccagagttgcaatagcgagagagactcgtacaggaaccaagcatgccacgctcgttgcaacctccttaaggtg

SEQ ID NO: 112931 - DNA, 231 bp, Glycine max
atcaccatggccaagcttgttctttccctttgtttccttcttttcagtggctgcttcgctctgagagagcaggcacagcaaaatgagtgccagatccaaaagctgaatgccctcaaaccggataaccgtatagagtcggaaggtgggttcattgagacctggaaccctaacaacaagccattccagtgtgccggtgttgccctctctcgctgcacccttaaccgcaatgcc

SEQ ID NO: 112932 - DNA, 228 bp, Glycine max
ccctagtataccttaataaataatttaagatactatgatgagagcacggttcccattactgttgctgggacttgttttcctggcttcagtttctgtctcatttggcattgcttactgggaaaaagagaaccccaaacacaacaagtgtctccagagttgcaatagcgagagagactcgtacaggaaccaagcatgccacgctcgttgcaacctccttaaggtggagaa

SEQ ID NO: 112933 - DNA, 231 bp, Glycine max
ggtccttaaacactcatcagtcatcaccatggccaagctagttttttccctttgttttctgcttttcagtggctgctgcttcgctttcagttccagagagcagcctcagcaaaacgagtgccagatccaaaaactcaatgccctcaaaccggataaccgtatagagtcagaaggagggctcattgagacatggaaccctaacaacaagccattccagtgtgccggtgttgc

SEQ ID NO: 112934 - DNA, 240 bp, Glycine max
cggctcgagccttaaacactcatcagtcatcaccatggccaagctagttttttccctttgttttctgcttttcagtggctgctgcttcgctttcagttccagagagcagcctcagcaaaacgagtgccagatccaaaaactcaatgccctcaaaccggataaccgtatagagtcagaaggagggctcattgagacatggaaccctaacaacaagccattccagtgtgccggtgttgccct

SEQ ID NO: 112935 - DNA, 227 bp, Glycine max
caaggttcctgttggcgaccagccatcggatatcgaggctcaaattagaaccatgatcatgtcctatatcaaaactccgacctgtctcattctcgcggtgacgccggcgaattccgatttggcgaactcggatgctctccagatggctggaattgccgatcctgatgggaacagaacaattggtgtcatcacgaagttggatatcatggatagaggtactgatgccc

SEQ ID NO: 112936 - DNA, 229 bp, Glycine max
ctcatcaccatggccaagcttgttctttccctttgtttccttcttttcagtggctgcttcgctctgagagagcaggcacagcaaaatgagtgccagatccaaaagctgaatgacactcaaaccggataaccgtatagagtcggaaggtgggttcattgagacctggaaccctaacaacaagccattccagtgtgccggtgttgccctctctcgctgcacccttaaccgc

SEQ ID NO: 112937 - DNA, 231 bp, Glycine max
ggcgatgagaaccaaactttctttagctatctttttcttttttcttttagccttattttcaaacctagcctttggcaaatgtaaagaaaccgaggtagaagaagaagaccctgagctcgtaacatgcaaacaccaatgccaacagccacagcaatacactgagggtgacaagcgggtatgcttgcaaagatgtgacaggtatcatcgtatgaagcaagagcgagagaaaca

SEQ ID NO: 112938 - DNA, 229 bp, Glycine max
caccgcacgaatatcttgttgtttggagcgatccgagaaaaactctgtaaacatgttggtttaccaggacctccttacaggtgatgagcttctctctgactccttccgttacaaggaaattgagaatggaatgctgtgggaagttgaggggaagtgggttgttaaaggagcagttgatgtagacattggtgcaaacccttctgctgagggtggaggagaagatgaggga

SEQ ID NO: 112939 - DNA, 230 bp, Glycine max
ggcattgatgagaccatttgcacaatgagacttcgccaaaacattggtcagaattcatcacctgacatctacaaccctcaagctggtagcatcacaaccgccaccagccttgacttcccagccctctggcttctcaaactcagtgcccagtatggatcactccgcaagaatgctatgttcgtgccacactacaccctgaacgcgaacagcataatatacgcattgaatgg

SEQ ID NO: 112940 - DNA, 234 bp, Glycine max
tctccattgtctttgaacactcatcaccatggccaagcttgttctttccctttgtttccttcttttcagtggctgcttcgctctgagagagcaggcacagcaaaatgagtgccagatccaaaagctgaatgccctcaaaccggataaccgtatagagtcggaaggtgggttcattgagacctggaaccctaacaacaagccattccagtgtgccggtgttgccctctctcgctg

SEQ ID NO: 112941 - DNA, 228 bp, Glycine max
cgaagcagatttcaagatgaagttcaacattgcgaatcccaccactggttgtcagaagaagctggagatcgatgatgacctgaagctacgagcattttgggacaagaggatctcacaagaggttgttggtgatgctctgggtgaggaattcaaaggctatgtcttcaaaattactggaggttgcgacaagcaaggatttccaatgaagcaaggagtgttgacccctgg

SEQ ID NO: 112942 - DNA, 228 bp, Glycine max
tgtgatgataatgatgatgatgatgtgttccatgtggatgtgggttgtccttgtggccattgctggtgcccttttagtcctaagatctatcctcaagaatgtaaattggtggctctatgaatccaaattgggtgtgaagcagtactctttgccaccaggtgacatgggatggcccttcattggcaacatgtggtcctttctcagtgctttcaagtccaaggaccctga

SEQ ID NO: 112943 - DNA, 228 bp, Glycine max
gcccaaattaagcgggaagcaattaaggccttgaattttcttccccttctctatgtggaagaaatctgtaagatattatgcaaaaaataattaaggtgtttttctttaaatgggttggttgattggttcaatgaaccgatcaagaccacatgcaggttcatggggatgcgaggattaagacgctttgttttttaatcttccgatgtcactcttgtttgttagtttgtt

SEQ ID NO: 112944 - DNA, 224 bp, Glycine max
ctcgagcgattcggctgagaagcttttctttttcttgtagtttaattttctgattttagcaaattaaaatagtagtgttattggtaggtttatgcaaagatgttttcagttccaggggtgtcgggaattctgaacagaggaggagggcataagataaaagggacagtggtgttgatgaggaagaatgtgttggacttcaacagcgtggctgatcttactaaagg

SEQ ID NO: 112945 - DNA, 230 bp, Glycine max
aacaagttttatgaagccttctctaagaatctgaaacttggtattcatgaggattctcagaacaagacaaaacttgctgaattgctcaggtatcactccaccaagagtggtgatgagatgaccagcctcaaggactatgttaccaggatgaaggaagggcagaatgacatctactacattactggtgaaagcaagaaagctgttgagaattcccctttccttgaaaagct

SEQ ID NO: 112946 - DNA, 225 bp, Glycine max
tcggcgattcggctcacaaggttatcaatgacaggattggcattgttgagggtttgatgaccactgttcattccatcaccgctacccagaagactgttgatggaccatcagccaaggactggagaggtggaagagctgcttcatttaacatcattcctagcagcactggagctgccaaggctgttgggaaagtcctccctgctttgaatggaaaattgactggta

SEQ ID NO: 112947 - DNA, 227 bp, Glycine max
ccctaaatcatcaccatggccaaccaagcctagcggcactacacactagttctatcgctatctccccaagatgtcgagcgccgatcccgagcacagagaagaggaggaggcacccgccgtaggcgacgacgaggacaccggagctcacgtcgctccaatcgtcaagctcgaggaggttgctgtcaccaccggcgaggaggacgaagatgcaatcctggatctcaaat

SEQ ID NO: 112948 - DNA, 228 bp, Glycine max
gttattatcaaataattaatcaaattcctcgtggaatcttgttgaagccatgtctacagctggtcaggtcatcaagtgcagagctgcggtggcatgggaagcagggaagccactatcgatagaaaccatagaagtggcaccaccccagaaaggtgaagtgcgtttgaagattctcttcaactccctttgccgtacagatgtttactggtgggatgctaagggccagac

SEQ ID NO: 112949 - DNA, 230 bp, Glycine max
ctaacaataattccttcacttgcagaacttagttctctgttgcatcatcatcatcttcattagtgttagccctaaacttcaccttcaaccatgaccacagtgccaccacacagtgtccaagtgcacacaacaacacaccgctacgaagccggcgtcgtcccgccggctcgttttgaggcgccgcgttacgaagccggcatcaaggcgccctcttccatttaccattccga

SEQ ID NO: 112950 - DNA, 228 bp, Glycine max
cttaaacactcatcagtcatcaccatggccaagctagttttttccctttgttttctgcttttcagtggctgctgcttcgctttcagttccagagagcagcctcagcaaaacaggtgccagatccaaaaactcaatgcgctcaaaccggataaccgtatagagtcagaaggagggctcattgagacatggaaccctaacaacaagccattccagtgtgccggtgttgcc

SEQ ID NO: 112951 - DNA, 74 bp, Glycine max
caaaggcttagatgccctttgttaagtgtagaataacgggtatagtaactatgtacccttgtgtaatgagtcac

SEQ ID NO: 112952 - DNA, 229 bp, Glycine max
cggctcgagcgtattaaagaatttaagatatactatgatgagagcgcggttcccattactgttgctgggagttgttttcctggcatcagtttctgtctcatttggcattgcgtattgggaaaagcagaaccccagtcacaacaagtgcctccgaagttgcaatagcgagaaagactcctacaggaaccaagcatgccacgctcgttgcaacctccttaaggtggaggaa

SEQ ID NO: 112953 - DNA, 229 bp, Glycine max
ccttagttcatatggggaagcccttcactctctctctttcttccctttgcttgctactcttgtcgagtgcatgctttgctattagctccagcaagctcaacgagtgccaactcaacaacctcaacgcgttggaacccgaccaccgcgttgagtccgaaggtggtttgattcaaacatggaactctcaacaccctgagctgaaatgcgccggtgtcactgtttccaaact

SEQ ID NO: 112954 - DNA, 232 bp, Glycine max
taacactttccttagttcaatatggggaagcccttcttcactctctctctttcttccctttgcttgctactcttgtcgagtgcatgctttgctattacctccagcaagttcaacgagtgccaactcaacaacctcaacgcgttggaacccgaccaccgcgttgagtccgaagtggtcttatcgaaacatggaactctcaacaccctgagctgcaatgcgccggtgtcactgt

SEQ ID NO: 112955 - DNA, 226 bp, Glycine max
ggcttagagagccctttttgcatgtgctaccacacttttgtccttttgggctctagctagtgctggtagcagtaaataagaatgaataaaagaaacaaaggcttagatgccctttgttaagtgtagaataacgggtatagtaactatgtacccttgtgtaatgagtcactcaagtacctatgcgggaaaagcatacataacagaagaaattccaataataagaata

SEQ ID NO: 112956 - DNA, 228 bp, Glycine max
aaaattcttccaccaagttatgggtacacttgtgttgcttcttttctccctcttaggtctctcttcaagttccagcatatcaactcatcgttccatattggaccttgacctaaccaagtttaccacacagaaacaggtgtcttcactgttccaactatggaagagtgagcatggacgtgtctaccataaccacgaagaagaggcaaagagacttgagattttcaagaa

SEQ ID NO: 112957 - DNA, 227 bp, Glycine max
ctcgagccgtgctttttaattcatgggatgattggacttcaaatgttcttcccaataactctgttttctttggactaccagcatctcccgacgctgctccaagtggtggttatataccaccacaggtgctcatttctgaggtgcttccctatgtaaagcaagcttccaactatggaggagttatgctgtgggacaggtaccatgatgttttaaattatcacagcgat

SEQ ID NO: 112958 - DNA, 230 bp, Glycine max
tctctccattggtccttaaacactcatcagtcatcaccatggccaagctagttttttccctttgttttctgcttttcagtggctgctgcttcgctttcagttccagagagcagcctcagcaaaacgagtgccagatccaaaaactcaatgccctcaaaccggataaccgtatagagtcagaaggagggctcattgagacatggaaccctaacaacaagccattccagtgt

SEQ ID NO: 112959 - DNA, 226 bp, Glycine max
gttcaatatcctagtataccttaataaataatttaagatactatgatgagagcacggttcccattactgttgctgggacttgttttcctggcttcagtttctgtctcatttggcattgcttactgggaaaaagagaaccccaaacacaacaagtgtctccagagttgcaatagcgagagagactcgtacaggaaccaagcatgccacgctcgttgcaacctcctta

SEQ ID NO: 112960 - DNA, 227 bp, Glycine max
aagttattatcaaataattaattaaattcctcgtggaatcttgttgaagccatgtctacagctggtcaggtcatcaagtgcagagctgcggtggcatgggaagcagggaagccactatcgatagaaaccatagaagtggcaccaccccagaaaggtgaagtgcgtttgaagatcctcttcaactccctttgccgtacagatgtttactggtgggatgctaagggcca

SEQ ID NO: 112961 - DNA, 227 bp, Glycine max
aacttattaacactttccttagttcaatatggggaagcccttcttcactctctctctttcttccctttgcttgctactcttgtcgagtgcatgctttgctattacctccagcaagttcaacgagtgccaactcaacaacctcaacgcgttggaacccgaccaccgcgttgagtccgaaggtggtcttattgaaacatggaactctcaacaccctgagctgcaatgcg

SEQ ID NO: 112962 - DNA, 227 bp, Glycine max
cttctacctcgctaccatgatcattcctgagaagaaccgcaaggagatctgcaaatacctcttccaagagggagtttgctttgcgaagaaggacttcaatttggcgaagaccctgagattgacgtgccgaatctgcaggtgattaagctgatgcagagtttcaagtctcgcgagtatgtgagggagacttttgcttggatgcactattactggttcctcaccaacga

SEQ ID NO: 112963 - DNA, 229 bp, Glycine max
aaatgaccaagttcacaatcctcctcatctctcttctcttctgcatcgcccacacttgcagcgcctccaaatggcagcaccagcaagatagctgccgcaagcagctccagggggtgaacctcacgccctgcgagaagcacatcatggagaagatccaaggccgcggcgatgacgatgatgatgatgacgacgacaatcacattctcaggaccatgcggggaagaatcaa

SEQ ID NO: 112964 - DNA, 230 bp, Glycine max
gcattttcagaggaacaatggcgggtagggtttcgacgtgcttcttcttcgtgtttgctctttctctccttcttccttttcagatctccgctgaggaatcatcggagaaagagttcgtactcacattggatcactctaactttcacgacactgtcagcaagcacgatttcatcgttgtcgagttctacgctccatggtgtggccactgtaagaagcttgctcccgagtat

SEQ ID NO: 112965 - DNA, 229 bp, Glycine max
cccgggttgtcctagcacatttgaagagcctcaacaacctcaacaaagaggacaaagcagcagaccacaagaccgtcaccagaagatctctaacttcagagagggtgatttgatcgcagtgcctactggtgttgcatggtggatgtacaacaatgaagacactcctgttgttgccgtttctattattgacaccaacagcttggagaaccagctcgaccagatgcctagg

SEQ ID NO: 112966 - DNA, 232 bp, Glycine max
attctctctgtgtatttccctacctctcccttcaagatgcagatcttcgtcaagaccctcaccggcaagaccatcacccttgaggtggaaagctctgacaccatcgacaacgtcaaggccaagatccaggacaaggaaggaatccccccggaccagcaacgtctcattttcgccggaaagcaacttgaggacggccgtacccttgctgactacaacattcagaaggagagta

SEQ ID NO: 112967 - DNA, 227 bp, Glycine max
ataggattctacccgccgctcgatgggaattgcgcttcaaggcgtctcgtagggctaatccgcctcacgagggtcaccaacggcacgtgcctttggggggccgaggccccctactgctggtcggcaaacggacggcgggcgcacgcgtcgcttctagcccggattctgacttagaggcgttcagtcataatccaacgcacggtagcttcgccgcactggcttttcaa

SEQ ID NO: 112968 - DNA, 228 bp, Glycine max
ctctccattgtctttgaacactcatcaccatggccaagcttgttctttccctttgtttccttcttttcagtggctgcttcgctctgagagagcaggcacagcaaaatgagtgccagatccaaaagctgaatgccctcaaaccggataaccgtatagagtcggaaggtgggttcattgagacctggaaccctaacaacaagccattccagtgtgccggtgttgccctct

SEQ ID NO: 112969 - DNA, 229 bp, Glycine max
gcaggatagacatctgcaccctgaacagcaaatgctaattcatcaagggaaagttcttagggatgctactaccttggaggagaataaagtagccgaaaatactttcattgtaattatgctatcaaagagtaagagcacatctggtgaaggatctactacttcaactgcattatcaaccaaggctccacagacaagtacagttcccgcttcaacccctccagtgtcagta

SEQ ID NO: 112970 - DNA, 228 bp, Glycine max
ataacactcgccatacccgttaacaagcctggtagatttgagagtttcttcctatctagcactgaagctcaacaatcctacttgcaaggattcagcaggaacattttagaggcctcctacgataccaaattcgaggagataaacaaggttctgtttagtagagaggaagggcagcagcaaggggagcagaggctgcaagagagcgtgattgtggaaatctcgaaggaa

SEQ ID NO: 112971 - DNA, 227 bp, Glycine max
tcaattcaatctgcctcgatcatggagaggaaaacatttgggtttttgttcttgctcctccttgtcttagcttctgatgtgacggtgaagagagcagaggcgaaagattgcttgacaaggaggcacgggttccagggtagatgcttattcgacaggcaatgtgcacatgtgtgcaggagcgatggtttcatcggtggtcagtgccgaggccctcttcgcaaatgctt

SEQ ID NO: 112972 - DNA, 230 bp, Glycine max
atttaccaccattctagatatcagagaactttgcagctctcttaggtttttaaaaaacaccacgcaaacagcaagatggccacttccgacagtaacatgctattaaattatgttccagtttatgtgatgctcccactcggagttgtcaatgttgacaatgtttttgaagacccagatggccttaaagaacagctcttgcagcttcgagctgcgggtgttgacggggttat

SEQ ID NO: 112973 - DNA, 229 bp, Glycine max
cagaaacccgtccctcacactctcctaagccaatgaagagcactagcttgttcgctatctttctactttgcgccttcacctcatacctaccttccgccaccgcccaggacgtgctcgacgtggatggcgatccgattcggaacggtttcatatactacgttttgccggcaataagaggaaacggtggcggaatagaacgagccgcactcgggaaagacacttgccctat

SEQ ID NO: 112974 - DNA, 225 bp, Glycine max
ggaaccagatatagagtacccagagaccatgcaacaacaacaacagcagaaaagtcatggtggacgcaagcaggggcaacaccagcaggaggaagaggaagaaggtggcagcgtgctcagtggcttcagcaaacacttcttggcacaatccttcaacaccaacgaggacactgctgagaaacttcagtctccagacgacgaaaggaagcagatcgtgacagtgga

SEQ ID NO: 112975 - DNA, 220 bp, Glycine max
tcaatatcctagtacaccgtattaaagaatttaagatatactatgatgagagcgcggttcccattactgttgctgggagttgttttcctggcatcagtttctgtctcatatggcattgcggattgggacaagcagaagctcagtcacaagaagtgcctccgaagttgctatagcggagaagagtcatacagggaccatgaatgcgacgctcgtagcaact

SEQ ID NO: 112976 - DNA, 228 bp, Glycine max
cacttccttagttcaatatggggaagcccttcactctctctctttcttccctttgcttgctactcttgtcgagtgcatgctttgctattagctccagcaagctcaacgagtgccaactcaacaacctcaacgcgttggaacccgaccaccgcgttgagtccgaaggtggtttgattcaaacatggaactctcaacaccctgagctgaaatgcgccggtgtcactgttt

SEQ ID NO: 112977 - DNA, 230 bp, Glycine max
gcagcaacaaggggaggagaggctgcaagagagtgtgattgtggaaatctcaaagaaacaaattcgggaactgagcaaacatgccaaatctagttcaaggaaaaccatttcttctgaagataaacctttcaacttgagaagccgcgaccccatctattccaacaagcttggcaagttgtttgagattaccccagagaaaaaccctcagcttcgggacttggatgtcttcc

SEQ ID NO: 112978 - DNA, 229 bp, Glycine max
aacttattaacactttccttagttcaatatggggaagcccttcttcactctctctctttcttccctttgcttgctactcttgtcgagtgcatgctttgctattacctccagcaagttcaacgagtaccaactcaacaacctcaacgcgttggaacccgaccaccgcgttgagtccgaaggtggtcttattgaaacatggaactctcaacaccctgagctgcaatgcgcc

SEQ ID NO: 112979 - DNA, 231 bp, Glycine max
gtagtgttggtgggttgcaaagatgcttggcgggtcttctccataggggtcataagataaaagggacagtggtgttgatgcgcaagaatgtgttggacgtgaatagcgtaaccagcgttgggggaattattggtcaaggtctcgacttagttggctcaacactcgatactcttactgccttcttgggccgatccgtgtctctccagcttattagtgctaccaaagctgatg

SEQ ID NO: 112980 - DNA, 228 bp, Glycine max
tcaatatcctagtataccttaataaataatttaagatactatgatgagagcacggttcccattactgttgctgggacttgttttcctggcttcagtttctgtctcatttggcattgcttactgggataaagagaaccccaaacacaacaagtgtctccagagttgcaatagcgagatagactcgtacaggatccatgcatgccacgctcgttgcaacctccttaaggt

SEQ ID NO: 112981 - DNA, 224 bp, Glycine max
gttggcctaaaagaacaacaacaggagcagcaacaggaagagcaacctttggaagtgcggaaatatagagccgaattgtctgaacaagatatatttgtaatcccagcaggttatccagttgtggtcaacgctacctcaaatctgaatttctttgctattggtattaatgccgagaacaaccagaggaacttcctcgcaggttcgcaagacaatgtgataagcca

SEQ ID NO: 112982 - DNA, 227 bp, Glycine max
cattgtctttgaacactcatcaccatggccaagcttgttctttccctttgtttccttcttttcagtggctgcttcgctctgagagagcaggcacagcaaaatgagtgccagatccaaaagctgaatgccctcaaaccggataaccgtatagagtcggaaggtgggttcattgagacctggaaccctaacaacaagccattccagtgtgccggtgttgccctctctcg

SEQ ID NO: 112983 - DNA, 227 bp, Glycine max
atcaattcaaaggcgatagtgatactggtaattaatgaaggagatgcaaacattgaacttgttggcctaaaagaacaacaacaggagcagcaacaggaagagcaacctttggaagtgcggaaatatagagccgaattgtctgaacaagatatatttgtaatcccagcaggttatccagttgtggtcaacgctacctcaaatctgaatttctttgctattggtattaa

SEQ ID NO: 112984 - DNA, 225 bp, Glycine max
gttcaatatcctagtacaccgtattaaagaatttaagatatactatgatgagagcgcggttcccattactgttgctgggagttgttttcctggcatcagtttctgtctcattttgcattgcgtattgggaaaagcagaaccccagtcacaacaagtgcctccgaagttgcaatagcgagaaagactcctacaggaaccaagcatgccacgctcgttgcaacctcc

SEQ ID NO: 112985 - DNA, 225 bp, Glycine max
gtttgcgaataaatggcaactaagaggagcgtgggaacgttgaaggagggtgatttgaaggggaagagggtattcgtgagggtcgatctgaacgtgcctttggatgacaaccttaacatcaccgatgacactagagtccgtgctgctgttcccaccatcaagtacttgactggttatggtgctaaagtgatcctttctagccatttgggacgtccaaaaggtgta

SEQ ID NO: 112986 - DNA, 224 bp, Glycine max
cggctcgaggttcgtgccacactacaacctgaacgcgaacagcataatatacgcattgaatggacgggcattgatacaagtggtgaattgcaacggtgagagagtgtttgatggagagatgcaagagggacgggtgctgatcgtgccacaaaactttgtggtggctgcaagatcacagagtgacaacttcgagtatgtgtcattcaagaccaatgatacaccca

SEQ ID NO: 112987 - DNA, 224 bp, Glycine max
ctcgagctacctagtacaccgtattaaagaatttaagttatactatgatgagagcgcggttcccattactgttgctgggagttgttttcctggcatcagtatctgtttcatttggcattgcgtattgggaaaagcagaaccccagtcacaacaagtgcctccgaagttgcaatagcgagaaagactcctacaggaaccaagcatgccacgctcgttgcaacctc

SEQ ID NO: 112988 - DNA, 227 bp, Glycine max
caatatcctagtataccttaataaataatttaagatactatgatgagagcacggttcccattactgttgctgggacttgttttcctggcttcagtttctgtctcatttggcattgcttactgggaaaaagagaaccccaaacacaacaagtgtctccagagttgcaatagcgagagagactcgtacaggaaccaagcatgccacgctcgttgcaacctccttaaggt

SEQ ID NO: 112989 - DNA, 228 bp, Glycine max
gcagaaggaggaacacgaatggcatcgcaaggaggaaaaacacggaggaaagggaagtgaagaggaacaagatgaacgtgaacacccacgcccacaccaacctcatcaaaaggaagaggaaaagcacgaatggcaacacaagcaggaaaagcaccaaggaaaggaaagtgaagaagaagaagaagaccaagacgaggatgaggagcaagacaaagagagccaagaaag

SEQ ID NO: 112990 - DNA, 228 bp, Glycine max
aatatggggaagcccttcttcactctctctctttcttccctttgcttgctactcttgtcgagtgcatgccttgctattacctccagctagttcaacgagtgccaactcaacaacctcaacgcgttggaacccgaccaccgcgttgagtccgaaggcggtcttattgcaacatggaactctcaacaccctgagctgcaatgcgccggtgtcactgtttccaaacgcacc

SEQ ID NO: 112991 - DNA, 229 bp, Glycine max
taattattaacacttccttagttcaatatggggaaggccttcactctctctcattcttccctttgcttgctactcttgtcgagtgcatgctttgctattagctccagcaagctcaacgagtgccaactcaacaacctcaacgcgttggaacccgaccaccgcgttgagtccgaaggtggattgattcaaacatggaactctcaacaccctgagctgaaatgcgccggtg

SEQ ID NO: 112992 - DNA, 225 bp, Glycine max
gttcaatatcctagtacaccgtattaaagaatttaagatatactatgatgagagcgcggttcccattactgttgctgggagttgttttcctggcatcagtttctgtctcatttggcattgcgtattgggaaaagcagaaccccagtcacaacaagtgcctccgaagttgcaatagcgagaaagactcctacaggaaccaagcatgccacgctcgttgcaacctcc

SEQ ID NO: 112993 - DNA, 226 bp, Glycine max
tgcagaaactgtggttgtgagccctccgggtctacaagaagccataaatgaagaaactgctaaggacccccaaggtcgatgctttgtgcgaccatctggcactgaagatgttgttcgtgtgtatgctgaggcatccacacaggaagcagctgatacacttgccaactgtgtggctaagcttgtggatcaattattagggttcaatagctcgtgacatcacaacagc

SEQ ID NO: 112994 - DNA, 227 bp, Glycine max
aaaattcttccaccaagttatgggtacacttgtgttgcttcttttctccctcttaggtctctgctctagttccagcatatcgactcatcgttccatattggaccttgacctaacgaagtttaccacacagaaacaggtgtcgtcactgttccaactatggaagagtgagcatggacgtgtctaccataaccacgaagaagaggcatagagacttgagattttcaaga

SEQ ID NO: 112995 - DNA, 226 bp, Glycine max
  unsure (1)..(226): unsure at all n locations
cggtacgncacaaccgccaccagccttgacttcccagccctctcgtggctcagactcagtgctgagtttggatctctccgcaagaatgcaatgttcgtgccacactacaacctgaacgcgaacagcataatatacgcattgaatggacgggcattgatacaagtggtgaattgcaacggtgagagagtgtttgatggagagctgcaagagggacgggtgctgatcg

SEQ ID NO: 112996 - DNA, 228 bp, Glycine max
gtttgttgttcctcactgacctcaccatggcgaccagagccaagctttctttagctatcttccttttctttcttttagccttgatttcaaacctagccttgggcaaacttaaagaaaccgaggtcgaagaagatcccgagctcgtaacatgcaaacaccagtgccaacagcaacggcaatacactgagagtgacaagcgaacatgcttgcaacaatgtgacagtatga

SEQ ID NO: 112997 - DNA, 227 bp, Glycine max
gtaaaagagtatcgtccatcatttttctacaacgacagaacaaggtttagccgtccctttaccaatgccttctcgtgtctgtgttagtctttaactcatctgtcatgtcaattccattgtttttgaaaccttttcctcccccaccttgaaacaaagtatattttgtctcatgtagttttaagacaacttgattaggctgagtctgttgcgaaaattttcctgtatga

SEQ ID NO: 112998 - DNA, 134 bp, Glycine max
ctcgagcgattcggctcagaactcaataaggttgacgaagacggcaccccaaaagcctcgtctcttggtcgcgccctctactccacccccatccacatttgggacaaagaaaccggtagcgttgccagcttcgc

SEQ ID NO: 112999 - DNA, 245 bp, Glycine max
caactaaataagaaatgaagagtactatcttctttgctctctttctagtttgtgccttcaccatctcatacctgccttcagccaccgctcagttcgtgctcgacactgatgatgatcctcttcaaaacggtggcacatactatatgttgccagttatgagaggaaagggcggtggaatagaagtagattcaactggaaaagaaatatgccctctcactgttgtgcaatcacccaatgagctcgat

SEQ ID NO: 113000 - DNA, 246 bp, Glycine max
ctccattggtccttaaacactcatcagtcatcaccatggccaagctagtttttgccctttgttttctgcttttcagtggctgctgcttcgctttcagttccagagagcagcctcagcaaaacgagtgccagatccaaaaactcaatgccctcaaaccggataaccgtatagagtcagaaggagggctcattgagacatggaaccctaacaacaagccattccagtgtgccggtgttgccctctctc

SEQ ID NO: 113001 - DNA, 246 bp, Glycine max
gcgggaaaggcataggtacttgagtgactcattacacaagggtacatagttactatacccgtgattctacacttaacagaggggatctaagcctttgtttctatgatgcatactgattcacagcgccagccatgaggaagccacagcaagaagaagatgatgatgatgaggaagagcagccacagtgcgtggagacagacaaaggttgccaacgccaatgcaaaaggagcagaaatggcattgatg

SEQ ID NO: 113002 - DNA, 247 bp, Glycine max
gaagtttttaaattttgtgaggttcattatgaagaaaagggacaagcttagttgtcaagttggaatcaacccatactccatggaatggactggtttggccaatagattactgagtaagggcaacgatattctgtgttgcgattatgctagttttgatggtttgattaccaagcaagttatgagcaagatggcagacatgataaacagtctttgtggtggtgatgaaaaattgatgcgtgacaggaca

SEQ ID NO: 113003 - DNA, 248 bp, Glycine max; identical to SEQ ID NO: 111082

SEQ ID NO: 113004 - DNA, 247 bp, Glycine max
gatctagatgggtacacaatggacgaggcacttggtagtcgaaggttatttatgttagattaccatgatatcttcatgccatatgtgaggcagataaatcagctgaattctgccaagacttatgcgacaaggactatcctttttttgagagaagatggaactttaaagccagtggccatcgaattaagtttgccacattctgctggggatctgtcagctgccgtcagtcaagtcgtcttacctgcta

SEQ ID NO: 113005 - DNA, 245 bp, Glycine max
caatatcctagtataccttaataaataatttaagatactatgatgagagcacggttcccattactgttgctgggacttgttttcctggcttcagtttctgtctcatttggcattgcttactgggaaaaagagaaccccaaacacaacaagtgtctccagagttgcaatagcgagagagactcgtacaggaaccaagcatgccacgctcgttgcaacctccttaaggtggagaaagaagaatgtga

SEQ ID NO: 113006 - DNA, 250 bp, Glycine max
gattaatgaaggagatgcaaacattgaacttgttggcattaaagaacaacaacagaagcagaaacaggaagaggaacctttggaagtgcaaaggtacagagctgaattgtctgaagacgatgtatttgtaattccagcagcttatccatttgtcgtcaacgctacctcaaacctcaatttccttgcttttggtatcaatgctgagaacaaccagaggaacttccttgcaggcgagaaagacaatgtggta

SEQ ID NO: 113007 - DNA, 186 bp, Glycine max
attctctccattgtctttgaacactcatcaccatggccaagcttgttctttccctttgtttccttcttttcagtggctgcttcgctctgagagagcaggcacagcaaaatgagtgccagatccaaaagctgaatgccctcaaaccggataaccgtatagagtcggaaggtgggttcattgagacct

SEQ ID NO: 113008 - DNA, 159 bp, Glycine max
ctcgagcggtccttaaacactcatcagtcatcaccatggccaagctagttttttccctttgttttctgcttttcagtggctgctgcttcgctttcagttccagagagcagcctcagccaaacgagtgccagatccaaaaactcaatgccctcaaaccgg

SEQ ID NO: 113009 - DNA, 246 bp, Glycine max
ggctacttcaaagttgaaaacccagaatgtggttgtgcctctctccctaaccttaaccttggtactggtgctactgaccagcaaggcaaactcagcggaaactgtttctttcagctggaacaagttcgtgccgaagcaaccaaacatgatcctccaaggagacgctattgtgacctcctcgggaaagttacaactcaataaggttgacgaaaacggcaccccaaaaccctcgtctcttggtcgcgc

SEQ ID NO: 113010 - DNA, 243 bp, Glycine max
ctttgcggtggctgcaaaatcccagagcgataactttgagtatgtgtcattcaagaccaatgatagaccctcgatcggaaaccttgcaggggcaaactcattgttgaacgcattgccagaggaagtgattcagcacacttttaacctaaagagccagcaggccaggcaggtgaagaacaacaaccctttcagcttcctggttccacctcaggagtctcagaggagagctgtggcttagagagc

SEQ ID NO: 113011 - DNA, 244 bp, Glycine max
ctgtacctgagacaggaaaagacccaaacagtgggaagaatggttcatttctagaactgctgccagcggtaaggcagcgtataattgatggttttaatccaaaggcacttgacatatttacaagagagtttgatttctttgacaaagttacatccatctctggtgtactatttccactccctaaagaagaccgccgagctggtatccggagggagttggagaaaattgacatggctggtgagga

SEQ ID NO: 113012 - DNA, 244 bp, Glycine max
ctagtacgccgtattaaagaatttaagatatactatgatgagagcgcggttcccattactgttgctgggagttgttttcctggcatcagtttctgtctcatttggcattgcgtattgggaaaagcagaaccccagtcacaacaagtgcctccgaagttgcaatagcgagacagactcctacaggaaccaagcatgccacgctcgttgcaacctccttaaggtggaggaagaagaagaatgcgaa

SEQ ID NO: 113013 - DNA, 244 bp, Glycine max
gctaaaatctgagttagaaaaggcttcgcctgtattgggccgtagtgctacatacttgaaggaatcacgcatcaatgccttgccaaggtacttgactgttcagtttgtccgtttcttttggaagagggaatccaaccaaaaggctaagattttgcggaaagtagattatcccctggagttggatgtttatgatttttgttcagatgatcttcgtaaaaaattggatgctcctagacagatccta

SEQ ID NO: 113014 - DNA, 245 bp, Glycine max
cttcttcttcttctgctgtagtttctcattttgccaaactaaaatagttgtgttggtggctttggcaaagatgttttcagcaggccataagatcaaagggacagtggtgttgatgcccaagaatgagttggaagttaaccctgatggctcagcagttgacaaccttaatgctttcttgggccgtagtgtctcccttcagctcattagtgctaccaaggctgatgcacatggaaaaggaaaagttg

SEQ ID NO: 113015 - DNA, 248 bp, Glycine max
ctagggtttacagagaagctaagaggcgcacgtacgcaaaagctcgtggaattgctagcaatggcgaggatcaaggtttacgagctgaggcagaagacgaaggctgatctgctgaatcaactgaaggacctgaaggcggagcttgccttgcttcgtgttgctaaggtcaccggtggtgcccctaacaagctttccaagataaaggtggtgaggttgaacattgcccaggttttgacggtgatttctca

SEQ ID NO: 113016 - DNA, 251 bp, Glycine max
cttaataaataatttaagatactatgatgagagcacggttcccattactgttgctgggacttgttttcctggcttcagtttctgtctcatttggcattgcttactgggaaaaagagaaccccaaacacaacaagtgtctccagagttgcaatagcgagagagactcgtacaggaaccaagcatgccacgctcgttgcaacctccttaaggtggagaaagaagaatgtgaagacggtgaaattccacgacca

SEQ ID NO: 113017 - DNA, 252 bp, Glycine max
attgtctttgaacactcatcaccatggccaagcttgttctttccctttgtttccttcttttcagtggctgcttcgctctgagagagcaggcacagcaaaatgagtgccagatccaaaagctgaatgccctcaaaccggataaccgtatagagtcggaaggtgggttcattgagacctggaaccctaacaacaagccattccagtgtgccggtgttgccctctctcgctgcacccttaaccgcaatgcccttc

SEQ ID NO: 113018 - DNA, 252 bp, Glycine max
caaggatctcgaagacccaccaacgcacgaaagccgggatctttcagaaaatggattcctattcgaagggtgcataaccgcatggataagctcacactaacccgtcaatttgggatccaattcggttccttaggaggtatcgggaaggaattttggaatgtaataatatcgattcatacagatacagaagaaagggttctctattgattcaaacgctctacctacgagatagggatagagaaagaggaaaaa

SEQ ID NO: 113019 - DNA, 158 bp, Glycine max
ctctccatttgtccttgaatataatactcagcatggctaagcttgttctttccctttgttttctgcttttcagtggctgctgcttcgctttcagtttcagagagcagccacagcaaaacgagtgccagatccaacgcctcaatgccctcaaaccggat

SEQ ID NO: 113020 - DNA, 244 bp, Glycine max
gttgtggatatgaacgagggagctctttttctgccacacttcaattcaaaggccatagtggtactagtgattaatgaaggagaagcaaacattgaacttgttggcattaaagaacaacaacagaggcagcaacaggaagagcaacctttggaagtgcggaaatatagagctgaattgtctgaacaagatatatttgtaatcccagcaggttatccagttatggtcaacgctacctcagatctga

SEQ ID NO: 113021 - DNA, 241 bp, Glycine max
gtgcccaatatgttgtcctctacaggaatggaatttactctccacattggaacttgaacgcgaacagtgtgatctatgtgactcgagggacaggaagagttagagtggtgaactgccaagggaatgcagtgttcgacggtgagctaaggaggggacaattgctagtggtgccgcagaactttgtggtggctgagcaagggggagaacaaggattggaatacgtatgttcaagacacaccac

SEQ ID NO: 113022 - DNA, 271 bp, Glycine max
cacgcgagtacgtcggaattcggtcgagctcgagcgatcaccatggccaagcttgttctttccctttgtttccttcttttcagtgcgctgcttcgctctgagagagcaggcacagcaaaatgagtgccagatccaaaagctgaatgccctcaaaccggataaccgtatagagtcggaaggtgggttcattgagacctggaaccctaacaacaagccattccagtgtgccggtgttgccctctctcgctgcacccttaaccgcaatgccctt

SEQ ID NO: 113023 - DNA, 244 bp, Glycine max
gaacactcatcaccatggccaagcttgttctttccctttgtttccttcttttcagtggctgcttcgctctgagagagcaggcacagcaaaatgagtgccagatccaaaagctgaatgccctcaaaccggataaccgtatagagtcggaaggtgggttcattgagacctggaaccctaacaacaagccattccagtgtgccggtgttgccctctctcgctgcacccttaaccgcaatgcccttcg

SEQ ID NO: 113024 - DNA, 239 bp, Glycine max
gtacaccgtattaaagaatttaagatatactatgatgagagcgcggttcccattactgttgctgggagttgttttcctggcatcagtttctgtctcatttggcattgcgtattgggaaaagcagaaccccagtcacaacaagtgcctccgaagttgcaatagcgagaaagactcctacaggaaccaagcatgccacgctcgttgcaacctccttaaggtggaggaagaagaagaatgcg

SEQ ID NO: 113025 - DNA, 243 bp, Glycine max
caagaatggaatttactctccacattggaatctgaatgcaaacagtgtgatctatgtgactcgaggacaaggaaaggttagagttgtgaactgccaagggaatgcagtgttcgacggtgagcttaggaggggacaattgctggtggtaccacagaacttcgtggtggcggacaagccggagaacaaggattcgaatacatagtattcaagacacaccacaacgcagtcactagctacttgaag

SEQ ID NO: 113026 - DNA, 246 bp, Glycine max
gccgagaacaaccagaggaacttcctcgcaggttcgcaagacaatgtgataagccagatacctagtcaagtgcaggagcttgcattccctgggtctgcacaagctgttgagaagctattaaagaaccaaagagaatcctactttgtggatgctcagcctaagaagaaagaggaggggaataagggaagaaagggtcctttgtcttcaattttgagggctttttactgaataagtatgtactaaaat

SEQ ID NO: 113027 - DNA, 248 bp, Glycine max
gagaaactacagaaaggtatgcagttgtgacaggtgcaaataaaggaattggattagagatagttagacaattagcttcagctggaatcaaggtggtgctcactgcaagaaatgaagagaggggtatccaagcactgcaaacactcaaggactcaggtctatctcaccttgtactgtttcatcaagttgatgtggctgatgcaacaagtgtagcttctctggcagattttatcaaatctaaatttgga

SEQ ID NO: 113028 - DNA, 252 bp, Glycine max
gtaaagagaacaacagtgacagcaacaaccgcaaccgcatgaacgtgatgagtattaatgtgttgttatgaacttatgatgttggtttatgtggggacatcaatgatgtatgtacctcttcttgcctatgtagtaggtttcggtgtttcgttgtctagctttgcttatttagtaattagtagaagggacgttcgttcgtgtctcataaaaaggggtactaccactctggcaatgtgatttgtcatttgatga

SEQ ID NO: 113029 - DNA, 246 bp, Glycine max
gtggtgttagatctgtacctgcctagccattgatttggaaaagtccaagcttcaaagatgagtaagcttcagagtgatgctcttagagaagctatctcaggaatcatgactgattccaaggaaaagaacaggaaatttgtggagaccattgaactccaaattgggctgaaaaactatgatccccagaaggacaagcgttttagtggctctgttaagttgcctcacattcctcgccccaagatgaag

SEQ ID NO: 113030 - DNA, 242 bp, Glycine max
gttcagtcataatccaacgcacggtagcttcgcgccactggcttttcaaccaagcgcgatgaccaattgtgcgaatcaacggttcctctcgtactaggttgaattactattgcgacactgtcatcagtagggtaaaactaacctgtctcacgacggtctaatcccagctcacgttccctattggtgggtgaacaatccaacacttggtgaattctgcttcacaatgataggaagagccgaca

SEQ ID NO: 113031 - DNA, 268 bp, Glycine max
cacgcgtagtacgtcggcattcggctcacctcgagcgaatcggctcagatggccaagcttgttctttcactttgtttccttcttaccagtggctgcttcgctcagagagagcaggcacagcaaaatgagtgccagatccaaaagctgaatgccctcaaaccggataaccgtatagagtcggaaggtgggttcattgagacctggaaccctaacaacaagccattccagtgtgccggtgttgccctctctcgctgcacccttaaccgca

SEQ ID NO: 113032 - DNA, 242 bp, Glycine max
tgataaggtcatgttgttgggtcacagcgattcttacacccaggacaaggacatgcaagtcactattgctttcaaccactttggtgaaggccttgttcaaaggatgccaaggtgtaggcttgggtatttccatgtggtgaacaatgattatactcactgggaaatgtatgccattggtggaagtgccaatccaaccatcaactgccaaggcaacagatttgttgcacccgatgacagattca

SEQ ID NO: 113033 - DNA, 246 bp, Glycine max
accttaataaataatttaagatactatgatgagagcacggttcccattactgttgctgggacttgttttcctggcttcagtttctgtctcatttggcattgcttactgggaaaaagagaaccccaaacacaacaagtgtctccagagttgcaatagcgagagagactcgtacaggaaccaagcatgccacgctcgttgcaacctccttaaggtggagaaagaagaatgtgaagaaggtgaaattcc

SEQ ID NO: 113034 - DNA, 245 bp, Glycine max
ctctattgggaaaatggaaggaatctgaatatggaggtggtcagtctgttcctgttggtggcattgcatactatatcactgcaccatccagcttagctgatatggcagccaatcctttccatgctctgttctatcttgtgtttatgctttcagcctgtgccttgttctctaaaacatggattgaagtctctggttcatctgctaaagatgttgccaagcagcttaaggaacaacaaatggtaatg

SEQ ID NO: 113035 - DNA, 250 bp, Glycine max
ataaaattcttccaccaagttatcgatacccttgtgttgcttcttttctccctcttaggtctctcttctagttccagcagctcaactcatcgttccatattggaccttgacctaaccaagtttaccacacagaaacaggtgtcttcactgttccaactatggaagagtgagcatggacgtgtctaccataaccacgaagaagaggcaaagagacttgagattttcaagaataacttgaactatatcaggg

SEQ ID NO: 113036 - DNA, 252 bp, Glycine max
gtccatccaaatcttaaaaatattcagtgcagatcaacctcaatggcatctcttggcgtgcgaccagttcttccccctccattaacttccatctccgacccacctcctcttttcgatggcaccaccaggttgtacatcagttattcttgcccctatgcacaacgtgtgtggatcgctaggaactacaaggggctacaagataagatcaatttggtccctattaaccttcaagacaggccagcttggtatacg

SEQ ID NO: 113037 - DNA, 93 bp, Glycine max
gttcgtttttctcaaataatgtgaaggtagaaaatggaaccatgcctcctctcttgcatgtgatttaaaatattagcagatggttttttcttt

SEQ ID NO: 113038 - DNA, 238 bp, Glycine max
ggcggggctaccgctgagtttaagcatatcaataagcggaggaacagaaactaacaaggattcccttagtaacggcagcgacgaagatcacattctcatcaggaccatgccgggaagaatcaactacatcaggaagaaggaaggaaaagaagaagaagaagaaggacacatgcagaagtgctgcagcgaaatgagcgagctgaaaagccccatatgccagtgcaaagcgctacagaag

SEQ ID NO: 113039 - DNA, 239 bp, Glycine max
taaacactcatcagtcatcaccatggccaagctagttttttccctttgttttctgcttttcagtggctgctgcttcgctttcagttccagagagcagcctcagcaaaacgagtgccagatccaaaaactcaatgccctcaaaccggataaccgtatagagtcagaaggagggctcattgagacatggaaccctaacaacaagccattccagtgtgccggtgttgccctctctcgctgca

SEQ ID NO: 113040 - DNA, 241 bp, Glycine max
gaagcccttcttcactctctctctttcttccctttgcttgctactcttgtcgagtgcatgctttgctattacctccagcaagttcaacgagtgccaactcaacaacctcaacgcgttggaacccgaccaccgcgttgagtccgaaggtggtcttattgaaacatggaactctcaacaccctgagctgcaatgcgccggtgtcactgtttccaaacgcaccctcaaccgcaacggcctccac

SEQ ID NO: 113041 - DNA, 242 bp, Glycine max
cggaccttgacctaaccaagtttaccacacagaaacaggtgtcttcactgttccaactatggaagagtgagcatggacgtgtctaccataaccacgaagaagaggcaaagagacttgagattttcaagaataacttgaactatatcagggacatgaatgcaaacagctaatcaccccattctcatcgtttaggattgaacaagtttgctgacatcactcctcaagagttcagcaaaaagtac

SEQ ID NO: 113042 - DNA, 243 bp, Glycine max
taaacactcatcagtcatcaccatggccaagctagttttttccctttgttttctgcttttcagtggctgctgcttcgctttcagttccagagagcagcctcaggaaaacgagtgccagatccaaaaactcaatgccctcaaaccggataaccgtatagagtcagacggagggctcattgagacatggaatcctaacaacaagccattccagtgtgccggtgttgccctctctcgctgcaccct

SEQ ID NO: 113043 - DNA, 244 bp, Glycine max
ctcacccttgaggtggaaagctctgacaccatcgacaacgtcaaggccaagatccaggacaaggaaggaatccccccggaccagcaacgtctcattttcgccggaaagcaacttgaggacggccgtacccttgctgactacaacattcagaaggagagtactcttcacctcgtcctccgtctccgtggtggcatgcagatcttcgttaagacactcaccggcaagaccataaccctagaggttg

SEQ ID NO: 113044 - DNA, 244 bp, Glycine max
ctcacatgcaacgaagatagcactggtgatggatggtagagggcatcttcaaatatcatgtccacacatgtcatcaaggtcagactcaaagcatgataagagtagcccctcataccatagaatcagtgcggacttgaagcctggaatggtgtttgttgtccctcctggtcatcccttcgtcactatagcttccaataaagagaatctcctcataatttgcttcgaggttaacgttcgagacaac

SEQ ID NO: 113045 - DNA, 247 bp, Glycine max
ccaagccccactcaaccaccagaccactctctctgctcttcttctacctttcaactttgtaaagtattaagatggctgagacattcctatttacctcagagtcagtgaatgagggacaccctgacaagctctgcgaccaaatctccgatgctgtcctcgacgcttgcctctgaacaggtaccagacagcaaggttgcctgcgaaacatgcaccaagaccaacttggtcatggtcttcggagagatca

SEQ ID NO: 113046 - DNA, 223 bp, Glycine max
  unsure (1)..(223): unsure at all n locations
caagcttttctttctctagttctttaattttctgatgttagcaaattaaaatagtagtgttatgcggtaagtgatgacaaagatgttgtcagttccacgggtctcactactcctnaatatangatcatgacattacagaagatgattagtagtctagctgagagtcaatgatctgaacgtcaacaacgtcgctgatctaactatacgacctgttagaggactc

SEQ ID NO: 113047 - DNA, 238 bp, Glycine max
cccagcttcgggacttggatatcttcctcagtattgtggatatgaacgagggagctcttcttctaccacactgcaattcaaaggcgatagtgatactggtaattaatgaaggagatgcaaacattgaacttgttggcctaaaagaacaacaacaggagcagcaacaggaagagcaacctttggaagtgcggaaatatagagccgaattgtctgaacaagatatatttgtaatcccagc

SEQ ID NO: 113048 - DNA, 236 bp, Glycine max
gttcaatatcctagtataccttaataaataatttaagatactatgatgagagcacggttcccattactgttgctggtacttgttttcctggcttcagtttctgtctcatttggcattgcttactgggaaaaagagaaccccaaacacaacaagtgtctccagagttgcaatagcgagagagactcgtacaggaaccaagcatgccacgctcgttgcaacctccttaaggtggagaa

SEQ ID NO: 113049 - DNA, 223 bp, Glycine max
  unsure (1)..(223): unsure at all n locations
cttaattattaacacttccttagttcaatatcggcaagcccttcactctctctctttcttccctttgcttgctactcctgtcgagtgcatgctttgctattagctccagcaagctcaacgagcgnnaacccaacaacctcaacgcgttggaacccgancaccgcgttgagtccgaagtggtttgattcaaacatggaactctcaacaccctgagctgaaatgc

SEQ ID NO: 113050 - DNA, 238 bp, Glycine max
gtacaacatggtggtgctaaaggtgtgtttggtgctacttttccttgtggggggtactactagtgccagcttgaggctgagtgagcttggcctgctcatgaaaagtgatcatcatcaacactcaaatgatgatgactcttcaaaaccatgctgtgatcaatgcgcatgcacaaagtcaaaccctcctcaatgccgctgttcagatatgaggctgaattcgtgccattcagcttgcaaa

SEQ ID NO: 113051 - DNA, 241 bp, Glycine max
tctctccattggtccttaaacactcatcagtcatcaccatggccaagctagttttttccctttgttttctgcttttcagtggctgctgcttcgctttcagttccagagagcagcctcagcaaaacgagtgccagatccaaaaactcaatgccctcaaaccggataaccgtatagagtcagaaggagggctcattgagacatggaaccctaacaacaagccattccagtgtgccggtgttgc

SEQ ID NO: 113052 - DNA, 240 bp, Glycine max
gcggttgctccaccacctaatcacttcccctgtaaatcacgtttagttcgcacaaggttttaaaaaatggctgatgctgaggacattcaacctcttgttgttgataatggaactggaatggtcaaggctggttttgcaggtgatgacgctcctagggccgtgttccccagtattattgggcgaccacgccataccggtgtaatggttgggatgggtcagaaggatgcttacgtgggtgat

SEQ ID NO: 113053 - DNA, 242 bp, Glycine max
ctcgagccgcagagtcaagtgtctgagcttaagtatgaaggaaattggggtcctttggtcaaccctgagtctcaacaaggctcaccccgtgttaaagtcgcataaatgacaagcatgatggtgtgaggatgaggccatcttatgaaataataacaaataaataaattttgtatgataataaaaagtatggcccatgtaccatcccagcgagcctatgtttatatctgagtggcgttgtacct

SEQ ID NO: 113054 - DNA, 248 bp, Glycine max
aaggaatacgagaatgagagcgaggaggagaaggaaaaatggcttccaaaagggtttgaggagagaaacagggagcaggggatgattgttaaagggtgggccccgcagctcctcatcctggcccacccggctgtgggtggcttcctctcgcattgcggctggaactcctccttggaggccgtcaccgccggggttcccatgatcacgtggccggtcatggcggatcagttttacaacgagaaactcat

SEQ ID NO: 113055 - DNA, 257 bp, Glycine max
attattacaaagtgctggaggttgaatatgatgcaaccgatgaaaatatcaaattaaattaccgaagactcgcgttgaaatggcatcctgacaagcacggaggtgatagtgctgttactgcaaaatttcaagagattattgaagcttacaatgtattaagtgatcctgccaagcgtttggactatgatttaactgggatatgtgagattgaaaaatatagcttgcaggaatatcttgccagatttaaaagcatgatt

SEQ ID NO: 113056 - DNA, 250 bp, Glycine max
tcccaattacccttcccaattttcaccaaaccctaatactcccacaccaatcttcgatcatggacgccgattcacaacctcaacaactcgaagagagaacagaggagcaagaactgaagtacctggaattcgtgcaattcgcgaccatacaggctctgatgcgctgcgccatcctctactcatacgccaaggagcgcgcgggtcctctgaagcccggtgtcgacaccgtggaggaggccgtgaagaccgt

SEQ ID NO: 113057 - DNA, 248 bp, Glycine max
ctagtataccttaataaataatttaagatactatgatgagagcacggttcccattactgttgctcggacttgttttcctggcttcagtttctgtctcatttggcattgcttactgggaaaaagagaaccccaaacacaacaagtgtctccagagttgcaatagcgagagagactcgtacaggaaccaagcatgccacgctcgttgcaacctccttaaggtggagaaagaagaatgtgaagaaggtgaa

SEQ ID NO: 113058 - DNA, 246 bp, Glycine max
ggctcgagcaatatcctagtataccttaataaataatttaagatactatgatgagagcacggttcccattactgttgctgggacttgttttcctggcttcagtctctgtctcatttggcattgcttactgggaaaaagataaccccaaacacaacaagtgtctccagagttgcaatagcgagagagactcgtacaggaaccaagcatgccacgctcgttgcaacctccttaaggtggagaaagaag

SEQ ID NO: 113059 - DNA, 108 bp, Glycine max
cttttatgtaagggagacaaataaaacatggaataaaaagctcgcagtggccagtaatttgcttttggcaaattttggtcatttttaaaaggagacaaataaaacagg

SEQ ID NO: 113060 - DNA, 251 bp, Glycine max
ctatcctagtacaccgtattaaagaatttaagacatactatgatgagagcgcggttcccattactgttgctgggagttgttttcctggcatcagtttctgtctcatttggcattgcgtattgggaaaagcagaaccccagtcacaacaagtgcctccgaagttgcaatagcgagaaagactcctacaggaaccaagcatgccacgctcgttgcaacctccttaaggtggaggaagaagaagaatgcgaaga

SEQ ID NO: 113061 - DNA, 249 bp, Glycine max
ggctacttcaaagttgaaaacccagaatgtggttgtatctctctccctaaccttaaccttggtactggtgctactgaccagcaaggcaaactcagcggaaactgtttctttcagctggaacaagttcgtgccgaagcaaccaaacatgatcctccaaggagacgctattgtgacctcctcgggaaagttacaactcaataaggttgacgaaaacggcaccccaaaaccctcgtctcttggtcgcgccct

SEQ ID NO: 113062 - DNA, 251 bp, Glycine max
catcaccatggccaagcttgttctttccctttgtttccttcttttcagtggctgcttcgctctgagagagcaggcacagcaaaatgagtgccagatccaaaagctgaatgccctcaaaccggataaccgtatagagtcggaaggtgggttcattgagacctggaaccctaacaacaagccattccagtgtgccggtgttgccctctctcgctgcacccttaaccgcaatgcccttcgtagaccttcctaca

SEQ ID NO: 113063 - DNA, 251 bp, Glycine max
cactttccttagttcaatatggggaagcccttcttcactctctctctttcttccctttgcttgctactcttgtcgagtgcatgctttgctattacctccagcaagttcaacgagtgccaactcaacaacctcaacgcgttggaacccgaccaccgcgttgagtccgaaggtggtcttattgaaacatggaactctcaacaccctgagctgcaatgcgccggtgtcactgtttccaaacgcaccctcaaccg

SEQ ID NO: 113064 - DNA, 252 bp, Glycine max
gtcatggtggacgcaagcaggggcaacaccagcaggaggaagaggaagaaggtggcagcgtgctcagtggcttcagcaaacacttcttggcacaatccttcaacaccaacgaggacatagctgagaaacttcagtctccagacgacgaaaggaagcagatcgtgacagtggaaggaggtctcagcgttatcagccccaagtggcaagaacaacaagatgaagatgaagatgaagacgaagatgatgaagatg

SEQ ID NO: 113065 - DNA, 255 bp, Glycine max
agacttcaatctggtgatgccctgagagtcccctcaggaaccacatactatgtggtcaaccctgacaacaacgaaaatctcagattaataacactcgccatacccgttaacaagcctggtagatttgagagtttcttcctatctagcactgaagctcaacaatcctacttgcaaggattcagcaggaacatttcagaggcctcctacgataccaaattcgaggagataaacaaggttctgtttagtagagaggaa

SEQ ID NO: 113066 - DNA, 250 bp, Glycine max
ctccattggtccttaaacactcatcagtcatctccatggccaagctagttttttccctttgttttctgcttttcagtggctgctgcttcgctttcagttccagagagcagcctcagcaaaacgagtgccagatccaaaaactcaatgccctcaaaccggataaccgtatagagtcagaaggagggctcattgagacatggaaccctaacaacaagccattccagtgtgccggtgttgccctctctcgctg

SEQ ID NO: 113067 - DNA, 252 bp, Glycine max
cggagattcagctgcgcctcaactcgatccgaaggctctccacgatcgcgcgcgcgctcggcgaggaccgcacgcggaaggagctgattccgttcctcagcgagaacaacgacgatgacgacgaagtgctcctcgcaatggccgaggaattaggtgtcttcattccctacgtcggaggcgttgagcacgccaacgtgcttcttcctcccttggagacgctctgcaccgttgaggaaaccagcgtcagagaca

SEQ ID NO: 113068 - DNA, 249 bp, Glycine max
acaagatctccatatctgttcccaaaagcttgtttgtaagaatggcttccggtgaacagaaattccctcctcaacaacaacaaacacagcctgggaaggagcatgctatgactccagtaccccaattcactagccctgactacaagccttcaaataaacttcaagggaagattgcattagtcactgggggtgattctgggattggacgagcggtgtgtaacttgtttgccttagaaggtgctaccgtgg

SEQ ID NO: 113069 - DNA, 247 bp, Glycine max
tctctccattgtctttgaacactcatcaccatggccaagcttgttctttccctttgtttccttcttttcagtggctgcttcgctctgagagagcaggcacagcaaaatgagtgccagatccaaaagctgaatgccctcaaaccggataaccgtatagagtcggaaggtgggttcattgagacctggaaccctaacaacaagccattccagtgtgccggtgttgccctctctcgctgcacccttaacc

SEQ ID NO: 113070 - DNA, 248 bp, Glycine max
cccaacaatcccaaaagcgcgtttcaattaccattgcgaactcaatagcaatagccaatgcgcagaacaaagagagagcgaggcttaagaaactcttcgaagaagcctacgagagatgccgcaatgctccaatggaaggtgtttccttcaccatcgaagacttcactgctgctcttgacaagtacgacttcgattctgaagttggcggcaagattaaaggcactgtgttctacacagataacaatgga

SEQ ID NO: 113071 - DNA, 246 bp, Glycine max
ctttggagtggtgctgtttgagttactctgcgctcgtccgcctctgatcagaactgcggagaagaaacaggtgtcgcttgctgattgggcgaggcactgctgccaaaatgggaccataggccagattgtggaccccactttaaaggggaggatggcgccagagtgtttgaggaaattctgcgaggttgcggtgagttgtttgttggacgacggaacgctgaggccgtcgatgaacgacgtcgtttg

SEQ ID NO: 113072 - DNA, 130 bp, Glycine max
caatatcctagtataccttaataaataatttaagatactatgatgagagcacggttcccattactgttgctgggacttgttttcctggcttcagtttctgtctcatttggcattgcttactgggcaaaag

SEQ ID NO: 113073 - DNA, 254 bp, Glycine max
aacaacctcaacaaagaggacaaagcagcagaccacaagaccgtcaccagaagatctataacttcagagagggtgatttgatcgcagtgcctactggtgttgcatggtggatgtacaacaatgaacacactcctgttgttgccgtttctattattgacaccaacagcttggagaaccagctcgaccagatgcctaggagattctatcttgctgggaaccaagagcaagagtttctaaaatatcagcaagagcaa

SEQ ID NO: 113074 - DNA, 254 bp, Glycine max
gcaatactagcgatactgataagagagataccaacaagaaaagaaaaaaagaagagttgagattccctttgaagaaaagatggcatcccataggcaaagctatgaagctggtcaaactaagggccgaactgaggaaaagacgaaccagacgatgggcaatattggagagaaggctcaagctgcaaaggagaagacccaggaaatggcccaagctgcaaaggagaagacccaacaaacagcccaagctgccaagg

SEQ ID NO: 113075 - DNA, 254 bp, Glycine max
caagctggtgcagtttggagagattcaggaaaaagttgtattgaaattttcacaagaggaatttcttacagcttggtcaactcaggtgcgtcctacaacaactctgttggctgatgggtgtccatatttgtatgctatcgtgcatgatagttcagtgtctacaataccaggtgattttgtcattggtgttaagttgacaaccataaacaatatctgtgcatatgggctcaatcctggtatttcaggttctcgtc

SEQ ID NO: 113076 - DNA, 131 bp, Glycine max
attcccacgcccacctcatcagaaggaagagcgaaagcaagaggaagatgaggatgaggagcagcagcgagagagcgaaacaagtgaagattctgagttacgaagacaaaagaataagaacccttttctct

SEQ ID NO: 113077 - DNA, 244 bp, Glycine max
attctctccattgtctttgaacactcatcaccatggccaagcttgttctttccctttgtttccttcttttcagtggctgcatcgctctgagagagcaggcacagcaaaatgagtgccagatccaaaagctgaatgccctcaaaccggataaccgtatagagtcggaaggtgggttcattgagacctggaaccctaacaacaagccattccagtgtgccggtgttgccctctctcgctgcaccct

SEQ ID NO: 113078 - DNA, 251 bp, Glycine max
gcggtagcttcgcgccactggcttttcaaccaagcgcgatgaccaattgtgcgaatcaacggttcctctcgtactaggttgaattactattgcgacactgtcatcagtagggtaaaactaacctgtctcacgacggtctaaacccagctcacgttccctattggtgggtgaacaatccaacacttggtgaattctgcttcacaatgataggaagagccgacatcgaaggatcaaaaagcaacgtcgctatg

SEQ ID NO: 113079 - DNA, 249 bp, Glycine max
aagaaagtcttccatagccccccaaacatgaagagcaccatcttctttgctctctttctcttttgtgccttcaccacctcatacctaccttcagccatcgctgatttcgtgctcgataatgaaggtaaccctcttgaaactggtggcacatattatatcttgtcagacataacagcatttggtggaataagagcagccccaacgggaaatgaaagatgccctctcactgtggtgcaatctcgcaatgag

SEQ ID NO: 113080 - DNA, 249 bp, Glycine max
cggctcgagtttgattcaaacatggaactctacacaccctgagctgaaatgcgccggtgtcactgtttccaaactcaccctcaaccgcaatggcctccacttgccatcttactcaccttatccccggatgatcatcatcgcccaagggaaaggagcacttggagttgcaattccaggatgtcctgagacgtttgaggagccacaagaacaatcaaacagaagaggctcaaggtcgcagaagcagcagct

SEQ ID NO: 113081 - DNA, 249 bp, Glycine max
ctcatcagtcatcaccatggccaagctagttttttccctttgttttctgcttttcagtggctgctgcttcgctttcagttccagagagcagcctcagcaaaacgagtgccagatccaaaaactcaatgccctcaaaccggataaccgtatagagtcagaaggagggctcattgagacatggaaccctaacaacaagccattccagtgtgccggtgttgccctctctcgctgcaccctcaaccgcaacgc

SEQ ID NO: 113082 - DNA, 244 bp, Glycine max
ctagttcaatatcctagtataccttaataaataatttaagatactatgatgagagcacggttcccattactgttgctgggacttgttttcctggcttcagtttctgtctcatttggcattgcttactgggaaaaagagaaccccaaacacaacaagtgtctccagagttgcaatagcgagagagactcgtacaggaaccaagcatgccacgctcgttgcaacctccttaaggtggagaaagaag

SEQ ID NO: 113083 - DNA, 248 bp, Glycine max
caggcactgtcataggtttgatcattgcaacccctcttcttgttatcttcagccccatccttgtccctgctgcgtttgtgctgttcctagttgcttctggctttttgttctctgggggctgtggtgtggctgccattgctgctttgtcttggatttacaactatgtgtctgggaaccagcctgcgggttatgacacccttgactatgcaaaagggtaccttgccgataaggcaagggatgtaaaggag

SEQ ID NO: 113084 - DNA, 250 bp, Glycine max
gaaatcgtgaaggaagtctcttcttacttgaagaaggttggttacaacccagacaagattccctttgttcccatctctggttttgagggtgacaacatgattgagaggtccaccaaccttgactggtacaagggaccaactctccttgaggctcttgaccaaatcaatgagcccaagaggccctccgacaagcctctaaggcttccattgcaggatgtctacaagattggtggtattggtactgtgccag

SEQ ID NO: 113085 - DNA, 250 bp, Glycine max
gatcgtgacagtggaaggaggtctcagcgttatcagccccaagtggcaagaacaacaagatgaagatgaagatgaagacgaagatgatgaagatgaacaaattccctctcaccctcctcgccgaccaagccatggaaagcgtgaacaagacgaggacgaggacgaagatgaagataaacctcgtcctagtcgaccaagccaaggaaagcgtgaacaagaccaggaccaggacgaggacgaagatgaagat

SEQ ID NO: 113086 - DNA, 246 bp, Glycine max
ccttattaacactttccttagttcaatatggggaagcccttcttcactctctctctttcttccctttgcttgctactcttgtcgagtgcatgctttgctattacctccagcaagttcaacgagtgccaactcaacaacctcaacgcgttggaacccgaccaccgcgttgagtccgaagtggtcttattgaaacatggaactctcaacaccctgagctgcaatgcgccggtgtcactgtttccaaac

SEQ ID NO: 113087 - DNA, 246 bp, Glycine max
ctttggctgaagaaaacatgagagccatctgctttgaagtatgtgatgttgtgctgcacgctgatgctatccacagaggaggtggtcaaatcattcctactgccaggagagtcttctatgcttcccagattactgccaaacccaggcttcttgagcctgtctacctggttgaaatacaggctcctgaacaagctcttggtggaatctacagtgttcttaaccagaagcgtggacacgtgttcgagg

SEQ ID NO: 113088 - DNA, 252 bp, Glycine max
gtatgaagcaagagcgagagagacaaatccaagaggaaactcgtgagaagaaagaggaggaaagccgtgaaagggaagaagaacaacaagagcagcatgaggaacaagatgaaaatccctacatatttgaggaagataaggattttgagaccagagtcgaaactgaaggtggcagaattcgggttctcaagaagttcactgaaaaatccaagcttcttcagggcattgagaattccgtttggccattttgga

SEQ ID NO: 113089 - DNA, 223 bp, Glycine max
tggtgacactgaccattattgttggcaacggccagaggacatgacaacttcacggcgagcatttaagatagacgagaataaccctggttcagatctggccggagagactgcagcagccatggcagctgcttccattctgttcaggaaaacaaacccacattactctcacttgcttctacatcatgccctgcagttgtttgagttcggggacaagtatagggga

SEQ ID NO: 113090 - DNA, 246 bp, Glycine max
gtcgcagcgatcgaagtttcacatcagccttatccagtttagggtttcggttccttaccctacctttgacgtatcgaaaccttaaatttgggattaggtctgagcaatctggttggtagaacctttggtcttagagagtcaagttttatgtctggattagacgatcaaattcctactgccttcgatccttttgctgatgcaaatgctgatgactcgggtgctgggtcaaaggagtatgtgcatatt

SEQ ID NO: 113091 - DNA, 246 bp, Glycine max
attgtctttgaacactcatcaccacggccaagcttgttctttccctttgtttccttcttttcagtggctgcttcgctctgagagagcaggcacagcaaaatgagtgccagatccaaaagctgaatgccctcaaaccggataaccgtatagagtcggaaggtgggttcattgagacctggaaccctaacaacaagccattccagtgtgccggtgttgccctctctcgctgcacccttaaccgcaatg

SEQ ID NO: 113092 - DNA, 246 bp, Glycine max
gtaagtatgaactaattcagactgtgaaactgcgaatggctcattaaatcagttatagtttgtttgatggtatctactactcggataaccgtagtaattctagagctaatacgtgcaacaaaccccgacttctggaagggatgcatttattagataaaaggtcaacacaggctctgcctgttgctttgatgattcatgataactcgtcggatcgcacggcctttgtgccggcgacgcatcattcaa

SEQ ID NO: 113093 - DNA, 248 bp, Glycine max
gccgagcagcgagagagagaaaccctagcaaaaatgccggctggtcacggtttgagatcccgcaccagagattccttctctcgtcccttcaggaagaagggtaccatcgccctcaccacatacctcagaacctaccacgtcggcgattatgtcgacgtcaaggttaacggcgccgtccacaagggaatgccacacaagttctaccatggccgcaccggtcgcgtctggaatgtcaccaaacgtgctgt

SEQ ID NO: 113094 - DNA, 248 bp, Glycine max
atcgagcgatattgagtggcttcaccctggaattcttggaacatgcattcagcgtggacatagcagatagcgaaaaacctacaaggagagaacgaaggggaagacaagggagccattgtgacagtgaaaggaggtctgagcgtgataaaaccacccacggacgagcagcaacaaagaccccaggaagaggaagaagaagaagaggatgagaagccacagtgcaagggtaaagacaaacactgccaacg

SEQ ID NO: 113095 - DNA, 242 bp, Glycine max
gttgccatcagtcttcttgacacctccaacttcaaaaatcagcttgatcaaaaccccagagtattttaccttgctgggaacccagatatagagcacccagagaccatgcaacaacagcagcagcagaagagtcatggtggacgcaagcaggggcaacaccagcagcaggaggaagaaggtggcagtgtgctcagtggcttcagcaaacatttcttagcacaatccttcaacaccaacgagga

SEQ ID NO: 113096 - DNA, 248 bp, Glycine max; identical to SEQ ID NO: 104577

SEQ ID NO: 113097 - DNA, 245 bp, Glycine max
agaggaattaccattgatattgctttgtggaagtttgaaaccaccaagtactactgcacggtcattgatgctcctggacatcgtgactttatcaagaacatgattactggtacctcccaggccgactgtgctgtccttattattgactccaccactggtggttttgaagctggtatttctaaggatggacagacccgtgagcatgctcttcttgctttcaccctaggtgtgaagcagatgatctg

SEQ ID NO: 113098 - DNA, 245 bp, Glycine max
atacccccgagaccaaagctgatatcaagttgcttcgttcccaagttcaaagtgaccttgaacaagggattgcaggtgctgtgcctatccctccagatgatgctgggaaacaggaagtcattgctgcacttgttgccaatgtggatgctatgattaaagctgatagaaagatcactgccttaaaagagttgcagggtcatatatggaaaactggctatgagaataatgaattggagggaatagtt

SEQ ID NO: 113099 - DNA, 130 bp, Glycine max
gacaattccttcacttgcagcactgttgcatcatcatcttcattgcaaaaccctaaacttcaccttcaaccatgaccacacaagtaccaccacacagtgtccaagtccacacaacaacacacacgtacga

SEQ ID NO: 113100 - DNA, 247 bp, Glycine max
actttccttagttcaatatggggaagcccttcttcactctctctctttcttccctttgcttgctactcttgtcgatcgcatgctttgctattacctccagcaagtccaacgagtgccaactcaacaacctcaacgcgttggaacccgaccaccgcgttgagtccgaaggtggtcttattgaaacatggaactctcaacaccctgagctgcaatgcgccggtgtcactgtttccaaacgcaccctcaa

SEQ ID NO: 113101 - DNA, 245 bp, Glycine max
gtgtcattcaagaccaatgatagaccctcgatcggaaaccttgcaggggcaaactcattgttgaacgcattgccagaggaagtgattcagcacacttttaacctaaagagccagcaggccaggcaggtgaagaacaataaccctttcagcttcctggttccacctcaggagtctcagaggagagctgtggcttagagagccctttttgcatgtgctaccacacttttgtccttttgggctctagc

SEQ ID NO: 113102 - DNA, 244 bp, Glycine max
accaagttcacaatcctcctcatctctcttcacttctgcatcgcccacacttgcagcgactccaaatggcagcaccagcaagatagctgccgcaagcagctccagggggtgaacctcacgccctgcgagaagcacatcatggagaagatccaaggccgcggcgatgacgatgatgatgatgacgacgacaatcacattctcaggaccatgcggggaagaatcaactacataaggaggaacgaag

SEQ ID NO: 113103 - DNA, 244 bp, Glycine max
ctttcttctgttcaggcccaaccgaggcttgtacgacaggtacacgaagaggagttacacgaaccagttcgacgctctgatggacgcggtgcactcggcgatgaatgctttggggtacggtgacgtggacatcgccgtcggcgaaacggggtggccctccgtttgcgacggttgggacgcgtgcagcgtggcgaacgcgcagtcctttaacagggaactggtgaagcacctggcgacggggaag

SEQ ID NO: 113104 - DNA, 248 bp, Glycine max
aaacagaacaggctcaaggtcgcagaagcagcagctacaggacagtcaccagaagattcgtcacttcaatgaaggagacgtactcgtgattcctcctggtgttccttactggacctataacactggcgatgaaccagttgttgccatcagtcttcttgacacctctaacttcaataaccagcttgatcaaacccctagggtattttaccttgctgggaacccagatatagagtacccagagaccatgc

SEQ ID NO: 113105 - DNA, 127 bp, Glycine max; identical to SEQ ID NO: 103522

SEQ ID NO: 113106 - DNA, 246 bp, Glycine max
ttgagagtttcttcctatctagcactgaagctcaacaatcctacttgcaaggattcagcaggaacattttagaggcctcctacgataccaaattcgaggagataaacaaggttctgtttagtagagaggaagggcagcagcaaggggagcagaggctgcaagagagcgtgattgtggaaatctcgaaggaacagattcgggcactgagcaaacgtgccaaatctagttcaaggaaaaccatttctt

SEQ ID NO: 113107 - DNA, 245 bp, Glycine max
tgctgcgtttgtgctgttcctggttgcttctggctttttgttctctgggggctgtggtgtggctgccattgctgctttatcttggatttacaactacgtttctgggaaccagcctgcgggttctgacacccttgactatgcaaaagggtaccttactgataaggcaagggatgtgaaggagagggcaaaggattatggaagttatgctcagggtagaattaatgaggccacacaaggaacttatt

SEQ ID NO: 113108 - DNA, 246 bp, Glycine max
taagaactaagatggattggatcggagcgtaccgcggaggccagagaagcagggactggtgcgacccttcatcaccattcactgatttgtgggaccctcgtcgtgtcggtgacgctgatgatatcacctcctctctcgcccatgctcacgttgactggcgtcgagactgataaagctcatatcttccgtgctgatcttccaggggtgaagaaagaggatctgaaggtgcaggtggaggagaataag

SEQ ID NO: 113109 - DNA, 247 bp, Glycine max
gtactatcttctttgctctctttctagtttgtgccttctccatctcatacctgccttcagccaccgctcagttcgtgctcgacactgatgatgatcctcttcaaaacggtggcacatactatatgttgccagttatgagaggaaagggcggtggaatagaagtagattcaactggaaaagaaatatgccctctcactgttgtgcaatcacccaatgagctcgataaggggattggactagtctttac

SEQ ID NO: 113110 - DNA, 251 bp, Glycine max
ctgagagtcccctcaggaaccacatactatgtggtcaaccctgacaacaacgaaaatctcagattaataacactcgccatacccgttaacaagcctggtagatttgagagtttcttcctatctagcactgaagctcaacaatcctacttgcaaggattcagcaggaacattttagaggcctcctacgataccaaattcgaggagataaacaaggttctgtttagtagagaggaagggcagcagcaagggga

SEQ ID NO: 113111 - DNA, 250 bp, Glycine max
aaatcattccaatacacatggcttccgaaaggcaagcgttgatgcttattctcttaacaacattcttcttcaccataaagccttcacaggccagtactactggtggcataacaatctactggggccaaaacattgacgacggcaccttgacttccacatgcgacactggtcacttcgagattgtcaacctagctttcctcaatgcgtttggttgcggcataactccatcatggaacttcgctggccactg

SEQ ID NO: 113112 - DNA, 253 bp, Glycine max
cgacagtgacatggccaccgacgcctccgccaccgtccctatccctgacgtcatgaagtcctccatccgcccggacatcgtcaacttcgtacactccaacatctccaagaacagccgacaaccctatgcagtcagccgccgcgctggccaccagacttccgccgagtcctggggaaccggtcgtgccgtctcccgtatcccccgtgttcccggcggcggaacccatcgcgccggccagggagccttcggaaac

SEQ ID NO: 113113 - DNA, 259 bp, Glycine max
gccaagttattgctcagtactaccaactaattcgactgggttatgagggatataaaatggtgatggaaaactgcaatgacaacatggcagtgcttaaggaaggactggagaaaacaggaaggtttgagattatatccaaagacattggtgttccattggtggccttcacattgaaggaccacacccacttcaatgaattccaaatctctgacatgctgaggcgctatggttggatagtgccagcatacacaatgccccc

SEQ ID NO: 113114 - DNA, 258 bp, Glycine max
gcagaaggaggaacacgaatggcatcgcaaggaggaaaaacacggaggaaagggaagtgaagaggaacaagatgaacgtgaacacccacgcccacaccaacctcatcaaaagaaagaggaaaagcacgaatggcaacacaagcaggaaaagcaccaaggaaaggaaagtgaagaagaagaagaagaccaagacgaggatgaggagcaagacaaagagagccaagaaagtgaaggttctgagtctcaaagagaaccacg

SEQ ID NO: 113115 - DNA, 249 bp, Glycine max
aacactttccttagttcaatatggggaagcccttcttcactctctctctttcttccctttgcttgctactcttgtcgagtgcatgctttgctattacctccagcaagttcaacgagtgccaactcaacaacctcaacgcgttggaacccgaccaccgcgttgagtccgaaggtggtcttattgaaacatggaactctcaacaccctgagctgcaatgcgccggtgtcactgtttccaaacgcaccctca

SEQ ID NO: 113116 - DNA, 253 bp, Glycine max
agaaagtcttccatagccccccaaaaatgaagagcaccatcttctttgctctctttctcttttgtgccttcaccacctcatacctaccttcagccatcgctgatttcgtgctcgataatgaaggtaaccctcttgaaaatggtggcacatattatatcttgtcagacataacagcatttggtggaataagagcagccccaacgggaaatgaaagatgccctctcactgtggtgcaatctcgcaatgagctcga

SEQ ID NO: 113117 - DNA, 251 bp, Glycine max
cttattaacactttccttagttcaatatggggaagcccttcttcactctctctctttcttccctttgcttgctactcttgtcgagtgcatgctttgctattacctccagcaagttcaacgagtgccaactcaacaacctcaacgcgttggaacccgaccaccgcgttgagtccgaaggtggtcttattgaaacatggaactctcaacaccctgagctgcaatgcgccggtgtcactgtttccaaacgcacc

SEQ ID NO: 113118 - DNA, 246 bp, Glycine max
cagatatactatgatgagagcgcggttcccattactgttgctgggagttgttttcctggcatcagtttctgtctcatttggcattgcgtattgggaaaagcagaaccccagtcacaacaagtgcctccgaagttgcaatagcgagaaagactcctacaggaaccaagcatgccacgctcgttgcaacctccttaaggtggaggaagaagaagaatgcgaagaaggtcaaattccacgaccacgacc

SEQ ID NO: 113119 - DNA, 250 bp, Glycine max
ctgtttatctccgcactccgtcttcatcaatcagcatcaccaccgctccaacacaggggaaaatgagggagatccttcacgttcagggagggcaatgcgggaaccagatcggttcgaagttctgggaagtggtgtgcgacgagcacggcatagatccgacggggaagtacgtcggaaactcagatctacaactcgagcgcgtgaacgtgtactacaacgaagcttcctgcgggcggtttgtcccacgcgc

SEQ ID NO: 113120 - DNA, 247 bp, Glycine max
cagtccacaacatctgttgctaatggactcactggacttataggcccttattctgggggagcaagaaagctgtatgttggcaatctgcatgtcagtattactgaagctgatattcgtatggtgtttgaagcatttggtcaggttgagctagtccagctgcctcttgatgaaagtgggcactgcaaaggttttggctttgtgcagtttgcacgccttgaagatgcaagaaatgctcagagcttgaatg

SEQ ID NO: 113121 - DNA, 244 bp, Glycine max
caaattcttccaccaagttatgggtacccttgtgttgcttcttttctccctcttaggtctctcttctagttccagcatatcaactcatcgttccatattggaccttgacctaaccaagtttaccacacagaaacaggtgtcttcactgttccaactatggaagagtgagcatggacgtgtctaccataaccacgaagaagaggcaaagagacttgagattttcaagaataacttgaactatatc

SEQ ID NO: 113122 - DNA, 248 bp, Glycine max
cagaagattcgtcacttcaatgaaggagacgtactcgtgattcctcctggtgttccttactggacctataacactggcgatgaaccagttgttgccatcagtcttcttgacacctctaacttcaataaccagcttgatcaaacccctagggtattttaccttgctgggaacccagatatagagtacccagagaccatgcaacaacaacaacagcagaaaagtcatggtggacgcaagcaggggcaaca

SEQ ID NO: 113123 - DNA, 258 bp, Glycine max
cattggtccttaaacactcatcagtcatcaccatggccaagctagttttttccctttgttttctgcttttcagtggctgctgcttcgctttcagttccagagagcagcctcagcaaaacgagtgccagatccaaaaactcaatgccctcaaaccggataaccgtatagagtcagaaggagggctcattgagacatggaaccctaacaacaagccattccagtgtgccggtgttgccctctctcgctgcaccctcaacc

SEQ ID NO: 113124 - DNA, 260 bp, Glycine max
gagaagcaaagcaatggctacttcaaagttgaaaacccagaatgtggttgtatctctctccctaaccttaaccttggtactggtgctactgaccagcaaggcaaactcagcggaaactgtttctttcagctggaacaagttcgtgccgaagcaaccaaacatgatcctccaaggagacgctattgtgacctcctcgggaaagttacaactcaataaggttgacgaaaacggcaccccaaaaccctcgtctcttggtcgcg

SEQ ID NO: 113125 - DNA, 256 bp, Glycine max
ctccattgtctttgaacactcatcaccatggccaagcttgttctttccctttgtttccttcttttcagtggctgcttcgctctgagagagcaggcacagcaaaatgagtgccagatccaaaagctgaatgccctcaaaccggataaccgtatagagtcggaaggtgggttcattgagacctggaaccctaacaacaagccattccagtgtgccggtgttgccctctctcgctgcacccttaaccgcaatgcccttc

SEQ ID NO: 113126 - DNA, 254 bp, Glycine max
cgatgaacaaattccctctcaccctcctcgccgaccaagccatggaaagcgtgaacaagacgaggacgaggacgaagatgaagataaacctcgtcctagtcgaccaagcaaaggaaagcaacaagaagaagaaaacgaaggaagcaacatattgagtggcttcgcccctgaattcttgaaagaagcgttcggcgtgaacatgcagatagtgagcaacctacaaggtgagaacgaagatgaggatagtggagcca

SEQ ID NO: 113127 - DNA, 252 bp, Glycine max
tttgttcctcactgaccaagccatggcgatgagaaccaaactttctttagctatctttttcttttttcttttagccttattttcaaacctagcctttggcaaatgtaaagaaaccgaggtagaagaagaagaccctgagctcgtaacatgcaaacaccaatgccaacagccacagcaatacactgagggtgacaagcgggtatgcttgcaaagatgtgacaggtatcatcgtatgaagcaagagcgagagaa

SEQ ID NO: 113128 - DNA, 251 bp, Glycine max; identical to SEQ ID NO: 111709

SEQ ID NO: 113129 - DNA, 250 bp, Glycine max
taacactttccttagttcaatatggggaagcccttcttcactctctctctttcttccctttgcttgctactcttgtcgagtgcatgctttgctattacctccagcaagttcaacgagtgccaactcaacaacctcaacgcgttggaacccgaccaccgcgttgagtccgaaggtggtcttattgaaacatggaactctcaacaccctgagctgcaatgcgccggtgtcactgtttccaaacgcaccctca

SEQ ID NO: 113130 - DNA, 248 bp, Glycine max
gtgatttcagaactgcaatggtgagtaaaaatagcaagcctcaagctactgcaatgcatgtgggagctatagaaattatcattgatagtttcgcaagtcctgactgcaacatagttggtgcaatgcttttgcgttgatacttatcataccaatcctgaaaatgcagttcgtagtatttttgttgcgcctttcagaggcggaaggcccattcgggtggttacatttccgaataccatcgtgcgcattga

SEQ ID NO: 113131 - DNA, 247 bp, Glycine max; identical to SEQ ID NO: 105284

SEQ ID NO: 113132 - DNA, 245 bp, Glycine max
ctgcaaaggattctacccgccgctcgatgggaattgcgcttcaaggcgtctcgtagggctaatccgcctcacgagggtcaccaacggcacgtgcctttggggggccgaggccccctactgctggtcggcaaacggacggcgggcgcacgcgtcgcttctagcccggattctgacttagaggcgttcagtcataatccaacgcacggtagcttcgcgccactggcttttcagcgaagcgcgatgac

SEQ ID NO: 113133 - DNA, 245 bp, Glycine max; identical to SEQ ID NO: 111714

SEQ ID NO: 113134 - DNA, 260 bp, Glycine max
tggttattcaagctatcttccttcttgatacacttgacaaggatattaattcattctccatgagagtcagagagtggtattcttggcattttcctgagctggtgaaaattgtaaatgataattatctgtatgccaaagttgcaaaatttattgaggataaggcaaagttggctgaagacacgattccaggcttaactgacatagttggagatgaagataaagcaaaggagattgtggaagctgccaaagcctccatggga

SEQ ID NO: 113135 - DNA, 257 bp, Glycine max
gcaaagcaatggctacttcaaagttgaaaacccagaatgtggttgtatctctctccctaaccttaaccttggtactggtgctactgaccagcaaggcaaactcagcggaaactgtttctttcagctggaacaagttcgtgccgaagcaaccaaacatgatcctccaaggagacgctattgtgacctcctcgggaaagttacaactcaataaggttgacgaaaacggcaccccaaaaccctcgtctcttggtcgcgcc

SEQ ID NO: 113136 - DNA, 253 bp, Glycine max
tggttattcaagctatcttccttcttgatacacttgacaaggatattaattcattctccatgagagtcagagagtggtattcttggcattttcctgagctggtgaaaattgtaaatgataattatctgtatgccaaagttgcaaaatttattgaggataaggcaaagttggctgaagacacgattccaggcttaactgacatagttggagatgaagatacagcaaaggagattgtggaagctgccaaagcctc

SEQ ID NO: 113137 - DNA, 252 bp, Glycine max
ctatgatgagagtgcggtttcctttgttggtgttgctgggaactgttttcctggcatcagtttgtgtctcattaaaggtgagagaggatgagaataaccctttctacttgagaagctctaacagcttccaaactctctttgagaaccaaaacggtcgcattcgtctcctccagagattcaacaaacgctccccacaacttgagaatcttcgagactaccggattgtccagtttcagtcaaaacccaacacaa

SEQ ID NO: 113138 - DNA, 248 bp, Glycine max
gatccttaattgccactcctctcttgataagatctgcaattaagacatgggtccaagaatatgtgtccttgtactatgcaagagatgatgatgtcaaacctgattctgaactccaacagtggtggaaagaagctgtagagaaaggtcatggtgatctgaaagacaagccatggtggcctaagttgcaaacaattgaagagcttgttgaaatttgcaccattatcatatggactgcttcagccctccat

SEQ ID NO: 113139 - DNA, 243 bp, Glycine max
ctcgcgcactgccgcaggatttgaaaaaggaattgatcgagattttgaaccagttctttccatgactcctcttaattgagacatgagatcctatgaagtagaaatcacttttattttactataaatattactataaatattgggttgaattgagcgggtcgtatttaaataagaatttcttttccttttttcttagtttctatcgaaaaaaaaaagattcgatagaaactaagaaaataaaca

SEQ ID NO: 113140 - DNA, 248 bp, Glycine max
gcaacaggaagagcaacctttggaagtgcggaaatatagagccgaattgtctgaacaagatatatttgtaatcccagcaggttatccagttgtggtcaacgctacctcaaatctgaatttctttgctattggtattaatgccgagaacaaccagaggaacttcctcgcaggttcgcaagacaatgtgataagccagatacctagtcaagtgcaggagcttgcattccctgggtctgcacaagctgttg

SEQ ID NO: 113141 - DNA, 241 bp, Glycine max
gttctatatcctagtataccttaataaataatttaagatactatgatgagagcacggttcccattactgttgctggatcttgttttcctggcttcagtttctgtctcatttggcattgcttactgggaaaaagagaaccccaaacacaacaagtgtctccagagttgcaatagcgagagagactcgtacaggaaccaagcatgccacgctcgttgcaacctccttaaggtggagaaagaag

SEQ ID NO: 113142 - DNA, 247 bp, Glycine max
cttgctgggaaccaagagcaagagtttctaaaatatcagcaagagctaggaggtcatcaaagccagaaaggaaagcatcagcaagaagaagaaaacgaaggaggcagcatattgagtggcttcaccctggaattcttggaacatgcattcagcgtggacaagcagatagcgaaaaacctacaaggagagaacgaaggggaagacaagggagccattgtgacagtgaaaggaggtctgagcgtgataa

SEQ ID NO: 113143 - DNA, 256 bp, Glycine max
aacgaaggaagcaacatattgagtggcttcgcccctgaattcttgaaagaagcgttcggcgtgaacatgcagatagtgagaaacctacaaggtgagaacgaagaggaggatagtggagccattgtgacagtgaaaggaggtctaagagtcacagctccagccatgaggaagccacagcaagaagaagatgatgatgatgaggaagagcagccacagtgcgtggagacagacaaaggttgccaacgccaaagcaaaa

SEQ ID NO: 113144 - DNA, 252 bp, Glycine max
ctctgtgcctgcggctgaggattccgaacgagtgaccttcttcgtttctcgcaaagtttaagtactcatgggtaaggaaaaggttcacatcaacattgtcgtcattggacatgtcgactctgggaagtcaactaccactggtcacttgatctacaagcttggaggtattgacaagcgtgtgattgagaggttcgagaaggaggctgccgagatgaacaagaggtcattcaagtatgcctgggtgctcgacaa

SEQ ID NO: 113145 - DNA, 256 bp, Glycine max
gtatctctctccctaaccttaaccttggtactggtgctactgaccagcaaggcaaactcagcggaaactgtttctttcagctggaacaagttcgtgccgaagcaaccaaacatgatcctccaaggagacgctattgtgacctcctcgggaaagttacaactcaataaggttgacgaaaacggcaccccaaaaccctcgtctcttggtcgcgccctctactccacccccatccacatttgggacaaagaaaccggta

SEQ ID NO: 113146 - DNA, 256 bp, Glycine max
attttcaacgtgcttggagagcccattgataatttaggtcctgtagatactcgcacaacatctcccattcatagatctgcgcctgcctttatacaattagatacaaaattagccatttttgaaacaggaataaaagtagtagatcttttagctccttatcgtcgtggaggaaaaataggacttttcggtggagctggagtgggtaaaacggtactgattatggaattgatcaataacattgccaaagctcatggag

SEQ ID NO: 113147 - DNA, 252 bp, Glycine max
attttcgcaataagcagagaacaggtgcgtgcgttggcccctaccaagaaaagctcttggtggccattcggtggcgaatccaagcctcaattcaatattttcagcaagcgtcccactatctccaacggatatggtcgtttaactgaagttggtcctgactatgatgaaaagagttggcttcaaagactcaatctcatgcttacctttaccaacatcacccagagatctatgagtactattcactacaactca

SEQ ID NO: 113148 - DNA, 250 bp, Glycine max
ggtagatttgagagtttcttcctatctagcactgaagctcaacaatcctacttgcaaggattcagcaggaacattttagaggcctcctacgataccaaattcgaggagataaacaaggttctgtttagtagagaggaagggcagcagcaaggggagcagaggctgcaagagagcgtgattgtggaaatctcgaaggaacagattcgggcactgagcaaacgtgccaaatctagttcaaggaaaaccattt

SEQ ID NO: 113149 - DNA, 250 bp, Glycine max
aacttattaacactttccttagttcaatatggggaagcccttcttcactctctctctttcttccctttgcttgctactcttgtcgagtgcatgctttgctattacctccagcaagttcaacgagtgccaactcaacaacctcaacgcgttggaacccgaccaccgcgttgagtccgaaggtggtcttattgaaacatggaactctcaacaccctgagctgcaatgcgccggtgtcactgtttccaaacgc

SEQ ID NO: 113150 - DNA, 251 bp, Glycine max
aaacactcatcagtcatcaccatggccaagctagttttttccctttgttttctgcttttcagtggctgctgcttcgctttcagttccagagagcagcctcagcaaaacgagtgccagatccaaaaactcaatgccctcaaaccggataaccgtatagagtcagaaggagggctcattgagacatggaaccctaacaacaagccattccagtgtgccggtgttgccctctctcgctgcaccctcaaccgcaa

SEQ ID NO: 113151 - DNA, 247 bp, Glycine max
gagaagaacagagagagatccatccatcaattccaatggccgatcagctcaccgacgaacagatctccgagttcaaggaagccttcagcctcttcgacaaggacggggatggttgtattaccaccaaggaacttgggaccgtgatgcggtcacttggccagaacccaactgaggcagagctgcaggacatgataaatgaggttgatgctgatgggaatggtaccattgatttcccagaattcctgaa

SEQ ID NO: 113152 - DNA, 247 bp, Glycine max
actcgagccgaatccgactgtttaattaaaacaaagcattgcgatggtccctgcggatgttgccgcaatgtgatttctgcccagtgctctgaatgtcaaagtgaagaaattcaaccaagcgcgggtaaacggcgggagtaactatgactctcttaaggtagccaaatgcctcgtcatctaattagtgacgcgcatgaatggattaacgagtttcccactgtccctgtctactatccagcgaaaccac

SEQ ID NO: 113153 - DNA, 245 bp, Glycine max
aaacatttcttagcacaatccttcaacaccaacgaggacacagctgagaaacttcggtctccagatgacgaaaggaagcagatcgtgacagtggagggaggcctcagcgttatcagccccaagtggcaagaacaagaagacgaagacgaagatgaagacgaagaatatgaacaaactccctcttatcctccacgacgaccaagccatggaaagcatgaagatgacgaggacgaggacgaagaaga

SEQ ID NO: 113154 - DNA, 245 bp, Glycine max
ctcgagccgaatcggctcgaggtcacagaaatgttcatcagaggacgagaaatcagaaaagagtatgaggagatttaccaaacggatctcatcaaacgccttgagtccgagatctctggtgactttgagagagctatgtaccggtggatgttgcagcctgcggatcgtgatgctgttttggtgaatgtggcaatcaagaatggcaccaaagactaccatgtgattgcagagattgcttgtgtcct

SEQ ID NO: 113155 - DNA, 237 bp, Glycine max
ctctccattgtctttgaacactcatcaccatggccaagcttgttctttccctttgtttccttcttttcagtggctgcttcgctctgagagagcaggcacagcaaaatgagtgccagatccaaaagctgaatgccctcaaaccggataaccgtatagagtcggaaggtgggttcattgagacctggaaccctaacaacaagccattccagtgtgccggtgttgccctctctcgctgca

SEQ ID NO: 113156 - DNA, 245 bp, Glycine max
gtcgcagcaaaaccaagccacccactaacttgtttggtccaagacatggctctgatcctgcatgctaccaaaacaaacaagaatgccttcaagactctgattgcggcagagtacagtggcgtccaagtggaattggcccctaatttcgagatgggtgtctctaacaaaactcctgaatttctcaagatgaatcctattggaaaggttcctgttttggaaacgcccgatggtccagtctttgagag

SEQ ID NO: 113157 - DNA, 116 bp, Glycine max
cttattaacactttccttagttacgatatggggaagcccgtcttcactctctctctttctaccctttgcttgctactcttgtcgagtgcatgctttgctattacctccagcaagtt

SEQ ID NO: 113158 - DNA, 253 bp, Glycine max
gtctgcacaagctgttgagaagctattaaagaaccaaagagaatcctactttgtggatgctcagcctaagaagaaagaggaggggaataagggaagaaagggtcctttgtcttcaattttgagggctttttactgaataagtatgtactaaaatgtatgctgtaatagctcatagtgagcgaggaaagtatcgggctatgtaactatgactagagcttcaactatgaataaataaatcgacagcatatgatgc

SEQ ID NO: 113159 - DNA, 255 bp, Glycine max
ctcccatttgctgatcaattttggtttaggtatctgtttggctggttgatgccacccaaggtttctctcctcaaggcaactcaaggtgatgctataagaaactattaccatgaaatgcatgtcatccaggacatgcttgttcctttgtacaaggtgggagaggctttagaatgggttcaccgtgagatggaggtataccccatttggctctgcccacacaaattgttcaagctgcctgtcaaaactatgatttac

SEQ ID NO: 113160 - DNA, 247 bp, Glycine max
  unsure (1)..(247): unsure at all n locations
gaactagttcaatatcctagtataccttaataaataatttaagatactatgatgagagcacggttcccattactgttgctgggacttgttttcctggcttcagtttctgtctcatttggcattgcttactgggaaaaagagaaccccagacacaacaagtgtctccagagttgcaatagcgagagagactcgtacaggaaccaagcatgccacgctcgttgcaacctccttaangtggagaaagaag

SEQ ID NO: 113161 - DNA, 250 bp, Glycine max
cttcaaacttaattattaacacttccttagttcaatatggggaagcccttcactctctctctttcttccctttgcttgctactcttgtcgagtgcatgctttgctattagctccagcaagctcaacgagtgccaactcaacaacctcaacgcgttggaacccgaccaccgcgttgagtccgaaggtggtttgattcaaacatggaactctcaacaccctgagctgaaatgcgccggtgtcactgtttcca

SEQ ID NO: 113162 - DNA, 131 bp, Glycine max
ctcctagtataccttactagataatttaagatactatgatgacagcacggttcccattactgttgctgggacttgtttgcctggcttcagtttctgtctcatttggcattgcttactgggaaaacagagaa

SEQ ID NO: 113163 - DNA, 246 bp, Glycine max
ctcgagccggttcatttagccaaaatccctatgttttagttctgttcctcgttctcactgactggatatcccgtgtaatgtctcgcgggctcattacatctgagagacatgagaaatggatggcacaatatggtaaggtttacaaggatgctgcagagaaggagaaacgtttccaagtattcaaaaacaatgtgcagttcattgagtcattcaatgctgctggggacaaacctttcaaccttagca

SEQ ID NO: 113164 - DNA, 246 bp, Glycine max
gtcttggctcgctccctctcggatcagatctgcgctctccgttctcagatcgcgttttgtttcaattcgacactttcctcgcttcaaagattaagcgaacaatatggttgtccttgctgcatccattgtgagcaaatctggcaaagtgctagtttctagacagtttgtggatatgactcgcataagaattgagggtcttctagcagcatttcccaagttggtagggactggaaaacagcacacgta

SEQ ID NO: 113165 - DNA, 245 bp, Glycine max
aacaagatgaagatgaagatgaagacgaagatgatgaagatgaacaaattccctctcaccctcctcgccgaccaagccatggaaagcgtgaacaagacgaggacgaggacgaagatgaagataaacctcgtcctagtcgaccaagccaaggaaagcgtgaacaagaccaggaccaggacgaggacgaagatgaagatgaagatcaacctcgcaagagccgcgaatggagatcgaaaaagacacaa

SEQ ID NO: 113166 - DNA, 246 bp, Glycine max
ttctctccattggtccttaaacactcatcagtcatcaccatggccaagctagttttttccctttgttttctgcttttcagtggctgctgcttcgctttcagttccagagagcagcctcagcaaaacgagtgccagatccaaaaactcaatgccctcaaaccggataaccgtatagagtcagaaggagggctcattgagacatggaaccctaacaacaagccattccagtgtgccggtgttgccctc

SEQ ID NO: 113167 - DNA, 254 bp, Glycine max
caatatcctagtataccttaataaataatttaagatactatgatgagagcacggttcccattactgttgctgggacttgttttcctggcttcagtttctgtctcatttggcattgcttactgggaaaaagagaaccccaaacacaacaagtgtctccagagttgcaatagcgagagagactcgtacaggaaccaagcatgccacgctcgttgcaacctccttaaggtggagagagacgaatgtgaagatggtga

SEQ ID NO: 113168 - DNA, 252 bp, Glycine max
cttaattattaacacttccttagttcaatatggggaagcccttcactctctctctttcttccctttgcttgctactcttgtcgagtgcatgctttgctattagctccagcaagctcaacgagtgccaactcaacaacctcaacgcgttggaacccgaccaccgcgttgcgtccgaaggtggtttgattcaaacatggaactctcaacaccctgagctgaaatgcgccggtgtcactgtttccaaactcaccc

SEQ ID NO: 113169 - DNA, 254 bp, Glycine max; identical to SEQ ID NO: 111291

SEQ ID NO: 113170 - DNA, 251 bp, Glycine max
atcaaattagttcattctctttgcgcagttccctacctctcctttcaagatgcagatcttcgtcaagaccctcaccggaaagaccatcacccttgaggtggaaagctctgacaccatcgacaacgtcaaggccaagatccaggacaaggaaggaattcccccggatcagcaacgtctcatcttcgccggaaagcagctcgaggacggccgtaccctcgccgactacaacatccagaaggagtcaacccttc

SEQ ID NO: 113171 - DNA, 248 bp, Glycine max
acaggaatggcctcgcaaggaggaaaaacgcggagaaaagggaagtgaagaggaagatgaggatgaggatgaggaacaagatgaacgtcaattcccattcccacgcccacctcatcagaaggaagagcgaaagcaagaggaagatgaggatgaggagcagcagcgagagagcgaagaaagtgaagattctgagttacgaagacataagaataagaacccttttctcttcggctctaacaggttcgaaa

SEQ ID NO: 113172 - DNA, 129 bp, Glycine max
ctccattggtccttaaacactcatcagtcatgaccatggccaagctagttttttccctttgttttctgcttttctgtggctgctgcttcgctttcagttccagagagcagcctcagcaaaacgagtgcc

SEQ ID NO: 113173 - DNA, 239 bp, Glycine max
ctcgagccgcagagtcaagtgtctgagcacaagtatgaaggaaattggggtcctttggtcacccctgagtctcaacaaggctcaccccgtgttaaagtcgcataaatgacaagcatgatggtgtgaggatgaggccatcttatgaaataataacagataaataaattttgtatgataataaaaagtatggcccatgtaccatcccagcgagcctatgtttatatctgagtggcgttgta

SEQ ID NO: 113174 - DNA, 266 bp, Glycine max
tgttcaatatcctagtataccttaataaataatttaagatactatgatgtgagcacggttcccattaactgttgctgggacttgttttcctggcttcagtttctgtctcatttggcattgcttactgggcaaaagcgaaccccaaacacaacaagtgtctccagagttgcaatagcgagagagactcgtacaggaaccaagcatgccacgctcgttgcaacctccttaaggtggagaaagacgaatgtgtgaaggtgaaattccac

SEQ ID NO: 113175 - DNA, 265 bp, Glycine max
actcgagcgattcggctcagagcaacaaacaggcatctcactgttgttcaccctaactataaactccttcaccctacactatcgtgacaccatgaacataaatgtgcctgctcggttatcactggtcaacgacggtggcgttatagaacaaacatttttgtggggaaggtattctgtggaaatgtctgctgtagtttacaaggattgggtttttacagatcaagcattgcctgctgatcttataaaaagaggacatggcattgag

SEQ ID NO: 113176 - DNA, 264 bp, Glycine max
tgaacactcatcaccatggccaagcttgttctttccctttgtttccttcttttcagtggctgcttcgctctgagagagcaggcacagcaaaatgagtgccagatccaaaagctgaatgccctcaaaccggataaccgtatagagtcggaaggtgggttcattgagacctggaaccctaacaacaagccattccagtgtgccggtgttgccctctctcgctgcacccttaaccgcaatgcccttcgtagaccttcctacaccaac

SEQ ID NO: 113177 - DNA, 263 bp, Glycine max
tctttcctctctctctctctacgctttctcgtttgagatccctcaagggatccactaactgaaggagcaatggggttgacatttaccaagctttttagccggcttttcgccaagaaggaaatgcgaattctaatggttggtcttgatgccgctggtaagaccaccatcctgtacaagctcaaacttggagagatcgttaccacaattcccaccattgggttcaacgtggagactgtggaatacaagaacattagtttcactgt

SEQ ID NO: 113178 - DNA, 264 bp, Glycine max
gcatgatatacctgctttgtcctagcacatttgaagagcctcaacaacctcaacaaagaggacaaagcagcagaccacaagaccgtcaccagaagatctataacttcagagagggtgatttgatcgcagtgcctactggtgttgcatggtggatgtacaacaatgaagacactcctgttgttgccgtttctattattgacaccaacagcttggagaaccagctcgaccagatgcctaggagattctatcttgctgggaaccaag

SEQ ID NO: 113179 - DNA, 264 bp, Glycine max
cttaaacactcatcagtcatcaccatggccaagctagttttttccctttgtgttctgcttttcagtggctgctgcttcgctttcagttccagagagcagcctcagcaaaacgagtgccagatccaaaaactcaatgccctcaaaccggataaccgtatagagtcagaaggagggctcattgagacatggaaccctaacaacaagccattccagtgtgccggtgttgccctctctcgctgcaccctcaaccgcaacgcccttcgt

SEQ ID NO: 113180 - DNA, 263 bp, Glycine max
aacattctaaaacaaaggacccagttttacatttttttttgttcctgagttccaatggctcttcaggctgcttccttggtttctgcttctttttctattgctaaagagggaaagtctggtgtatctctcagggacaccacaatgtttggtgtttcattgtcggatactctcaaatctgacttcagctctccctcatcgacttgcaaaagggaattccaacaaaaatttggccctttgagggttcagtcagtggcaacaacaac

SEQ ID NO: 113181 - DNA, 256 bp, Glycine max; identical to SEQ ID NO: 110884

SEQ ID NO: 113182 - DNA, 266 bp, Glycine max
cttggtccttaaacactcatcagtcatcaccatggccaagctagtttttttccctttgttttctgcttttcagtggctgctgcttcgctttcagttccagagagcagcctcagcaaaacgagtgccagatccaaaaactcaatgccctcaaaccggataaccgtatagagtcagaaggagggctcattgagacatggaaccctaacaacaagccattccagtgtgccggtgttgccctctctcgctgctacctcaaccgcaacgcc

SEQ ID NO: 113183 - DNA, 264 bp, Glycine max
cggctcgagtttgattcaaacatggaactctcaacaccctgagctgaaatgcgccggtgtcactgtttccaaactcaccctcaaccgcaatggcctccacttgccatcttactcaccttatccccggatgatcatcatcgcccaagggaaaggagcacttggagttgcaattccaggatgtcctgagacgtttgaggagccacaagaacaatcaaacagaagaggctcaaggtcgcagaagcagcagctacaggacagtcacca

SEQ ID NO: 113184 - DNA, 263 bp, Glycine max
gcaagatgtcccacttcaaggtgtagctggtggaatgatgtcagtcccttatgacatgggtggtctgccaatccgcgatgctgtgggacagccaatgcccattcaagctttggccacggctcttgcaaatgctccccctgaacagcagaggactatgctcggtgaagctttatacccgcttgtggatcagctggaacacgatgctgcagcaaaggttactggcatgcttctggagatggaccagcctgaagttttacatctga

SEQ ID NO: 113185 - DNA, 260 bp, Glycine max
ctcaaagagcatgtgatcaagcctgtgatcccagagaagtaccttgatgagaagaccattttccacttgaacccttcaggccgttttgtcattggtggccctcatggcgatgctggtctcaccggccgcaagatcattatcgatacttatggaggatggggtgctcatggtggtggtgctttctccgggaaggaccctaccaaggttgataggagtggtgcttacattgtgagacaggctgctaagagcattgtggcaag

SEQ ID NO: 113186 - DNA, 261 bp, Glycine max
ccgagattgaggcgggggttgatttggaagaaacccagctaaggtaattcctcgcaacccctaactaaaccttcaaaggatcatcatgggcagtcacaatgctttggctgccactttcggaatattaggtaacatcatttctgtgatggtgtacttggctccggtgccaacgttttaccggatatacaaaaagaaatgcacggacggtttccactcgctgccatacttgttgtcattaatgagttctatgctttggttata

SEQ ID NO: 113187 - DNA, 260 bp, Glycine max
ctcttcttcagtggtggccgctactagaacactagtttgttgagcactgcgatgaggaagtggacggttgcttccgctctccttcttctctctctcctctttctctttgcagatcaaggtcgaaagtttcaggcgaatgccgagggagattccgacgagcttgtagatccacccaaggtggaggacaagatcggtgctgtgcctcatggcctttcaaccgattcagatgtcgtcaagagggaggcggagtcgatctcgaa

SEQ ID NO: 113188 - DNA, 261 bp, Glycine max
ctctctctccttctcgctctttcagctttgacttttgttggaaactaaggcctaatcaaaatggtgaagttcacagctgaagagctacgtcgtattatggactataagcataatatccgtaatatgtctgtcattgctcatgttgatcacggaaaatcaaccctcactgattctcttgtggctgctgctggtattattgctcaagaagttgccggtgatgtccgtatgactgatacccgtgcagatgaagctgagcgtggt

SEQ ID NO: 113189 - DNA, 246 bp, Glycine max
aacattctctccattgtctttgaacattcatcaccatggccaagcttgttctttccctttgtgtccttcttttcagtggctgcttcgctctgagagagcaggcacagcaaaatgagtgccagatccaaaagctgaatgccctcaaaccggataaccgtatagagtcggaaggtgggttcattgagacctggaaccctaacaacaagccattccagtgtgccggtgttgccctctctcgctgcaccc

SEQ ID NO: 113190 - DNA, 262 bp, Glycine max
cagcaaagcaatggctacttcaaagttgaaaacccagaatgtggttgtatctctctccctaaccttaaccttggtactggtgctactgaccagcaaggcaaactcagcggaaactgtttctttcagctggaacaagttcgtgccgaagcaaccaaacatgatcctccaaggagacgctattgtgacctcctcgggaaagttacaactcaataaggttgacgaaaacggcaccccaaaaccctcgtctcttggtcgcgccctc

SEQ ID NO: 113191 - DNA, 263 bp, Glycine max
actcatcaccatggccaagcttgttctttccctttgtttccttcttttcagtggctgcttcgctctgagagagcaggcacagcaaaatgagtgccagatccaaaagctgaatgccctcaaaccggataaccgtatagagtcggaaggtgggttcattgagacctggaaccctaacaacaagccattccagtgtgccggtgttgccctctctcgctgcacccttaaccgcaatgcccttcgtagaccttcctacaccaacggtc

SEQ ID NO: 113192 - DNA, 262 bp, Glycine max
gctagctagcaagcaagcacagagatggaggcaaagcgaggccatgccctcatgtgcttggcacgtgtttcactcttcctctgcgctctaaccctatccgctgctcacggaagcaccacggttcaagacatcgcgagaaagttgaaactcggggacaacgagcttctgcgcacggagaagaagttcaaggttttcatggagaattacgggaggagctactccacagaggaggagtatttgcgccgtttggggattttcgccc

SEQ ID NO: 113193 - DNA, 263 bp, Glycine max
cgtttggatcctgctaggttaggctctattcctatcagtgttcagtcagagcaaaaatcaaggcctgctgcctcaaaggctcagagacaccccataacaaacaagcagagatctttgtcaccattgcctgagacttatctttctgaggccttcagggaagctagacatgaacagaagaggttctccacgccgaatccccggagggaaaagaggattatggggaagttgttgaacaaagattctagggagactaaggaatcaag

SEQ ID NO: 113194 - DNA, 263 bp, Glycine max
gcagcagcggcaagcaactccatccgcaatgggaatcgatttgaaggcaggaggtaagtccaagaagaccaaacgtacagcccccaaatccaatgatatttacctcaagctcctcgtcaagctgtaccgttttcttgttcggaggactggtagtaacttcaatgccgtcatcctcaaacgccttttcatgagcaaggtcaacaagcccccgctatccctctctagattgattcgttacaccaagggaaaggaggataagatag

SEQ ID NO: 113195 - DNA, 263 bp, Glycine max
cattcttccaccaagttatgggttgccttgtgttgcttcttttctccctcttaggtctctcttctagttccagcatatcaactcatcgttccatattggaccttgacctaaccaagtttaccacacagaaacaggtgtcttcactgttccaactatggaagagtgagcatggacgtgtctaccataaccacgaagaagaggcaaagagacttgagattttcaagaataacttgaactatatcagggacatgaatgcaaacaga

SEQ ID NO: 113196 - DNA, 258 bp, Glycine max
ctcttcttctcttgcggtgcaggttagcgcagttcttctagatttaaggaagatgggtaaggaaaaggttcacatcagtattgtggtcattggccatgtcgactctgggaaatccactaccactggtcacctgatttacaagcttggaggcattgacaagcgtgttattgagaggtttgagaaggaagctgctgagatgaacaagaggtctttcaagtatgcctgggtgctggacaaacttaaggctgagcgtgaaag

SEQ ID NO: 113197 - DNA, 146 bp, Glycine max
cacaacccagaagacctagacaagaagaaccacgtgaaagaggatgcgagacaagaaacggggttgaggaaaatatctgcaccttgaagcttcacgagaacattgctcgcccttacacgcgctagacttctgacaaccctaaaagc

SEQ ID NO: 113198 - DNA, 261 bp, Glycine max
tggagacactttgcactgttgaggaaacctgtgtgagagataaagctgtggagtcactttgtagaattggatctcaaatgagggagagtgatttggttgaatattacatcccattggtgaagagattggcagcaggtgaatggtttaccgcccgagtctctgcatgtggactatttcatattgcataccctagcgcaccagaaacatcaaagacagagttgagatcaatatacagtcagttatgtcaggatgatatgccta

SEQ ID NO: 113199 - DNA, 261 bp, Glycine max
ttccttaaacactcatcagtcatcaccatggccaagctagttttttccctttgttttctgcttttcagtggctgctgcttcgctttcagttccagagagcagcctcagccaaacgagtgccagatccaaaaactcaatgccctcaaaccggataaccgtatagagtcagaaggagggctcattgagacatggaaccctaacaacaagccattccagtgtgccggtgttgccctctctcgctgcaccctcaaccgcaacgcc

SEQ ID NO: 113200 - DNA, 260 bp, Glycine max
cggctcgagctcgaccgagaaagtcttccatagccccccaacaatgaagagcaccatctactttgctctctttctcttttgtgccttcaccacctcatacctaccttcagccatcgctgatttcgtgctcgataatgaaggtaaccctcttgaaaatggtggcacatattatatcttgtcagacataacagcatttggtggaataagagcagccccaacgggaaatgaaagatgccctctcactgtggtgcaatctcgca

SEQ ID NO: 113201 - DNA, 260 bp, Glycine max
caaacattgaacttgttggcattaaagaacaacaacagaggcagcaacaggaagagcaacctttggaagtgcggaaatatagagctgaattgtctgaacaagatatatttgtaatcccagcaggttatccagttgtggtcaacgctacctcagatctgaatttctttgcttttggtatcaatgccgagaacaaccagaggaacttccttgcaggttcgaaagacaatgtgataagccagatacctagtcaagtgcaggag

SEQ ID NO: 113202 - DNA, 260 bp, Glycine max
acgaggacgaagccagaggccccaagaccgtcaccaaaaggtacatcgcttcagagagggtgatttgatcgcagtgcctactggtgttgcatggtggatgtacaacaatgaagacactcctgttgttgccgtttctattattgacaccaacagcttggagaaccagctcgaccagatgcctaggagattctatcttgctgggaaccaagagcaagagtttctaaaatatcagcagcagcagcaaggaggttcccaaagcc

SEQ ID NO: 113203 - DNA, 260 bp, Glycine max
gacgtgcttgtggccatcgacagtggtaaatctgaaggtggttcagttggacggcactgggttttggatccgatagatggtactaaagggtttgtaagaggagatcaatatgctatagcattagctttgttacatgaaggcaaaattgtattgggtgtcttggcttgtccaaatcttccactggcatccattggctctaatcagcagcattcttcttcaaatgaagttggttgtctcttctttgctaaagttggtgatgg

SEQ ID NO: 113204 - DNA, 178 bp, Glycine max
gagccctttttgcatgtgctaccacacttttgtccttttgggctctagctagtgctggtagcagtaaataagaatgaataaaagaaacaaaggcttagatgccctttgttaagtgtagaataacgggtatagtaactatgtacccttgtgtaatgagtcactcaagtacctatgcggg

SEQ ID NO: 113205 - DNA, 255 bp, Glycine max
gttcaatatcctagtataccttaataaataatttaagatactatgatgagagcacggttcccattactgttgctgggacttgttttcctggcttcagtttctgtctcatttggcattgcttactgggaacaagagaaccccaaacacaacaagtgtctccagagttgcaatagcgagagagactcgtacaggaaccaagcatgccacgctcgttgcaacctccttaaggtggagaaagaagaatgtgaagaaggt

SEQ ID NO: 113206 - DNA, 258 bp, Glycine max
attaacacttccttagttcaatatggggaagcccttcactctctctctttcttccctttgcttgctactcttgtcgagtgcatgctttgctattagctccagcaagctcaacgagtgccaactcaacaacctcaacgcgttggaacccgaccaccgcgttgagtccgaaggtggtttgattcaaacatggaactctcaacaccctgagctgaaatgcgccggtgtcactgtttccaaactcaccctcaaccgcaatgg

SEQ ID NO: 113207 - DNA, 260 bp, Glycine max
cacaaccacacctagttgaagtccacacaacaacactcgaaaccgttgttaccacacacaaccataaccatagaccctcaataaatgcctcaggtgaaaagaagaaaattgtgggggtgttctacaaagggaatgagtatgctaaattgaaccccaatttcgtggggtgtgttgaaggagcattgggtatacgtgagtggctggaatcacagggtcatcagtacattgtcactgatgacaaagaaggaccagattctgaa

SEQ ID NO: 113208 - DNA, 260 bp, Glycine max
cggcaccttcaaatggcatacctaccatgcagcaggaggaggatcatggacttggaagctacaagaaagtagttcggtacagagaatgcctgaagaaccatgcagcagccatgggagggaatgccactgatgggtgtggtgagttcatgccaagtggagaagaagggaccatagaggcactgaactgctctgcctgtcattgccacagaaacttccacagaaaggaagtggagggtgagccttcatgtgactaccaccac

SEQ ID NO: 113209 - DNA, 259 bp, Glycine max
acctacagcgaatcggctcgaggtctttgaacactcatcaccacggccaagcttgttcagtccctttgtttccttcttactcagtggctgcttcgctctgagagagcaggcacagcaaaatgagtgccagatccaaaagctgaatgccctcaaaccggataaccgtatagagtcggaaggtgggttcattgagacctggaaccctaacaacaagccattccagtgtgccggtgttgccctctctcgctgcacccttaac

SEQ ID NO: 113210 - DNA, 258 bp, Glycine max
atctcctggcccctcctcaacaacctccacagcgccgtcgacttgctcccttccttcgtcggcgccgtcacgcccgacaacggttcccttcagtggaagggcgcctgcttttacgataatcaagcctccctcgagttcaccgcccccggcggcgccgtgctccatctcaagacagaagctgcacacagttggacctgcatggatctgtatgtttttgcaacaccttataggattacatgggactactatttctctgcg

SEQ ID NO: 113211 - DNA, 259 bp, Glycine max
acgcgttcgtgtcgcggggaacagtgattctcgcggagtacaccgaattcagcggaaacttcaactccatcgccttccagtgccttcagaagctccctgccaccaacaacaagttcacctacaattgcgacgcacacaccttcaattacctcgtcgacaatggctacacatattgtgttgttgcagatgaatcaattggaagacagttacccatggcttttctagagcgtgtcaaagatgaatttgtgtcaaaatatgg

SEQ ID NO: 113212 - DNA, 256 bp, Glycine max
ctgaattcttgaaagaagcgttcggcgtgaacatgcagatagtgagaaacctacaaggtgagaacgaagaggaggatagtggagccattgtgacagtgaaaggaggtctaagagtcacagctccagccatgaggaagccacagcaagaagaagatgatgatgatgaggaagagcagccacagtgcgtggagacagacaaaggttgccaacgccaaagcaaaaggagcagaaatggcattgatgagaccatttgcac

SEQ ID NO: 113213 - DNA, 256 bp, Glycine max
atcttcaaagacttgcattcttcttacttaggttctgaatggctggaatctgctgtggtgttgtcggagaaggtgacactccggctccactcgagccatctactcgcccctccaggcgccggagtttggacatcttacccttaaaatacatcgctgacatggcggtgccgccgtcggatggttcacggaaacgtctcaagctggatctcatggaccgcgataacgtagctcaaaattgcgacgaatccactggaca

SEQ ID NO: 113214 - DNA, 259 bp, Glycine max
aacattctctccattgtctttgaacactcatcaccatggccaagcttgttctttccctttgtttccttcttttcagtggctgcttcgctctgagagagcaggcacagcaaaatgagtgccagatccaaaagctgaatgccctcaaaccggataaccgtatagagtcggaaggtgggttcattgagacctggaaccctaacaacaagccattccagtgtgccggtgttgccctctctcgctgcacccttaaccgcaatgc

SEQ ID NO: 113215 - DNA, 274 bp, Glycine max
ttcggctcgaggctagctagcaagcaagcacagagatggaggcaaagcgaggccatgccctcatggtgcttggcacgtgtttcactcttcctctgcgctctaaccctatccgctgctcacggaagcaccacggttcaagacatcgcgagaaagttgaaactcggggacaacgagcttctgcgcacggagaagaacctcaaggttttcatggagaattacgggaggagctactccacagaggaggagtatttgcgccgtttggggatttcgccca

SEQ ID NO: 113216 - DNA, 258 bp, Glycine max
tggtaggaggtaaggctgggtcgacccagatctagttgagctcaccaactcccgctcccatttccttatttatagacagagtctgattgtttcctcaccactccctccactctctttctctagtcctgttatttctcagcgcgtaaagcatggctttgttggtggagaaaaccacgagtggtcgcgagtacaaggtcaaggacctttcccaggccgacttcggccgcctcgagatcgagctggccgaggttgagatgc

SEQ ID NO: 113217 - DNA, 259 bp, Glycine max
ttgtctttgaacactcatcaccatggccaagcttgttctttccctttgtttccttcttttcagtggctgcttcgctctgagagagcaggcacagcaaaatgagtgccagatccaaaagctgaatgccctcaaaccggataaccgtatagagtcggaaggtgggttcattgagacctggaaccctaacaacaagccattccagtgtgccggtgttgccctctctcgctgcacccttaaccgcaatgcccttcgtagacct

SEQ ID NO: 113218 - DNA, 257 bp, Glycine max
ctcgagccgctcgagccgcttaattattaacacttccttagttcaatatggggaagcccctcactctctctctttcttccctttgcttgctactcttgtcgagtgcatgctttgctattagctccagcaagctcaacgagtgccaactcaacaacctcaacgcgttggaacccgaccaccgcgttgagtccgaaggtggtttgattcaaacatggaactctcaacaccctgagctgaaatgcgccggtgtcactgtt

SEQ ID NO: 113219 - DNA, 257 bp, Glycine max
ataaaattcttccaccaagttatgggtttccttgtgttgcttcttttctccctcttaggtctctcttctagttccagcatatcaactcatcgttccatattggaccttgacctaaccaagtttaccacacagaaacaggtgtcttcactgttccaactatggaagagtgagcatggacgtgtctaccataaccacgaagaagaggcaaagagacttgagattttcaagaataacttgaactatatcagggacatgaa

SEQ ID NO: 113220 - DNA, 249 bp, Glycine max
tatatactatgatgagagtgcggtttcctttgttggtgttgctgggaactgttttcctggcatcagtttgtgtctcattaaaggtgagagaggatgagaataaccctttctacttgagaagctctaacagcttccaaactctctttgagaaccaaaacggtcgcattcgtctcctccagagattcaacaaacgctccccacaacttgagaaccttcgagactaccggattgtccagtttcagtcaaaac

SEQ ID NO: 113221 - DNA, 245 bp, Glycine max
ttgtctttgaacactcatcaccatggccatgcttgttctctccctttgtttccttcttttcagtggctgcttcgctctgagagagcaggcacagcactatgagtgccagatccaaaagctgaatgccctcaaaccggataaccgtatagagtcggaaggtgggttcattgagacctggaaccctaacaacaagccattccagtgtgccggtgttgccctctctcgctgcacccttaaccgcaatg

SEQ ID NO: 113222 - DNA, 256 bp, Glycine max
gattgatacacccttcttcgttcctcactcaccagccacagattctctcttctctattcagtaaacggctgttttgtatacgagctgtcccggtctcagcctctacatcccaaaacatcaaaacaactggttgggctccttgtatggcttcttcctcagttggtagaagagctacatattcaacacaatctgtatcgacaaatgagccagttgtatctgtagattggctttatgataacctgaaggagccagatat

SEQ ID NO: 113223 - DNA, 247 bp, Glycine max
gttcctcactgaccaagccatggcgatgagaaccaaactttctttagctatctttttcttttttcttttagccttattttcaaacctagcctttggcaaatgtaaagaaaccgaggtagaagaagaagaccctgagctcgtaacatgcaaacaccaatgccaacagccacagcaatacactgagggtgacaagcgggtatgcttgcaaagatgtgacaggtatcatcgtatgaagcaagagcgagag

SEQ ID NO: 113224 - DNA, 254 bp, Glycine max
ctcgagccgtaaaattcttccaccaagttatgggtttccttgtgttgcttcttttctcactcttaggtctctcttctagttccagcatatcaactcatcgttccatattggaccttgacctaaccaagtttaccacacagaaacaggtgtcttcactgttccaactatggaagagtgagcatggacgtgtctaccataaccacgaagaagaggcaaagagacttgagattttcaagaataacttgaactatatc

SEQ ID NO: 113225 - DNA, 257 bp, Glycine max
cagtgtggtacttgtgtcgtggtacttgtgtggtcatggttgaaggtgcagtttagggttttgcaatgaagatgatgaccacacaagtaccaccacacagtgtccaagtccacacaacaacacaccgctacgaagctggcgtcgtcccccccggagcccgtttcgaaccgccgcgtcatgaagccggcgtcaaagcgccctccatttaccattccgagagaggtccaacgacttcccaggtcctcgccgtcctcgcc

SEQ ID NO: 113226 - DNA, 256 bp, Glycine max
gttcaatatcctagtataccttaataaataatttaagatactatgatgagagcacggttcccattactgttgctgggacttgttttcctggcttcagtttctgtctcatttggcattgcttactgggaaaaagagaaccccaaacacaacaagtgtctccagagttgcaatagcgagagagactcgtacaggaaccaagcatgccacgctcgttgcaacctccttaaggtggagctagacgaatgtgaagatggtg

SEQ ID NO: 113227 - DNA, 226 bp, Glycine max
actgactcggaacacgcatggacatggccaagctagttctatgcctacgattccttctgaacagtggccgctccgctcggagagcggaggcacagcaaaatgagtgccagatcgaaaagcggaatgccctcaaaccggataaccgtatagaggccgaaagtgggatcactgagacctggaacccgaacaacaagccagagcactgtgccggtgacacccccactcg

SEQ ID NO: 113228 - DNA, 257 bp, Glycine max
gccaaattagagttagattattagggtttaaccgttcctccccttccttttcaccataatcaacatcaacctcttccaaatcccaatggatccgaccaagaagcgcaagctcgacgagaacggcttcatcaacaacgactcctccgagcccctcaagctctccccctccgacgcccgcaagctcatcgagcgcttcaccactgaccagctcctcgacatcctccaggacacggtggcgcgccaccccgacgtcctcg

SEQ ID NO: 113229 - DNA, 255 bp, Glycine max
ctcgagcgattcggctgagagaatgtgaagaaggtgaaataccacgaccacgaccaagcacacaacacccggagagggaacctcagcaacccggtgagaaggaggaagacgaagatgagcaaccacgtccaatcccattcccacgcccacaacctcgtcaagaagaagagcacgagcagagagaggaacaggaatggcctcgcaaggaggaaaaacgcggagaaaagggaagtgaagaggaagatgaggatgagg

SEQ ID NO: 113230 - DNA, 255 bp, Glycine max
tcttagtacaccgtattaaagaatttaagatatactatgatgagagcgcggttcccattactgttgctgggagttgttttcctggcatcagtttctgtctcatttggcattgcgtattgggaaaagcagaaccccagtcacaacaagtgcctccgaagttgcaatagcgagaaagactcctacaggaaccaagcatgccacgctcgttgcaacctccttaaggtggaggaagaagaagaatgcgaagaaggtcat

SEQ ID NO: 113231 - DNA, 255 bp, Glycine max
gatcgttccacaaaactttgcggtggctgcaaaatcccagagcgataactttgagtatgtgtcattcaagaccaatgatagaccctcgatcggaaaccttgcaggggcaaactcattgttgaacgcattgccagaggaagtgattcagcacacttttaacctaaagagccagcaggccaggcaggtgaagaacaacaaccctttcagcttcctggttccacctcaggagtctcagaggagagctgtggcttagag

SEQ ID NO: 113232 - DNA, 256 bp, Glycine max
ccaaattcgggaactgagcaaacatgccaaatctagttcaaggaaaaccatttcttctgaagataaacctttcaacttgagaagccgcgaccccatctattccaacaagcttggcaagttgtttgagattaccccagagaaaaaccctcagcttcgggacttggatgtcttcctcagtgttgtggatatgaacgagggagctctttttctgccacacttcaattcaaaggccatagtggtcttccatgattaatga

SEQ ID NO: 113233 - DNA, 255 bp, Glycine max
agaagaggctcaaggtcgcagaagcagcagctacaggacagtcaccagaagattcgtcacttcaatgaaggagacgtactcgtgattcctcctggtgttccttactggacctataacactggcgatgaaccagttgttgccatcagtcttcttgacacctctaacttcaataaccagcttgatcaaacccctagggtattttaccttgctgggaacccagatatagagtacccagagaccatgcaacaacaacaa

SEQ ID NO: 113234 - DNA, 253 bp, Glycine max
agacggtaacggaaccgttaagaccatcgccgaggccattaagaaggtgccggaatatagttcacgccgcattattatctacgtcagggcaggaaggtgtgaagaagagaatttaaagttggggaggaagaaaacaaatgtgatgttcataggggacgggaagggcaaaaccgtcatcacgggcggaagaaattattaccagaatctgaccacatttcacaccgcgtccttcgctgctagtggttctggtttc

SEQ ID NO: 113235 - DNA, 256 bp, Glycine max
ctctccattgtctttgaacactcatcaccatggccaagcttgttctttccctttgtttccttcttttcagtggctgcttcgctctgagagagcaggcacagcaaaatgagtgccagatccaaaagctgaatgccctcaaaccggataaccgtatagagtcggaaggtgggttcattgagacctggaaccctaacaacaagccattccagtgtgccggtgttgccctctctcgctgcacccttaaccgcaatgccct

SEQ ID NO: 113236 - DNA, 257 bp, Glycine max
aaaccttgctctatactacacagtacacacactagaagaataatggcttccatcctccactactttttagccctctctctttcttgctcttttcttttcttcttatccgactcagtcacccctacaaaaccaataaaccttgttgttctacccgttcaaaatgatggttccacagggctccattggtccaacctccaaaaaagaacccctctaatgcaagtaccagtcctggtggacctcaatggaaatcacttgtg

SEQ ID NO: 113237 - DNA, 256 bp, Glycine max
ctcgagccgcagagcttttgtcaattttctattgaccttctcggtggaggaattttagtggacaaaactggagattggatcacacttatacaaaattctccaattagtaacttgttgagagttgctgcttggaagaaaggctgtttaatggttaagattgtgatgtctgggaatgcagcagtcaaaaggagtgattgggcctcattggtacaagtgtttttaacaaacagcaacagtacagagcattttgatgcat

SEQ ID NO: 113238 - DNA, 253 bp, Glycine max; identical to SEQ ID NO: 102906

SEQ ID NO: 113239 - DNA, 253 bp, Glycine max
gccactttgattccgaggttgtttttttcaacatcaaggggcgagccgtacttgggttggtgagtgaaagtgaaacagaaaaaatcacccttgaacctggggacatgatacacataccagctggcaccccactgtacatcgttaacagagatgagaatgataagctcttccttgccatgctccatatacctgtctctgtctctactcctggaaaatttgaggaatttttcgggcctggaggacgagacccaga

SEQ ID NO: 113240 - DNA, 254 bp, Glycine max
ctagttcaatatcctagtataccttaataaataatttaagatactatgatgagagcacggttcccattactgttgctgggacttgttttcctggcttcagtttctgtctcatttggcattgcttactgggaaaaagagaaccccaaacacaacaagtgtctccagagttgcaatagcgagagagactcgtacaggaaccaagcatgccacgctcgttgcaacctccttaaggtggagaaagaagaatgtgaaga

SEQ ID NO: 113241 - DNA, 252 bp, Glycine max
aatatcctagtataccttaataaataatttaagatactatgatgagagcacggttcccattactgttgctgggacttgttttcctggcttcagtttctgtctcatttggcattgcttactgggaaaaagagaaccccaaacacaacaagtgtctccagagttgcaatagcgagagagactcgtacaggaaccaagcatgccacgctcgttgcaacctccttaaggtggagaaagaagaatgtgaagaaggtg

SEQ ID NO: 113242 - DNA, 240 bp, Glycine max
  unsure (1)..(240): unsure at all n locations
gttcctcactgaccaagccagggcgatgagaaccaaactttctttagctatctttttcttttttcttttagccttattttcaaacctagcctttggcaaatgtaaagaaaccgaggtagaagaagaagaccctgagctcgtaacatgcaanaaccaatgccaacagccacagcaatacactgagggtgacaagcgggtatgcttgcaaagatgtgacaggtatcatcgtatgaagcaaga

SEQ ID NO: 113243 - DNA, 249 bp, Glycine max
cagcttggagaaccagctcgaccagatgcctaggagattctatcttgctgggaaccaagagcaagagtttctaaaatatcagcagcagcagcaaggaggttcccaaagccagaaaggaaagcaacaagaagaagaaaacgaaggaagcaacatattgagtggcttcgcccctgaattcttgaaagaagcgttcggcgtgaacatgcagatagtgagaaacctacaaggtgagaacgaagaggaggatag

SEQ ID NO: 113244 - DNA, 251 bp, Glycine max
taaaattcttccaccaagttatgggtttccttgtgttgcttcttttctccctcttaggtctctcttctagttccagcatatcaactcatcgttccatattggaccttgacctaaccaagtttaccacacagaaacaggtgtcttcactgttccaactatggaagagtgagcatggacgtgtctaccataaccacgaagaagaggcaaagagacttgagattttcaagaataacttgaactatatcagggac

SEQ ID NO: 113245 - DNA, 252 bp, Glycine max
atatactatgatgagagtgcggtttcctttgttggtgttgctgggaactgttttcctggcatcagtttgtgtctcattaaaggtgagagaggatgagaataaccctttctacttgagaagctctaacagcttccaaactctctttgagaaccaaaacggtcgcattcgtctcctccagagattcaacaaacgctccccacaacttgagaaccttcgagactaccggattgtccagtttcagtcaaaacccaa

SEQ ID NO: 113246 - DNA, 253 bp, Glycine max
cggctcgagaatttttgcaggatagcagatatgttccggttaagttggcaccatcaggatttgtgcttctcagagacttgcatcctactgagccagaagtgcttgctctaactgacacgccctcatctaccagttctgctgctggtgggtcagcaacaggattgcagagttcttcatcagccatggctgtggatgaggaacctcaacctcctcaaccatttgaatacacctcatgagtttggacctgattcca

SEQ ID NO: 113247 - DNA, 253 bp, Glycine max
gcttggcaagttctttgagatcaccccagagaaaaacccccagcttcgggacttggatatcttcctcagtattgtggatatgaacgagggagctcttcttctaccacacttcaattcaaaggcgatagtgatactggtaattaatgaaggagatgcaaacattgaacttgttggcctaaaagaacaacaacaggagcagcaacaggcagagcaaccgttggaagtgcggaaatatagagccgaattgtctgaa

SEQ ID NO: 113248 - DNA, 250 bp, Glycine max; identical to SEQ ID NO: 113149

SEQ ID NO: 113249 - DNA, 252 bp, Glycine max
caattgaagagcttgttgaaatttgcaccattatcatatggactgcttcagccctccatacagccgttaactttggtcaatatccatatggaggtttcattctgaatcgcccaacttcttctagaaggttgcttcctgagaaaggcaccccagaatatgaagaaatggtgaaaagtcatcaaaaggcttatttgagaactattacatcaaagtttcaaactctagttgacctttcagtgatagagatcttgt

SEQ ID NO: 113250 - DNA, 251 bp, Glycine max
gttcaatatcctagtataccttaataaataatttaagatactatgatgagagcacggttcccattactgttgctgggacttgttttcctggcttcagtttctgtctcatttggcattgcttactgggacaaagagaaccccaaacacaacaagtgtctccagagttgcaatagcgagagagactcgtacaggaaccaagcatgccacgctcgttgcaacctccttaaggtggagaaagaagaatgtgaaga

SEQ ID NO: 113251 - DNA, 247 bp, Glycine max
ccaatatattccattctctctgtgtatttccctacctctcccttcaagatgcagatcttcgtcaagaccctcaccggcaagaccatcacccttgaggtggaaagctctgacaccatcgacaacgtcaaggccaagatccaggacaaggaaggaatccccccggaccagcaacgtctcattttcgccggaaagcaacttgaggacggccgtacccttgctgactacaacattcagaaggagagtactc

SEQ ID NO: 113252 - DNA, 249 bp, Glycine max
ctcctttaccaccattctagatatcagagaactttgcagctctcttaggtttttaaaaaacaccacgcaaacagcaagatggccacttccgacagtaacatgctactaaattatgttccagtttatgtgatgctcccactcggagttgtcaatgttgacaatgtttttgaagacccagatggccttaaagaacagctcttgcagcttcgagctgcgggtgttgacggggttatggttgatgtgtggtgg

SEQ ID NO: 113253 - DNA, 250 bp, Glycine max
ctcgagccgctcgtacaggaaccaagcatgccacgctcgttgcaacctccttaaggtggagaaagaagaatgtgaagaaggtgaaattccacgaccacgaccacggccacaacacccggagagggaacctcagcaacccggtgagaaggaggaagacgaagatgagcaaccacgtccaatcccgttcccacgcccacaacctcgtcaagaagaagagcacgagcagagagaggaacaggaatggcctcgc

SEQ ID NO: 113254 - DNA, 138 bp, Glycine max
ttctgatattcaaattggataaagatgaaattcgaacaatgattttttcattttctttttaatacttttttggtttagactccctaagaatctgtcgatatttcgaattaaatcttcttgttcctgtgaaggtcctat

SEQ ID NO: 113255 - DNA, 106 bp, Glycine max
ttattcagtaaaatgtatgctgtaatagctcatagtgagcgaggaaagtatcgggctatttaactatgacttgagctccatctatgaataaataaatcagcatatg

SEQ ID NO: 113256 - DNA, 250 bp, Glycine max
agaagaggctcaaggtcgcagcagcaactacaagacagtcaccagaagattcgtcacttcaatgaaggagacgtactagtgattcctcctggtgttccttactggacctataacactggcgatgaaccagttgttgccatcagtcttcttgacacctccaacttcaacaatcagcttgatcaaaaccccagagtattttaccttgctgggaacccagatatagagcacccagagaccatgcaacaacagc

SEQ ID NO: 113257 - DNA, 249 bp, Glycine max
cttaattattaacacttccttagttcaatatggggaagcccttcactctctctctttcttccctttgcttgctactcttgtcgagtgcatgctttgctattagctccagcaagctcaacgagtgccaactcaacaacctcaacgcgttggaacccgaccagcgcgttgagtccgaaggtggtttgattcaaacatggaactctcaacaccctgagctgaaatgcgccggtgtcactgtttccaaactca

SEQ ID NO: 113258 - DNA, 81 bp, Glycine max
gttgaacgcattgccggaggaagtgattcagcaaacttttaacctaaggcggcagcaggccaggcaggtcaagaacaactc

SEQ ID NO: 113259 - DNA, 249 bp, Glycine max
gaggttgggtttggaaggcaaaggctggtgttgtcccaatccaagagagaagtaaagtaaagcaaaggaatggcgaacatagacatcgaagggatcttgaagcagcagcctgatgatgggcgcgttccgaagacgaaaatagtgtgtactttgggccccgcttctcgatccgtggaaatgactgagaagcttcttagggctgggatgaacgttgctcgtttcaatttctctcatggcacccacgactat

SEQ ID NO: 113260 - DNA, 250 bp, Glycine max
gtctgcatggatgactgatgaagaatttgcaagagaaatgcttgctggtgtaaatccaaacttgattcgttgtcttaaggagttccctccacgaagcaagctagatagccaagtctatggtgatcatactagtcaaataaccaaagaacacctagagcccaacttagaagggctcactgtagatgaggcaattcaaaacaagagattgttcctactagatcatcatgacccaatcatgccatatttgagg

SEQ ID NO: 113261 - DNA, 252 bp, Glycine max
cattgtctttgaacactcatcaccatggccaagcttgttctttccctttgtttccttcttttcagtggctgcttcgctctgagagagcaggcacagcaaaatgagtgccagatccaaaagctgaatgccctcaaaccggataaccgtatagagtcggaaggtgggttcattgagacctggaaccctaacaacaagccattccagtgtgccggtgttgccctctctcgctgcacccttaaccgcaatgccctt

SEQ ID NO: 113262 - DNA, 250 bp, Glycine max
cttaattattaacacttccttagttcaatatggggaagcccttcactctctctctttcttccctttgcttgctactcttgtcgagtgcatgctttgctattagctccagcaagctcaacgagtgccaactcaacaacctcaacgcgttggaacccgaccaccgcgttgagtccgaaggtggtttgattcaaacatggaactctcaacaccctgagctgaaatgcgccggtgtcactgtttccaaactcac

SEQ ID NO: 113263 - DNA, 250 bp, Glycine max
caagaggaagagcacgagcagaaggaggaacacgaatggcatcgcaaggaggaaaaacacggaggaaagggaagtgaagaggaacaagatgaacgtgaacacccacgcccacaccaacctcatcaaaaggaagaggaaaagcacgaatggcaacacaagcaggaaaagcaccaaggaaaggaaagtgaagcagaagaagaagaccaagacgaggatgaggagcaagacaaagagagccaagaaagtgaag

SEQ ID NO: 113264 - DNA, 250 bp, Glycine max
ctcgagccgcgagcagaaggaggaacacgaatggcatcgcaaggaggaaaaacacggaggacaagggaagtgaagaggaacaagatgaacgtgaacacccacgcccacaccaacctcatcaaaaggaagaggaaaagcacgaatggcaacacaagcaggaaaagcaccaaggaaaggaaagtgaagaagaagaagaagaccaagacgaggatgaggagcaagacaaagagagccaagaaagtgaaggttc

SEQ ID NO: 113265 - DNA, 247 bp, Glycine max
tcccaattacccttcccaattttcaccaaaacctaatactcccacaccaatcttcgatcatggacgccgattcacaacctcaacaactcgaagagagaacagaggagcaagaactgaagtacctggaattcgtgcaattcgcgaccatacaggctctgatgcgctgcgccatcctctactcatacgccaaggagcgcgcgggtcctctgaagcccggtgtcgacaccgtggaggaggccgtgaagac

SEQ ID NO: 113266 - DNA, 247 bp, Glycine max
ctagttcaatatcctagtataccttaataaataatttaagatactatgatgagagcacggttcccattactgttgctgggacttgttttcctggcttcagtttctgtctcatttggcattgcttactgggaaaaagagaaccccaaacacaacaagtgtctccagagttgcaatagcgagagagactcgtacaggaaccaagcatgccacgctcgttgcaacctccttaaggtggagaaagaagaat

SEQ ID NO: 113267 - DNA, 247 bp, Glycine max
gcaggttatccagttgtggtcaacgctacctcaaatctgaatttctttgctattggtattaatgccgagaacaaccagaggaacttcctcgcaggttcgcaagacaatgtgataagccagatacctagtcaagtgcaggagcttgcattccctgggtctgcacaagctgttgagaagctattaaagaaccaaagagaatcctactttgtggatgctcagcctaagaagaaagaggaggggaataagg

SEQ ID NO: 113268 - DNA, 248 bp, Glycine max; identical to SEQ ID NO: 112248

SEQ ID NO: 113269 - DNA, 231 bp, Glycine max
gctagctagctagcaagcaagcacagagatggaggcaaagcgaggccatgccctcatgtgcttggcacgtgtttcactcttcctctgcgctctaaccctatccgctgctcacggaagcaccacggttcaagacatcgcgagacagttgaaactcggggacaacgaacttctgcgcacggagaagaagttcaaggttttcatggagaattacgggaggagctactccacaga

SEQ ID NO: 113270 - DNA, 248 bp, Glycine max
gtcttgacaaaaacatatcatatgattgatgaggatgaaccaatattggagaaagcaattgggactgaaattcaatggcacccaggaaaatgtctgacacagaagattcttaagaaaaaacctaagaagggttcgaagaatgctaaaccaattaccaaaactgaaaattgtgaaagcttcttcaatttcttcaaccccccgcaagttcctgaagatgatgaagacattgatgaagatgtggctgagga

SEQ ID NO: 113271 - DNA, 249 bp, Glycine max; identical to SEQ ID NO: 111989

SEQ ID NO: 113272 - DNA, 247 bp, Glycine max
gttctcagaaaccttaaaaacaacaacgtaggagtgttcggaaaagatggctaagcaggaagtggtggaagggttcaagttcgagcagaggcacgggaaagaacgcgtgagagtggcgcgcgtgtggaagacgaggcaggggcagcacttcattgtggagtggcgcgtggggatcactctcttttcggattgcgtcaactcgtacctccgcgatgacaactctgacatcgttgctactgataccatg

SEQ ID NO: 113273 - DNA, 247 bp, Glycine max
aagaggacaaagcagcagaccacaagaccgtcaccagaagatctataacttcagagagggtgatttgatcgcagtgcctactggtgttgcatggtggatgtacaacaatgaagacactcctgttgttgccgtttctattattgacaccaacagcttggagaaccagctcgaccagatgcctaggagattctatcttgctgggaaccaagagcaagagtttctaaaatatcagcaagagcaaggaggt

SEQ ID NO: 113274 - DNA, 249 bp, Glycine max
ctcgagccgttttctctctcgttttttctcaaaaagttgcaagagttaaagcaaaaaccacagtgagagagaaaatgatgaagccatcgatgctcagatctcttcactctgccgccacccgcggcgcctcccacctctcccgccgtggctacgcctccgagccggtgccggagcgcaaggtggccgttctaggtgccgccggcgggatcgggcaacccctctcccttctcatgaagctcaaccccctcg

SEQ ID NO: 113275 - DNA, 248 bp, Glycine max
aaagctttttgatcaacagaacgagggaagtattttcgcaataagcagagaacaggtgcgtgcgttggcccctaccaagaaaagctcttggtggccattcggtggcgaatccaagcctcaattcaatattttcagcaagcgtcccactatctccaacggatatggtcgtttaactgaagttggtcctgacgatgatgaaaagagttggcttcaaagactcaatctcatgcttacctttaccaacatca

SEQ ID NO: 113276 - DNA, 246 bp, Glycine max
ctcgagccgattcggctcgagtcaatatcctagtataccttaatcgataatttaagatacgatgatgagagcacggttcccattactgttgctgggacttgttttcctggcttcagtttctgtctcatttggcattgcttactgggaaaaagagaaccccaaacacaacaagtgtctccagagttgcaatagcgagagagactcgtacaggaaccaagcatgccacgctcgttgcaacctccttaa

SEQ ID NO: 113277 - DNA, 245 bp, Glycine max
gctgaggatgacaaatgtggggatattgggattagtattgatcatcagaaagtcttccatagccccccaaaaatgaagagcaccatcttctttgctctctttctcttttgtgccttcaccacctcatacctaccttcagccatcgctgatttcgtgctcgataatgaaggtaaccctcttgaaaatggtggcacatattatatcttgtcagacataacagcatttggtggaataagagcagcccc

SEQ ID NO: 113278 - DNA, 244 bp, Glycine max
gttcaatatcctagtataccttaataaataatttaagatactatgatgagagcacggttcccattactgttgctgggacttgttttcctggcttcagtttctgtctcatttggcattgcttactgggaaaaagagaaccccaaacacaacaagtgtctccagagttgcaatagcgagagagactcgtacaggaaccaagcatgccacgctcgttgcaacctccttaaggtggagaaagaagaat

SEQ ID NO: 113279 - DNA, 247 bp, Glycine max
cttaattattaacacttccttagttcaatatggggaagcccttcactctctctctttcttccctttgcttgctactcttgtcgagtgcatgctttgctattagctccagcaagctcaacgagtgccaactcaacaacctcaacgcgttggaacccgaccaccgcgttgagtccgaaggtggtttgattcaaacatggaactctcaacaccctgagctgaaatgcgccggtgtcactgtttccaaact

SEQ ID NO: 113280 - DNA, 247 bp, Glycine max
cttctaccgttctacatagcatctcctagagcaccattctagatatcagagaactgtgcagctctcttaggtatgtaaaaaacaccacgcaaacagcaagagggccacttccgacagtaacatgctagtaaattatgttccagtttatgtgatgctcccactcggagttgtcaatgttgacaatgtttttgaagacccagatggccttaaagaacagctcttgcagcttcgagctgcgggtgttgac

SEQ ID NO: 113281 - DNA, 246 bp, Glycine max
cctagtataccttaataaataatttaagatactatgatgagagcacggttcccattactgttgctgggacttgttttcctggcttcagtttctgtctcatttggcattgcttactgggaaaaagagaaccccaaacacaacaagtgtctccagagttgcaatagcgagagagactcgtacaggaaccaagcatgccacgctcgttgcaacctccttaaggtggagaaagaagaatgtgaagaaggt

SEQ ID NO: 113282 - DNA, 246 bp, Glycine max
gcagcagcggcaagcaactccatccgcaatgggaatcgatttgaaggcaggaggtaagtccaagaagaccaaacgtacagcccccaaatccaatgatatttacctcaagctcctcgtcaagctgtaccgttttcttgttcggaggactggtagtaacttcaatgccgtcatcctcaaacgccttttcatgagcaaggtcaacaagcccccgctatccctctctagattgattcgttacaccaaggg

SEQ ID NO: 113283 - DNA, 82 bp, Glycine max
taagatttgagattttgataaaccgcgatcacaggttgccgcaccttaaaaccggaaacaaaagcaatcgttacttgatttc

SEQ ID NO: 113284 - DNA, 247 bp, Glycine max
gctctttgttctttgccatggagtggccacaacaacaatggccttccatgatgatgagggtggtgataaaaagtcaccaaaaagtttgtttttgatgagcaactccacgagggttttcaatcctgatgcaggggaaatgcgtgtgctgaaaagccatggtggtaggatattttataggcacatgcacattggcttcatctctatggaaccaaagtccttgtttgttcctcagtacctcgactccaat

SEQ ID NO: 113285 - DNA, 247 bp, Glycine max
ggctcgagccgaatcggctcgagcgaggaatcttgttgaagccatggctacagctggtcagggcatcaagtgcagagctgcggtggcatgggaagcagggaagccactatcgatagaaaccatagaagtggcaccaccccagaaaggtgaagtgcgtttgaagatcctcttcaactccctttgccgtacagatgtttactggtgggatgctaagggccagactccgctgtttcctcgtatcttaggc

SEQ ID NO: 113286 - DNA, 245 bp, Glycine max
agatgaagacgaagaatatgaacaaactccctcttatcctccacgacgaccaagccatggaaagcatgaagatgacgaggacgaggacgaagaagaagatcaacctcgtcctgatcaccctccacagcgaccaagcaggcccgaacaacaagaaccacgtggaagaggatgtcagactagaaatggggttgaggaaaatatttgcaccatgaagcttcacgagaacattgctcgcccttcacgtg

SEQ ID NO: 113287 - DNA, 245 bp, Glycine max
ctagttcaatatcctagtataccttaataaataatttaagatactatgatgagagcacggttcccattactgttgctgggacttgttttcctggcttcagtttctgtctcatttggcattgcttactgggaaaaagagaaccccaaacacaacaagtgtctccagagttgcaatagcgagagagactcgtacaggaaccaagcatgccacgctcgttgcaacctccttaaggtggagaaagaaga

SEQ ID NO: 113288 - DNA, 246 bp, Glycine max
gagcttgcattccctgggtctgcacaagctgttgagaagctattaaagaaccaaagagaatcctactttgtggatgctcagcctaagaagaaagaggaggggaataagggaagaaagggtcctttgtcttcaattttgagggctttttactgaataagtatgtactaaaatgtatgctgtaatagctcatagtgagcgaggaaagtatcgggctatgtaactatgactagagcttcaactatgaat

SEQ ID NO: 113289 - DNA, 244 bp, Glycine max
ggcatttcaaggatggcctttactttctcaggatctatctctatccctttctgacttacgataaatcctagcagcttccccgacttcaccccaaaggtgcatttggttgggttcagttttaattggtatttccgcaaccttccaaaaagcttacgcagattgacaaggtgttcggcctcagtccgagacttggcaatcatgtcatctacgtagacctctatttccttatgcatcctatcatgga

SEQ ID NO: 113290 - DNA, 243 bp, Glycine max
ccgtattaaagaatttaagatatactatgatgagagcgcggttcccattactgttgctgggagttgttttcctggcatcagtttctgtctcatttggcattgcgtattgggaaaagcagaaccccagtcacaacaagtgcctccgaagttgcaatagcgagaaagactcctacaggaaccaagcatgccacgctcgttgcaacctccttaaggtggaggaagaagaagaatgcgaagaaggtc

SEQ ID NO: 113291 - DNA, 246 bp, Glycine max
ggaagaggatgataaggacttgcatggggggtagaatcaactacataaggaggaacgaaggaaaagacgaagacgaagaagaagaaggacacatgcagaagtgctgcacagaaatgagcgagctgagaagccccaaatgccagtgcaaagcgctgcagaagataatggagaaccagagcgaggaactggaggagaagcagaagaagaaaatggagaaggagctcattaacttggctactatgtgca

SEQ ID NO: 113292 - DNA, 245 bp, Glycine max
ctcgttcctcttattagcgacggccattctcgccgttgtgtgctccgccgtgagcggttgctcgccatcggatagggcggcgctgctggccttccggaaggcgctgagcgagccctaccttggcctcttcaactcgtggacgggctccaactgctgcctcgactggtacggcatcagctgcgacgccaccaccggccgcgtcaccgacatcaacctccgcggggagtccgaagaccccatcttcg

SEQ ID NO: 113293 - DNA, 246 bp, Glycine max
cttgagattttcaagaataacttgaactatatcagggacatgaatgcaaacagaaaatcaccccattctcatcgtttaggattgaacaagtttgctgacatcactcctcaagagttcagcaaaaagtacttgcaagctcccaaggatgtgtcgcagcaaatcaaaatggccaacaagaaaatgaagaaggaacaatattcttgtgaccatccacctgcatcatgggattggaggaaaaaaggtgtc

SEQ ID NO: 113294 - DNA, 246 bp, Glycine max
ggaatttccatcagtaagaaattgttggatcaaacatctgatgacttccacaaggtgttgcacactgctattcgctgcatcaatgaccataagaagtactatgagaaggttttgcgcaatgcagtcaagaagtttggaactgacgaggatggactaagccgtgtgattgttacaagggctgagaaggatctgaaggacatcaaagagctctactacaagagaaacagtgttcaccgtgaggatgaa

SEQ ID NO: 113295 - DNA, 246 bp, Glycine max
tgagattcagatgatggcgagtgagtcgcaaaactgggtgttcatggtcactgcacagacaccaaccaacattgccgttatcaagtattgggggaaaagagacgaaaccctcatcttaagggttaacgacagtatcagtgtcactctcgatcccagccacctctgcaccaccaccactgctgccgtcagtcccgctttccaccaagatcgcatgtggctcaatggaaaggagatttctctttctgg

SEQ ID NO: 113296 - DNA, 244 bp, Glycine max
accagttgttgccatcagtcttcttgacacctccaacttcaacaatcagcttgatcaaaaccccagagtattttaccttgctgggaacccagatatagagcacccagagaccatgcaacaacagcagcagcagaagagtcatggtggacgcaagcaggggcaacaccagcagcaggaggaagaaggtggcagtgtgctcagtggcttcagcaaacatttcttagcacaatccttcaacaccaac

SEQ ID NO: 113297 - DNA, 246 bp, Glycine max
ggaagacgaaggtgagcagccacgtccattcccattcccacgcccacgccaacctcatcaagaggaagagcacgagcagaaggaggaacacgaatggcatcgcaaggaggaaaaacacggaggaaagggaagtgaagaggaacaagatgaacgtgaacacccacgcccacaccaacctcatcaaaaggaagaggaaaagcacgaatggcaacacaagcaggaaaagcaccaaggaaaggaaagtga

SEQ ID NO: 113298 - DNA, 245 bp, Glycine max
gttcaatatcctagtacaccgtattaaagaatttaagatatactatgatgagagcgcggttcccattactgttgctgggagttgttttcctggcatcagtttctgtctcatttggcattgcgtattgggaaaagcagaaccccagtcacaacaagtgcctccgaagttgcaatagcgagacagactcctacaggaaccaagcatgccacgctcgttgcaacctccttaaggtggaggaagaagaa

SEQ ID NO: 113299 - DNA, 241 bp, Glycine max
cttgtgttgcttcttttctccctcttaggtctctcttctagttccagcatatcaactcatcgttccatattggaccttgacctaaccaagtttaccacacagaaacaggtgtcttcactgttccaactatggaagagtgagcatggacgtgtctaccataaccacgaagaagaggcaaagagacttgagattttcaagaataacttgaactatatcagggacatgaatgcaaacagaaaat

SEQ ID NO: 113300 - DNA, 243 bp, Glycine max
agaaaaaagccattactttacttcactttacatgtcgaactccgacgccaccactaacggcgtcactaacggcgccatcattgatgcgcagagacagcaggccttagccgttaagaccccgccgtctaaggaccgtcacagcaaggtggacggccgagggcgccgcataaggatgccaatcatatgcgccgcacgtgtgttccagctcacgcgcgagcttggccacaagtccgacggtcaaac

SEQ ID NO: 113301 - DNA, 239 bp, Glycine max
cacttccttagttcaatatggggtcgcccttcactctctctctttcttccctttgcttgctactcttgtcgagtgcatgctttgctattagctccagcaagctcaacgagtgccaactcaacgccctcaacgcgttggaacccgaccaccgcgttgagtccgaatgtggtttgattcaaacatggaactctcaacaccctgagctgaaatgcgccggtgtcactgtttccaaactcacc

SEQ ID NO: 113302 - DNA, 244 bp, Glycine max
attggtccttaaacactcatcagtcatcaccatggccaagctagttttttccctttgttttctgcttttcagtggctgctgcttcgctttcagttccagagagcagcctcagcaaaacgagtgccagatccaaaaactcaatgccctcaaaccggataaccgtatagagtcagaaggagggctcattgagacatggaaccctaacaacaagccattccagtgtgccggtgttgccctctctcgc

SEQ ID NO: 113303 - DNA, 244 bp, Glycine max
ggacagtgtggggaagaaagaaacagacaaaaatggcgccaaacgctctctttctcttctctgtcctcgccattcccctcctccttctgccctgcccaaccgccgccggccacgactaccgcgacgccctccgcaaaagcattctcttcttcgaaggccagcgctccggcaaactccccgccgaccagcgcctccgcaggcgccacgactctgcattgcacgacggcgccaccgccggagtgga

SEQ ID NO: 113304 - DNA, 243 bp, Glycine max
cgcagagaagaacagagagagatccatccatcaattccaatggccgatcagctcaccgacgaacagatctccgagttcaaggaagccttcagcctcttcgacaaggacggggatggttgtattaccaccaaggaacttgggaccgtgatgcggtcacttggccagaacccaactgaggcagagctgcaggacatgataaatgaggttgatgctgatgggaatggtaccattgatttcccagaa

SEQ ID NO: 113305 - DNA, 242 bp, Glycine max
tccttagttcaatatggggaagcccttcttcactctctctctttcttccctttgcttgctactcttgtcgagtgcatgctttgctattacctccagcaagttcaacgagtgccaactcaacaacctcaacgcgttggaacccgaccaccgcgttgagtccgaaggtggtcttattgaaacatggaactctcaacaccctgagctgcaatgcgccggtgtcactgtttccaaacgcaccctca

SEQ ID NO: 113306 - DNA, 243 bp, Glycine max
tgccctaagagtccctgcaggaaccacatactatgtggttaaccctgacaacgacgagaatctcagaatgataacactcgccatacccgttaacaaacccggtagatttgagagtttcttcctatctagcactcaagctcaacagtcctacttgcaagggttcagcaagaatattctagaggcctcatacgacaccaaattcgaggagataaacaaggttctgtttggtagagaggaggggca

SEQ ID NO: 113307 - DNA, 241 bp, Glycine max
tgcgtctcttcctcttctctttcgattcatccctcattcataatcttccaatccaacaacctcagcctcacactcacacatacacacatctgaacgcgtatcgtccctcccatggcttcaaagcgcatcctcaaggagctcaaggacttgcagaaagacccaccaacttcttgcagcgctggtccagtagctgaggacatgttccattggcaagcaacgattatgggtcctgctgatagtc

SEQ ID NO: 113308 - DNA, 243 bp, Glycine max
cttcaaacttaattattaacgcttccttagttcaatatggggaagcccttcactctctctctttcttccctttgcttgctactcttgtcgagtgcatgctttgctattagctccagcaagctcaacgagtgccaactcaacaacctcaacgcgttggaacccgaccaccgcgttgagtccgaaggtggtttgattcaaacatggaactctcaacaccctgagctgaaatgcgccggtgtcact

SEQ ID NO: 113309 - DNA, 256 bp, Glycine max
ctaaaacaaaggacccagttttacatttttttcctgagttccaatggctcttcaggctgcttccttggtttctgcttctttttctattgctaaagagggaaagtctggtgtatctctcagggacaccacaatgtttggtgtttcattgtcggatactctcaaatctgacttcagctctccctcatcgacttgcaaaagggaattccaacaaaaatttggccctttgagggttcagtcagtggcaacaacaactcca

SEQ ID NO: 113310 - DNA, 256 bp, Glycine max
cttttgtccatagatcctgctgatcgtggaacttcagcatctgctttgaatagtgagttcttctcaacaaagcctctaccttgtgatccctcaagcttaccaaagtatcctcctagcaaagaatttgatgccaaagttcgggatgaagaagctagaagacaaggagcagcaggaagcaagggccagagacatgatcttgagagaagaggtgctagagaatcacgagccattcctgcacctgatgccaatgctgaac

SEQ ID NO: 113311 - DNA, 256 bp, Glycine max
cagagggttaattgtggagtattttggaaggatgtcttacgttgctcataacgttaaccagccccaagagaaagatttgttggagggaaatttttcctttgatattaaatctcgctctagattggaaaaagtttcctctacaaaagcacaatttgttagtggaaaaaccttcaaatatgatataattggtgctggttcacattcttcagaaaattttcctgaaaaggacagatcaagaaaaacccaaaaagattga

SEQ ID NO: 113312 - DNA, 253 bp, Glycine max
tgacttcccagccctctggcttctcaaactcagtgcccagtatggatcactccgcaagaatgctatgttcgtgccacactacaccctgaacgcgaacagcataatatacgcattgaatgggcgggcattggtacaagtggtgaattgcaatggtgagagagtgtttgatggagagctgcaagagggaggggtgctgatcgttccacaaaactttgcggtggctgcaaaatcccagagcgataactttgagtat

SEQ ID NO: 113313 - DNA, 250 bp, Glycine max
gtgaattgcaatggtgagagagtgtttgatggagagctgcaagagggaggggtgctgatcgttccacaaaactttgcggtggctgcaaaatcccagagcgataactttgagtatgtgtcattcaagaccaatgatagaccctcgatcggaaaccttgcaggggcaaactcattgttgaacgcattgccagaggaagtgattcagcacacttttaacctaaagagccagcaggccaggcaggtgaagaaca

SEQ ID NO: 113314 - DNA, 253 bp, Glycine max
cttgcaacgattaacaatggcttcaaccgacaagtcaccggacccaacgccggcgaagggtccggatccaactccggggaagccgatgagtgttggtcagcacgtgatcgacaagagtgcaatgatggtgcagtcgctggaccccattaagcagatgagtcagcacgtgtgctccttcgctatctacagccatgacatgtctcgccagatagagacacatcactactgctccagactccaccagaacttcata

SEQ ID NO: 113315 - DNA, 254 bp, Glycine max
atgaccaagttcacaatcctcctcatctctcttctcttctgcatcgcccacacttgcagcgcctccaaatggcagcaccagcaagatagctgccgcaagcagctccagggggtgaacctcacgccctgcgagaagcacatcatggagaagatccaaggccgcggcgatgacgatgatgatgatgacgacgacaatcacattctcaggaccatgcggggaagaatcaactacataaggaggaacgaaggaaaaga

SEQ ID NO: 113316 - DNA, 256 bp, Glycine max
ctggtgcaaagaatgccattctcatgaatatgccaaatgctgttctttcaatgtggagatattttgttggagatctcgtctttgaagtttctaagatgacttctccctacatcaaatgtacagtctctttcttcatagcatttggaaatttggctgatgacaccatcaattttgaggcttttccccacaagctggtgcagtttggagagattcaggaaaaagttgtattgaaattttcacaagaggaatttcttac

SEQ ID NO: 113317 - DNA, 256 bp, Glycine max
caagcttgttctttccctttgtttccttcttttcagtggctgcttcgctctgagagagcaggcacagcaaaatgagtgccagatccaaaagctgaatgccctcaaaccggataaccgtatagagtcggaaggtgggttcattgagacctggaaccctaacaacaagccattccagtgtgccggtgttgccctctctcgctgcacccttaaccgcaatgcccttcgtagaccttcctacaccaacggtccccaggaa

SEQ ID NO: 113318 - DNA, 255 bp, Glycine max
accaattttcctatagcacttggacacgaaggagttggtattatagagagtgtcggtgatcaagtaacgaatctgaaagaaggggatgtggtaattccaacatacataggcgagtgccaagaatgtgagaattgtgtttcagaaaaaaccaatttgtgtatgacatacccagtaagatggactggcctaatgccagataacacttcaaggatgtccatccgaggagagaggatataccatattttcagttgtgct

SEQ ID NO: 113319 - DNA, 253 bp, Glycine max
cggctcagcgtaaacgcaaggaagctgattggtgggatccccctgtgggttgcaccgccgaccgaccctgatcttctgtgaagggttcgagtgagagcatacctgtcgggacccgaaagatggtgaactatgcctgagcggggcgaagcacgaggaaactctggtggaggcccgcagcgatactgacgtgcaaatcgttcgtctgacttgggtataggggcgaaagactaatcgaaccgtctagtagctggtt

SEQ ID NO: 113320 - DNA, 256 bp, Glycine max
gttcaatatcctagtataccttaataaataatttaagatactatgatgagagcacggttcccattactgttgctgggacttgttttcctggcttcagtttctgtctcatttggcattgcttactgggaaaaagagaaccccaaacacaacaagtgtctccagagttgcaatagcgagagagactcgtacaggaaccaagcatgccacgctcgttgcaacctccttaaggtggagaaagaagaatgtgaagaaggtg

SEQ ID NO: 113321 - DNA, 257 bp, Glycine max
caaactttctttagctatctttttcttttttcttttagccttattttcaaacctagcctttggcaaatgtaaagaaaccgaggtagaagaagaagaccctgagctcgtaacatgcaaacaccaatgccaacagccacagcaatacactgagggtgacaagcgggtatgcttgcaaagatgtgacaggtatcatcgtatgaagcaagagcgagagaaacaaatccaagaggaaactcgtgagaagaaagaggaggaaa

SEQ ID NO: 113322 - DNA, 208 bp, Glycine max
tatgcctggtatgaggccaggtgcagctcctgtgccgaattttttcgtgccaatggttcagcagggacaacagggacagcgtccggtggaaggcgtccaggtgcagttcagcagtcccagcagccagttcctatgatgccacagcagatgcttcctaggggacgtgtctatcgttatcctcctggtaggggtattcctgatgttccta

SEQ ID NO: 113323 - DNA, 251 bp, Glycine max
caaaaggcttgactagagaaagagagagagagagcttcgaatcgaaactcagaagtagaaaaaaacacaaatcacaatcgctatggctaggtacgaccgagcaatcaccgtgttctcccctgacggccatctcttccaggtcgagtacgccctcgaagccgtccgcaagggcaacgccgccgtcggcgtccgcggcaccgacaatgttgtcctcggcgtcgagaagatatccaccgccaaactccaagact

SEQ ID NO: 113324 - DNA, 255 bp, Glycine max
ctttctctctcgctcgcaaacgcaaataataaaaaacaaggttttagccatggcatcgaagcggatcttgaaggaactcaaggatctccaaaaggatcctcctacctcatgcagcgccggtcctgttgctgaagacatgtttcactggcaagcaacaattatgggtcctccagacagtccttatgctggaggtgttttcctagtcactattcatttccctccagattatccctttaagccacccaaggttgcatt

SEQ ID NO: 113325 - DNA, 249 bp, Glycine max
taaaattcttccaccaagttatgggttcccttgtgttgcttcttttctccctcttaggtctctcttctagttccagcatatcaactcatcgttccatattggaccttgacctaaccaagtttaccacacagaaacaggtgtcttcactgttccaactatggaagagtgagcatggacgtgtctaccataaccacgaagaagaggcaaagagacttgagattttcaagataatcatgaactatatcaggg

SEQ ID NO: 113326 - DNA, 253 bp, Glycine max
ctcgagcgtctctctctccaatggccaaagacctcgaaacggagattcaaagtgcgttgcctcacaaggactaccacgacccaccccccgccccattctacgaccccgccgagctccgaaagtggtccttcttccgagccctcatcgccgagttcgtcgccaccctcctcttcctctacgtcaccatcctcaccgtcatcggctacaaccaccagacagccaccgccgccgagccctgcagcggcgtcggcgt

SEQ ID NO: 113327 - DNA, 252 bp, Glycine max
cggctcgagatctttttctaagtgtagtagaggagaggaaccgcgccaaccctctctacttcttcttcttcaatccttttataacatttatagtttcattcttaatcgttgggaaaaatgttcatcgagaattttaaggtagagagtcctaatgtgaagtacaccgagactgagattcagtccgtgtacaactacgaaaccaccgaacttgttcacgagaacaggaatggcacctatcagtggattgtcaaa

SEQ ID NO: 113328 - DNA, 252 bp, Glycine max
ctagtacaccgtattaaagaatttaagatatactatgatgcgagcgcggttcccattactgttgctgggagttgttttcctggcatcagtttctgtctcatttggcattgcgtattgggaaaagcagaaccccagtcacaacaagtgcctccgaagttgcaatagcgagaaagactcctacaggaaccaagcatgccacgctcgttgcaacctccttaaggtggaggaagaagaagaatgcgaagaaggtca

SEQ ID NO: 113329 - DNA, 255 bp, Glycine max
  unsure (1)..(255): unsure at all n locations
ggacaaggggaatccgactgtttaattaaaacaaagcattgcgatggtccctgcggatgttgacgcaatgtgatttctgcccagtgctctgaatgtcaaagtgaagaaattcaaccaagcgcgggtaaacggcgggagtaactatgactctcttaaggtagccaaatgcctcgtcatctaattagtgacgcgcatgaatggattaacgagattcccactgtccctgtctactatccagcganaccacagccaagg

SEQ ID NO: 113330 - DNA, 257 bp, Glycine max
aacactcatcagtcatcaccatggccaagctagttttttccctttgtattctgcttttcagtggctgctgcttcgctttcagttccagagagcagcctcagcaaaacgagtgccagatccaaaaactcaatgccctcataccggataaccgtatagagtcagaaggagggctcattgagacatggaaccctaacaacaagccattccagtgtgccggtgttgccctctctcgctgcaccctcaaccgcaacgccctt

SEQ ID NO: 113331 - DNA, 250 bp, Glycine max
attaacacttccttagttcaatatgggttcagcccttcactctctctctttcttccctttgcttgctactcttgtcgagtgcatgctttgctattagctccagcaagctcaacgagtgccaactcaacaacctcaacgcgttggaacccgaccaccgcgttgagtccgaaggtggtttgattcaaacatggaactctcaacaccctgagctgaaatgcgccggtgtcactgtttccaaactcaccctcaa

SEQ ID NO: 113332 - DNA, 205 bp, Glycine max
actcgagcggtcttccatagccccccaaaaatgaagagcaccatcttctttgctctctttcttctttgtgccttcaccacctcatacctaccttcagccatcgctgatttcgtgctcgataatgaaggtaaccctcttgaaaatggtggcacatattatatcttgtcagacataacagcatttggtggaataagagcagccccaa

SEQ ID NO: 113333 - DNA, 251 bp, Glycine max
cgggacgtggcggctgacggcaacgttagggagtccggagacgtcggcgggggccccggaaagagttatcttttctgtttaacagcctgcccaccctggaaacggctcagccggaggtagggtccagcggctggaagagcaccgcacgtcgcgtggtgtccggtgcgcccccggcggcccttgaaaatccggaggaccgagtgcctcccacgcccggtcgtactcataaccgcatcaggtctccaaggtga

SEQ ID NO: 113334 - DNA, 251 bp, Glycine max
tgaataggtaagggtatttttggcatgatatacccgggttgtcctagcacatttgaagagcctcaacaacctcaacaaagaggacaaagcagcagaccacaagaccgtcaccagaagatctataacttcagagagggtgatttgatcgcagtgcctactggtgttgcatggtggatgtacaacaatgaagacactcctgttgttgccgtttctattattgacaccaacagcttggagaaccagctcgacca

SEQ ID NO: 113335 - DNA, 251 bp, Glycine max
acttttgtccatagatcctgctgatcgtggaacttcagcatctgctttgaatagtgagttcttctcaacaaagcctctaccttgtgatccctcaagcttaccaaagtatcctcctagcaaagaatttgatgccaaagttcgggatgaagaagctagaagacaaggagcagcaggaagcaagggccagagacatgatcttgagagaagaggtgctagagaatcacgagccattcctgcacctgatgccaatg

SEQ ID NO: 113336 - DNA, 248 bp, Glycine max
tctcaattcattgatgtctctaacactactccggatgaaactgcattcttccgcctcgtgctcaatcgcgagggagtagtaggatcccttataatgattcaacccacacttttccaatattcgtttgatggcccaccggtgccagtgctgctagatattcgttccatttctccagattttatcttgctctttgattctttcttctgtgtggtgattcattatgggtccaagattgcccagtggaggaa

SEQ ID NO: 113337 - DNA, 251 bp, Glycine max
gagctgcaagagggacgggtgctgatcgtgccacaaaactttgtggtggctgcaagatcacagagtgacaacttcgagtatgtgtcattcaagaccaatgatacacccatgatcggcactcttgcaggggcaaactcattgttgaacgcattaccagaggaagtgattcagcacactttcaacctaaaaagccagcaggccaggcagataaagaacaacaaccctttcaagttcctggttccacctcagga

SEQ ID NO: 113338 - DNA, 252 bp, Glycine max
caatatcctagtataccttaataaataatttaagatactatgatgagagcacggttcccattactgttgctgggacttgttttcctggcttcagtttctgtctcatttggcattgcttactgggaaaaagagaaccccaaacacaacaagtgtctccagagttgcaatagcgagagagactcgtacaggaaccaagcatgccacgctcgttgcaacctccttaaggtggagaaagaagaatgtgaagaaggt

SEQ ID NO: 113339 - DNA, 255 bp, Glycine max
aggtgaacaacgacgacagagactcctacagacttcaatctggtgatgccctgagagtcccctcaggaaccacatactatgtggtcaaccctgacaacaacgaaaatctcagattaataacactcgccatacccgttaacaagcctggtagatttgagagtttcttcctatctagcactgaagctcaacaatcctacttgcaaggattcagcaggaacattttagaggcctcctacgataccaaattcgaggaga

SEQ ID NO: 113340 - DNA, 255 bp, Glycine max
agaaaacgaaggaggcagcatattgagtggcttcgccccggaattcttggaacatgcgttcgtcgtggacaggcagatagtgagaaagctacaaggtgagaacgaagaggaagagaagggtgccattgtgacagtgaaaggaggtctcagcgtgataagcccacccacggaagagcagcaacaaagacccgaggaagaggagaagccagattgtgacgagaaagacaaacattgccaaagccaaagcagaaatgg

SEQ ID NO: 113341 - DNA, 251 bp, Glycine max
ctcacggtcacggacaagcgaagagtaaagaaagaagaaatgttggtgaggaagctgaaactgaaagcggttagtggggtccacttgagatggatgagcaccgtgatgtgtttcggagatggcagccagggtgccgttggatccccagtaggtgtgggactagacgcatacgaacccacacctgttaccgctcttccttccgacatcgttagcgtccacgccggacactaccattccctcgccctcacttc

SEQ ID NO: 113342 - DNA, 251 bp, Glycine max
gccaagttagttgccaagtataggccagcggttccaatattgtcggtggtggttccagtgttgagcacggactcatttgattggacctgcagtgatgagacgccagcaaggcacagcctgatatacaggggcttgattcctatactgggcgagggatctgcaaaggctaccgatgcagaatccacagaggtcattctcgaagctgctcttaagtccgcaacagaaagggccctttgtaagcctggtgatgc

SEQ ID NO: 113343 - DNA, 252 bp, Glycine max
aaatgaccaagttcacaatcctcctcatctctcttctcttctgcatcgcccacacttgcagcgcctccaaatggcagcaccagcaagatagctgccgcaagcagctccagggggtgaacctcacgccctgcgagaagcacatcatggagaagatccaaggccgcggcgatgacgatgatgatgatgacgacgacaatcacattctcaggaccatgcggggaagaatcaactacataaggaggaacgaaggaa

SEQ ID NO: 113344 - DNA, 252 bp, Glycine max
caacaagccattccagtgtgccggtgttgccctctctcgctgcacccttaaccgcaatgcccttcgtagaccttcctacaccaacggtccccaggaaatctacatacaacaaggtaatggtatttttggcatgatattcccgggttgtcctagcacttatcaagagccgcaagaatctcagcaacgaggacgaagccagaggccccaagaccgtcaccaaaaggtacatcgcttcagagagggtgatttgat

SEQ ID NO: 113345 - DNA, 248 bp, Glycine max
ctttgagatcaccccagagaaaaacccccagcttcgggacttggatatcttcctcagtattgtggatatgaacgagggagctcttcttctaccacacttcaattcaaaggcgatagtgatactggtaattaatgaaggagatgcaaacattgaacttgttggcctaaaagaacaacaacaggagcagcaacaggaagagcaacctttggaagtgcggaaatatagagccgaattgtctgaacaagata

SEQ ID NO: 113346 - DNA, 252 bp, Glycine max
cattcttccaccaagttatgggatgccttgtgttgcttcttttctccctcttaggtctctcttctagttccagcatatcaactcatcgttccatattggaccttgacctaaccaagtttaccacacagaaacaggtgtcttcactgttccaactatggaagagtgagcatggacgtgtctaccataaccacgaagaagaggcaaagagacttgagattttcaagaataacttgaactatatcagggacatga

SEQ ID NO: 113347 - DNA, 250 bp, Glycine max
caaattctatcacatggaggagagtaatggacatcaatgattgattcttgagaaaaattgctattggccagggacctgacgagaaaggaatggtgagagaaacaggctttgatatttcagttgctagtgagattatggctgttttggcactgacaacatccttagctgatatgcgagagaggcttgggaaaatggttattgggaatagcaagagtggtgaccctgtaactgctgatgatctaggtgttgg

SEQ ID NO: 113348 - DNA, 249 bp, Glycine max
ctcgagcgcttagttcaatatggggaagcccttcttcactctctctctttcttcactttgcttgctactcttgtcgagtgcatgctttgctattacctccagcaagttcaacgagtgccaactcaacaacctcaacgcgttggaacccgaccaccgcgttgagtccgaaggtggtcttattgaaacatggaactctcaacaccctgagctgcaatgcgccggtgtcactgtttccaaacgcaccctcaa

SEQ ID NO: 113349 - DNA, 250 bp, Glycine max
gggtttccttgtgttgcttcttttctccctcttaggtctctcttctagttccagcatatcaactcatcgttccatattggaccttgacctaaccaagtttaccacacagaaacaggtgtcttcactgttccaactatggaagagtgagcatggacgtgtctaccataaccacgaagaagaggcaaagagacttgagattttcaagaataacttgaactatatcagggacatgaatgcaaacagaaaatca

SEQ ID NO: 113350 - DNA, 180 bp, Glycine max
gtgctaccacacttttgtccttttgggcactagttagtgtgcgtacaataaataagaacgaataaaacagcaaagcctttgttaagtataaaataacgggtaatgtaattgtacccttgtgtaatgagtcactcaagtacctatgcgggaaaatcataaattaaaagagaaatttcaatg

SEQ ID NO: 113351 - DNA, 249 bp, Glycine max; identical to SEQ ID NO: 110870

SEQ ID NO: 113352 - DNA, 247 bp, Glycine max
tcaatatcctagtacaccgtattaaagaatttaagatatactatgatgagagcgcggttcccattactgttgctgggagttgttttcctggcatcagtttctgtctcatttggcattgcgtattgggaaaagcagaaccccagtcacaacaagtgcctccgaagttgcaatagcgagaaagactcctacaggaaccaagcatgccacgctcgttgcaacctccttaaggtggaggaagaagaagaat

SEQ ID NO: 113353 - DNA, 239 bp, Glycine max
taaacactcatcagtcatcaccatggccaagctagttttatccctatgttttctgcttttcagtggctgctgcttcgactttcagtgccagagagcagcctcagcagaacgagtgccagatccaaaaactcaatgccctcaaaccggataaccgtatagagtcagaaggagggctcattgagacatggaaccctaacaacaagccattccagtgtgccggtgttgccctctctcgctgc

SEQ ID NO: 113354 - DNA, 247 bp, Glycine max; identical to SEQ ID NO: 112300

SEQ ID NO: 113355 - DNA, 248 bp, Glycine max; identical to SEQ ID NO: 112792

SEQ ID NO: 113356 - DNA, 246 bp, Glycine max
caaagctggtggcgccggctacagtgggggcggacggggagtttatggtgggggctgcggtggggacgagggaggacgataaggagaggttggagcatttggtgaaggctgggttgaatgttgtggtgttggatagttctcaagggaactcaatttatcagttggagatggtgaagtatgtgaagagggtgtaccctgagcttgatgtgattggggggaatgttgtgactatgtaccaggctgaga

SEQ ID NO: 113357 - DNA, 246 bp, Glycine max; identical to SEQ ID NO: 110856

SEQ ID NO: 113358 - DNA, 243 bp, Glycine max
gtatttttggcatgatattcccgggttgtcctagcacttatcaagagccgcaagaatctcagcaacgaggacgaagccagaggccccaagaccgtcaccaaaaggtacatcgcttcagagagggtgatttgatcgcagtgcctactggtgttgcatggtggatgtacaacaatgaagacactcctgttgttgccgtttctattattgacaccaacagcttggagaaccagctcgaccagatgc

SEQ ID NO: 113359 - DNA, 250 bp, Glycine max
ccttaataaataatttaagatactatgatgagagcacggttcccattactgttgctgggacttgttttcctggcttcagtttctgtctcagttggcattgcttactgggaaaaagagaaccccaaacacaacaagtgtctccagagttgcaatagcgagagagactcgtacaggaaccaagcatgccacgctcgttgcaacctccttaaggtggagaaagaagaatgtgaagaaggtgaaattccacgac

SEQ ID NO: 113360 - DNA, 247 bp, Glycine max
atttctcttccgttcgccggaaacaaaaaacctctttcggctccaattcgaaggcggttcaatgtcattgctatggctccccctgaacccggtgggaaggccaagaaagtggttggaattataaagctggctcttgaagctgggaaggctacacctgctcctcccgttggccctgctcttggttccaagggtgtcaatattatggctttctgtaaggattacaacgctagaaccgccgacaagcccg

SEQ ID NO: 113361 - DNA, 240 bp, Glycine max; identical to SEQ ID NO: 110708

SEQ ID NO: 113362 - DNA, 252 bp, Glycine max
agcaattagtaacttgttgagagttgctgcttggaagaaaggctgtttaatggttaagattgtgatgtctgggaatgcagcagtcaaaaggagtgattgggcctcattggtacaagtgtttttaacaaacagcaacagtacagagcattttgatgcatgtaagtggacaaaatcggaaccacattcctgggaattgatcttcccaatagaggtatgtggtcctaataatggttttgaaatgtggagttctga

SEQ ID NO: 113363 - DNA, 76 bp, Glycine max
gttgcatggtggatgtacaacaatgaagacactcctgttgttgccgtttctattattgacaccaacagcttggaga

SEQ ID NO: 113364 - DNA, 249 bp, Glycine max
  unsure (1)..(249): unsure at all n locations
cttaattattaacacttccttagttcaatatggctcaagcccttcactctctctctntcttccctttgtttgctactcttttcgagtgcatgctttgctattagctccagcaangctcaacgattcgnccacttaacaacttcaactcgttggaacccgaccaccgcgttgagtccgaagtggtttgattcaaacatggaactctcaacaccctgagctgatctgcgccggtgtcctgntttccaactc

SEQ ID NO: 113365 - DNA, 247 bp, Glycine max
attgtctttgaacactcatcaccatggccaagcttgttctttccttttgtttccttcttttcagtggctgcttcgctctgagagagcaggcacagcaaaatgagtgccagatccaaaagctgaatgccctcaaaccggataaccgtatagagtcggaaggtgggttcattgagacctggaaccctaacaacaagccattccagtgtgccggtgttgccctctctcgctgcacccttaaccgcaatgc

SEQ ID NO: 113366 - DNA, 248 bp, Glycine max
ctcatcaccatggccaagcttgttcttgccctttgtttccttcggttcagtggctgcttcgctctgagagagcaggcacagcaaaatgagtgccagatccaaaagctgaatgccctcaaaccggataaccgtatagattcggaaggtgggttcattgagacctggaaccctaacaacaagccattccagtgtgccggtgttgccctctctcgctgcacccttaaccgcaatgcccttcgtagaccttc

SEQ ID NO: 113367 - DNA, 249 bp, Glycine max
ctcgagcgatcaataccacaatgaccaagcttacaattctcctcatcgctcttctacttcatcgcccacacctgctgcgcctccaaatggcaacagcaccagcaagagagctgccgcgagcagctcaaggggatcaacctcaacccctgtgagcacatcatggagaagatccaagctggccgccgcggcgaggacggcagcgacgaagatcacattctcatcaggaccatgccgggaagaatcaactac

SEQ ID NO: 113368 - DNA, 246 bp, Glycine max
tcaatatcctagtataccttaataaataatttaagatactatgatgagagcacggttcccattactgttgctgggacttgttttcctggcttcagtttctgtctcatttggcattgcttactgggaaaaagagaaccccaaacacaacaagtgtctccagagttgcaatagcgagagagactcgtacaggaaccaagcatgccacgctcgttgcaacctccttaaggtggagaaagaagaatgtga

SEQ ID NO: 113369 - DNA, 246 bp, Glycine max
gcagaagaggctcaaggtcgcagcagcaactacaagacagtcaccagaagattcgtcacttcaatgaaggagacgtactagtgattcctcctggtgttccttactggacctataacactggcgatgaaccagttgttgccatcagtcttcttgacacctccaacttcaacaatcagcttgatcaaaaccccagagtattttaccttgctgggaacccagatatagagcacccagagaccatgcaac

SEQ ID NO: 113370 - DNA, 218 bp, Glycine max
gttcaatatcctagtataccttaataaataatttaagatactatgatgagagcacggttcccattactgttgctgggacttgttttcctggcttcagtttctgtctcatttggcattgcttactgggaaaaagagaaccccaaacacaacaagtgtctccagagttgcaatagcgagagagactcgtacaggaaccaagcatgccacgctcgttgcaa

SEQ ID NO: 113371 - DNA, 249 bp, Glycine max
ggagcagcagcgagagagcgaagaaagtgaagattctgagttacgaagacataagaataagaacccttttctcttcggctctaacaggttcgaaactctcttcaaaaaccaatatggtcgcattcgcgtcctccagaggttcaaccaacgctccccacaacttcagaatctccgagactaccgcattttggagttcaactccaaacccaacaccctccttctccccaaccatgctgacgctgattacct

SEQ ID NO: 113372 - DNA, 245 bp, Glycine max; identical to SEQ ID NO: 111914

SEQ ID NO: 113373 - DNA, 240 bp, Glycine max
aatgtaggcaagggaagtcggcaaaatggatccgtaacctcgggaaaaggattggctctgagggctgggcacgggggtcccagtcccgaacccgtcggctgtcggtggactgctcgagctgcttccgcggcgagagcgggtcgtcgcgtgccggtcgggggacggattgggaacgggcccttcggggcctcttccccgggcgtcgaacagtcaactcagaactggtacggacaaggggaa

SEQ ID NO: 113374 - DNA, 249 bp, Glycine max
aacttattaacactttccttagttcaatatggggaagcccttcttcactctctctctttcttccctttgcttgctactctcgtcgagtgcatgctttgctattacctccagcaagttcaacgagtgccaactcaacaacctcaacgcgttggaacccgaccaccgcgttgagtccgaaggtggtcttattgaaacatggaactctcaacaccctgagctgcaatgcgccggtgtcactgtttccaaacg

SEQ ID NO: 113375 - DNA, 139 bp, Glycine max
  unsure (1)..(139): unsure at all n locations
tgaaattttgataaaccgcgatcacaggttgccgcaccttaaaaccggaaacanaagcaatcgttacttgatttcaagaatctctcaatttctttctaattctttgtgtacgatttcttaaggtgaagaaaatcactct

SEQ ID NO: 113376 - DNA, 258 bp, Glycine max; identical to SEQ ID NO: 111395

SEQ ID NO: 113377 - DNA, 259 bp, Glycine max
atccaatcccatgatgcaggaaaaaaggtgtcatcacccaggtaaagtaccaagggggctgtggatggtcacaagaatattgttccttcttcatgggattggaggaaaaaaggtgtcatcacccaagtaaagtaccaagggggctgtggaagcggttgggcgttttctgccacgggagccatagaagcagcacatgcaatagcaacaggagaccttgttagcctttctgaacaagaactcgtagactgtgtggaagaaa

SEQ ID NO: 113378 - DNA, 256 bp, Glycine max
ctcgaccgattcggctcaggcaaaggattctacccgcacgctcgatgggaattagcgcttcaaggcgtctcgacgggctaatccgcctcacgagggtcaccaacggcacgtgcctttggggggccgaggccccctactgctggtcggcaaacggacggcgggcgcacgcgtcgcttctagcccggattctgacttagaggcgttcagtcataatccaacgcacggtagcttcgcgccactggcaactcaaccaagc

SEQ ID NO: 113379 - DNA, 262 bp, Glycine max
cttaattattaacacttccttagttcaatatggggaagcccttcactctctctctttcttccctttgcttgctactcttgtcgagtgcatgctttgctattagctccagcaagctcaacgagtgccaactcaacaacctcaacgcgttggaacccgaccaccgcgttgagtccgaaggtggtttgattcaaacatggaactctcaacaccctgagctgaaatgcgccggtgtcactgtttccaaactcaccctcaaccgcaa

SEQ ID NO: 113380 - DNA, 263 bp, Glycine max
ctctcttctcttctgcatcgcccacacttgcagcgcctcgaaatggcagcaccagcaagatagctgccgcaagcagctccagggggtgaacctcacgccctgcgagaagcacatcatggagaagatccaaggccgcggcgatgacgatgatgatgatgacgacgacaatcacattctcaggaccatgcggggaagaatcaactacataaggaggaacgaaggaaaagacgaagacgaagaagaagaaggacacatgcagaagt

SEQ ID NO: 113381 - DNA, 258 bp, Glycine max
tcaatatcctagtataccttaataaataatttaagatactatgatgagagcacggttcccattactgttgctgggacttgttttcctggcttcagtttctgtctcatttggcattgcttactgggaaaaagagaaccccaaacacaacaagtgtctccagagttgcaatagcgagagagactcgtacaggaaccaagcatgccacgctacgttgcaacctccttaaggtggagaaagaagaatgtgaagaaggtgaaa

SEQ ID NO: 113382 - DNA, 254 bp, Glycine max
ctaacaataattccttcacttgcagaacttagttctctgttgcatcatcatcatcttcattagtgttagccctaaacttcaccttcaaccatgaccacagtgccaccacacagtgtccaagtgcacacaacaacacaccgctacgaagccggcgtcgtcccgccggctcgttttgaggcgccgcgttacgaagccggcatcaaggcgccctcttccatttaccattccgagagaggtccgacgacctctcaggt

SEQ ID NO: 113383 - DNA, 254 bp, Glycine max
cttctaactcctcactaccgtgacaccatgaacatcaacacacttgctaggcaatctctcattaatgctgatggcataatagagaaatcttttttgccctcaaagcattccgttgagatgtcttcagcggtttataagaattgggttttcactgatcaagcactacctgcagatcttatcaagagaggagtggcaattaaggatccatctgccccacatggacttcgacttctgatagaggactacccttatgc

SEQ ID NO: 113384 - DNA, 255 bp, Glycine max
ctctccattgtctttgaacactcatcaccatggccaagcatgttctttccctttgtttccttcttttcagtggctgcttcgctctgagagagcaggcacagcaaaatgagtgccagatccaaaagctgaatgccctcaaaccggataaccgtatagagtcggaaggtgggttcattgagacctggaaccctaacaacaagccattccagtgtgccggtgttgccctctctcgctgcacccttaaccgcaatgccc

SEQ ID NO: 113385 - DNA, 257 bp, Glycine max
gaacgagggagctctttttctgccacacttcaattcaaaggccatagtggtactagtgattaatgaaggagaagcaaacattgaacttgttggcattaaagaacaacaacagaggcagcaacaggaagagcaacctttggaagtgcggaaatatagagctgaattgtctgaacaagatatatttgtaatcccagcaggttatccagttgtggtcaacgctacctcagatctgaatttctttgcttttggtatcaatg

SEQ ID NO: 113386 - DNA, 252 bp, Glycine max
gaaaaggattggctctgagggctgggcacgggggtcccagtcccgaacccgtcggctgtcggtggactgctcgagctgcttccgcggcgagagcgggtcgtcgcgtgccggtcgggggacggattgggaacgggcccttcggggcctcttccccgggcgtcgaacagtcaactcagaactggtacggacaaggggaatccgactgtttaattaaaacaaagcattgcgatggtccctgcggatgttgacgca

SEQ ID NO: 113387 - DNA, 257 bp, Glycine max
cggctcgagcttaaacactcatcagtcatcaccatggccaagctagtttattccctttgttttctgcttttcagtggctgctgcttcgctttcagttccagagagcagcctcagcaaaacgagtgccagatccaaaaactcaatgccctcaaaccggataaccgtatagagtcagaaggagggctcattgagacatggaaccctaacaacaagccattccagtgtgccggtgttgccctctctcgctgcaccctcaa

SEQ ID NO: 113388 - DNA, 258 bp, Glycine max
tcgtctcaaatctcttcgttccttcgattcgttccatttcttccaaaatggccaaagacccagttcgcgttctcgtcactggagctgcagggcaaattgggtatgctcttgtccctatgattgctaggggagtgatgttgggtcctgaccagcccgtgatcctccacatgcttgacattcctccggcagcagagtcattgaatggggttaaaatggaattggtggatgctgcattccctcttcttaaaggtgttgttg

SEQ ID NO: 113389 - DNA, 257 bp, Glycine max
ccagcctcttggttgcttctttggtctacccttcacagagaaccagcaatatcctctccgatgtggtcgatttgaagacttctcttcccgagtgggtgaggatagggttctctgctgccacgggactcgacatacctggggaatcgcatgacgtgctttcttggtcttttgcttccaatttgccacacgctagcagtaacattgatcctttggatcttacaagctttgtgttgcatgaggccatctaaatgtgacag

SEQ ID NO: 113390 - DNA, 256 bp, Glycine max
  unsure (1)..(256): unsure at all n locations
ctccattggtccttaaacactcatcagtcatcaccatggccaagctagttttttccctttgttttctgcttttcagtggctgctgcttcgctttcagttccagagagcagcctcagcaaaacgagtgccagatccaaaaactcaatgccctcaaaccggataaccgtatagagtcagaaggagggctcattgagacatggaaccctaacaacaagccattccagtgtgccggtgttgncctctctcgctgcacctc

SEQ ID NO: 113391 - DNA, 253 bp, Glycine max
cagcaatcaagcagaagaggctcaaggtcgcagcagcaactacaagacagtcaccagaagattcgtcacttcaatgaaggagacgtactagtgattcctcctggtgttccttactggacctataacactggcgatgaaccagttgttgccatcagtcttcttgacacctccaacttcaacaatcagcttgatcaaaaccccagagtattttaccttgctgggaacccagatatagagcacccagagaccatgc

SEQ ID NO: 113392 - DNA, 252 bp, Glycine max
cattctcatacacaatggctctctatgctcttgctttgttttatgtggcatgcaaggatctgcttcaaccattcaatccagtcccaaagtttattataataaaatctgttgtattcctaacttattggcagggtgtcttagttttccttgccgcaaagtcggaatttgttaaggatgcagatgaagctgctctacttcaagattttttcatttgcgttgagatgcttgttgctgctgttggccacttttatg

SEQ ID NO: 113393 - DNA, 253 bp, Glycine max
ccaaaatgaccaagcttacaattctcctcatcgctcttctcttcatcgcccacacctgctgcgcctccaaatggcaacagcaccagcaagagagctgccgcgagcagctcaaggggatcaacctcaacccctgtgagcacatcatggagaagatccaagctggccgccgcggcgaggacggcagcgacgaagatcacattctcatcaggaccatgccgggaagaatcaactacatcaggaagaaggaaggaaa

SEQ ID NO: 113394 - DNA, 254 bp, Glycine max
ctctccattgtctttgaacactcatcaccatggccaagcttgttctttccctttgtttccttcttttcagtggctgcttcgctctgagagagcaggcacagcaaaatgagtgccagatccaaaagctgaatgccctcaaaccggataaccgtatagagtcggaaggtgggttcattgagacctggaaccctaacaacaagccattccagtgtgccggtgttgccctctctcgctgcacccttaaccgcaatgcc

SEQ ID NO: 113395 - DNA, 253 bp, Glycine max
caagaatggaatttactctccacattggaatctgaatgcaaacagtgtgatctatgtgactcgaggacaaggaaaggttagagttgtgaactgccaagggaatgcagtgttcgacggtgagcttaggaggggacaattgctggtggtaccacagaacttcgtggtggcggacaagccggagaacaaggattcgaatacatagtattcaagacacaccacaacgcagtcactagctacttgaaggatgtgttta

SEQ ID NO: 113396 - DNA, 251 bp, Glycine max
ctagtataccttaataaataatttaagatactatgatgagagcacggttcccattactgttgctgggacttgttttcctggcttcagtttctgtctcatttggcattgcttactgggaaaaagagaaccccaaacacaacaagtgtctccagagttgcaatagcgagagagactcgtacaggaaccattcatgccacgctcgttgcaacctccttaaggtggagaaagaagaatgtgaagaaggtgaaatt

SEQ ID NO: 113397 - DNA, 250 bp, Glycine max
gttgatagcagtgcctctactgtgccaagcttgtgtgatgagaaaaaggagaacatgaatttgaaggctacagagttgaggctgggtcttcccggatcccaatcgcctgaaagggagccggatcttttctctttaagcccagcaaagcttgatgagaagccactgttccctttgcttcctactaaagacgggatttgcttgtcggcgcaaaaaactgttgtttctggcaacaaaagaggttttgctgata

SEQ ID NO: 113398 - DNA, 255 bp, Glycine max
gttcatacatagtagtgttggtgggttgcaaagatgcttgggggtcttctccataggggtcataagataaaagggacagtggtgttgatgcgcaagaatgtgttggacgtgaatagcgtaaccagcgttgggggaattattggtcaaggtctcgacttagttggctcaacactcgatactcttactgccttcttgggccgatccgtgtctctccagcttattagtgctaccaaagctgatgccaacggaaaaggg

SEQ ID NO: 113399 - DNA, 249 bp, Glycine max
cttccttagttcaatatggggaagcccttcactctctctctttcttccctttgcttgctactcttgtcgagtgcatgctttgctattagctccagcaagctcaacgagtgccaactcaacaacctcaacgcgttggaacccgaccaccgcgttgagtccgaaggtggtttgattcaaacatggaactctcaacaccctgagctgaaatgcgccggtgtcactgtttccaaactcaccctcaaccgcaat

SEQ ID NO: 113400 - DNA, 253 bp, Glycine max
ctcgagccgcttggatgtcttcctcagtgttgtggatatgaacgagggagctctttgcctgccacacttcaattcaaaggccatagtggtactagtgattaatgaaggagaagcaaacattgaacttgttggcattaaagaacaacaacagaggcagcaacaggaagagcaacctttggaagtgcggaaatatagagctgaattgtctgaacaagatatatttgtaatcccagcaggttatccagttgtggtc

SEQ ID NO: 113401 - DNA, 254 bp, Glycine max
agccaaagcaaaagcagaagaaatggcattgacgagaccatatgcaccatgagacttcgccacaacattggccagacttcatcacctgacatctacaaccctcaaaccggtagcgtcacaaccgccaccagccttgacttcccagccctctcgtggctcagactcagtgctgagtttggatctctccgcaagaatgcaatgttcgtgccacactacaacctgaacgcgaacagcataatatacgcattgaatgg

SEQ ID NO: 113402 - DNA, 246 bp, Glycine max
catacatagtagtgttggtgggttgcaaagatgcttgggggtcttctccataggggtcataagataaaagggacagtggtgttgatgcgcaagaatgtgttggacgtgaatagcgtaaccagcgttgggggaattattggtcaaggtctcgacttagttggctcaacactcgatactcttactgccttcttgggccgatccgtgtctctccagcttattagtgctaccaaagctgatgccaacgga

SEQ ID NO: 113403 - DNA, 248 bp, Glycine max
cggctcgaggcctgagcggggcgaagcagaggaaactctggtggaggcccgcagcgatactgacgtgcaaatcgttcgtctgacttgggtataggggcgaaagactaatcgaaccgtctagtagctggttccctccgaagtttccctcaggatagctggagcccgcgggcgagttctatcgggtaaagccaatgattagaggcatcgggggcgcaacgcctcgacctattctcaaactttaaataggt

SEQ ID NO: 113404 - DNA, 247 bp, Glycine max
aacttattaacactttccttagttcaatatggggaagcccttcttcactctctctctttcttccctttgcttgctactcttgtcgagtgcatgctttgctattacctccagcaagttcgagtgccaactcaacaacctcaacgcgttggaacccgaccaccgcgttgagtccgaaggtggtcttattgaaacatggaactctcaacaccctgagctgcaatgcgccggtgtcactgtttccaaacgc

SEQ ID NO: 113405 - DNA, 244 bp, Glycine max
gtataccttaataaataatttaagatactatgatgagagcacggttcccattactgttgctgggacttgttttcctggcttcagtttctgtctcatttggcattgcttactgggaaaaagagaaccccaaacacaacaagtgtctccagagttgcaatagcgagagagactcgtacaggaaccaagcatgccacgctcgttgcaacctccttaaggtggagaaagaagaatgtgaagaaggtga

SEQ ID NO: 113406 - DNA, 253 bp, Glycine max
  unsure (1)..(253): unsure at all n locations
gaagaatgcgaagaaggtcaaattccacgaccacgaccacaggacngggagagggaacgtcggcaacatggtgagaaggaggaagacgaaggtgagcagccacgtccattcccattcccacgcccacgccaacctcatcaagaggaagagcacgagcagaaggaggaacacgaatggcatcgcaaggaggaaaaacacggaggaaagggaagtgaagaggaacaagatgaacgtgaacacccacgcccacacc

SEQ ID NO: 113407 - DNA, 249 bp, Glycine max
atcctagtataccttaataaataatttaagatactatgatgagagcacggttcccattactgttgctgggacttgttttcctggcttcagtttctgtctcatttggcattgcttactgggaaaaagagaaccccaaacacaacaagtgtctccagagttgcaatagcgagagagactcgtacaggaaccaagcatgccacgctcgttgcaacctccttaaggtggagaaagaagaatgtgaagaaggtg

SEQ ID NO: 113408 - DNA, 250 bp, Glycine max
ctcgagcgaatcggctcgagccagttcaatatcctagtacaccgtattaaagaattaggagatatactatgatgaacgcgcggttcccattactgttgctgggagttgttttcctggcatcagtttctgtctcatttggcattgcgtattgggaaaagcagaaccccagtcacaacaagtgcctccgaagttgcaatagcgagaaagactcctacaggaaccaagcatgccacgctcgttgcaacctcct

SEQ ID NO: 113409 - DNA, 249 bp, Glycine max
tacgataccaaattcgaggagataaacaaggttctgtttagtagagaggaagggcagcagcaaggggagcagaggctgcaagagagcgtgattgtggaaatctcgaaggaacagattcgggcactgagcaaacgtgccaaatctagttcaaggaaaaccatttcttctgaagataaaccttttaacttgagaagccgcgaccccatctactccaacaagcttggcaagttctttgagatcaccccagag

SEQ ID NO: 113410 - DNA, 253 bp, Glycine max; identical to SEQ ID NO: 111676

SEQ ID NO: 113411 - DNA, 256 bp, Glycine max
attgacaccaacagcttggagaaccagctcgaccagatgcctaggagattctatcttgctgggaaccaagagcaagagtttctaaaatatcagcagcagcagcaaggaggttcccaaagccagaaaggaaagcaacaagaagaagaaaacgaaggaagcaacatattgagtggcttcgcccctgaattcttgaaagaagcgttcggcgtgaacatgcagatagtgagaaacctacaaggtgagaacgaagaggagg

SEQ ID NO: 113412 - DNA, 251 bp, Glycine max
aaaagccatttccatagcagcctaagaaaatgaagagcactagcttgttcgctatctttctactttgcgccttcacctcatacctaccttccgccaccgcccaggacgtgctcgacgtggatggcgatccgattcggaacggtttcatatactacgttttgccggcaataagaggaaacggtggcggaatagaacgagccgcactcgggaaagacacttgccctatcactgtagtgcaatctcccaatcca

SEQ ID NO: 113413 - DNA, 252 bp, Glycine max
gtcttccatagccccccaaaaatgaagagcaccatcttctttgctctctttctcttttgtgccttcaccacctcatacctaccttcagccatcgctgatttcgtgctcgataatgaaggtaaccctcttgaaaatggtggcacatattatatcttgtcagacataacagcatttggtggaataagagcagccccaacgggaaatgaaagatgccctctcactgtggtgcaatctcgcaatgagctcgacaaa

SEQ ID NO: 113414 - DNA, 251 bp, Glycine max
ctctccattgtctttgaacactcatcaccatggccaagcttgttctttccctttgtttccttcttttcagtggctgcttcgctctgagagagcaggcacagcaaaatgagtgccagatccaaaagctgaatgccctcaaaccggataaccgtatagagtaggaaggtgggttcattgagacctggaaccctaacaacaagccattccagtgtgccggtgttgccctctctcgctgcacccttaaccgcaat

SEQ ID NO: 113415 - DNA, 249 bp, Glycine max
gccaactgcggcgattcacgcgccgtgctttgtcgcaacaaggtagccgtcccactctccgacgatcacaagccggaccggcccgacgagttgcttcggatccaagccgcgggagggcgcgtgatatattgggaccggcctagagtgcttggagtgttggctatgtccagagccataggggacaattatctgaaaccgtatgtaatttcggaaccggaggtaacggtaacggagcggagtgacaaggat

SEQ ID NO: 113416 - DNA, 249 bp, Glycine max
aattccttcacttgcagcactgttgcatcatcatcttcattgcaaaaccctaaacttcaccttcaaccatgaccacacaagtaccaccacacagtgtccaagtccacacaacaacacacccctacgaagctggcgtcgtcccccccggagcccgtttcgaaccgccgcgttatgaagccggcgtcaaagcgccctccatttaccattccgagagaggtccaacgacttcccaggtcctcgccgtcctcg

SEQ ID NO: 113417 - DNA, 245 bp, Glycine max
taattattaacacttccttagttcaatatggggaagcccttcactctctctctttcttccctttgcttgctactcttgtcgagtgcatgctttgctattagctccagcaagctcaacgagtgccaactcaacaacctcaacgcgttggaacccgaccaccgcgttgagtccgaaggtggtttgattcaaacatggaactctcaacaccctgagctgaaatgcgccggtgtcactgtttccaaact

SEQ ID NO: 113418 - DNA, 238 bp, Glycine max
gttcaatatcctagtataccttaataaataatttaagatactatgatgagagcacggttcccattactgttgctgggacttgttttcctggcttcagtttctgtctcatttggcattgcttactgggaaaaagagaaccccaaacacaacaagtgtctccagagttgcaatagcgagagagactcgtacaggaaccaagcatgccacgctcgttgcaacctccttaaggtggagaaag

SEQ ID NO: 113419 - DNA, 246 bp, Glycine max
ctagggtttagcgcacttcttctagatttaaggaagatgggtaaggaaaaggttcacatcagtattgtggttattggccatgttgactctgggaagtccactaccactggccacctgatctacaagcttggaggcattgacaagcgtgttattgagagatttgagaaggaagctgctgagatgaacaagaggtctttcaagtatgcctgggtgcttgataagcttaaggctgagcgtgaaagagga

SEQ ID NO: 113420 - DNA, 249 bp, Glycine max
accgtattaaagactcatcgatatagtatgatgagagcgcggttcccattactgttgctgggagttgttttcctggcatcagtttctgtctcatttggcattgcgtattgggaaaagcagaaccccagtcacaacaagtgcctccgaagttgcaatagcgagaaagactcctacaggaaccaagcatgccacgctcgttgcaacctccttaaggtggaggaagaagaagaatgcgaagaaggtcaaatt

SEQ ID NO: 113421 - DNA, 248 bp, Glycine max
tgagattcagatgatggcgagtgagtcgcaaaactgggtgttcatggtcactgcacagacaccaaccaacattgccgttatcaagtattgggggaaaagagacgaaaccctcatcttaccggttaacgacagtatcagtgtcactctcgatcccagccacctctgcaccaccaccactgctgccgtcagtcccgctttccaccaagatcgcatgtggctcaatggaaaggagatttctctttctgggg

SEQ ID NO: 113422 - DNA, 250 bp, Glycine max
tctctccattggtccttaaacactcatcagtcatcaccatggccaagctagttttttccctttgttttctgcttttcagtggctgctgcttcgctttcagttccagagagcagcctcagcaaaacgagtgccagatccaaaaactcaatgccctcaaaccggataaccgtatagagtcagaaggagggctcattgagacatggaaccctaacaacaagccattccagtgtgccggtgttgccctctctcg

SEQ ID NO: 113423 - DNA, 242 bp, Glycine max
ctcagaaccttctgaggttaaagcaaaaaacaaagagagagagagagagaaaatgatgaagccatcgatgctcagatctcaccactccgccgccacccgcggcgcctctcatctcttccgccgtgggtacgcctccgagccggtgccggagcgcaaggtagccgttctcggcgccgccggcgggatcgggcagcctctctcccttctcatgaagctcaatcccctcgtttcgagcctctcct

SEQ ID NO: 113424 - DNA, 251 bp, Glycine max
agagagtcttccatagccccccaaaaatgaagagcaccatcttctttgctctctttctcttttgtgccttcaccacctcatacctaccttcagccatcgctgatttcgtgctcgataatgaaggtaaccctcttgaaaatggtggcacatattatatcttgtcagacataacagcatttggtggaataagagcagccccaacgggaaatgaaagatgccctctcactgtggtgcaatctcgcaatgagctc

SEQ ID NO: 113425 - DNA, 247 bp, Glycine max
attgatattgctttgtggaagtttgaaacaacaaagtattattgcacagttattgatgcgcctggacatagggatttcattaagaatatgattactgggacatcccaagctgactgtgctgttcttatcattgattcgaccactggtggttttgaagctggtatttccaaggatggacagactcgtgaacatgctctgctttcattcacccttggtgtgaaacagatgatttgctgctgtaacaaaa

SEQ ID NO: 113426 - DNA, 203 bp, Glycine max
tctctccattggtccttaaacactcatcagtcatcaccatggccaagctagttttttccctttgttttctgcttttcagtggctgctgcttcgcttctagttccagagagcagcctcagcaaaacgagtgccagatccaaaaactcaatgccctcaaaccggataaccgtatagagtcagaaggagggctcattgagacatgg

SEQ ID NO: 113427 - DNA, 247 bp, Glycine max
gcaaagatggctttcacggaatcgtctctcctccttccttcggtttcaggaaccaacaagaacaagaacaaggttccagaagacaaatggtatttagcctacattgtgtattttaccctgggtctcggttaccttctcccatggaacgctttcatcaccgccgttgattacttctcctttctctaccctgacgccagcgttgaccgcatcttcgccgtggtttacatgatagtcgggctggtgggga

SEQ ID NO: 113428 - DNA, 243 bp, Glycine max
cttcctggtcttattgatgatgttgccttgaattgtcttgcatgggttagtggatccgattatgccgcactatcatgtatcaataaaaggttcaataaactgatcaatagtgggtatctatatgggttgaggaaacaattgggggctgtggagcatttggtgtatatggtttgtgatccaagaggatgggtggcctttgaccccaagataaacaggtggatgtcattacccaagataccttgt

SEQ ID NO: 113429 - DNA, 245 bp, Glycine max
ctcagtgttgtggatatgaacgagggagctctttttctgccacacttcaattcaaaggccatagtggtactagtgattaatgaaggagaagcaaacattgaacttgttggcattaaagaacaacaacagaggcagcaacaggaagagcaacctttggaagtgcggaaatatagagctgaattgtctgaacaagatatatttgtaatcccagcaggttatccagttgtggtcaacgctacctcaga

SEQ ID NO: 113430 - DNA, 133 bp, Glycine max
gggaagcccttcttcactctctctctttcttccctttgcttgctactcttgtcgagtgcatgctttgctattacctccagcaagttcaacgagtgccaactcaacaacctcaacgcgttggaacccgaccacc

SEQ ID NO: 113431 - DNA, 244 bp, Glycine max
tcaatatcctagtacaccgtattaaagaatttaagatatactatgatgagatcgcggttcccattactgttgctgggagttgttttcctggcatcagtttctgtctcatttggcattgcgtattgggaaaagcagaaccccagtcacaacaagtgcatccgaagttgcactagcgagaaagactcctacaggaaccaagcatgccacgctcgttgcaacctccttaaggtggaggaagaagaag

SEQ ID NO: 113432 - DNA, 232 bp, Glycine max
agcgaaacaagaggaagatgaggatgaggagcagcagcgagagagcgaagaaagtgaagattctgagttacgaagacataagaataagaacccttttctcttcggctctaacaggttcgaaactctcttcaaaaaccaatatggtcgcattcgcgtcctccagaggttcaaccaacgctccccacaacttcagaatctccgagactaccgcatgttggagttaactccaaac

SEQ ID NO: 113433 - DNA, 246 bp, Glycine max
gtagaggaagagaagggtgccattgtgacagtgaaaggaggtctcagcgtgataagcccacccacggaagagcagcaacaaagacccgaggaagaggagaagccagattgtgacgagaaagacaaacattgccaaagccaaagcagaaatggcattgacgagaccatttgcacaatgagacttcgccacaacattggccagacttcatcacctgacatcttcaaccctcaagctggtagcatcaca

SEQ ID NO: 113434 - DNA, 247 bp, Glycine max
cgaggacgaggacgaagaagaagatcaacctcgtcctgatcaccctccacagcgaccaagcaggcccgaacaacaagaaccacgtggaagaggatgagcagactagaaatggggttgaggaaaatatttgcaccatgaagcttcacgagaacattgctcgcccttcacgtgctgacttctacaacccaaaagctggtcgcattagcaccctcaacagtctcaccctcccagccctccgccaattcgg

SEQ ID NO: 113435 - DNA, 243 bp, Glycine max
gcaaagcaatggctacttcaaagttgaaaacccagaatgtggttgtatctctctccctaaccttaaccttggtactggtgctactgaccagcaaggcaaactcagcggaaactgtttctttcagctggaacaagttcgtgccgaagcaaccaaacatgatcctccaaggagacgctattgtgacctcctcgggaaagttacaactcaataaggttgacgaaaacggcaccccaaaaccctcgt

SEQ ID NO: 113436 - DNA, 242 bp, Glycine max
attttcatagcattttcagaggaaaatggcgggtacggtttcgacttgtttcttcttcgtgtttcttctttctctccttcttccttttcagatctccgctgaggaatcctcggagaaggagttcgtactcacattggatcactctaactttcacgacactgtcagcaagcacgatttcatcgtcgtcgagttctacgccccatggtgtggtcactgtaagaagcttgctccggagtatgaga

SEQ ID NO: 113437 - DNA, 240 bp, Glycine max
gacgtactcgtgattcctcctggtgttccttactggacctataacactggcgatgaaccagttgttgccatcagtcttcttgacacctctaacttcaataaccagcttgatcaaacccctagggtattttaccttgctgggaacccagatatagagtacccagagaccatgcaacaacaacaacagcagaaaagtcatggtggacgcaagcaggggcaacaccagcaggaggaagaggaa

SEQ ID NO: 113438 - DNA, 238 bp, Glycine max
cttaattattaacacttccttagttcaatatggggaagccctacactctctctctttcttccctttgcttgctactcttgtcgagtgcatgctttgctattagctccagcaagctcaacgagtgccaactcaacaacctcaacgcgttggaacccgaccaccgcgttgagtccgaagctggtttgattcaaacatggaactctcaacaccctgagctgaaatgcgccggtgtcactgt

SEQ ID NO: 113439 - DNA, 242 bp, Glycine max
aggaaaaagttgtattgaatctctccaaacttcaccatcttggggaaaagcctcaaaattgatggtgtcatcagccaaatttgaggcttttccccaagctggtgcagtatgaagaaattaagagtaaagttgtattgaaattttcacaagaggaatttcttacagcttggtcaactcaggtgcgtccaacaacaactctgttggctgatgggtgtccatatttgtatgctatggtgcatgat

SEQ ID NO: 113440 - DNA, 243 bp, Glycine max
ttttgttcctcactgaccaagccagggcgatgagaaccaaactttctttagctatctttttcttttgtcttttagccttattttcaaacctagcctttggcaaatgtaaagaaaccgaggtagaagaagaagaccctgagctcgtaacatgcaaacaccaatgccaacagccacagcaatacactgagggtgacaagcgggtatgcttgcaaagatgtgacaggtatcatcgtatgaagcaag

SEQ ID NO: 113441 - DNA, 252 bp, Glycine max
gcaagaggaagatgaggatgaggagcagcagcgagagagcgaagaaagtgaagattctgagttacgaagacataagaataagaacccttttctcttcggctctaacaggttcgaaactctcttcaaaaaccaatatggtcgcattcgcgtcctccagaggttcaaccaacgctccccacaacttcagaatctccgagactaccgcattttggagttcaactccaaacccaacaccctccttctccccaacca

SEQ ID NO: 113442 - DNA, 248 bp, Glycine max
gttcaatatcctagtatatcttaataaataatttaagatactatgatgagagcacggttcccattactgttgcttggacttgttttcctggcttcagtttctgtctcatttggcattgcttactgggaaaaagagaaccccaaacacaacaagtgtctccagagttgcaatagcgagagagactcgtacaggaaccaagcatgccacgctcgttgcaacctccttaaggtgtagaaagaagaatgtga

SEQ ID NO: 113443 - DNA, 246 bp, Glycine max
cgaaggtgagcagccacgtccattcccattcccacgcccacgccaacctcatcaagaggaagagcacgagcagaaggatgaacacgaatggcatcgcaaggaggaaaaacacggaggaaagggaagtgaagaggaacaagatgaacgtgaacacccacgcccacaccaacctcatcaaaaggaagaggaaaagcacgaatggcaacacaagcaggaaaagcaccaaggaaaggaaagtgaagaaga

SEQ ID NO: 113444 - DNA, 245 bp, Glycine max
atagcatctcctttaccaccattctagatatcagagaactttgcagctctcttaggtttttaaaaaacaccacgcaaacagcaagatggccacttccgacagtaacatgctactaaattatgttccagtttatgtgatgctcccactcggagttgtcaatgttgacaatgtttttgaagacccagatggccttaaagaacagctcttgcagcttcgagctgcgggtgttgacggggttatggttg

SEQ ID NO: 113445 - DNA, 241 bp, Glycine max
cccgaacccgtcggctgtcggtggactgctcgagctgcttccgcggcgagagcgggtcgtcgcgtgccggtcgggggacggattgggaacgggcccttcggggcctcttccccgggcgtcgaacagtcaactcagaactggtacggacaaggggaatccgactgtttaattaaaacaaagcattgcgatggtccctgcggatgttgacgcaatgtgatttctgcccagtgctctgaatgtc

SEQ ID NO: 113446 - DNA, 244 bp, Glycine max
aattcttccaccaagttatgggtttccttgtgttgcttcttttctccctcttaggtctctcttctagttccagcatatcaactcatcgttccatattggaccttgacctaaccaagtttaccacacagaaacaggtgtcttcactgttccaactatggaagagtgagcatggacgtgtctaccataaccacgaagaagaggcaaagagacttgagattttcaagaataacttgaactatatcag

SEQ ID NO: 113447 - DNA, 240 bp, Glycine max
gctggcgaaacaactcgcaaagggttttatttgtatgatgataaacgcaaggctagtcctgatcctgaattgaagatctatattgagaaggctaggagcatttctggtgtctccgttgatccaaagcttgccaaattacaagaaaaggatatttagagatgatattctttcctgtggtgaatgaggcttgtcgggtccttgatgaaggtatcgcagtcaaagcagcagatcttgatattt

SEQ ID NO: 113448 - DNA, 241 bp, Glycine max
ctaccaaccacaacaccaataccccctccgctaccctaacgatccacaccaacaaacccgttcctccacccaccaggtcgtcaaggccgccaccgccgtcacagcgggcggctccctcttgatcctcgcctcgttgatcctcgccgccaccgtcattgccctcaccatcgtcaccccgctgttcgtcattttcagtccggttctcgtccccgccgtaatcaccgttgcgctcctgagcctg

SEQ ID NO: 113449 - DNA, 240 bp, Glycine max
accagctcgaccagatgcctaggagattctatcttgctgggaaccaagagcaagagtttctaaaatatcagcagcagcagcaaggaggttcccaaagccagaaaggaaagcaacaagaagaagaaaacgaaggaagcaacatattgagtggcttcgcccctgaattcttgaaagaagcgttcggcgtgaacatgcagatagtgagaaacctacaaggtgagaacgaagaggaggatagtg

SEQ ID NO: 113450 - DNA, 238 bp, Glycine max
aacactcatcagtcatcaccatggccaagctagttttttccctttgttttctgcttttcagtggctgctgcttcgctttcagttccagagagcagcctcagcaaaacgagtgccagatccaaaaactcaatgccctcaaaccggataaccgtatagagtcagaaggagggctcattgagacatggaaccctaacaacaagccattccagtgtgccggtgttgccctctctcgctgcac

SEQ ID NO: 113451 - DNA, 236 bp, Glycine max
cttccttagttcaatatggggaagcccttcactctctctctttcttccctttgcttgctactcttgtcgagtgcatgctttgctattagctccagcaagctcaacgagtgccaactcaacaacctcaacgcgttggaacccgaccaccgcgttgagtccgaaggtggtttgattcaaacatggaactctcaacaccctgagctgaaatgcgccggtgtcactgtttccaaactcac

SEQ ID NO: 113452 - DNA, 234 bp, Glycine max
ttgtctttgaacactcatcaccatggccaagcttgttctttccctttgtttccttcttttcagtggctgcttcgctctgagagagcaggcacagcaaaatgagtgccagatccaaaagctgaatgccctcaaaccggataaccgtatagagtcggaaggtgggttcattgagacctggaaccctaacaacaagccattccagtgtgccggtgttgccctctctcgctgcaccct

SEQ ID NO: 113453 - DNA, 248 bp, Glycine max
ctcaacaccctgagctgaaatgcgccggtgtcactgtttccaaactcaccctcaaccgcaatggcctccacttgccatcttactcaccttatccccgtatgatcatcatcgcccaagggaaaggagcacttggagttgcaattccaggatgtcctgagacgtttgaggagccacaagaacaatcaaacagaagaggctcaatgtcgcagaagcagcagctacaggacagtcaccagaagattcgtcac

SEQ ID NO: 113454 - DNA, 207 bp, Glycine max
atcaagaaccgctctgctatggctgctcttcaatacttggaatcgctgcgcaattcgcaccctgagctctccgattggtacaattcgctggcggatctgtagcatgagaagctctggcaccaggtcactctcaagctcgagcatcttgtggctctcgccgtcttccaggctggtgatgcgttaatacaattatatgacaatttcagc

SEQ ID NO: 113455 - DNA, 245 bp, Glycine max
tctccatttgtccttgaatataatactcagcatggctaagcttgttctttccctttgttttctgcttttcagtggctgctgcttcgctttcagtttcagagagcagccacagcaaaacgagtgccagatccaacgcctcaatgccctcaaaccggataaccgtatagagtcagaaggtggcttcattgagacatggaaccctaacaacaagccattccagtgtgccggtgttgccctctctcgct

SEQ ID NO: 113456 - DNA, 242 bp, Glycine max
  unsure (1)..(242): unsure at all n locations
cttaattattaacacttccttagttctatatggctctgcncttcactctctctctttcttccctttgcttgctactcttgtcgagtgcatgctttgctattagctccagcaagctcaacgagtgccaactcaacaacctcaacgcgttggaccccgaccaccgcgttgagtccgaaggtggtttgattcaaacatggaactctcaacaccctgagctgaaatgcgccggtgtcactgtttcc

SEQ ID NO: 113457 - DNA, 242 bp, Glycine max
  unsure (1)..(242): unsure at all n locations
ctacccgccgctcgatgggaattgcgcttcaaggcgtctcgtagggctaatccgcctcacgagggtcaccaacggcacgtgcctttggggggccgaggccccctactgctggtcggcaaacggacggcgggcgcacgcgtcgcttctagcccggattctgacttagaggcgttcagtcataatccaacgcacggtagcttcgcgccnacggcttttcaaccaagcgcgatgaccaattgtgc

SEQ ID NO: 113458 - DNA, 242 bp, Glycine max
ctgttgtatcatatgttttattggctaatccgttggatgaagcaactttttaatcgggaaattgaactgagactaaatcatgggccttcaatttggtttcttgaggataagtacttcaaaccctaatttgtctgtggacattctaggttcgtcatgcgtttgtaaaagtttattctttttaaagtgtgaatgttatgcatgcaggtgtcttcttatcttcctaatcatctgtcgcaggctag

SEQ ID NO: 113459 - DNA, 240 bp, Glycine max
gcggcacgagaacgcgtactcaagaatcgtggagaagcttctggaagtggatcccaccggggcaatggtggccatagggaacatgatggagaagaagatcacgatgccggcgcaccttatgtacgatggggatgaccccaggctattcgagcactactccgctgtggcgcagcgcataggcgtgtacaccgccaacgactacgcagacatcttggagtttctcgttgaacggtggagatt

SEQ ID NO: 113460 - DNA, 239 bp, Glycine max
aacttattaacactttccttagttcaatatggggaagcccttcttcactctctctctttcttccctttgcttgctactcttgtcgagtgcatgctttgctattacctccagcaagttcaacgagtgccaactcaacaacctcaacgcgttggaacccgaccaccgcgttgagtccgaaggtggtcttattgaaacatggaactctcaacaccctgagctgcaatgcgccggtgtcactg

SEQ ID NO: 113461 - DNA, 239 bp, Glycine max
ctcgcaccaattgacactaagccacaaacacatgcaggttatcttggtcttttcaacgaaaacgagtctggtgatcaagtcgtcgctgttgagtttgacactttccggaactcttgggatccaccaaatccacacatcggaattaacgtcaattctatcagatccatcaaaacgacgtcttgggatttggccaacaataaagtagccaaggttctcattacctatgatgcctccaccag

SEQ ID NO: 113462 - DNA, 234 bp, Glycine max
tgcaaaccctcaaaagtataatcacgccataacaccattgaagccatctgcaccaaagattcccattgaggttcttctggaagcaactaaaccaacactgccattcccctggcttccagagacagacatgaaagttgatggctgatttcccaatttggtgccatgagtaattaaataatctgctggaaataatatctaccaatataaataaagcatccagccactgtaatctgc

SEQ ID NO: 113463 - DNA, 234 bp, Glycine max
aaaattcttccaccaagttatgggttcccttgtgttgcttcttttctccctcttaggtctctcttctagttccagcatatcaactcatcgttccatattggaccttgacctaaccaagtttaccacacagaaacaggtgtcttcactgttccaactatggaagagtgagcatggacgtgtctaccataaccacgaagaagaggcaaagagacttgagattttcaagaataactt

SEQ ID NO: 113464 - DNA, 230 bp, Glycine max
accttaataaataatttaagatactatgatgagagcacggttcccattactgttgctgggacttgttttcctggcttcagtttctgtctcatttggcattgcttactgggaaaatgtgttccccaaacactataagtgtctccagagttgcaatagcgtgagagactcgtacaggcaccatgcatgtcacgctcgttgcagcctccttaaggtggagaaagaagaatgtg

SEQ ID NO: 113465 - DNA, 242 bp, Glycine max
aactccttcaccctcactatcgtgacaccatgaacataaatggccttgctcggttatcactggtcaacgacggtggcgttatagaacaaacatttttgtggggaaggtattctgtggaaatgtctgctgtagtttacaaggattgggtttttacagatcaagcattgcctgctgatcttataaaaagaggaatggcaattgaggatccatcgtgccctcatggcattcgccttgtgatagag

SEQ ID NO: 113466 - DNA, 238 bp, Glycine max
ctcgagccgcactttccttagttcaatatggggaagcccttcttcactctctctctttcttccctttgcttgctactcttgtcgagtgcatgctttgctattacctccagcaagttcaacgagtgccaactcaacaacctcaacgcgttggaacccgaccaccgcgttgagtccgaaggtggtcttattgaaacatggaactctcaacaccctgagctgcaatgcgccggtgtcactg

SEQ ID NO: 113467 - DNA, 237 bp, Glycine max
aaaaaagagaagaagatgggtttgaagaacaacatggtggtgctaaaggtgtgtttggtgctacttttccttgtggggggtactactagtgccaacttgaggctgagtaagcttggcctgctcatgaaaagtgatcatcatcaacactcaaatgatgatgagtcttcaaaaccatgctgtgatcaatgcgcatgcacaaagtcaaaccctcctcaatgccgctgttcagatatgagg

SEQ ID NO: 113468 - DNA, 234 bp, Glycine max
gttcaatatcctagtataccttaataaataatttaagatactatgatgagagcacggttcccattactgttgctgggacttgttttcctggcttcagtttctgtctcatttggcattgcttactgggaaaaagagaaccccaaacacaacaagtgtctccagagttgcaatagcgagagagactcgtacaggaaccaagcatgccacgctcgttgcaacctccttaaggtggag

SEQ ID NO: 113469 - DNA, 233 bp, Glycine max
gttcaatatcctagtataccttaatacataatttaagatactatgatgagagcacggttcccattactgttgctgggacttgttttcctggcttcagtttctgtctcatttggcattgcttactgggaaaaagagaaccccaaacacaacaagtgtctccagagttgcaatagcgagtgagactcgtacaggaaccaagcatgtcacgctcgttgcaacctccttatggtgga

SEQ ID NO: 113470 - DNA, 233 bp, Glycine max
tcaatatcctagtataccttaataaataatttaagatactatgatgagagcacggttcccattactgttgctggtacttgttttcctggcttcagtttctgtctcatttggcattgcttactgggaaaaagagaaccccaaacacaacaagtgtctccagagttgcaatagcgagagagactcgtacaggaaccaagcatgccacgctcgttgcaacctccttaaggtggaga

SEQ ID NO: 113471 - DNA, 89 bp, Glycine max
aaaagatcatacatagtagtgttggtgggttgcaaagatgcttaggggtcttctccataggggtcataagatacaagggtcagtggtgt

SEQ ID NO: 113472 - DNA, 243 bp, Glycine max
taaaattcttccaccaagttatcggtttccttgtgttgcttcttttctccctcttaggtctctcttctagtttcagcatatcaactcatcgttccatattggaccttgacctaaccaagtttaccacacagaaacaggtgccttcactgttccaactatggaagagtgagcatggacgtgtctagcataaccacgaagaagaggcaaagagacttgtggttttcaagaataacttgaactata

SEQ ID NO: 113473 - DNA, 239 bp, Glycine max
cgggggtcccagtcccgaacccgtcggctgtcggtggactgctcgagctgcttccgcggcgagagcgggtcgtcgcgtgccggtcgggggacggattgggaacgggcccttcggggcctcttccccgggcgtcgaacagtcaactcagaactggtacggacaaggggaatccgactgtttaattaaaacaaagcattgcgatggtccctgcggatgttgacgcaatgtgatttctgccc

SEQ ID NO: 113474 - DNA, 241 bp, Glycine max; identical to SEQ ID NO: 111106

SEQ ID NO: 113475 - DNA, 238 bp, Glycine max
gaaaaaccctcagcttcgggacttggatgtcttcctcagtgttgtggatatgaacgagggagctctttttctgccacacttcaattcaaaggccatagtggtactagtgattaatgaaggagaagcaaacattgaacttgttggcattaaagaacaacaacagaggcagcaacaggaagagcaacctttggaagtgcggaaatatagagctgaattgtctgaacaagatatatttgta

SEQ ID NO: 113476 - DNA, 237 bp, Glycine max
cacaccatggcctcaaccaacgctctctcttcagcctccattctacgctctcccaaccgccagtctctgacccgaagagcgaaccataatggaagagtaaattaccggaaaccgaataaccgtttctccgtgaaagcctccgccaaagagattgcctttgaccagcattcccgctctgctatgcaggccggcattgacaagctcgccgacgctgttgggctcactcttgggcccaga

SEQ ID NO: 113477 - DNA, 236 bp, Glycine max
tgagaccatcaaagaagctttggaaagagaatgccctggagttgtttcatgtgctgatatcctcgttctctctgccagagatggcattgtttcgctaggaggtccccatatccctcttaagactggaagaagggatggtagaaggagcagagctgatgtggttgagcagttcctcccagaccacaatgagtccatttctgcagttcttgacaagtttggtgccatgggaattgaca

SEQ ID NO: 113478 - DNA, 234 bp, Glycine max
gtcttcttgacacctctaacttcaataaccagcttgatcaaacccctagggtattttaccttgctgggaacccagatatagagtacccagagaccatgcaacaacaacaacagcagaaaagtcatggtggacgcaagcaggggcaacaccagcaggaggaagaggaagaaggtggcagcgtgctcagtggcttcagcaaacacttcttggcacaatccttcaacaccaacgagg

SEQ ID NO: 113479 - DNA, 233 bp, Glycine max
taaacactcatcagtcatcaccttggccaagctagttttttccctttgttttctgcttttcagtggctgctgcttcgctttcagttccagagagcagcctcagcgaaacgagtgccagatccaaaaactcaatgccctcacaccggataaccgtatagagtcagaaggagggctcattgagacatggaaccctaacaacaagccattccagtgtgccggtgttgccctctctc

SEQ ID NO: 113480 - DNA, 234 bp, Glycine max
ccttaataaataatttaagatactatgatgagagcacggttcccattactgttgctgggacttgttttcctggcttcagtttctgtctcatttggcattgcttactgggaaaaagagaaccccaaacacaacaagtgtctccagagttgcaatagcgagagagactcgtacaggaaccaagcatgccacgctcgttgcaacctccttaaggtggagaaagaagaatgtgaagaa

SEQ ID NO: 113481 - DNA, 246 bp, Glycine max
agatcttacaaccttcaatctggcgatgccctaagagtccctgcaggaaccacatactatgtggttaaccctgacaacgacgagaatctcagaatgataacactcgccatacccgttaacaaacccggtagatttgagagtttcttcctatctagcactcaagctcaacagtcctacttgcaagggttcagcaagaatattctagaggcctcatacgacaccaaattcgaggagataaacaaggtt

SEQ ID NO: 113482 - DNA, 241 bp, Glycine max
cgcagagtagagcagcagagaagagagaaaacggcactgcagccgtagaaggaaaaccgaccatggtgcacgtctccttttacaggaactatggtaagacgtttaagaagccccgccgtccgtacgagaaggagcgtctagacgcggagctgaagctggtgggggagtacgggctgcggtgcaagagggagctgtggagggtgcagtacgcgctcagccgcatccgcaacaacgcgcggaa

SEQ ID NO: 113483 - DNA, 239 bp, Glycine max
ggtgagtacatagccagtgggtctcctgacagatcgatgctcatatggtccttgaaggaaggcaagatcgttaaaacctacactggtgatggaggcatttttgaggtctgttggaataaggagggtgacaagatcgctgcctgttttgccaataatacagtttgtgttttggatttcagaatgtaacctgagaagcaccaagttattttgactatttaattgtttttccctccttactt

SEQ ID NO: 113484 - DNA, 239 bp, Glycine max
gctgcatgagtataaaactgctacaaatatgactgagcagtttgctgctttggttgccatagcacaaaaccctggtaaaacccgtgatgatgttcttgctgacttttatggcaagtggcagcatgatttcttggtggtgaacaaatggtttgctcttcaagcaatgtctgacattcctggtaatgttgagaatgtgcggaaactgttaagccacccagcatttgatctgcgcaatccca

SEQ ID NO: 113485 - DNA, 73 bp, Glycine max
ggaagaaggtggcagtgtgctcagtggcttcagcaaacatttcttagcacaatccttcaacaccaacgaggac

SEQ ID NO: 113486 - DNA, 235 bp, Glycine max
atgaaggtgtggtgaggccatcttatatgaaataatatcaaaatatattttgtgtaataataaaactatggcctatgtatttaccaccctccgacccagcctatgttaatatctgagtggcgttgtacctttgaatcgccttaataaaatgtcagtcttcaagttttgtctttaaaaaaaaaaaaaaaaaaaaaaggggggcccccgattagtgagcccttggtcccgggattta

SEQ ID NO: 113487 - DNA, 234 bp, Glycine max
gtggaaacaaatatggacagagtatcattccaatggagccatgtggtgtgggatactggattatttcatcagctcaagtccctcttgctttatttttcactgcttggattgtatatagaaaagaaagccatcaagaccaaaatctcatgcaagaggactcatgcctatcctcaaatggaccatcaaacaagcttatttttcacatgatggcactgctagcagggatattgggtg

SEQ ID NO: 113488 - DNA, 232 bp, Glycine max
ctctccattgtctttgaacactcatcaccatggccaagcttgttctttccctttgtttccttcttttcagtggctgcttcgctctgagagagcaggcacagcaaaatgagtgccagatccaaaagctgaatgccctcaaaccggataaccgtatagagtcggaaggtgggttcattgagacctggaaccctaacaacaagccattccagtgtgccggtgttgccctctctcg

SEQ ID NO: 113489 - DNA, 232 bp, Glycine max
gcaatggctacttcaaagttgaaaacccagaatgtggttgtatctctctccctaaccttaaccttggtactggtgctactgaccagcaaggcaaactcagcggaaactgtttctttcagctggaacaagttcgtgccgaagcaaccaaacatgatcctccaaggagacgctattgtgacctcctcgggaaagttacaactcaataaggttgacgaaaacggcaccccaaaac

SEQ ID NO: 113490 - DNA, 241 bp, Glycine max
ccaccaagttatgggtttccttgtgttgcttcttttctccctcttaggtctctcttctagttccagcatatcaactcatcgttccatattggaccttgacctaaccaagtttaccacacagaaacaggtgtcgttcactgttccaactatggaagagtgagcatggacgtgtctaccataaccacgaagaagaggcaaagagacttgagattttcaagaataacttgaactatatcaggga

SEQ ID NO: 113491 - DNA, 238 bp, Glycine max
ctagttcaatatcctagtataccttaataaataatttaagatactatgatgatagcacggttcccattactgttgctgggacttgttttcctggcttcagtttctgtctcatttggcattgcttactgggaaaaagagaaccccaaacacaacaagtgtctccagagttgcaatagcgagagagactcgtacaggaaccaagcatgccacgctcgttgcaacctccttaaggtggaga

SEQ ID NO: 113492 - DNA, 240 bp, Glycine max
ctccatttgtccttgaatataatactcagcatggctaagcttgttctttccctttgttctctgcttttcagtggctgctgcttcgctttcagtttcagagagcagccacagcaaaacgagtgccagatccaacgcctcaatgccctcaaaccggataaccgtatagagtcagaaggtggcttcattgagacatggaaccctaacaacaagccattccagtgtgccggtgttgccctctct

SEQ ID NO: 113493 - DNA, 233 bp, Glycine max
cattgtctttgaacactcatcaccatggccaagcttgttctttccctttgtttccttcttttcagtggctgcttcgctctgagagagcaggcacagcaaaatgagtgccagatccaaaagctgaatgccctcaaaccggataaccgtatagagtcggaaggtgggttcattgagacctggaaccctaacaacaagccattccagtgtgccggtgttgccctctctcgctgcac

SEQ ID NO: 113494 - DNA, 237 bp, Glycine max
ctttcagctatgaacgctctagcagccaccaaccgtaacttccgacgtgcagctcacattctcggtttggacactaagcttgagaatagccttctcattcccttcagggaaatcaaagttgaatgcacgatcccaaaagatgacggaacactagtatcatatgtaggattcagaattcaacatgacaatgctcgtggaccgatgaaaggagggattcgttatcacccggaggttgac

SEQ ID NO: 113495 - DNA, 114 bp, Glycine max
gagaaccccaaacacaacaagtgtctccagagttgcaatagcgagagagactcgtacaggatccaagcatgccacgctcgttgcaacctccttaaggtggagaaagaagaatgt

SEQ ID NO: 113496 - DNA, 234 bp, Glycine max
ctcgagccgcgccgccagatctcagacacacactctcactctctctccctcaccttccataatgcagctcctctggccactgctcgcggcggcgctgctcctcctcgccaccctctccgacgcgcacaacatcaccagcatcctcgcaaagcaccccgagctctccaccttcaaccactacctcaccctcacccacctcgcccccgaaatcaacggcaaaaccaccatcaccgt

SEQ ID NO: 113497 - DNA, 231 bp, Glycine max
tctctccatcggtccttacacactcatcagtcatcaccatggccaagctagttttttccctttgttttctgcttttcagtggctgctgcttcgctttcagttccagagagcagcctcatccctacgagtgccagatccataaactcaatgccctcaaaccgggtaaccgtatagagtcagaaggagggctcattgagacatgggaccctaacaactagccactccagtgtg

SEQ ID NO: 113498 - DNA, 229 bp, Glycine max
cttcaagcactcatcaccatggacaagcttgtactgtccctttatgaccttctaactagtagatgcttcgcgctgagtctgcaggtaccgcaatctgagtgccagattcacaagctgactgctctcaaaccggttcagcgtatagagccagaaggtgggttcattgcgacctggaatcctagcgccaatccattccagcatcgcggtcatcgcctctctcgctgcaccc

SEQ ID NO: 113499 - DNA, 260 bp, Glycine max
ctaacttaattattaacacttccttagttcaatatggggaagcccttcactctctctctttcttccctttgcttgctactcttgtcgagtgcatgctttgctattagctccagcaagctcaacgagtgccaaccaacaacctcaacgcgttggaacccgaccaccgcgttgagtccgaaggtggtttgattcaaacatggaactctcaacaccctgagctgaaatgcgccggtgtcactgtttccaaactcaccctcaac

SEQ ID NO: 113500 - DNA, 256 bp, Glycine max
gttcaatatcctagtataccttaataaataatttaagatactatgacctccgcacggttcccattactgttgctgggacttgttttcctggcttcagtttctgtgctcatttggccattgcttactgggaaaagagaaccctaaacacaacaagtgtctctagagttgcaatagcgagagagactcgtacaggaaccaagcatgctacgctcgttgctacctccttaaggtggagatagatgaatgtgaagaaggt

SEQ ID NO: 113501 - DNA, 258 bp, Glycine max
gttcaatatcctagtataccttaataaataatttaagatactatgatgagagcacggttcccattactgttgctgggacttgttttcctggcttcagtttctgtctcatttggcattgcttactgggaaaagagaaccccaaacacaacaagtgtctccagagttgcaatagcgagagagactcgtacaggaaccaagcatgccacgctcgttgcaacctccttaaggtggagaaagaagaatgtgaagaaggtgaaa

SEQ ID NO: 113502 - DNA, 254 bp, Glycine max
aacttagaagggctcactgtagatgaggcaattcaaaacaagagattgttcctactagatcatcatgacccaatcatgccatatttgaggcgaataaatgcaacctccacaaaggcttatgctaccagaacatccttttcctgaaaaatgacggaactttaagaccacttgccatagagttgagtttgccacatcctcagggagatcaatctggtgcttttagtcaagtttttctgcctgcagatgcaggtgtt

SEQ ID NO: 113503 - DNA, 254 bp, Glycine max
gaagcatccactttgtttgcaattcgtggatttacaatgccaaactcttcaaaagtgaccgcattttctttgcgaaccagtcatatcttccaagtgagacaccagctccactagtcaaatatagagatgagagttgcataatttaagaggagatggaactggagaacgcaaagtgtgggaaaggatctatgattatgatgtctacaatgatttaggtgatccggataaaggtgaaaatcatgcacgtcctgttc

SEQ ID NO: 113504 - DNA, 254 bp, Glycine max
actttccttagttcaatatggggaagcccttcttcactctctctctttcttccctttgcttgctactcttgtcgagtgcatgctttgctattacctccagcaagttcaacgagtgccaactcaacaacctaacgcgttggaacccgaccaccgcgttgagtccgaaggtggtcttattgaaacatggaactctcaacaccctgagctgcaatgcgccggtgtcactgtttccaaacgcaccctcaactgcaacg

SEQ ID NO: 113505 - DNA, 258 bp, Glycine max
caaacacttcaacaatctactctatacccgatttacaagatgagttcatttagccaaaatccctatgttttagttctgttcctcgttctcactgtgtggatatcccgtgtaatgtctcgcgggctcattacactgagagacatgagaaatggatggcacaatatggtaaggtttacaaggatgctgcagagaaggagaaacgtttccaagtattcaaaaacaatgtgcagttcattgagtcattcaatgctgctgggg

SEQ ID NO: 113506 - DNA, 242 bp, Glycine max
ctttccttagttcattatggggaagcccttcttcactctctatctttcttccctttgcttgctactcttgtcgagtgcatgctttgctattacctccagcaagttcaacgactgccaactcaacaacctcaacggttggaacccgaccaccgcgttgagtccgaaggtggtcttattgaaacatggaactctcaacaccctgagctgcaatgcgccggtgtcactgtttccaaacgcaccct

SEQ ID NO: 113507 - DNA, 264 bp, Glycine max
tagcgttgccagcttcgccgcttccttcaacttcaccttctatgcccctgacacaaaaaggcttgcagatgggcttgccttctttctcgcaccaattgacactaagccacaaacacatgcaggttatcttggtctttcaacgaaaacgagtctggtgatcaagtcgtcgctgttgagtttgacactttccggaactcttgggatccaccaaatccacacatcggaattaacgtcaattctatcagatccatcaaaacgacgtct

SEQ ID NO: 113508 - DNA, 92 bp, Glycine max
ctcaaggtcgcagaagcagcagctacaggacagtcaccagaagattcgtcacttcaatgatggagacgtactcgtgattcctcctggtgttc

SEQ ID NO: 113509 - DNA, 258 bp, Glycine max
tgtctccattgcctttgaacactcatcaccatggccaagcttgttctttcgctttgtttccttcttttcagtggctgcttcgctctgagagagcaggcacagcaaaatgagtggcagatccaaaagctgaatgcctcaaaccggataaccgtatagagtcggaaggtgggttcattgagacctggaaccctaacaacaagccattccagtgtgccggtgttgccctctctcgctgcacccttaaccgcaatgcccttc

SEQ ID NO: 113510 - DNA, 258 bp, Glycine max
ggacgaagaagaagatcaacctcgtcctgatcaccctccacagcgaccaagcaggcccgaacaacaagaaccacgtggaagaggatgtcagactagaaatggggttgaggaaaatatttgcaccatgaagctcacgagaacattgctcgcccttcacgtgctgacttctacaacccaaaagctggtcgcattagcaccctcaacagtctcaccctcccagccctccgccaattcggactcagtgcccaatatgttgtc

SEQ ID NO: 113511 - DNA, 255 bp, Glycine max
attccccttatctttctctcttctctctccccgcccaaaccctaactccctaccctattccgctttctctcatccatcatgaaaggaggaaagtccaagaccgaatctaagagagccgatgccaaacttgcgtgaataagaagggcgccgccaccaagactaggaaacccgccggaaaggggaaggcagcgaaagatcctaacaagccaaagaggcctccaagtgctttcttcgttttcatggaggaattcagga

SEQ ID NO: 113512 - DNA, 258 bp, Glycine max
tcctagtataccttaataaataatttaagatactatgatgagagcacggttcccattactgttgctgggacttgttttcctggcttcagtttctgtctcatttggcattgcttactgggaaaaagagaacccaaacacaacaagtgtctccagagttgcaatagcgagagagactcgtacaggaaccaagcatgccacgctcgttgcaacctccttaaggtggagaaagaagaatgtgaagaaggtgaaattccacga

SEQ ID NO: 113513 - DNA, 253 bp, Glycine max
attctagaggcctcatacgacaccaaattcgaggagataaacaaggttctgtttcggcctggagttgaactccaaacccaacacccttcttctcccccaccatgctgacgctgattacctcatcgttatcttaacgggactgccattcttaccttggtgaacaacgacgaccgagactctcacaaccttcaatctggcgatgccctaagagtccctgcaggaaccacatactatgtggttaaccctgacaacg

SEQ ID NO: 113514 - DNA, 257 bp, Glycine max
gccgaccaagccatggaaagcgtgaacaagacgaggacgaggacgaagatgaagataaacctcgtcctagtcgaccaagccaaggaaagcgtgaacaagaccaggaccaggacgaggacgaagatgaagataagatcaacctcgcaagagatgcgaatggagatcgaaaaagacacaacccagaagacctagacaagaagaaccacgtgaaagaggatgcgagacaagaaacggggttgaggaaaatatctgcacct

SEQ ID NO: 113515 - DNA, 253 bp, Glycine max
ggaatctgcaaaaacacagaggttgtgtcaacactgtgagcttcaatgcagatggtgacactctagtctccggttccgacgattggggggttattctctgggactgggaaactggccgcattaaactctcttccattctggtcattctaacaatgttttccaggccaagttcatgcctcactctcatgatcgtaccattgtcacctgtgctgctgatggacaggtgagacatgctcaaattcttgaaaatgga

SEQ ID NO: 113516 - DNA, 246 bp, Glycine max
gactctgcggagatatgggcaccccattgatgcgttgcttgatgttttgagttaacatagggataagtaccatgagctgcttttgtctgactgtaggaagcagattgcggaggcggttgtggctgataatttgagcagatgttgatgaagaaggagtatgagtattccatgcatgtgctttctttccagatacagacctcagatatcataccagcttttccctatgtggcgccattttcatccact

SEQ ID NO: 113517 - DNA, 254 bp, Glycine max
ggtgatgataacttgattagtgttcatgaatatgtcaagccttactttagtggttctaaattgaaaagctttctagctggtcataatatcaccattactgatggtattgacaaaactagtgcaactttgcgtttagaaagttagcagattgtgactttctcaagagaaactttaagcagatgtcgaatgtcttgtgggtggctcctgaggacaaggcgagtttatggtcacaacttcattatgtttcgtgtaac

SEQ ID NO: 113518 - DNA, 257 bp, Glycine max
cggctcgagcttaaacactcatcagtcatcaccatggccaagctagttttttccctttgtattctgcttttcagtggctgctgcttcgctttcagttctagagagcagcctcagtaaaacgagtgccagatcaaaaactcaatgccctcaaaccggataaccgtatagagtcagaaggagggctcattgagacatggtaccctaacaacaagccattccagtgtgccggtgttgccctctctcgctgcaccctcaac

SEQ ID NO: 113519 - DNA, 256 bp, Glycine max
gttcagttacccacagcagtgtgaaagaaagaatccttggtgggccatttctaaggatatatctgaaggaccacctgctattaaactctctgggttccatggtactgaactcggttggtttaaaattcagaagcttccaaatcctgtgactctaatgactacaagcttgtgttctgccagtatgatgagacctggtgtttggatgtcggcatttacgtcgatcgtcaaggaaacaggcgtttggtgcttgctgtta

SEQ ID NO: 113520 - DNA, 257 bp, Glycine max
  unsure (1)..(257): unsure at all n locations
agtataccttaataaataatttaagatactatgatgagagcacggttcccattactgttgctgggacttgtcttcctggcttcagtttctgtctcattcggcattgcttactgggaaaaagagctccccaacacaacaagtgtctccagagttgcaatagctagagagactcgtacaggaaccaagcttngccacgctcgttgcaacctccttaaggtggagaaagaagaatgtgaagaaggtgaaattccacgacc

SEQ ID NO: 113521 - DNA, 254 bp, Glycine max
cagttcttgatgttgttcgaaaagaagctgagaattgtgactgcttgcaggggttccaaatttgtcactcactgggaggtggaactgggtctggaatgggtaccttgcttatctcaaagatcagagaagagatccggataggatgatgttgactttctcagtgttcccgtccccgaaggtctctgacactgtggttgaaccctacaatgccactctctctgttcatcaactagttgagaatgcggatgaatgca

SEQ ID NO: 113522 - DNA, 252 bp, Glycine max
ccatttgtccttgaatataatactcagcatggctaagcttgttctttccctttgttttctgcttttcagtggctgctgcttcgctttcagtttcagagagcagccacagcaaaacgagtgccagatccacgcctcaatgccctcaaaccggataaccgtatagagtcagaaggtggcttcattgagacatggaaccctaacaacaagccattccagtgtgccggtgttgccctctctcgctgcaccctcaac

SEQ ID NO: 113523 - DNA, 252 bp, Glycine max
gtcatttacgcttctcttctctgcagcaactatgcctaaccctaaggtcttcttcgacatgaccatcggcggtcaatctgctggccgcatcgtgatggagctctacgccgacgtcactccccgcaccgcgagaacttccgcgcgctttgcaccggcgagaagggcgtagggcggacggcaagcccctccactacaagggctcgtccttccaccgcgtgatcccgagtttcatgtgtcagggtggcgacttca

SEQ ID NO: 113524 - DNA, 255 bp, Glycine max
gcaaagcaatggctacttcaaagtcccacacccagaatgtggttgtatctctctccctaaccttaaccttggtactggtgctactgaccagcaaggcaaactcagcggaaactgtttctttccctggaaaagttcgtgccgaagcaaccaaacatgatcctccaaggagacgctattgtgacctcctcgggaaagttacaactcaataaggttcacgaaaacggcaccccaaaaccctcgtctcttggtcgcgcc

SEQ ID NO: 113525 - DNA, 255 bp, Glycine max
cttaattattaacacttccttagttcaatatgggtaagcccatcactctctctctttcttccctttgcttgctactcttgtcgagtgcatgctttgctattagctccagcaagctcaacgagtgccaactcaaaacctcaacgcgttggaacccgaccaccgcgttgagtccgaaggtggtttgattcaaacatggaactctcaacaccctgagctgaaatgcgccggtgtcactgtttccactctcaccctcaa

SEQ ID NO: 113526 - DNA, 255 bp, Glycine max
gctttgctattagctccagcatgctcaccgaatgccaactcaacaacctcaacgcgttggaacccgaccaccgcgttgagtccgtaggtggcttgattcaaacatggaactctcaacaccctgagctgaaatcgccggtgtcactgtttccaaactcaccctcaaccgcaatgacctccacttgccatcttactcaccttatccccggatgatcatcatcgcccaagggaaaggagcacttggagctgcaattcc

SEQ ID NO: 113527 - DNA, 259 bp, Glycine max
tttttggagttgaactccaaacccaacacccttcttctcccccaccatgctgaccctgattacctcatcgttatccttaacgggactgccattcttaccttggtgaacaacgacgaccgagactcttacaacctcaatctggcgatgccctaagagtccctgcaggaaccacatactatgtggttaaccctgacaacgacgagaatctcagaatgataacactcgccatacccgttaacaaacccggtagatttgagag

SEQ ID NO: 113528 - DNA, 259 bp, Glycine max
cggctcgaggacgacagagactcctacagacttcaatctggtgatgccctgagagtcccctcaggaaccacatactatgtggtcaaccctgacaacaacgaaaatctcagattaataacactcgccataccgttaacaagcctggtagatttgagagttacttcctatctagcactgaagctcaacaatcctacttgcaaggattcagcaggaacattttagaggcctcctacgataccaaattcgaggagataaacaa

SEQ ID NO: 113529 - DNA, 254 bp, Glycine max
aaaggacgcacctgctgttggcttgttgttcaaggatggcaatttgtaaaaaagatgtttggagggttgaatgtggaatcccttctggatttccgctcacagttatttgcaatagcatttttaatgagagctcattagatatagctatgaaaaactactgcgccaggcaaaagctccaagtatgtttttacaatccttcaaaaattttgtttctttgtgtgtgtatggtgatgataacttgattagtgttcatg

SEQ ID NO: 113530 - DNA, 256 bp, Glycine max
aagcagatgagtaacttcacgaaggaggagtttgtgcacattttgcggcgacagagcactggtttttcgaggggaagctccaaatacaggggagttactctgcataagtgcgggcgatgggaagctcgtaggggcagtttcttggtaaaaagtatatatatcttgggctattcgacagtgaattagaggctgcaagagcgtatgataaggcagctataaaatgcaatggaagggaagcagttacaaacttcgagcc

SEQ ID NO: 113531 - DNA, 254 bp, Glycine max
gaggaattgaagaagaagaagaagaagaagggagaaggagagcattggaagacatagagataaagaattgaagataatgcgaaccctttgcgacgtatgcgagagcgccgctgccattgtcttctgcgcgctgatgaggctgctctctgctccgcttgtgaccacaagatccatatgtgtaacaaacttgctagtagacacgttcgggttggccttgctgaccccactgatgttccacgctgtgacatatgtga

SEQ ID NO: 113532 - DNA, 250 bp, Glycine max
acactcataacacaaagcacaaagcaaagctcatccttgagttaaaaaatggcagcagcttcttccatggctctctcatccccatccttggctggcaaggccgtgaagctgggcccatcagccccagagtgggaagggtgagcatgaggaagaccgtcaccaagcaggtctcctcaggaagcccatggtacggcccagaccgagtcaagtacttgggcccattctctggcgagccccgtcctacctaacg

SEQ ID NO: 113533 - DNA, 249 bp, Glycine max
gttcaatatcctagtataccttaataaataatttaagatactatgatgagagcacggttcccattactgttgctcctacttgttttcctggcttcagtttctgtctcatttggccttgcttactgggaaaagagaaccccaaacacaataagtgtcttcagagttgcaatagcgagagagacctgtacaggaaccaagcatgccacgctcgttgcaacctccttaaggtggagaaagaagaatgtgaag

SEQ ID NO: 113534 - DNA, 237 bp, Glycine max
atttcctatactatgatgagagcacggttcccattactgttgctgggacttgttttcctggcttcagcttctgtctcatttggcattgcttactgggaaaaagagaaccccaaacacaacaagtgtctcagagttgcaatagcgagagagactcgtacaggaaccaagcatgccacgctcgttgcaacctccttaaggtggagaaagaagaatgtgaagaaggtgaaattccacaca

SEQ ID NO: 113535 - DNA, 252 bp, Glycine max
ctcctgttgttgccgtttctattattgacaccaacagcttggagaaccagctcgaccagatgcctaggagattctatcttgctgggaaccaagagcaagagtttctaaaatatcagcagcagcagcaaggggttcccaaagccagaaaggaaagcaacaagaagaagaaaacgaaggaagcaacatattgagtggcttcgcccctgaattcttgaaagaagcgttcggcgtgaacatgcagatagtgagaaa

SEQ ID NO: 113536 - DNA, 258 bp, Glycine max
  unsure (1)..(258): unsure at all n locations
ttgaaatggaagaggagcctgtttatgtcaatgcgaanagtatccatggtattttgaggcgaagacagtcacgtgctanngctgagattgnaaagaaagtaatcaaaaacaggaagccatacctccacgaatcccgtcaccttcatgcaatgagaagggcaagaggcaacggtggtcgctttctcaacacaaagaagcttgaaaataacaattctaattccacttcagacaaaggnccaatatcgtgcaaacccctca

SEQ ID NO: 113537 - DNA, 263 bp, Glycine max
ccaaacccgaaaacagagtacaagatttaaacacgcgaacaccgtgtttgaaaatcgaacataagagaagagggcgcaatcgttagggtttccaagatggaaggcatggttgatcacctggctttcgagcggaacattcgcagttcgatgtcgacgagatgaagatcgtttgggccggttctcgtcacgcttttgaagtatctgacaaaatggctcgcctcgttgccagcgatccggcattcagaaaggatgatagagttgtg

SEQ ID NO: 113538 - DNA, 177 bp, Glycine max
attctctccattggtccttaaacactcatcagtcatcaccatggccaagctagttttttccctttgttttctgcttttcagtggctgctgcttcgctttcagttccagagagcagcctcagcaaaacgaggccagatccaaaaactcaatgccctcaaaccggataaccgtatagag

SEQ ID NO: 113539 - DNA, 252 bp, Glycine max
gttcaatatcctagtacaccgtattaaagaatttaagatatactatgatgagagcgcggttcccattactgttgctgggagttgttttcctggcatcagtttctgtctcatttggcattgcgtattggaaaagcagaaccccagtcacaacaagtgcctccgaagttgcaatagcgagaaagactcctacaggaaccaagcatgccacgctcgttgcaacctccttaaggtggaggatgaagtagaatgcgt

SEQ ID NO: 113540 - DNA, 251 bp, Glycine max
ttaacacttccttagttcaatatggggaagcccttcactctctctctttcttccctttgctcctctactcttgtcgagtgcatgctttgctattagctccagcaagctcaacgagtgccaactcaacacctcaacgcgttggaaccctaccaccgcgttgagtccgaaggtggtttgattcaaacatggaactctcaacaccctgagctgaaatgcgccggtgtcactgtttccaaactcaccctcaaccg

SEQ ID NO: 113541 - DNA, 254 bp, Glycine max
cttctcgagcgaatcggctcgagctctccattgtctttgaacactcatcaccatggccaagcttgttctttccctttgatctcttcttttcagtggctgcttcgctctgagagagcaggcacagcaaaagagtgccagatccaaaagctgaatgccctcaaaccggataaccgtatagagtcggaaggtgggttcattgagacctggaaccctaacaacaagccattccagtgtgccggtgttgccctctctcg

SEQ ID NO: 113542 - DNA, 251 bp, Glycine max
ccagttcaatatcctagtacaccgtattaaagaatttaagatatactatgatgacagcgcggttcccattactgttgctgggagttgttttcctggcatcagtttctgtctcatttggcattgcgtatgggacaagcacaaccccagtcacaacaagtgcctccgaagttgcaatagcgagaaagactcctacaggaaccacaaatgccacgctcgttgcaacctccttaaggtggaggaagaagaagaat

SEQ ID NO: 113543 - DNA, 250 bp, Glycine max
aattcttccaccaagttatgggcttccttgtgttgcttcttttctccctcttaggtctctcttctagttccagcatatcaactcatcgttccatattggaccttgacctaaccaagtttaccacacaaaacaggtctcttcactgttccaactatggaagagtgagcatggacgtgtctaccataaccacgaagaagaggcaaagagacttgagattttcaagaataacttgaactatatcagggacatg

SEQ ID NO: 113544 - DNA, 249 bp, Glycine max
gtttaaaaatggtgaatgacttatcccgctgttatacattggtaggtaattgttacagaagtcttgggtggtggtaaattctatgtccagacagttggagatcaaaagatcgcatccattcagcacaacttgcttctttgaacctgaaggatgctcctgtgcttggtgctttcaatcctaagaagggtgacatagtcctttgttattttcatgctgacaagtcttggtaccgggcaatggtaagttcct

SEQ ID NO: 113545 - DNA, 250 bp, Glycine max
tcgggattgtcaagaacgatgactccgatttgtaccggaagcttgttattgcttccgcttggaggaaacagatgccgaagctcgcgctttcgcttggtctcgctcagcaaatgcctgatatgattgagagttgatcagcaaagggcagcagcttgatgcggttcactttacctatgaagtgggtctggtggaaaagttccctcctgttcccttgttgaagtcttttctcaaggatgctaagaaagttgcg

SEQ ID NO: 113546 - DNA, 252 bp, Glycine max
gttcaatatcctagtataccttaataaataatttaagatactatgatgagagcacggttcccattactgttgctgggacttgttttcctcctttcagtttctgtctcatttggcattgcttaactggaaaaagagaaccccaaacacaacaagtgtctccagagttgcaatagcgagagagactcgtacaggaaccaagcatgccacgctcgttgcaacctccttaaggtggagaaagaagaatgtgaagaa

SEQ ID NO: 113547 - DNA, 257 bp, Glycine max
cgcggcatacagtggatacttcatacttcctccccagaatgtggttgtatctctctccctaaccttaaccttggtactggtgctactgaccagcaaggcaaactcagcggaaactgtttctttcatctggaaaagttcgtgccgaagcaaccaaacatgatcctccaaggagacgctattgtgacctcctcgggaaagttacaactcaataaggttctcgagaacgggaccccaaaaccctcgtctcttggtcgcgc

SEQ ID NO: 113548 - DNA, 259 bp, Glycine max
gagatgcaagagatgcaagggaagcagctgcaagagatgcaagggatgcaaaggtggaggcgagagatgtaaagagaacaacagtgacagcaacaaccgcaaccgcatgaacgtgatgagtattaatgtgttttatgaacttatgatgttggtttatgtggggaaataaatgatgtatgtacctcttcttgcctatgtagtaggtttgggtgttttgttgtctagctttgcttatttagtaattagtagaagggacgtt

SEQ ID NO: 113549 - DNA, 250 bp, Glycine max
ccccaactaacaataattccttcacttgcagaacttagttctctgttgcatcatcatcatcttcattagtgttagccctaaacttcaccttcaaccatgaccacagtgccaccacacagtgtccaaggcacacaacaacacacctctacgaagccggcgtcgtcccgccggctcgttttgaggcacgcgttacgaagccggcatcaaggcgccctcttccatttaccattccgagagaggtccgacgact

SEQ ID NO: 113550 - DNA, 254 bp, Glycine max
attaatgccgagaacaaccagaggaacttcctcgcaggttcgcaagacaatgtgataagccagatacctagtcaagtgcaggagcttgcattccctgggtctgcacaagctgttgagaagctattaaaaaccaaagagaatcctactttgtggatgctcagcctaagaagaaagaggaggggaataagggaagaaagggtcctttgtcttcaattttgagggctttttactgaataagtatgtactaaaatgta

SEQ ID NO: 113551 - DNA, 250 bp, Glycine max
gtggcttcaactgtgcagaggcagtgaatgtggctcctattgattggttaatgcatggacaaagtgctgtcgagctttacaggttacaatgccgcaagacatccctgtcacatgacaagctgttgttgggtcagcactggaatctgtacgagcccttgcagagctagctcttggaaaggaaactccaaaaaatttgaaatggggaagtgtctgtgggaaagatggagatcttaccaaggcagttagggca

SEQ ID NO: 113552 - DNA, 247 bp, Glycine max
cgggcattgatacaagtggtgaattgcaacggtgagagagtgtttgatggagagctgcaagagggacgggtgctgatcgtgccacaaaactttgtggtggctgcaagatcacagagtgacaacttcagtatgtgtcattcaagaccaatgatacacccatgatcggcactcttgcaggggcaaactcattgttgaacgcattaccagaggaagtgattcagcacactttcaacctaaaaagccagca

SEQ ID NO: 113553 - DNA, 251 bp, Glycine max
ctggcgatgaaccagttgttgccatcagtcttcttgacacctccaacttcaacaatcagcttgatcaaaaccccagagtattttaccttgctgggaacccagatatagagcacccagagaccatgcacaacagcagcagcagaagagtcatggtggacgcaagcaggggcaacaccagcagcaggaggaagaaggtggcagtgtgctcagtggcttcagcaaacatttcttagcacaatccttcaacacca

SEQ ID NO: 113554 - DNA, 249 bp, Glycine max
ctcgagctgctcgagccgctttgaacactcatcaccatggccaagcttgttctttccatttgtttcattcttttcagtggctgcttcgctctgagagagcaggcacagcaaaatgagtgccagatcaaaagctgaatgccctcaaaccggataaccgtatagagtcggaaggtgggttcattgagacctggaaccctaacaacaagccattccagtgtgccggtgttgccctctctcgctgcacgctta

SEQ ID NO: 113555 - DNA, 251 bp, Glycine max
taagaaaagccatttccatagcagcctaagaaaatgaagagcactagcttgttcgctatctttctactttgcgccttcacctcatacctaccttccgccaccgcccaggacgtgctcgacgtggatgcgatccgattcggaacggtttcatatactacgttttgccggcaataagaggaaacggtggcggaatagaacgagccgcactcgggaaagacacttgccctatcactgtagtgcaatctcccaat

SEQ ID NO: 113556 - DNA, 257 bp, Glycine max
tctcgagcgattcggctcgcggagaaaaacagatagtgcgggactagaaacgagcggcagtgaaaatgacgaccaggttcaagacgaacacgaagcagacaggtcacgtcagcgccggacacggccgtatggaaagcaccgccagcatcccggccccgcggtaacgccggtggcatgcatcaccaccgtatcctcttcgacaagtaccatcctggtttcttcgggaaggtaggcatgcgctacttgccacaaacttc

SEQ ID NO: 113557 - DNA, 257 bp, Glycine max
cacttccttagttcattatggctaagcccttcactccttctctttcttccctttgcttgctactcttgtcgagtgcatgctttgctattagctccagcaagctcaacgagtgccaactcaacaacctcaagcgttggaacccgaccaccgcgttgagtccgaaggtggtttgattcaaacatggaactctcaacaccctgagctgaaatgcgccggtgtcactgtttccaaactcaccctctctcgcaatggcctcc

SEQ ID NO: 113558 - DNA, 256 bp, Glycine max
caaaaaaagacaacccagagagcgcgtcttaataaacgctcttctctgaaaacccccatttcttttcttctttcttcttctctttcgcttcttcgatcttcgatcttcgtcgctgaaaatgagagagtgcatttcaatccacatcggccaggccgggattcaggttggaaacgcctgctgggagctttactgcctcgaacacggcattcagcctgatgggcagatgccaagtgacaagaccgttggtggaggtgat

SEQ ID NO: 113559 - DNA, 250 bp, Glycine max; identical to SEQ ID NO: 111312

SEQ ID NO: 113560 - DNA, 256 bp, Glycine max
atttgtccttgaatataatactcagcatggctaagcttgttctttccctttgttttctgcttttcagtggctgctgcttcgctttcagtttcagagagcagccacagcaaaacgagtgccagatccaacgcctcaatgccctcaaaccggataaccgtatagagtcagaaggtggcttcattgagacatggaaccctaacaacaagccattccagtgtgccggtgttgccctctctcgctgcaccctcaaccgcaa

SEQ ID NO: 113561 - DNA, 254 bp, Glycine max; identical to SEQ ID NO: 111291

SEQ ID NO: 113562 - DNA, 255 bp, Glycine max
cggctcgaggttcaatatcctagtataccttaataaataatttaagatactatgatgagagcacggttcccattactgttgctgggacttgttttcctggcttcagtttctgtctcatttggcattgcttactgggaaaaagagaaccccaaacacaacaagtgtctccagagttgcaatagcgagagagactcgtacaggaaccaagcatgccacgctcgttgcaacctccttaaggtggcgaaagaagaatgt

SEQ ID NO: 113563 - DNA, 254 bp, Glycine max
tgtgtttgcggctgaggattccgaacgagcgaccttcttcgtttctcgcaaagtttaagtcatcatgggtcaggaaaagactcacatcaacattgtcgtcattggacatgtcgactctgggaagtcaactaccactggtcatttgatctacaagcttggaggtattgacaagcgtgtgattgagaggttcgagaaggaggctgctgagatgaacaagaggtcattcaagtatgcctgggtgcttgacaagctca

SEQ ID NO: 113564 - DNA, 254 bp, Glycine max
cacaccccgtgagtttgatagcttttgatttgaatttcacaccccgtgagttttatagctttgatgaagttcatggactctattcaggcggaattaagctgccaacagatataatcagcaagattagtccactacccgtgcttaaggaaatcttccgaactgatggtgaacaggcccttaagtttctgcctcctaaagtaattcaagtgagtaagtctgcatggatgactgatgaagaatttgcaagagaaatg

SEQ ID NO: 113565 - DNA, 247 bp, Glycine max
ctcgcgtcctccagaggttcaaccaacgctccccacaacttcagaatctccgagactaccgcattttggagttcaactccaaacccaacaccctccttctccccaaccatgctgacgctgattacctcatcgttatccttaacgggactgccattctttccttggtgaacaacgacgacagagactcctacagacttcaatctggtgatgccctgagagtcccctcaggcaacacatactatgtggt

SEQ ID NO: 113566 - DNA, 255 bp, Glycine max
atcttgtcaaggcatgcttctgatgaggtctaccttggccaaagggacaacccacattggacctctgactcaaaagcattacaagcctttcaaaaatttggaaacaagctcaaagaaattgaggaaaaacttgcaaggaagaacaatgatcaaagtctctccaatcgacttgggccggttcaactgccatacactttgctccatcctaacagtgaggaagggttgacttgcagggggattcctaatagcatctct

SEQ ID NO: 113567 - DNA, 254 bp, Glycine max
tctttgaacactcatcaccatggccaagcttgttctttccctttgtttccttcttttcagtggctgcttcgctctgagagagcaggcacagcaaaatgagtgccagatccaaaagctgaatgccctcaaaccggataaccgtatagagtcggaaggtgggttcattgagacctggaaccctaacaacaagccattccagtgtgccggtgttgccctctctcgctgcacccttaaccgcaatgcccttcgtagac

SEQ ID NO: 113568 - DNA, 255 bp, Glycine max
aggcacttggaatccaaaaatgagagaaatcatcagcattcacataggtcaggccgggatccaggttggcaactcctgctgggaactctactgcctggaacatggcatccagcccgatggcatgatgccaagtgactcctccttcggtgtagcccacgacgccttcaacaccttcttcagcgaaaccggatccggcaagcacgtccctcgcgccgtcttcgtcgatctcgagcccaccgtcatcgacgaagtccg

SEQ ID NO: 113569 - DNA, 250 bp, Glycine max
gtccttgaatatcatactcagcatggctaagcttgttctttccctttgttttctgcttttcagtggctgctgcttcgctttcagtttcagagagcagccacagcaaaacgagtgccagatccaacgcctcaatgccctcaaaccggataaccgtatagagtcagaaggtggcttcattgagacatggaaccctaacaacaagccattccagtgtgccggtgttgccctctctcgctgcaccctcaaccgc

SEQ ID NO: 113570 - DNA, 254 bp, Glycine max
tgcagaccgagctagctagctagcaagcaagcacagagatggaggcaaagcgaggccatgccctcatgtgcttggcacgtgtttcactcttcctctgcgctctaaccctatccgctgctcacggaagcaccacggttcaagacatcgcgagaaagttgaaactcggggacaacgagcttctgcgcacggagaagaagttcaaggttttcatggagaattacgggaggagctactccacagaggaggagtatttg

SEQ ID NO: 113571 - DNA, 253 bp, Glycine max
ctcgagccgattgttagagaggtcgagaagccaggatcaaagcttcacaagaaggaaacttgtgagcctgttacaattattgagacccctccaatggttattgttggtgttgtgggttatgtgaaaactccacgtggtctccgaacattgaacactgtctgggctcagcatttgagtgaggaattgaaacgtaggttctacaagaactggtgcaagtccaagaagaaggccttcaccaagtactctaagcagt

SEQ ID NO: 113572 - DNA, 251 bp, Glycine max
cgacgagaatactgtttcttttgtgacattgaacaaggttggtggatttcttcagcggatggatttggctcgcaagtatgcatttggaaagatgcttgtgattggatcagttccaccatttaaggtgaaggggctgtggcttttccgtgggcaagaaatcccaaaatttgtgattgatgaatgctatgacatggagctctacgaatggactaaggttgacatctctgatgaagctcaaaaggagcgtgtca

SEQ ID NO: 113573 - DNA, 254 bp, Glycine max
acgaaaatctcagattaataacactcgccatacccgttaacaagcctggtagatttgagagtttcttcctatctagcactgaagctcaacaatcctacttgcaaggattcagcaggaacattttagaggcctcctacgataccaaattcgaggagataaacaaggttctgtttagtagagaggaagggcagcagcaaggggagcagaggctgcaagagagcgtgattgtggaaatctcgaaggaacagattcgg

SEQ ID NO: 113574 - DNA, 253 bp, Glycine max
tgtttgttgtaggaagaggaatcttgagaaatggcaggggacagcaagagcaagattctgttcatcggagggactggttacatcggaaaattcatcgtggaagccagcgccaaagctggccacccaactttccttttggtgagggagtccactctctccaaccccgcaaaatcacccctcatcgacaatttcaaaggcctcggtgtcaatcttgttttaggagatctatacgatcaccaaagtttggtgagtg

SEQ ID NO: 113575 - DNA, 249 bp, Glycine max
cttattaacactttccttagttcaatatgtggatgcccttcttcactctctctctttcttccctttgcttgctactcttgtcgagtgcatgctttgctattacctccagcaagttcaacgagtgcccctcaacaacctcaacgcgttggcacccgaccaccgcgttgagtccgcagtggtcttattgaaacatggaactctcaacaccctgagctgcaatgcgccggtgtcactgtttccaaacgcacc

SEQ ID NO: 113576 - DNA, 253 bp, Glycine max
cattgtctttgaacactcatcaccatggccaagcttgttctttccctttgtttccttcttttcagtggctgcttcgctctgagagagcaggcacagcaaaatgagtgccagatccaaaagctgaatgccctcaaaccggataaccgtatagagtcggaaggtgggttcattgagacctggaaccctaacaacaagccattccagtgtgccggtgttgccctctctcgctgcacccttaaccgcaatgcccttc

SEQ ID NO: 113577 - DNA, 252 bp, Glycine max
gttcaatatcctagtacaccgtattaaagaatttaagatatactatgatgagagcgcggttcccattactgttgctgggagttgttttcctggcatcagtttctgtctcatttggcattgcgtattgggaaaagcagaaccccagtcacaacaagtgcctccgaagttgcaatagcgagaaagactcctacaggaaccaagcatgccacgctcgttgcaacctccttaaggtggaggcagaagaagaatgcg

SEQ ID NO: 113578 - DNA, 253 bp, Glycine max
ctttgaacactcatcaccatggccaagcttgttctttccctttgattccttcttttcagtggctgcgtcgctctgagagagcaggcacagcaatatgagtgccagatccaaaagctgaatgccctcaaaccggataaccgtatagagtcggaaggtgggttcattgagacctggaaccctaacaacaagccattccagtgtgccgatgttgccctctctcgctgcacgcttaaccgcaatgcccttcgtagac

SEQ ID NO: 113579 - DNA, 253 bp, Glycine max
ctccattgtctttgaacactcatcaccatggccaagcttgttctttccctttgtttccttcttttcagtggctgcttcgctctgagagagcaggcacagcaaaatgagtgccagatccaaaagctgaatgccctcaaaccggataaccgtatagagtcggaaggtgggttcattgagacctggaaccctaacaacaagccattccagtgtgccggtgttgccctctctcgctgcacccttaaccgcaatgccc

SEQ ID NO: 113580 - DNA, 253 bp, Glycine max
acaaagaatcaaagaaaggggtggtggctgcttcgaaagcttaataatttgtttatttccagaacatcatagttttcgcagcagcaaactaacaaattactcatatcatataataagatggcccgttctctctcgcaagccaaacgtattggtgtccttgttgctcaatctatctccctaattcccgttcatcggcgaggttacgcagtggcatccgatgtatcggtaagagttggattgggtaatattgggc

SEQ ID NO: 113581 - DNA, 253 bp, Glycine max
gcgggaagcccttcactctctctctttcttccctttgcttgctactcttgtcgagtgcatgctttgctatcagctccagcaagctcaacgagtgccaactcaacaacctcaacgcgttggaacccgaccaccgcgttgagtccgaaggtggtttgcttcaaacatggaactctcaacaccctgagctgaaatgcgccggtgtcactgtttccaaactcaccctcaaccgcaatggcctccacttgccatctta

SEQ ID NO: 113582 - DNA, 251 bp, Glycine max
gcaacgattaacaatggcttcaaccgacaagtcaccggacccaacgccggcgaagggtccggatccaactccggggaagccgatgagtgttggtcagcacgtgatcgacaagagtgcaatgatggtgcagtcgctggaccccattaagcagatgagtcagcacgtgtgctccttcgctatctacagccatgacatgtctcgccagatagagacacatcactactgctccagactccaccagaacttcatac

SEQ ID NO: 113583 - DNA, 236 bp, Glycine max
ccatgctgacgctgattacctcatcgttatccttaacgggactgccattcttaccttggtgaacaacgacgaccgagactcttacaaccttcaatctggcgatgccctaagagtccctgcaggaaccacatactatgtggttaaccctgacaacgacgagaatctcagaatgataacactcgccatacccgttaacaaacccggtagatttgagagtttcttcctatctagcactc

SEQ ID NO: 113584 - DNA, 240 bp, Glycine max
ctagtacaccgtattaaagtatttaagatatatcatgatgagagcgcggttcccattactgttgctgggagttgttttcctggcatcagtttctgtctcatttggcattgcgtattgggaaacgcagaaccccagtcacaacaagtgcctccgaagttgcaatagcgagcaagactcctacaggcaccaagcatgccacgctcgttgcaacctccttaaggtggcggccgacgacgactg

SEQ ID NO: 113585 - DNA, 250 bp, Glycine max
ttgtctttgaacactcatcaccatggccaagcttgttctttccctttgtttccttcttttcagtggctgcttcgctctgagagagcaggcacagcaaaatgagtgccagatccaaaagctgaatgccctgcgaccggataaccgtatagagtcggaaggtgggttcattgagacctggaaccctaacaacaagccattccagtgtgccggtgttgccctctctcgctgcacccttaaccgcaatgccctt

SEQ ID NO: 113586 - DNA, 251 bp, Glycine max
aggagataagatattgaagtagtgctaagtgcctaacacctgcagtgaacaatggcctctgcattagcatctcttctcaagtcttcacttgttcttgacaagtctgagtgggtgaagggacaaacacttcgccaaccttctgctgcatcagttgtgagatgcaaccccaccaccccatcaggcctcaccatcagagctggttcctatgctgatgagctcgttaagaccgcgaaaacagtggcttcaccagg

SEQ ID NO: 113587 - DNA, 252 bp, Glycine max
ctcgagccgattcggctcgaggtctttgaacactcatcaccatggtcaagcttgttctttccctttgtttccttcttttcagtggctgcttcgctctgagagaccaggcacagcaaatgaatggccaatccaaaagctgaatgccctcaaaccggataaccgtatagagtcggaaggtgggttcattgagacctggaaccctaacaacaaaagcatttccagtgttgccggtgttgccctctctcgctgcac

SEQ ID NO: 113588 - DNA, 246 bp, Glycine max
ctccattgtctttgaacactcatcaccatggccaagcttgttctttccctttgtttccttcttttcagtggctgcttcgctctgagagagcaggcacagcaaaatgagtgccagatccaaaagctgaatgccctcaaaccggataaccgtatagagtcggaaggtgggttcattgagacctggaaccctaacaacaagccattccagtgtgccggtgttgccctctctcgctgcacccttaaccgc

SEQ ID NO: 113589 - DNA, 255 bp, Glycine max
tacaaggtgagaacgaagaggaggatagtggagccattgtgacagtgaaaggcggtctaagagtcacagctccagccatgaggaagccacagcaagaagaagatgatgatgatgaggaagagcagccacagtgcgtggagacagacaaaggttgccaacgccaaagcaaaaggagcagaaatggcattgatgagaccatttgcacaatgagacttcgccaaaacattggtcagaattcatcacctgacatctaca

SEQ ID NO: 113590 - DNA, 247 bp, Glycine max
attaacacttccttagttcaatatggggaagcccttcactctctctctttcttccctttgcttgctactcttgtcgagtgcatgctttgctattagctccagcaagctcaacgagtgccaacccaacaacctcaacgcgttggaacccgaccaccgcgttgagtccgaaggtggtttgattcaaacatggaactctcaacaccctgagctgaaatgcgccggtgtcactgtttccaaactcaccctc

SEQ ID NO: 113591 - DNA, 252 bp, Glycine max
ctcagtattgtggatatgaacgagggagctcttcttctaccacactgcaattcaaaggcgatagtgatactggtaattaatgaaggagatgcaaacattgaacttgttggcctaaaagaacaacaacaggagcagcaacaggaagagcaacctttggaagtgcggaaatatagagccgaattgtctgaacaagatatatttgtaatcccagcaggttatccagttgtggtcaacgctacctcaaatctgaat

SEQ ID NO: 113592 - DNA, 252 bp, Glycine max
aaaattcttccaccaagttatgggtccccttgtgttgcttcttttctccctcttaggtctctcttctagttccagcatatcaactcatcgttccatattggaccttgacctaaccaagtttaccacacagaaacaggtgtcttcactgttccaactatggaagagtgagcatggacgtgtctaccataaccacgaagaagaggcaaagagacttgagattttcaagaataacttgaactatatcagggacat

SEQ ID NO: 113593 - DNA, 252 bp, Glycine max
ctgcatccaaaatgccaggtcttaccatcggagacactattcctgatcttcaagttgaaactaaccaaggcaaaatcaagcttcatcagttctgtgctgatggctggaccatccttttctctcacccaggtgatttcaccccggtttgtaccactgagcttggtaagatggctcagtatgctaaggagttttatcaacgaggagtgaagctcttaggtttatcttgtgatgatgtgcaatcccacaatgagt

SEQ ID NO: 113594 - DNA, 252 bp, Glycine max
tgaacactcatcaccatggccaagcttgttctttccctttatttccttcttttcaatagctgaggcgctctgagagagcaggcacagcaaaatgagtgccagatccaaaagctgaatgccctcaaaccggataaccgtatagagtcggaaggtgggttcattgagacctggaaccctaacaacaagccattccagtgtgccggtgttgccctctctcgctgcacccttaaccgcaatgcccttcgtagacct

SEQ ID NO: 113595 - DNA, 252 bp, Glycine max
cgaagaagaggcaaagagacttgagattttcaagaataacttgaactatatcagggacatgaatgcaaacagaaaatcaccccattctcatcgtttaggattgaacaagtttgctgacatcactcctcaagagttcagcaaaaagtacttgcaagctcccaaggatgtgtcgcagcaaatccaaatggccaacaagaaaatgaggagggaacaatattcttgtgaccatccacctgcatcatgggattggag

SEQ ID NO: 113596 - DNA, 253 bp, Glycine max
tgtcattcaagaccaatgatagaccctcgatcggaaaccttgcaggggcaaactcattgttgaacgcattgccagaggaagtgattcagcacacttttaacctaaagagccagcaggccaggcaggtgaagaacaacaaccctttcagcttcctggttccacctcaggagtctcagaggagagctgtggcttagagagccctttttgcatgtgctaccacacttttgtccttttgggctctagctagtgctgg

SEQ ID NO: 113597 - DNA, 234 bp, Glycine max
gttcaatatcctagtataccttaataaataatttaagatactatgatgagagcacggttcccattactgttgctaggacttgttttcctggcttcagtttctgtctcatttagcattgcttactgggacaaagagatccgcagacacaacaagtgtctccagagttgcaatagctagagagaatcgtcacggaaccaagcatgccacgctcgttgcgaactccttaaggtggag

SEQ ID NO: 113598 - DNA, 247 bp, Glycine max
agttggagtacttcacagacactaccacactcttcgtagttgagctctttttcattggttgggccgagggtagaaggtgggctgatatcatcaagccaggctgtgtcaacactgaccctatctttcccaacaacaagctcacaggaactgatgttgggtacccaggtgggctttggtttgatccacttggctggggaagtggttctcctgagaagatcaaggagttgagaacaaaggagatcaagaa

SEQ ID NO: 113599 - DNA, 248 bp, Glycine max
tgcttttgttcctctcatgtacatgtgcatctgcacatactattcatggttcaaaattggaatgttgatgttttactcactgacacccagacagactagctcagttaacttgcttatgatatgctcgatggttgctcgttatgctcctcctgtctcatacaactttctcaatctcattcgccttggcaagaataaaacaactatatttgaacagcgaatggggaacattgacaatgctgttcctttct

SEQ ID NO: 113600 - DNA, 249 bp, Glycine max
gaaaaacagtaaagatgggtttgaagaacaacatggtggtgctaaaggtgtgtttcttggttcttttccttgtgggggttactaatgcacgcatggaactgaacctcttcaaaagtgatcactcatcaagtgatgatgagtcttcaaaaccatgctgtgatctctgcatgtgcacagcctcaatgccacctcaatgccattgtgcagatattaggttgaattcatgtgactcagcttgtgatcgctgtg

SEQ ID NO: 113601 - DNA, 255 bp, Glycine max
cgctaactcagatctaaatttctttgcttttcatatcaatgccgagaacaaccagaggaacttccttgcaggttcgcaagacaatgtgataccgccagctccctagtcaagtgcaggagcttacgctccctgggtactgctaaagatcttagacaagctattaaagagccaaagtgagtcctactttatggatactcagtctcagcagaccgcggttgggaatacgggtcgaaagggtcctattgtcttcaattt

SEQ ID NO: 113602 - DNA, 253 bp, Glycine max
ttcgaaactctcttcaaaaaccaatatggtcgcattcgcgtcctccagaggttcaaccaacgctccccacaacttcagaatctccgagactaccgcattttggagttcaactccaaacccaacaccctccttctccccaaccatgctgacgctgattacctcatcgttatccttaacgggactgccattctttccttggtgaacaacgacgacagagactcctacagacttcaatctggtgatgccctgagag

SEQ ID NO: 113603 - DNA, 160 bp, Glycine max
tgctttgctattacctccagcaagttcaacgagtgccaactcaacaacctcaacgcgttggaacccgaccaccgcgttgagtccgaaggtggtcttattgaaacatggaactctcaacaccctgagctgcaatgcgccggtgtcactgtttccaaacgca

SEQ ID NO: 113604 - DNA, 250 bp, Glycine max
cattgtctttgaacactcatcaccatggccaagcttgttctttccctttgtttccttcttttcagtggctgcttcgctctgagagagcaggcacagcaaaatgagtgccagatccaaaagctgaatgccctcaaaccggataaccgtatagagtcggaaggtgggttcattgagacctggaaccctaacaacaagccattccagtgtgccggtgttgccctctctcgctgcacccttaaccgcaatgccc

SEQ ID NO: 113605 - DNA, 251 bp, Glycine max
taaaattcttccaccaagttatggagttccttgtattgcttcttttctccctcttaggtctctcttctagttccagcatatcaactcatcgttccatattggaccttgacctaaccaagtttaccacacagaaacaggtgtcttcactgttccaactatggaagagtgagcatggacgtgtctaccataaccacgacgacgcggcaatgagacttgagattttcaagaataacttgaactatatcagggac

SEQ ID NO: 113606 - DNA, 252 bp, Glycine max
atcgtctttgaacactcatcagcatggccaagcttgttctttccctttgtttccttcttttcagtggctgcttcgctctgagagagcaggcacagcaaaatgagtgccagatccaaaagctgcatgccctcaaaccggataaccgtatagagtcggaaggtgggttcattgagacctggaaccctaacaacaagccattccagtgtgccggtgttgccctctctcgctgcacccttaaccgcaatgcccttc

SEQ ID NO: 113607 - DNA, 250 bp, Glycine max
gttctttctctcgcaatcttcaccacattcaccgagattttgcattcacattgaatatggctgaggctacacaatctaatgctgagttgttggagtggcctaagaaagataagcgccgcttcctgcatgttgtgtatcgtgttggtgatcttgatcgcaccattaagttttatactgaatgtcttgggatgaagcttttgaggaaaagagatattccagaggagaaatatgccaatgcttttcttggatt

SEQ ID NO: 113608 - DNA, 252 bp, Glycine max
gcttcctatgtccattgcgatgccacaaacgaaaacgacgttgaaaactgtgtgaacacagcggtttccaagtatggcaaactcgatatcatgtttaataatgctggcataattgatgagatcaaaacaagccacagttgacaacagcaagtctgattttgagagagtgataggtgttaacttggttggtccttttctgggaacaaagcatgctgcaagggtcatgattcctgctaaaaagggatgcataat

SEQ ID NO: 113609 - DNA, 249 bp, Glycine max
atttactctccacattggaatctgaatgcaaacagtgtgatctatgtgactcgaggacaaggaaaggttagagttgtgaactgccaagggaatgcagtgttcgacggtgagcttaggaggggacaattgctggtggtaccacagaacttcgtggtggcggagcaagccggagaacaaggattcgaatacatagtattcaagacacaccacaacgcagtcactagctacttgaaggatgtgtttagggca

SEQ ID NO: 113610 - DNA, 247 bp, Glycine max
gtcctcacatacaaagattcctcttatgcaagcttcatagccgctccaccgctaagaacatacacagaaacaactttaccaccagcagcaggagcaggtgctgctctgccatagccattgatgctccatcgtctttgaccgaggtgcccggcataagatgggggtccatagccttgcagggtctccgtgaagagatggaagatgatattattgttcggcctgagggccttcagggcttctcttttgc

SEQ ID NO: 113611 - DNA, 249 bp, Glycine max
attcatttggaatcatattgttgagattgttgactgggagaccagcattgggaataacaaaggaagtgaaatatgcattagacactggaaagttgaaatccctattggatcctttggctggagactggccatttgtgcaggctgaacagttggctcgcttggctttgaggtgttgtgatatgaatagaaagagccgaccggatctttattcagatgtctggaggatacttgatgcaatgagggtttctt

SEQ ID NO: 113612 - DNA, 250 bp, Glycine max
cgttgaacactcatcaccatggccaagcttgttctttccctttgtttccttcttttcagtggctgcttcgctctgagagagcaggcacagcaaaatgagtgccagatccaaaagctgaatgccctcaaaccggataaccgtatagagtcggaaggtgggttcattgagacctggaaccctaacaacaagccattccagtgtgccggtgttgccctctctcgctgcacccttaaccgcaatgcccttcgta

SEQ ID NO: 113613 - DNA, 248 bp, Glycine max
attgtctttgaacactcatcaccatggccaagcttgttctttcccggggtttcctttttcagtggctgcttcgctctgagagagcaggcacagcaaaatgagtgccagatccaaaagctgaatgccctcaaaccggataaccgtatagagtcggaaggtgggttcattgagacctggaaccctaacaacaagccattccagtgtgccggtgttgccctctctcgctgcacccttaaccgcaatgccct

SEQ ID NO: 113614 - DNA, 251 bp, Glycine max
cgctcgagccgattcggctcgagcggctcgaggggagctcttcttctagcacactgcaattcaacaggcgatagtgatactggtaattaatgaaggagatgcaaacattgaacttgttggcctaaaagaacaacaacaggagcagcaacaggaagagcaacctttggaagtgcggaaatatagagccgaattgtctgaacaagatatatttgtaatcccagcaggttatccagttgtggtcaacgctacct

SEQ ID NO: 113615 - DNA, 251 bp, Glycine max
ctaactaagatagtcttccatagccccccaaaaatgaagagcaccatcttctttgctctctttctcttttgtgccttcaccacctcatacctaccttcagccatcgctgatttcgtgctcgataatgaaggtaaccctcttgaaaatggtggcacatattatatcttgtcagacataacagcatttggtggaataagagcagccccaacgggaaatgaaagatgccctctcactgtggtgcaatctcgcaa

SEQ ID NO: 113616 - DNA, 244 bp, Glycine max
ctttccttagttcaatatggggaagcccttcttcactctctctctttcttccctttgcttgctactcttgtcgagtgcatgctttgctattccctccagcaagttcaccgagtgccaactcaacaacctcaacgcgttggaccccgaccaccgcgttgagtccgaaggtggtcttattgaaacatggaactctcaacaccctgagctgcaatgcgccggtgtcactgtttccaaccgcaccctc

SEQ ID NO: 113617 - DNA, 242 bp, Glycine max
accaagatcgcttccagtttccttcagcttggatccgtagaggaacaagatctcgacggtgtcctcggagttacagaggatgtggttgccttcgccagaagcgtagctttgcatccagaaacttggctcgattttccccttcccgatgatgaggattctgatgattttgatttgtccgatgcacaacaagaacatgctctagctgttgaacatctggcaccaagcttagctgctcttagaat

SEQ ID NO: 113618 - DNA, 250 bp, Glycine max
cagccatcgctgatttcgtgctcgataatgaaggtaaccctcttgaaaatggtggcacatattatatcttgtcagacataacagcatttggtggaataagagcagccccaacgggaaatgaaagatgccctctcactgtggtgcaatctcgcaatgagctcgacaaagggattggaacaatcatctcgtccccatatcgaatccgttttatcgccgaaggcatcctttgagccttaagttcgattcattt

SEQ ID NO: 113619 - DNA, 248 bp, Glycine max; identical to SEQ ID NO: 102918

SEQ ID NO: 113620 - DNA, 250 bp, Glycine max
tgattatcacttccttagttcaatatggggaagcccttcactctctctctttcttccctttgcttgctactcttgtcgagtgcatgctttgctattagctccagcaagctcaacgagtgccaactcaacaacctcaacgcgttggaacccgaccaccgcgttgagtccgaaggtggtttgattcaaacatggaactctcaacaccctgagctgaaatgcgccggtgtcactgtttccaaactcaccctca

SEQ ID NO: 113621 - DNA, 176 bp, Glycine max
taaaccgcgatcacaggttgccgcaccttaaaaccggaaacaaaagcaatcgttacttgatttcaagaatctctcaatttctttctacttctttgtgtacgatttcttcagggaaagaaaatcactctctgtgctggccacagacttcgtgaatcattttcttttccacacaacat

SEQ ID NO: 113622 - DNA, 247 bp, Glycine max; identical to SEQ ID NO: 105284

SEQ ID NO: 113623 - DNA, 250 bp, Glycine max
tgcaaacttattaacactttccttagttcaatatggggaagcccttcttcactctctctctttcttccctttgcttgctactcttgtcgagtgcatgctttgctattacctccagcaagttcaacgagtgccaactcaacaacctcaacgcgttggaacccgaccaccgcgttgagtccgaaggtggtcttattgaaacatggaactctcaacaccctgagctgcaatgcgccggtgtcactgtttccaa

SEQ ID NO: 113624 - DNA, 250 bp, Glycine max
ctagttcaatatcctagtataccttaataaataatttaagatactatgatgagagcacggttcccattactgttgctgggacttgttttcctggcttcagtttctgtctcatttggcattgcttactgggaaaaagcgaaccccaaacacaacaagtgtctccagagttgcaatagcgagagagactcgtacaggaaccaagcatgccacgctcgttgcaacctccttaaggtggagaaagaagaatgtg

SEQ ID NO: 113625 - DNA, 258 bp, Glycine max
gttctattctgtggctttgacgaataactatcagcaggcggataccgggaccaagatgatacacaaagggaagaacacgaggagtaggattatatccaaaggaatatcggttgggcattccaggaactgttatagagggcttgttcaggttctgtccaaggctgacaatgcccgaaactcgtcacagtgtgattctatgcttattggtgacaatgctgctgcaaatacctatccttatatccaggttttttttttttt

SEQ ID NO: 113626 - DNA, 251 bp, Glycine max
ggtgaagaacaacaaccctttcagcttcctggttccacctcaggagtctcagaggagagctgtggcttagagagccctttttgcatgtgctaccacacttttgtccttttaggctctagctagtgctggtagcagtaaataagaatgaataaaagaaacaaaggcttagatgccctttgttaagtgtagaataacgggtatagtaactatgtacccttgtgtaatgagtcactcaagtacctatgcgggaa

SEQ ID NO: 113627 - DNA, 249 bp, Glycine max
attcatttggaatcatattgttgagattgttgactgggagaccagcattgggaataacaaaggaagtgaaatatgcattagacactggaaagttgaaatccctattggatcctttggctggagactggccatttgtgcaggctgaacagttggctcgcttggctttgaggtgttgtgatatgaatagaaagagccgaccggatctgtattcagatgtctggaggatacttgatgcaatgagggtttctt

SEQ ID NO: 113628 - DNA, 250 bp, Glycine max
aacttattaacactttccttagttcaatatggggacgcccttcttcactctctctctttcttccctttgcttgctactcgcgtcgagtgcatgctttgctattacctccagcaagttcaacgagtgccaactcaacaacctcaacgcgttggaacccgaccaccgcgttgagtccgaaggtggtcttattgaaacatggaactctcaacaccctgagctgcaatgcgccggtgtcactgtttccaaacgc

SEQ ID NO: 113629 - DNA, 247 bp, Glycine max
atgcaatctacttcatctaagatcaacatgccacagatccaacaatccacctcccatcaacaacaggatcctttgcatccacaacaattggcgcagaataaccggaaaaggatggggcctacatcttcaggaccggccaacagtactggtaccggaaatcaccttggaccttctaattctcagccatccactccatcaactcatactcctggtgatggagttgctatggcgggtaacttgcagaatg

SEQ ID NO: 113630 - DNA, 240 bp, Glycine max
ctccattggtccttaaacactcatcagtcatcaccatggccaagctagttttttccctttgttttctgcttttcagtggctgctgcttcgctttcagttccagagagcagcctcagcaaaacgagtgccagatccacaaaactcaatgccctcaaaccggataaccgtatagagtcagaaggagggctcattgagacctggaaccctaacaacaagccattcaagtgtgcaggtgttgcc

SEQ ID NO: 113631 - DNA, 238 bp, Glycine max
tctctccattggtccttaaacactcatcagtcatcaccatggccaagctagttttttccctttgttttctgcttttcagtggctgctgcttcgctttcagttccagagagcagcctcagcaaaacgagtgccagatccaaaaactcaatgccctcaaaccggataaccgtatagagtcagaaggagggctcattgagacatggaaccctaacaacaagcctttccagtgtgccggtgt

SEQ ID NO: 113632 - DNA, 250 bp, Glycine max
ccttaaggtggatgacgaagaagaatgcgaagaaggtcaaattccacgaccacgaccacagcacccggagagggcacgtcagcaacacggtgagaaggaggaagacgaaggtgagcagccacgtccattcccattcccacgcccacgccaacctcatcaagaggaagagcacgagcagaaggaggaacacgaatggcatcgcaaggaggaaaaacacggaggaaagggcagtgaagaggaacaagatgaa

SEQ ID NO: 113633 - DNA, 244 bp, Glycine max
cccaccgccgtccacggcgtcacgcagttctccgatctcaccgaggcacgagtttgagaagctctagcctggtcgtcaatggcggcttcccgtcatcgaataatgccgccggcggtattgcgccgccgttggaggtggacgggctgccggagaattttgattggagagagaaaggagctgtcaccgaagttaagttacagggtagatgtggatcatgctgggctttcagcaccacaggatctat

SEQ ID NO: 113634 - DNA, 251 bp, Glycine max
attctgatcgctccctgagagagctcgtcgcggcggttgcagaagaagattgcaagatgaagttcaacatcgcgaatcccaccactggatgccagaagaagctcgagatcgacgacgatctgaaactgcgagcattttgggacaagaggatctcacaggaggtcatcggagatgcactcggtgaggaatttaagggctatgtcttcaaaattaccggaggttgtgacaaacaaggatttccaatgaagcag

SEQ ID NO: 113635 - DNA, 248 bp, Glycine max
ggtgatgaaaaattgatgcgtgaaaggacacacctgctgttggcctgttgttcaaggatggcaatttgtaagaaagatgtttggagagttgaatgtggaatcccttctggatttccgctcacagttatttgcaatagcatttttaatgagatgctcattagatatagctatgaaaaattactgcgccaggctaaagctccaagtatgtttttacaatccttcaaaaattttgtttctttgtgtgtgta

SEQ ID NO: 113636 - DNA, 248 bp, Glycine max
gaagtgcaaaggtacagagctgaattgtctgaagacgatgtatttgtaattccagtcagcttatccatttgtcgtcaacgctacctcaaacctcaatttccttgcttttggtatcaatgctgagaacaaccagaggaacttccttgcaggcgagaaagacaatgtggtaaggcagatagaaagacaagtgcaggagcttgcgttccctgggtctgcacaagatgttgagaggctattaaagaagcaga

SEQ ID NO: 113637 - DNA, 202 bp, Glycine max
atttgattgcagtgccaaccggttttgcatactggatgtacaacaatgcagacactcctgttgttgccgtttctcttattgaccccaacagcttccagcaccagctcgaccagatgcctaggagcttctatcttgctgggaaccaagagcaacagtttctacagtatcagccacagaagcagcaaggaggtactcaaagcca

SEQ ID NO: 113638 - DNA, 239 bp, Glycine max
attctctccattgtctttgaacactcatcaccatggccacgcttgttctttccctttgtttccttcttttcagtggctgcttcgctctgagagagcaggcacagccaaatgagtgccagatccaaaagctgaatgccctcaaaccggatacccgtatagagtcggaaggtgggttcattgagacctggaaccctaacaacaagccattccagtgtgccggtgttgccctctctcgctgc

SEQ ID NO: 113639 - DNA, 231 bp, Glycine max
gtcctctacaagaatggaatttactctccacattggaatctgaatgcaaacagtgtgatctatgtgactcgaggacaaggaaaggttagagttgtgaactgccaagggaatgcagtgttcgacggtgagcttaggaggggacaattgctggtggtaccacagaacttcgtggtggcggacaagccggagaacaaggattcgaatacatagtattcaagacacaccacaacg

SEQ ID NO: 113640 - DNA, 247 bp, Glycine max
caatatcctagtataccttaataaataatttaagatactatgatgagagcacggttcccattactgttgctgggacttgttttcctggcttcagtttctgtctcatttggcattacttactgggaaaaagagaaccccaaacacaacaagtgtctccagagttgcaatagcgagagagactcgtacaggaaccaagcatgccacgctcgttgcaacctccttaaggtggagaaagaagaatgtgaag

SEQ ID NO: 113641 - DNA, 250 bp, Glycine max
ccttaaacactcatcagtcatcaccatggccaagctagttttttccctttgttttctgcttttcagtggctgctgcttcgctttcagttccagagagcagcctcagcaaaacgagtgccagatccaaaaactcaatgccctcaaaccggataaccgtatagagtcagcaggcgggctcattgagacatggcaccctaacaacaagccattccagtgtgccggtgttgccctctctcgctgcaccctcaac

SEQ ID NO: 113642 - DNA, 249 bp, Glycine max
ggcaaaaggtgtgtggagtgctggtgcatgcgagcttatatggtgccaccacggcctatgtcattacatctgccaccagcatcagagcaatactgaaatcaaattgttatcacaaggaagggcatcaggctccttgtaaatatggggatgcagtatatatgatgctgtttggactagttcagatcataatgtcattcataccagatctccacaacatggcatgggtttcacttgttgcggccataatgt

SEQ ID NO: 113643 - DNA, 255 bp, Glycine max
tgaacactcatcaccatggccaagcttgttctttccctttgtttccttcttttcagtggctgcttcgctctgagagagcaggcacagcaaaatgagtgccagatccaaaagctgaatgccctcaaaccggataaccgtatagagtcggaaggtgggttcattgagacctggaaccctaacaacaagccattccagtgtgccggtgttgccctctctcgctgcacccttaaccgcaatgcccttcgtagaccttcc

SEQ ID NO: 113644 - DNA, 256 bp, Glycine max
attgtctttgaacactcatcaccatggccaagcttgttctttccctttgtttccttcttttcagtggctgcttcgctctgagagagcaggcacagcaaaatgagtgccagatccaaaagctgaatgccctcaaaccggataaccgtatagagtcggaaggtgggttcattgagacctggaaccctaacaacaagccattccagtgtgccggtgttgccctctctcgctgcacccttaaccgcaatgcccttcgtag

SEQ ID NO: 113645 - DNA, 239 bp, Glycine max
ggaaccagggtcatcagcgggtgagctagtggtaattgcactagctcatgcatttgctctatttgctgctatttctgctagcctgcatgtgtctggtggacacgtcaaccctgccgtcacttttggcgctcttcttggtggaaggatctccgtccttagagcagtttactattgggttgctcaacttctaggttctatagtggctgctctcttgttgaggcttgtcactaacaacatga

SEQ ID NO: 113646 - DNA, 248 bp, Glycine max
cattggtgttaagttgacaaccataaacaatatgtgtgcatatgggctcaatcctggtatttcaggttctcgtcttttgggcaccattcctcagtctatttcacagcaaactgtttggaatcaaatggcaacagtgagaacaccattgaattttgattctagcaagcagagcttttgtcaattttctattgaccttctcggtggcggaattttagtggacaaaactggagattggatcacacttatac

SEQ ID NO: 113647 - DNA, 223 bp, Glycine max
ctgagttacgaagacataagaataagaacccttttctcttcggctctaacaggttcgaaactctcttcaaaaaccaatatggtcgcattcgcgtcctccagaggttcaaccaacgctccccacaacttcagaatctccgagactaccgcattttggagttcaactccaaacccaacaccctccttctccccaaccaggctgacgctgattacctcatcgttat

SEQ ID NO: 113648 - DNA, 249 bp, Glycine max; identical to SEQ ID NO: 112183

SEQ ID NO: 113649 - DNA, 251 bp, Glycine max
taaaattcttccaccaagttatgggttcccttgtgttgcttcttttctccctcttaggtctctcttctagttccagcatatcaactcatcgttccatattggaccttgacctaaccaagtttaccacacagaaacaggtgtcttcactgttccaactatggaagagtgagcatggacgtgtctaccataaccacgaagaagaggcaaagagacttgagattttctagaataacttgaactatatcagggac

SEQ ID NO: 113650 - DNA, 237 bp, Glycine max
ctttgaacactcatcaccatggccaagcttgttctttccctttgtttccttcttttcagtggctgcttcgctctgagagagcaggcacagcacaatgagtgccagatccaaaagctgaatgccctcaaatcggataaccgtatagagtcggaaggtgggttcattgagacctggaaccctaacaacaagccattccagtgtgccggtgttgccctctctcgctgcacccttaaccgc

SEQ ID NO: 113651 - DNA, 242 bp, Glycine max
caatatcctagtataccttaataaataatttaagatactatgatgagagcacggttcccattactgttgctgggacttgttttcctggcttcagtttctgtctcatttggcattgcttactgggacaaagagaaccccaaacacaacaagtgtctccagagttgcaatatcgagatagactcgtacaggaaccaagcatgccacgctcgttgcaacctccttaaggtggagaacgacgaatg

SEQ ID NO: 113652 - DNA, 243 bp, Glycine max
ctcatattggtgaattgaaatctggtgtctatgttccactgcctacaaagaggcatttggtggaaactcccaaggaatggcagctggatctaccttgtgacaaaattcctagtgtcgtgactacaactgatgagcgattggttggcacagaacatgagggatatgatccttttcttgatggaattcaaaaatatgccactcccatgatgcccctagatgcagaaattctttctaaggttgcac

SEQ ID NO: 113653 - DNA, 80 bp, Glycine max
cgagagcagcctcagcaaaacgagtgccagatccaaaaactcaatgccctcaaaccggataaccgtatagagtcagaagg

SEQ ID NO: 113654 - DNA, 230 bp, Glycine max
caaaaactcaatgccctcaaaccggataaccgtatagagtcagaaggagggctcattgagacatggaaccctaacaacaagccattccagtgtgccggtgttgccctctctcgctgcaccctcaaccgcaacgcccttcgtagaccttcctacaccaacggtccccatgaaatctacatccaacaaggtaagggtatttttggcatgatatcaccgggttgtcctcgcac

SEQ ID NO: 113655 - DNA, 240 bp, Glycine max
tatggggtcgcccgtcttcactctctctctttcttccctttgcttgctactcttgtcgagtgcatgctttgctattacctccagcaagttcaacgagtgccaactcaacaacctcaacgcgttggaacccgaccaccgcgttgagtccgaaggtggtcttattgaaacatggaactctcaacaccctgagctgcaatgcgccggtgtcactgtttccaaacgcaccctcaacggcaaggg

SEQ ID NO: 113656 - DNA, 232 bp, Glycine max
attggtccttaaaccctcatcagtcatcaccatggccaagctagttttttccctttgttctctgcttttcagtggctgctgcttcgctttcagttccagatagcagcctcagccaaacgagtgccagatccaaaaactcaatgcccgcaaaccggataaccgtatagaatcatcaggagggctcattaagacatggaaccctaccaacaggccattccagtgtgccggtgtt

SEQ ID NO: 113657 - DNA, 240 bp, Glycine max
tcaatatcctagtacaccgtattaaagactgtaagatagactatgatgagagcgcggttcccattactgttgctgggagttgttttcctggcatcaggttctgtctcatttggcattgcgtattgggcacagcagaaccccagtcagaacaagtgcctccgaagttgcgatagcgagaaagactccgacaggatccaagcatgccacgctcgttggcacctccttaaggtggaggaagaa

SEQ ID NO: 113658 - DNA, 249 bp, Glycine max
gctcctcacgctcacactcactcatttgcaaagaaagagagagaaatggcactgagggcagccgtgctccgccacgttcgtgtgccactccaagccgctccaaaactgcagccatggcgtgccatgtcatcacacggcgacgatcatctctccaaagaggaggtcgtcgaaagagtcctcgccgtcgtcaaagatttccccaaagtcgatccttccagggtgagtccagatgtacatttccagaaggat

SEQ ID NO: 113659 - DNA, 129 bp, Glycine max
attaacacttccttagttcaatatggggaagcccttcactctctctctttcttccctttgcttgctactcttgtcgagtgcatgctttgctattagctccagcgagctcaacgagtgccaactcaacaa

SEQ ID NO: 113660 - DNA, 250 bp, Glycine max
gttcaatatcctagtataccttaataaataatttaagatactatgatgagagcacggttcccattactgttgctgggacttgttttcctggcttcagtttctgtctcatttggcattgcttactgggaaaaagagaaccccaaacacaacaattgtctccagagttgcaatagcgagagagactcgtacaggaaccaagcatgccacgctcgttgcaacctccttaaggtggcgacagaagaatgtgaag

SEQ ID NO: 113661 - DNA, 253 bp, Glycine max
cgctacctcagatctgaatttctttgcttttggtatcaatgccgagaacaaccagaggaacttccttgcaggttcgaaagacaatgtgataagccagatacctagtcaagtgcaggagcttgcgttccctgggtctgcaaaagatattgagaacctaataaagagccaaagtgagtcctactttgtggatgctcagcctcagcagaaagaggaggggaacaagggaagaaagggtcctttgtcttcaattttg

SEQ ID NO: 113662 - DNA, 250 bp, Glycine max
gtgtggaggaactaaaagctccagcttattaccctgagtttgtcaaggaagctatttcccttgctctagataaaagtccgccatgcgctgaacctgttgccaatctttttgaatatctgttcattaagaagattctttcagccagagacatagggactgggtgcatgttatttgcttctctgctggatgatatcggcatagatttacctaaagcaccaaataattttggtgagataatagggaaactagt

SEQ ID NO: 113663 - DNA, 248 bp, Glycine max
gttcagtgtctacaataccaggtgattttgtcattggtgttaagttgacaaccataaacaatatgtgtgcatatgggctcaatcctggtatttcaggttctcgtcttttgggcaccattcctcagtctatttcacagcaaactgtttggaatcaaatggcaacagtgagaccaccattgaattttgattctagcaagcagagcttttgtcaattttctattgaccttctcggtggcggaattttagtg

SEQ ID NO: 113664 - DNA, 239 bp, Glycine max
cacagtgtccaagtgcacacaacaacacacccctacgacgccggcgtcgtcccgccggctcgttttgaggcgccgcgttacgaagccggcatcaaggcgccctcttccatttaccattccgagagaggtccgacgacctctcaggttctcgcagtcgtcgccggccttccggtcggcggcatcctcctgctcctggcaggactgaccctggctggaactctcaccgggctggtggtggc

SEQ ID NO: 113665 - DNA, 237 bp, Glycine max
ctagttcaatatcctagtataccttaataaataatttaagatactatgatgagagcacggttcccattactgttgctgggacttgttttcctggcttcagtttctgtctcatttggcattgcttactgggaaaaagagaaccccaaacacaacaagtgtctccagagttgcaatagcgagagagactcgtacaggaagcaagcatgccacgctcgttgcaacctccttaaggtggca

SEQ ID NO: 113666 - DNA, 246 bp, Glycine max
atgaaggtaaccctcttgaaaatggtggcacatattatatcttgtcagacataacagcatttggtggaataagagcagccccaacgggaaatgaaagatgccctctcactgtggtgcaatctcgcaatgagctcgacaaagggattggaacaatcatctcgtccccatatcgaatccgttttatcgccgaaggccatcctttgagccttaagttcgattcatttgcagttataatgctgtgtgttg

SEQ ID NO: 113667 - DNA, 241 bp, Glycine max
gttcaatatcctagtataccttaataaataatttaagctactatgatgagagcacggttcccattactgttgctgggacttgttttcctgccttcagtttctgtctcatttggcattgcttactgggaaaaagagaaccccaaacacaacaagtgtctccagagttgcaatagcgagagagactcgtacaggaaccaagcatgccacgctcgttgcaacctccttacggtggagacagaag

SEQ ID NO: 113668 - DNA, 246 bp, Glycine max
cattggtccttaaacactcatcagtcatcaccatggccaagctagttttttccctttgtgtgctgcttttcagtggctgctgcttcgctttcagttccagagagcagcctcagcaaaacgagtgccagatccaaaaactcaatgccctcaaaccggataaccgtatagagtcagaaggagggctcattgagacatggaaccctaacaacaagccattccagtgtgccggtgttgccctctcgcgct

SEQ ID NO: 113669 - DNA, 251 bp, Glycine max
aagataaacctcgtcctagtcgacccagccaaggaaagcgtgaacaagaccaggaccaggacgaggacgaagatgaagatgaagatcaacctcgcaagagccgcgaatggagatcgaaaaagacacaacccagaagacctcgacaagaagaaccacgtgaacgaggatgcgagaccagaaacggggttgaggaaaatatctgcaccttgaagcttcacgagaacattgctcgcccttcacgcgctgacttc

SEQ ID NO: 113670 - DNA, 249 bp, Glycine max
ggttgctgctttatcttggatttacaactacgtttctgggaaccagcctgcgggttctgacacccttgactatgcaaaagggtaccttactgataaggcaagggatgtgaaggagagggcaaaggattatggaagttatgctcagggtagaattaatgaggccacacaaggaacttattagtcatgcatgcatcaatatatgcatgtgtgtatgaggttgacattgaaggtggtgatggtggtggtacc

SEQ ID NO: 113671 - DNA, 251 bp, Glycine max
tctctccattggtccttaaacactcatcagtcatcaccatggccaagctagttttttccctttgttttctgcttttcagtggctgctgcttcgctttcagttccagagagcagcctcagcaaaacgagtgccagatccaaaaactcaatgccctcaaaccggctaaccgtatagagtcagaaggagggctcattgagacatggaaccctaacaacaagccattccagtgtgccggtgttgccctctctcgc

SEQ ID NO: 113672 - DNA, 249 bp, Glycine max
caaacttgccatacccgtcaacaaacctggcagatctgatgatttcttcttatctagcactcaagcccaacagtcctacttgcaaggcttcagtcataatattctagagacctccttccatagcgaattcgaggtgcgaatcagggttttgtttggagaggtagaggagcagaggcagcaagagggagtgatcgtggaactctcaaaggaacaaattcggcaactgagcagacgtgccaaatctagttc

SEQ ID NO: 113673 - DNA, 246 bp, Glycine max
caatgtccttgtttggaacagcaatactctcaccttggacgattttataggaagcggaaagattcaattgcacaaggttctctctcaatgcttcgatgactctgcttggccacttcagactaaaactggcagatacgctggtgaagtcaaagtcatattgtattacgcaattgccaatcatcaaaggcataaatcagtgtcaagccatgctccatcagcaccaccgtatgtggtaacaacaactcc

SEQ ID NO: 113674 - DNA, 240 bp, Glycine max
attgtcttggaccactcatcaccatggccaagcttgttctttccctttgtttccttcttttcagtggctgcttcgctctgagagagcaggcacagcaaaatgagtgccagatccaaaagctgaatgccctcaaaccggataaccgtatagagtcggaaggtgggttcattgagacctggaaccctaacaacaagccattccagtgtgccggtgtttcccgctctcgctgcacccgtaacc

SEQ ID NO: 113675 - DNA, 246 bp, Glycine max
gagggaacctcagcaacccggtgagaaggaggaagacgaagatgagcaaccacggccaatcccattcccacgcccacaacctcggcaagaagaagagcacgagcagagagaggaacaggaatggcctcgcaaggagggcaaacgcggcgaaacgggaagtgcagaggaagatgaggatgaggctgaggaagaagatgaacgtcaattcccattcccacgcccacctcatcagcaggaagagcgaaa

SEQ ID NO: 113676 - DNA, 246 bp, Glycine max
  unsure (1)..(246): unsure at all n locations
ggaagatgaggatgcggatgaggaacaagatgaacgtcaattcccattcccacgcccacctcatcaggangaagagcggtagcaagaggaagatgaggatgaggagcagcagcgagagagcgaagaaagtgacgattctgagttacgcagacataagaataagaacccttttctcttcggctctaacaggttcgaaactctcttcaaaaaccaatatggtcgcattcgcgtcctccagaggtgcaa

SEQ ID NO: 113677 - DNA, 252 bp, Glycine max
ctcgagccgattcggctcgagactttagccgaggtcaggaggagccctagctaagttcacaagttcaaaatggctaggggactaacgaagcatttgaaaaggctcaatgctcctaagcattggatgcttgacaaactgggtggtgcatttgcgcctaaaccctcatctggaccacacaaatcgagggagtgcctccccctcattcttattctgcgaaaccggctgacgtcatgcctgacataccgtgaagtc

SEQ ID NO: 113678 - DNA, 256 bp, Glycine max
gcagcaacaggaagagcaacctttggaagtgcggaaatatagagctgaattgtctgaacaagatatatttgtaatcccagcaggttatccagttgtggtcaacgctacctcagatctgaatttctttgcttttggtatcaatgccgagaacaaccagaggaacttccttgcaggttcgaaagacaatgtgataagccagatacctagtcaagtgcaggagcttgcgttccctgggtctgcaaaagatattgagaac

SEQ ID NO: 113679 - DNA, 247 bp, Glycine max
gacgaagatgatgaagatgaacaaattccctctcaccctcctcgccgaccaagccatggaaagcgtgaacaagacgaggacgaggacgaagatgaagataaacctcgtcctagtcgaccaagccaaggaaagcgtgaacaagaccaggaccaggacgaggacgaagatgaagatgaagatcaacctcgcaagagccgcgaatggagatcgaaaaagacacaacccagaagacctagacaagaagaac

SEQ ID NO: 113680 - DNA, 248 bp, Glycine max
caatatcctagtataccttaataaataatttaagatactatgatgagagcacggttcccattactgttgctgggacttgttttcctggcttcagtttctgtctcatttggcattgcttactgggaaaaagagaaccccaaacacaacaagtgtctccagagttgcaatagcgagagagactcgtacaggaaccaagcatgccacgctcgttgcaacctccttaaggtggagaaagaagaatgtgaaga

SEQ ID NO: 113681 - DNA, 247 bp, Glycine max
caatatcctagtacaccgtattaaagaatttaagatatactatgatgagagcgcggttcccattactgttgctgggagttgttttcctggcatcattttctgtctcatttggcattgcgtattgggaaaagcagaaccccagtcacaacaagtgcctccgaagttgcaatagcgagaaagactcctacaggaaccaagcatgccacgctcgttgcaacctccttaaggtggaggaagaagaagaatg

SEQ ID NO: 113682 - DNA, 247 bp, Glycine max
cttaaacactcatcagtcatcaccatggccaagctagttttttccctttgttttctgcttttcagtggctgctgcttcgctttcagttccagagagcagcctcagcaaaacgagtgccagatccaaaaactcaatgccctcaaaccggataaccgtatagagtcagaaggagggctcattgagacatggaaccctaacaacaagccattccagtgtgccggtgttgccctctctcgctgcaccctca

SEQ ID NO: 113683 - DNA, 246 bp, Glycine max
aataaataatttaagatactatgatgagaccacggttcccattactgttgctgggacttgttttcctggcttcagttactgtctcatttggcattgcttactgggaacaagagaaccccaaacacaacaagtgtctccagagttgcaatagcgagagagactcgtacaggaaccaagcatgccacgctcgttgcaacctccttaaggtggagaaagaagaatgtgaagaaggtgaaattccacgac

SEQ ID NO: 113684 - DNA, 246 bp, Glycine max
aattattaacacttccttagttcaatatggggaagcccttcactctctctctttcttccctttgcttgctactcttgtcgagtgcatgctttgctattagctccagcaagctcaacgagtgccaactcaacaacctcaacgcgttggaacccgaccaccgcgttgagtccgaaggtggtttgattcaaacatggaactctcaacaccctgagctgaaatgcgccggtgtcactgtttccaaactca

SEQ ID NO: 113685 - DNA, 247 bp, Glycine max
aacttattaacactttccttagttcaatatggggaagcccttcttcactctctctctttcttccctttgcttgctactcttgtcgagtgcatgctttgctattacctccagcaagttcaacgagtgccaactcaacaacctcaacgcgttggaacccgaccaccgcgttgagtccgaaggtggtcttattgaaacatggaactctcaacaccctgagctgcaatgcgccggtgtcactgtttccaaa

SEQ ID NO: 113686 - DNA, 250 bp, Glycine max
cagacatgaattcaaggttccagcttttgagtaccactaccaatggtgattttgttcaaggaaaagatctcgcaatggttaaagttaatgtagcatgtgctgctgttggcttgacatcaagttacactccaactccattgttggaatctggtttgcaaaaagacagagggttaattgtggagtattttggaaggatgtcttacgttgctcataacgttaaccagccccaagagaaagatttgttggaggg

SEQ ID NO: 113687 - DNA, 242 bp, Glycine max
attctctccattggtccttaaacactcatcagtcatcaccatggccaagctagttttttccctttgttttctgcttttcagtggctgctgcttcgctttcagttccagagagcagcctcagcaaaacgagtgccagatccaaaaactcaatgccctcaaaccggataaccgtatagagtcagaaggagggctcattgagacatggaaccctaacaacaagccattccagtgtgccggtgttg

SEQ ID NO: 113688 - DNA, 249 bp, Glycine max
ctagttcaatatcctagtataccttaataaataatttaagatactatgatgagagcacggttcccattactgttgctgggacttgttttcctggcttcagtttctgtctcatttggcattgcttactgggaaaaagagaaccccaaacacaacaagtgtctccagagttgcaatagcgagagagactcgtacaggaaccaagcatgccacgctcgttgcaacctccttaaggtggagaaagaagaatgt

SEQ ID NO: 113689 - DNA, 247 bp, Glycine max
gttcctcactgaccaagccatcgcgatgagaaccaaactttctttagctatctttttcttttttcttttagccgcattttcaaacctagcctttggcaaatgtaaagaaaccgaggtagaagaagaagaccctgagctcgtaacatgcaaacaccaatgccaacagccacagcaatacactgagggtgacaagcgggtatgcttgcaaagatgtgacaggtatcatcgtatgaagcaagagcgagag

SEQ ID NO: 113690 - DNA, 255 bp, Glycine max
aacttattaacactttccttagttcaatatggggaagcccttcttcactctctctctttcttccctttgcttgctactcttgtcgagtgcatgctttgctattacctccagcaagttcaacgagtgccaactcaacaacctcaacgcgttggaacccgaccaccgcgttgagtccgaaggtggtcttattgaaacatggaactctcaacaccctgagctgcaatgcgccggtgtcactgtttccaaacgcaccct

SEQ ID NO: 113691 - DNA, 256 bp, Glycine max
atttttggcatgatattcccgggttgtcctagcacttatcaagagccgcaagaatctcagcaacgaggacgaagccagaggccccaagaccgtcaccaaaaggtacatcgcttcagagagggtgatttgatcgcagtgcctactggtgttgcatggtggatgtacaacaatgaagacactcctgttgttgccgtttctattattgacaccaacagcttggagaaccagctcgaccagatgcctaggagattctatc

SEQ ID NO: 113692 - DNA, 248 bp, Glycine max
gagcaaggcactgcatggaggcgagtatcctccactcagcgaaccggatattggagttttacttgtcaaactctcagcgggatccatgttggcacctcatgtgaatccaatatcagatgagtataccatagtgctgagtggttatggtgaactgcatatagggtatccaaacggaagcaaagcaatgaaaactaaaatcaaacaaggggacgtgtttgttgtgccaagatacttccccttctgtcaag

SEQ ID NO: 113693 - DNA, 247 bp, Glycine max
tgctggattagtgcgtctcacaggttgctgacacctcaccacatcaaagaaagagttctttggagatgctttttaacattttgaaggatcatggtcatctattctcccacacattttggaatagcattttctgttctgttattttccctgtatataactcagtatctggaaagagagagatgaatctacaagaggtccattgtccaccttcttcagtatctgtgcatactgaaggaagcacatggga

SEQ ID NO: 113694 - DNA, 245 bp, Glycine max
gctcgagacaacaagaagtttacatttgcagggaaggacaacattgtgagttctctggacaacgttgctaaggagcttgcctttaactatccttctgagatggtgaacggagtattcgaccgaaaggagagtttctttttcccttttgagttgccgagagaggagcgtggtcgtcgcgctgatgcgtgagaggtttagaacaatcaagaaaaggtgtgcatgtggctgaagatcacggggaatgt

SEQ ID NO: 113695 - DNA, 245 bp, Glycine max
ctcgagccgataaaattcttccaccaagttatgggtttccttgtgttgcttcttttctccctcttaggtctctcttctagttccagcatatcaactcatcgttccatattggactttgacctaaccaagtttaccacacagaaacaggtgtcttcactgttccaactatggaagagtgagcatggacgtgtctaccataaccacgaagaagaggcaaagagacttgagattttcaagaataactt

SEQ ID NO: 113696 - DNA, 243 bp, Glycine max
ttcaaaccttgctctatactacacagtacacacactagaagaataatggcttccatcctccactactttttagccctctctctttcttgctcttttcttttcttcttatccgactcagtcacccctacaaaaccaataaaccttgttgttctacccgttcaaaatgatggttccacagggctccattgggccaacctccaaaaaagaacccctctaatgcaagtaccagtcctggtggacctc

SEQ ID NO: 113697 - DNA, 246 bp, Glycine max
taaaattcttccaccaagttatgggtttccttgtgttgcttcttttctccctcttaggtctctcttctagttccagcatatcaactcatcgttccatattggaccttgacctaaccaagtttaccacacagaaacaggtgtcttcactgttccaactatggaagagtgagcatggacgtgtctaccataaccacgaagaagaggcaaagagacttgagattttcaagaataacttgaactatatca

SEQ ID NO: 113698 - DNA, 249 bp, Glycine max
cttattaacacttccctttgcttgctactcttgtcgagtgcatgctttgctattacctccagcaagttcaacgagtgccaactcaacaacctcaacgcgttggaacccgaccaccgcgttgagtccgaaggtggtcttattgaaacatggaactctcaacaccctgagctgcaatgcgccggtgtcactgtttccaaacgcaccctcaaccgcaacggcctccacttgccatcttactcaccttatccc

SEQ ID NO: 113699 - DNA, 247 bp, Glycine max
cactttccttagttcaatatggggaagcccttcttcactctctctctttcttccctttgcttgctactcttgtcgagtgcatgctttgctattacctccagcaagttcaacgagtgccaactcaacaacctcaacgcgttggaacccgaccaccgcgttgagtccgaaggtggtcttattgaaacatggaactctcaacaccctgagctgcaatgcgccggtgtcactgtttccaaacgcaccctca

SEQ ID NO: 113700 - DNA, 250 bp, Glycine max
atatcctagtacaccgtattaaagaatttaagatatactatgatgagagcgcggttcccattactgttgctgggagttgttttcctggcatcagtttctgtctcatttggcattgcgtattgggaaaagcagaaccccagtcacaacaagtgcctccgaagttgcaatagcgagaaagactcctacaggaatcaagcatgccacgctcgttgcaacctccttaaggtggaggatgtagaagaatgcgaag

SEQ ID NO: 113701 - DNA, 252 bp, Glycine max
gttcaatatcctagtacaccgtattaaagaatttaagatatactatgatgagagcgcggttcccattactgttgctgggagttgttttcctggcatcagtttctgtctcatttggcattgcgtattgggaaaagcagaaccccagtcacaacaagtgcctccgaagttgcaatagcgagaaagactcctacaggaaccaagcatgccacgctcgttgcaacctccttaaggtggaggaagaagaagaatgcg

SEQ ID NO: 113702 - DNA, 254 bp, Glycine max
tgatcatacatagtagtgttggtgggttgcaaagatgcttgggggtcttctccataggggtcataagataaaagggacagtggtgttgatgcgcaagaatgtgttggacgtgaatagcgtaaccagcgttgggggaattattggtcaaggtctcgacttagttggctcaacactcgatactcttactgccttcttgggccgatccgtgtctctccagcttattagtgctaccaaagctgatgccaacggaaaag

SEQ ID NO: 113703 - DNA, 250 bp, Glycine max
ttgtctttgaacactcatcaccatggccaagcttgttctttccctttgtttccttcttttcagtggctgcttcgctctgagagagcaggcacagcaaaatgagtgccagatccaaaagctgaatgccctcaaaccggataaccgtatagagtcggaaggtgggttcattgagacctggaaacccaacaacaagccatccagtgtgccggtgttgccctctctcgttgaacccttaacggaaatgcccttc

SEQ ID NO: 113704 - DNA, 258 bp, Glycine max
ttgaacactcatcaccatggccaagcttgttctttccctttgtttccttcttttcagtggctgcttcgctctgagagagcaggcacagcaaaatgagtgccagatccaaaagctgaatgccctcaaaccggataaccgtatagagtcggaaggtgggttcattgagacctggaaccctaacaacaagccattccagtgtgccggtgttgccctctctcgctgcacccttaaccgcaatgcccttcgtagaccttccta

SEQ ID NO: 113705 - DNA, 250 bp, Glycine max
tttgaacactcatcaccatggccaagcttgttctttccctttgtttccttcttttcagtggctgcttcgctctgagagagcaggcacagcaaaatgagtgccagatccaaaagctgaatgccctcaaaccggataaccgtatagagtcggaaggtgggttcattgagacctggaaccctaacaacaagccattccagtgtgccggtgttgccctctctcgctgcacccttaaccgcaatgcccttcgtag

SEQ ID NO: 113706 - DNA, 245 bp, Glycine max
gcagatttcaagatgaagttcaacattgcgaatcccaccaccggttgtcagaagaagctggagatcgatgatgacctgaagctgcgagcattttgggacaagaggatctcacaagaggttgttggtgatgctctgggtgaggaattcaaaggttatgtcttcaaaattactggaggttgcgacaagcaaggatttccaatgaagcaaggagtgttgacccctggtcgtgttcgcctcttgctgca

SEQ ID NO: 113707 - DNA, 245 bp, Glycine max
acttattaacactttccttagttcaatatggggaagcccttcttcactctctctctttcttccctttgcttgctactcttgtcgagtgcatgctttgctattacctccagcaagttcaacgagtgccaactcaacaacctcaacgcgttggaacccgaccaccgcgttgagtccgaaggtggtcttattgaaacatggaactctcaacaccctgagctgcaatgcgccggtgtcactgtttccaa

SEQ ID NO: 113708 - DNA, 244 bp, Glycine max
cgggaaatgaaagatgccctctcactgtggtgcaatctcgcaatgagctcgacaaagggattggaacaatcatctcgtccccatatcgaatccgttttatcgccgaaggccatcctttgagccttaagttcgattcatttgcagttataatgctgtgtgttggaattcctaccgagtggtctgttgtggaggatctaccagaaggacctgctgttaaaattggtgagaacaaagatgcaatgga

SEQ ID NO: 113709 - DNA, 243 bp, Glycine max
ggcttcgccctgaattcttgaaagaagcgttcggcgtgaacatgcagatagtgagaaacctacaaggtgagaacgaagaggaggatagtggagccattgtgacagtgaaaggaggtctaagagtcacagctccagccatgaggaagccacagcaagaagaagatgatgatgatgaggaagagcagccacagtgcgtggagacagacaaaggttgccaacgccaaagcaaaaggagcagaaatg

SEQ ID NO: 113710 - DNA, 245 bp, Glycine max
ggcaggtcaagaacaacaaccctttcagcttcctggttccacctaaggatctctcagaggagagttgtggcttagagccctttttgcatgtgctaccacacttttgtccttttgggcactagttagtgtgcgtagaactaaataagaacgaataaaacaacaaaggctttgctgccctttgttaagtataaaataacgggtaatgtaattgtacccttgtgtaatgagtcactcaagtacctatg

SEQ ID NO: 113711 - DNA, 246 bp, Glycine max
gttcaaggaaaaccatttcttctgaagataaacctttcaacttgagaagccgcgaccccatctattccaacaagcttggcaagttgtttgagattaccccagagaaaaaccctcagcttcgggacttggatgtcttcctcagtgttgtggatatgaacgagggagctctttttctgccacacttcaattcaaaggccatagtggtactagtgattaatgaaggagaagcaaacattgaacttgttg

SEQ ID NO: 113712 - DNA, 249 bp, Glycine max; identical to SEQ ID NO: 112298

SEQ ID NO: 113713 - DNA, 247 bp, Glycine max
tccattactctaacttcacgatctgcattttaacctttttttgttgtttagaatcttaagctatgggaaagtcttacccaaccgtgagcgctgattaccagaaggccgttgagaaggcgaagaagaagctcagaggcttcatcgctgagaagagatgcgctcctctaatgctccgtttggcatggcactctgctggaacttacgacgtgagctcgaagaccggtggtcccttcggaaccataaagca

SEQ ID NO: 113714 - DNA, 250 bp, Glycine max
aagcaaagcaatggctacttcaaagttgaaaacccagaatgtggttgtatctctctccctaaccttaaccttggtactggtgctactgaccagcaaggcaaactcagcggaaactgtttctttcagctggaacaagttcgtgccgaagcaaccaaacatgatcctccaaggagacgctattgtgacctcctcgggaaagttacaactcaataaggttgacgaaaacggcaccccaaaaccctcgtctctt

SEQ ID NO: 113715 - DNA, 243 bp, Glycine max
atcatacatagtagtgttggtgggttgcaaagatgcttgggggtcttctccataggggtcataagataaaagggacagtggtgttgatgcgcaagaatgtgttggacgtgaatagcgtaaccagtgttgggggaattattggtcaaggtctcgacttagttggctcaacactcgatactcttactgccttcttgggccgatccgtgtctctccagcttattagtgctaccaaagctgatgcca

SEQ ID NO: 113716 - DNA, 243 bp, Glycine max
cctgccagtagtcatatgcttgtctcaaagattaagccatgcatgtgtaagtatgaactaattcagactgtgaaactgcgaatggctcattaaatcagttatagtttgtttgatggtatctactactcggataaccgtagtaattctagagctaatacgtgcaacaaaccccgacttctggaagggatgcatttattagataaaaggtcaacacaggctctgcctgttgctttgatgattcat

SEQ ID NO: 113717 - DNA, 244 bp, Glycine max
gccacagcaagaagaagatgatgatgatgaggaagagcagccacagtgcgtggagacagacaaaggttgccaacgccaaagcaaaaggagcagaaatggcattgatgagaccatttgcacaatgagacttcgccaaaacattggtcagaattcatcacctgacatctacaaccctcaagctggtagcatcacaaccgccaccagccttgacttcccagccctctggcttctcaaactcagtgcc

SEQ ID NO: 113718 - DNA, 243 bp, Glycine max
gcaagaatgcaatgttcgtgccacactacaacctgaacgcgaacagcataatatacgcattgaatggacgggcattgatacaagtggtgaattgcaacggtgagagagtgtttgatggagagctgcaagagggacgggtgctgatcgtgccacaaaactttgtggtggctgcaagatcacagagtgacaacttcgagtatgtgtcattcaagaccaatgatacacccatgatcggcactcttg

SEQ ID NO: 113719 - DNA, 240 bp, Glycine max
cttgtgttgcttcttttctccctcttaggtctctcttctagttccagcatatcaactcatcgttccatattggaccttgacttaaccaagtttaccacacagaaacaggtatattcactgttccaactatggaagagtgagcatggacgtgtctaccataaccacgaagaagaggcaaagagacttgagattttcaagaataattagaactatatcagggacatgaatgcaaacagaaaa

SEQ ID NO: 113720 - DNA, 230 bp, Glycine max
cccaaacacaacaagtgtctccagagttgcaatagcgagagagactcgtccaggaaccaagcatgccacgctcgttgcaacctccttaaggtggagaaagaagaatgtgaagaaggtgaaattccacgcaaaatacgagagacacaacacccggagagggaacctcagcaaaccggtgagaaggaggaagacgaagatgagcaaccacgtccaatcccattcccacgccc

SEQ ID NO: 113721 - DNA, 244 bp, Glycine max
gaaacagtcagaatcagaatcagaagaagcgagcaaagatgtcgggtcgtggaaagggaggcaagggtttgggtaagggaggagccaagaggcacaggaaggtgctccgcgataacatccagggaatcacaaaacccgccattcgccgtttggctcgcagaggcggcgtcaagagaatcagtggcctcatctatgaagaaacccgcggcgtccttaagatcttcctcgagaacgttattcgcga

SEQ ID NO: 113722 - DNA, 177 bp, Glycine max
gaacactcatcaccatggccaagcttggtccttccccttggttccctcctttcaattggctgcttcgctctgagagagcaggcacagcaaaatgagtgccagatccaaaagctgaatgccctcaaaccggataaccgtatagagtcggaaggtgggtcacattgagacctggaaccc

SEQ ID NO: 113723 - DNA, 250 bp, Glycine max
ccttaataaataatttaagatactatgatgagagcacggttcccattactgttgctgggacttgttttcctggcttcagtttctgtctcatttggcattgcttactgggaaaaagagaaccccaaacacaacaagtgtctccagagttgcaatagcgagagagactcgtacaggaaccaagcatggcacgctcgttgcaacctccttaaggtggagaaagaagaatgtgaagaaggtgaaattccacgac

SEQ ID NO: 113724 - DNA, 248 bp, Glycine max
caacggcggaggtcatgtcaaccattctattttctggaaaaatctagctcctgttcgtgaaggaggtggtgaaccacccaagggttcactgggatgggctattgacacacattttggttcttttgaagcattaatacaaaaagttaacgcagaaggtgctgcactacaggggtctggatgggtgtggcttggtctggacaaagagttgaagaggcttgtagttgaaaccactgccaaccaggacccac

SEQ ID NO: 113725 - DNA, 250 bp, Glycine max
ctcgagccggaaggagatgcaaacattgaacttgttggcctaaaagaacaacaacaggagcagcaacaggaagagcaacctttggaagtgcggaaatatagagccgaattgtctgaacaagatatatttgtaatcccagcaggttatccagttgtggtcaacgctacctcaaatctgaatttctttgctattggtattaatgccgagaacaaccagaggaacttcctcgcaggttcgcaagacaatgtga

SEQ ID NO: 113726 - DNA, 253 bp, Glycine max
ggtggtttgattcaaacatggaactctcaacaccctgagctgaaatgcgccggtgtcactgtttccaaactcaccctcaaccgcaatggcctccacttgccatcttactcaccttatccccggatgatcatcatcgcccaagggaaaggagcacttggagttgcaattccaggatgtcctgagacgtttgaggagccacaagaacaatcaaacagaagaggctcaaggtcgcagaagcagcagctacaggaca

SEQ ID NO: 113727 - DNA, 255 bp, Glycine max; identical to SEQ ID NO: 105154

SEQ ID NO: 113728 - DNA, 252 bp, Glycine max
atcctagtataccttaataaataatttaagatactatgatgagagcacggttcccattactgttgctgggacttgttttcctggcttcagtttctgtctcatttggcattgcttactgggaaaaagagaaccccaaacacaacaagtgtctccagagttgcaatagcgagagagactcgtacaggaaccaagcatgccacgctcgttgcaacctccttaaggtggagaaagaagaatgtgaagaaggtgaaa

SEQ ID NO: 113729 - DNA, 250 bp, Glycine max; identical to SEQ ID NO: 113262

SEQ ID NO: 113730 - DNA, 249 bp, Glycine max; identical to SEQ ID NO: 111989

SEQ ID NO: 113731 - DNA, 246 bp, Glycine max
taaacactcatcagtcatcaccatggccaagctagttttttccctttgttttctgcttttcagtggctgctgcttcgctttcagttccagagagcagcctcagcaaaacgagtgccagatccaaaaactcaatgccctcaaaccggataaccgtatagagtcagaaggagggctcattgagacatggaaccctaacaacaagccattccagtgtgccggtgttgccctctctcgctgcaccctcaa

SEQ ID NO: 113732 - DNA, 248 bp, Glycine max
atatgaacgagggagctcttcttctaccacactgcaattcaaaggcgatagtgatactggtaattaatgaaggagatgcaaacattgaacttgttggcctaaaagaacaacaacaggagcagcaacaggaagagcaacctttggaagtgcggaaatatagagccgaattgtctgaacaagatatatttgtaatcccagcaggttatccagttgtggtcaacgctacctcaaatctgaatttctttgct

SEQ ID NO: 113733 - DNA, 246 bp, Glycine max
gcaccatcttctttgctctctttctcttttgtgccttcaccacctcatacctaccttcagccatcgctgatttcgtgctcgataatgaaggtaaccctcttgaaaatggtggcacatattatatcttgtcagacataacagcatttggtggaataagagcagccccaacgggaaatgaaagatgccctctcactgtggtgcaatctcgcaatgagctcgacaaagggattggaacaatcatctcgt

SEQ ID NO: 113734 - DNA, 246 bp, Glycine max
atttagttgtaatttggctaacacggtgttgtgttctgaagtgtagagaagagaggcttaaaaccccagcagagtcctcgcatttcactctcactctcactctcactctctcagctcaggagtgtataatctgagcgatgtcagatcttgaggctcccttgcgccctaagaggaagaaggtttgggtggactatttcgttcagtttcgatggatccttgttatttttgtggtccttcccatctcct

SEQ ID NO: 113735 - DNA, 246 bp, Glycine max
cttaattattaacacttccttagttcaatatggggaagcccttcactctctctctttcttccctttgcttgctactcttgtcgagtgcatgctttgctattagctccagcaagctcaacgagtgccaactcaacaacctcaacgcgttggaacccgaccaccgcgttgagtccgacagtggtttgattcaaacatggaactctcaacaccctgagctgaaatgcgccggtgtcactgtttccaaac

SEQ ID NO: 113736 - DNA, 249 bp, Glycine max
taggttcaatatcctagtataccttaataaataatttaagatactatgatgagagcacggttctcattactgttgctgggtattgttttcctggcttcagtttctgtctcatttggcattgcttactggtaaaaagagtaccccaaacacaacaagtgtctccagagttgcaatagcgagagagactcgtacatgaaccaagcatgctacgctcgttgcaacctccttaaggtggagaaagaagaatgt

SEQ ID NO: 113737 - DNA, 248 bp, Glycine max
attggtccttaaacactcatcagtcatcaccatggccaagctagttttttccctttgttttctgcttttcagtggctgctgcttcgctttcagttccagagagcagcctcagcaaaacgagtgccagatccaaaaactcaatgccctcaaaccggataaccgtatagagtcagaaggagggctcattgagacatggaaccctaacaacaagccattccagtgtgccggtgttgccctctctcgctgca

SEQ ID NO: 113738 - DNA, 252 bp, Glycine max
tgattaacacttccttagttcaatatggggaagcccttcactctctctctttcttccctttgcttgctactcttgctcgagtgcatgctttgctattagctccagcaagctcaacgagtgtcaactcaacaacctcaacgcgttggaacccgactaacgcgttgagtccgaatgtggtatgattctaacatggaactctcaataccctgagctgacatgcgccgttgtcactgattccagtctcaccctcaa

SEQ ID NO: 113739 - DNA, 216 bp, Glycine max
gccgctatctcgagatgttctatgctctcaagtaccgcaaattggccgagtctgtgccccttgctgttgagtaaactgaggatgaagagttggataaagaaatggaggaaccggctttttgtttctcatttggagtttgtcttacttgagttctataaataatatgtccctgatgattttaattttgtgattaagctttcgataagagacagagag

SEQ ID NO: 113740 - DNA, 252 bp, Glycine max
attgtctttgaacactcatcaccatggccaaccttgttctttccctttgtttccttcttttcagtggctgcttctctctgagagagcaggcacagcaaaatgagtgccagatccaaaagctgaatgccctcagcccggataaccgtctagagtcggaaggtgggttcattgagacctggtaccctaacaacaagccattccagtgtgccggtgttgcactctctcgctgcacccttaaccgcaatgcccttc

SEQ ID NO: 113741 - DNA, 251 bp, Glycine max
ttctctccattggtccttaaacactcatcagtcatcaccatggccaagctagttttttccctttgttttctgcttttcagtggctgctgcttcgctttcagttccagagagcagcctcagcaaaacgagtgccagatccaaaaactcaatgccctcaaaccggataaccgtatagagtcagaaggagggctcattgagacatggaaccctaacaacaagccattccagtgtgccggtgttgccctctctcg

SEQ ID NO: 113742 - DNA, 251 bp, Glycine max
tgaacaaccgtaggccatatcatagtattaactttgttattgcacatgacggatttaccttgcgtgatcttgtttcatacaatttcaagcacaataaagccaatggggaaggtggaaaagacggaagcaatgataatttcagttggaattgtggtttcgaaggggaaactgatgatgctagtataagagctttgcgatcacggcaaatgaaaaacttccatttggcattaatgatatctcagggtacacca

SEQ ID NO: 113743 - DNA, 251 bp, Glycine max
tgaacaaccgtaggccatatcatagtattaactttgttattgcacatgacggatttaccttgcgtgatcttgtttcatacaatttcaagcacaataaagtcaatggggaaggtggaaaagacggaagcaatgataatttcagttggaattgtggtttcgaaggggaaactgatgatgctagtataagagctttgcgatcacggcaaatgaaaaacttccatttggcattaatgatatctcagggtacacca

SEQ ID NO: 113744 - DNA, 249 bp, Glycine max
ataacactcgccatacccgttaacaagcctggtagatttgagagtttcttcctatctagcactgaagctcaacaatcctacttgcaaggattcagcaggaacattttagaagcctcctacgataccaaattcgaggagataaacaaggttctgtttagtagagaggaagggcagcagcaaggggagcagaggctgcaagagagcgtgattgtggaaatctcgaaggaacagattcgggcactgagcaaa

SEQ ID NO: 113745 - DNA, 248 bp, Glycine max
agctcaacgagtgccaactctacaacctcaacgcgttggaacccgaccaccgcgttgagtccgaaggtggtttgattcaaacatggaactctcaacaccctgagctgaaatgcgccattgtcactgtttccaaactcaccctcaactgcaatggcctccacttgccatcttactcaccttatccccggatgatcatcatcgcccaagggaaaggagcacttggagttgcaattccaggatgtcctgag

SEQ ID NO: 113746 - DNA, 243 bp, Glycine max
gaaacagtcagaatcagaatcagaagaagcgagcaaagatgtcgggtcgtggaaagggaggcaagggtttgggtaagggaggagccaagaggcacaggaaggtgctccgcgataacatccagggaatcacaaaacccgccattcgccgtttggctcgcagaggcggcgtcaagagaatcagtggcctcatctatgaagaaacccgcggcgtccttaagatcttcctcgagaacgttattcgcg

SEQ ID NO: 113747 - DNA, 249 bp, Glycine max
gagaaacctacaaggtgagaacgaagaggaggatagtggagccattgtgacagtgaaaggaggtctaagagtcacagctccagccatgaggaagccacagcaagaagaagatgatgatgatgaggaagagcagccacagtgcgtggagacagacaaaggttgccaacgccaaagcaaaaggagcagaaatggcattgatgagaccatttgcacaatgagacttcgccaaaacattggtcagaattcatc

SEQ ID NO: 113748 - DNA, 249 bp, Glycine max
ttacgctctctcactcacaaacacacactgaactaaaaaacatcaaaagagacatggctgagcaaaccttcatcatgatcaagcctgatggcgtccaaagaggccttattggcgagatcattagcagatttgagaagaaaggtttctacttgaaaggtttgaaacttgttactgtggaccgtccttttgctgagaagcactatgctgatttgtctgccaagcctttctttagtggtttggtggattaca

SEQ ID NO: 113749 - DNA, 253 bp, Glycine max
caacttccaagtaaggtcactcttccagatggcgcgtacaaagcacactgctcgcaagtccaccggcggcaaggctccccggaagcagctggcgacgaaggccgctcggaagtctgctccggcgaccggcggagtgaagaagccgcacaggttcaggcctggaacagtggccctgagggagatcagaaagtaccagaagagcacggagcttctgatccgagagcttacgtttcagcgtttggttcgtgaaatc

SEQ ID NO: 113750 - DNA, 256 bp, Glycine max
gtgatgccctgagagtcccctcaagaaaccacatactatgtggtcaaccctgacaacaacgaaaatctcagattaataacactcgccatacccgttaacaagcctggtagatttgagagtttcttcctatctagcactgaagctcaacaatcctacttgcaaagattcagcacggacactgtaagaggcctcctacgataccaaattcgaggagataaccaaggttctgtttagtagagaggaagggcagcagcaa

SEQ ID NO: 113751 - DNA, 257 bp, Glycine max
cgaattattaacactttccttagttcaatatggggaagcccttcttcactctctctctttcttccctttgcttgctactcttgtcgagtgcatgctttgctattacctccagcaagttcaacgagtgccaactcaacaacctcaacgcgttggaaaccgaacaccgcggtgagtccgaaagtggtcctattgaaacatggaactctcaacaacctgagctgccatgcgccggtgtcactgtttccaaacgccacctc

SEQ ID NO: 113752 - DNA, 260 bp, Glycine max
gagctcatcaccctgagctgaaatgcgccggtgtcactgtttccaaactcaccctcaaccgcaatggcctccacttgccatcttactcaccttatccccggatgatcatcatcgcccaagggaaaggagcacttggagttgcaattccaggatgtcctgagacgtttgaggagccacaagaacaatcaaacagaagaggctcaaggtcgcagaagcagcagctacaggacagtcaccagaagattcgtcacttcaatgaa

SEQ ID NO: 113753 - DNA, 255 bp, Glycine max
accaagttcacaatcctcctcatctctcttctcttctgcatcgcccacacttgcagcgcctccaaatggcagcaccagcaagatagctgccgcaagcagctccagggggtgaacctcacgccctgcgagaagcacatcatggagaagatccaaggccgcggcgatgacgatgatgatgatgacgacgacaatcacattctcaggaccatgcggggaagaatcaactacataaggaggaacgaaggaaaagacgaa

SEQ ID NO: 113754 - DNA, 226 bp, Glycine max
cccaactaacaataattccttcacttgcagaacttagttctctgttgcatcatcatcatcttcattagtgttagccctaaacttcaacttcaaccatgatcacagtgccaccacacagtgtccaagtgcacacaacatcacaccgctacgatgccggcgtcgtcccgccggctcgttttgaggcgccgcgttacgaagccggcatccaggctgcttcttccattta

SEQ ID NO: 113755 - DNA, 226 bp, Glycine max
caaattcttccaccaagttatgggtttccttgtgttgcttcttttctccctcttaggtctctcttctaattccagcatatcaactcatcgttccatattggaccttgacctaaccaagtttaccacacagaaacaggtctcttcactgttccaactatggaagagtgagcatggacgtgtctaccataaccacgaagaagaggcaaagagacttgagattttcaag

SEQ ID NO: 113756 - DNA, 259 bp, Glycine max
gacaccacatactatgtggtcaaccctgacaacaacgaaaatctcagattaataacactcgccatacccgttaacaagcctaggtagatttgagagtttcttcctatctagcactgaagctcaacaatcctacttgcaaggattcagcaggaacattttagaggcctcctacgataccaaattcgaggagataaacaaggttctgtttagtagagaggaagggcagcagcaaggggagcagaggctgcaagagagcgtg

SEQ ID NO: 113757 - DNA, 258 bp, Glycine max
ggtccttaaacactcatcagtcatcaccatggccaagctagttttttccctttgttttctgcttttcagtggctgctgcttcgctttcagttccagagagcagcctcagcaaaacgagtgccagatccaaaaactcaatgccctcaaaccggataaccgtatagagtcagaaggagggctcattgagacatggaaccctaacaacaagccattccagtgtgccggtgttgccctctctcgctgcaccctcaaccgcaa

SEQ ID NO: 113758 - DNA, 257 bp, Glycine max
cggttcaatatcctagtataccttaataaataatttaagatactatgatgagagcacggttcccattactgttgctgggacttgttttcctggcttcagtttctgtctcatttggcattgcttactgggaaaaagagaaccccaaacacaacaagtgtctccagagttgcaatagcgagagagactcgtacaggaaccaagcatgccacgctcgttgcaacctccttaaggtggagacagaagaatgtgaagaaggt

SEQ ID NO: 113759 - DNA, 256 bp, Glycine max
gtggtctttctctccgtgacacagcacaaacaaattctcagtgttggagacttgagctcatagagaaatcatagtttgtttaatttcaattctgagcaaaggtcaacatgcaagttttttccattgaaggcgaaagtgctttgtcagttgttggtccaaggccaatggaatggtctactgttccatacaatgcccctcacgctcctgggccaaatggaaagcagcggacctcaagtttggaatcaccgatcatgtt

SEQ ID NO: 113760 - DNA, 256 bp, Glycine max
taaagaaccaaagagaatcctactttgtggatgctcagcctaagaagaaagaggaggggaataagggaagaaagggtcctttgtcttcaattttgagggctttttactgaataagtatgtactaaaatgtatgctgtaatagctcatagtgagcgaggaaagtatcgggctatgtaactatgactagagcttcaacgatgtctaactaaatcgatcctgcttgatgctttatgcgggtgtttctatagtcttctac

SEQ ID NO: 113761 - DNA, 257 bp, Glycine max
ctatcctagtataccttaataaataatttaagatactatgatgagagcacggttcccattactgttgctgggacttgttttcctggcttcagtttctgtctcatttggcattgcttactgggaaaaagagaaccccaaacacaacaagtgtctccagagttgcaatagcgagagagactcgtacaggaaccaagcatgccacgctcgttgcaacctccttaaggtggagaaagaagaatgtgaagaaggtgaaattc

SEQ ID NO: 113762 - DNA, 243 bp, Glycine max
tggtccttaaacactcatcagtcatcaccatggccaagctagttttttccctttgttttctgcttttcagtggctgctgcttcgctttcagttccagagagcagcctcagcacaacgagtgccagatccaaaaactcaatgccctcaaaccggctaaccgtatagagtcagaaggagggctcattgagacatggaaccctaacaacaagccattccagtgtgccggtgttgccctctctcgct

SEQ ID NO: 113763 - DNA, 253 bp, Glycine max
ctctcttcaaaaaccaatatggtcgcattcgcgtcctccagaggttcaaccaacgctccccacaacttcagaatctccgagactaccgcattttggagttcaactccaaacccaacaccctccttctccccaaccatgctgacgctgatcacctcatcgttatccttaacgggactgccattctttccttggtgaacaacgacgacagagactcctacagacttcaatctggtgatgccctgagagtcccctc

SEQ ID NO: 113764 - DNA, 254 bp, Glycine max
ctaaactttacaaaagcgtgcgcattttctttgccaaccatacatatgttccaagtgagacaccagcagcacttgtggggtacagagaagaagaattgaagaatttaagaggagatggaaaaggagagcgcaaagaacatgataggatctatgattatgatgtctacaatgatttgggcaatccagatcacggtgaaaattttgctcgcccaattcttggagggtctagcactcatccctaccctcgtagggga

SEQ ID NO: 113765 - DNA, 253 bp, Glycine max
gttcaatatcctagtacaccgtattaaagaatttaagatatactatgatgagagcgcggttcccattactgttgctgggagttgttttcctggcatcagtttctgtctcatttggcattgcgtattgggaaaagcagaaccccagtcacaacaagtgcctccgaagttgcaatagcgagaaagactcctacaggaaccaagcatgccacgctcgttgcaacctccttaaggtggaggaagaagaagaatgcga

SEQ ID NO: 113766 - DNA, 254 bp, Glycine max
ggaacaatggcgggtagggtttcgacgtgcttcttcttcgtgtttgctctttctctccttcttccttttcagatctccgctgaggaatcatcggagaaagagttcgtactcacattggatcactctaactttcacgacactgtcagcaagcacgatttcatcgttgtcgagttctacgctccatggtgtggccactgtaagaagcttgctcccgagtatgagaaagctgcttctatcttgagtagtcatgatcc

SEQ ID NO: 113767 - DNA, 255 bp, Glycine max
ctccattgtctttgaacactcatcaccatggccaagcttgttctttccctttgtttccttcttttcagtggctgcttcgctctgagagagcaggcacagcaaaatgagtgccagatccaaaagctgaatgccctcaaaccggataaccgtatagagtcggaaggtgggttcattgagacctggaaccctaacaacaagccattccagtgtgccggtgttgccctctctcgctgcacccttaaccgcaatgccctt

SEQ ID NO: 113768 - DNA, 255 bp, Glycine max
caaaatgaccaagttcacaatcctcctcatctctcttctcttctgcatcgcccacacttgcagcgcctccaaatggcagcaccagcaagatagctgccgcaagcagctccagggggtgaacctcacgccctgcgagaagcacatcatggagaagatccaaggccgcggcgatgacgatgatgatgatgacgacgacaatcacattctcaggaccatgcggggacgaatcaactacataaggaggaacgcaggaaa

SEQ ID NO: 113769 - DNA, 257 bp, Glycine max
cttattaacactttccttagttcaatatggggaagcccttcttcactctctctctttcttccctagtgcttgctactcttgtcgagtgcatgctttgctattacctccagcaagttcaacgagtgccaactcaacaacctcaacgcgttggaacccgaccaccgcgttgagtccgaaggtggtcttattgaaacatggaactctcaacaccctgagctgcaatgcgccggtgtcactgtttccaaacgcaccctcaa

SEQ ID NO: 113770 - DNA, 273 bp, Glycine max
cggacttcggctcgatggagggtacttcaggaacacagttagagaactactaagagatggcatattcaacgcagacgacgacacgtggcagaagcaaaggaagacagcaagcattgaatttcattcaaccaagttcaggcaattaacaacagaatcattgtttgagcttgtccactataggctcttgcctgtgttagaagcatcagttaagaaatctgttgcaatagacctccaagacattctcttaaggctaacttttgacaatgtttgcat

SEQ ID NO: 113771 - DNA, 256 bp, Glycine max
gtccttaaacactcaccagtcatcatcatagacaagctagttttttccctttgttttctgcttttcagtggctgctgcttcgctttcagttccagagagcagcctcagcaaaacgagtgccagatccaaaaactccatgccctcaaaccggataaccgtatagagtcagaaggagggctcattgagacatggaaccctaacaacaagccattccagtgtgccggtgttgccctctctcgctgcaccctcaaccgca

SEQ ID NO: 113772 - DNA, 259 bp, Glycine max
ctgaagagttcggacggcgaggctttcgaggtggacgaggcggtggcgctggagtctcagacgataaagcacatgatcgaggacgactgcgccgacagcggcatccctctgccgaacgtgacgagcaagatcctggcgaaggtgatcgagtactgcaagaagcacgtcgaggccgcgaatcccgaagacaaaccctccgaggacgatctcaaagcctgggacgccgatttcgtcaaggtcgaccaggccacgctcttcg

SEQ ID NO: 113773 - DNA, 252 bp, Glycine max
cttgaatactatgtattcaagacacaccacaacgcagtcactagctacttgaaggatgtgtttagggcaattccctcagaggttcttgcccattcttacaaccttcgacagagtcaagtgtctgagcttaagtatgaaggaaattggggtcctttggtcaaccctgagtctcaacaaggctcaccccgtgttaaagtcgcataaatgacaagcatgatggtgtgaggatgaggcccatcttatgaataataa

SEQ ID NO: 113774 - DNA, 255 bp, Glycine max; identical to SEQ ID NO: 112915

SEQ ID NO: 113775 - DNA, 252 bp, Glycine max
ctcttccttcaattttccaacaagggttcaagggtattatgcttgctggattcattctcttgctgaaatgcagtctctctagaaagtttgttcaactgtcccattattggcgttactatgctacccactggagcaaaagagacccaattacgtgagagcaacagtcagaaggtccatcctcaaccaatagaagaggccatgaatcagaatccagaagcaatggaaaccctaatatctaaagtttttatgaat

SEQ ID NO: 113776 - DNA, 254 bp, Glycine max
cgaagatagcactggtgatcgatggcagagggcatcttcaaatatcatgtccacacatgtcatcaaggtcgtcacactcgaagcatgataagagtagcccttcataccatagaatcagttccgatttgaagcctggaatggtgtttgttgtccctcccggtcatcccttcgtcaccatagcttccaataaagagaatctcctcatgatttgcttcgaggttaacgctcgagacaacaagaagtttacatttgca

SEQ ID NO: 113777 - DNA, 251 bp, Glycine max
ggtccttctggtagatcctccacaacagaccactcggtaggacctgctgttaaaattggtgagaacaaagatgcaatggatggttggtttagacttgagagagtttctgatgatgaattcaataactataagcttgtgttctgtccacagcaagctgaggatgacaaatgtggggatattgggattagtattgatcatgatgatggaaccaggcgtttggtggtgtctaagaacaaaccgttagtggttca

SEQ ID NO: 113778 - DNA, 254 bp, Glycine max
aatttcaaccatgcttttgctctaatgccacactctgtatttcgctcgtgactacgaacattgcaggaagaaagaaagaaaggcgatggacctcggaacctatgacgtgccagaaggagtggacattctgggaagatacgatgcagagtttgcaaaaatcctcgcaaaagatgctttgaaattcgttgctgaactgcaacgtgagttccggaacgatatcaagcatgcattagagcgcagaagagaggctaaga

SEQ ID NO: 113779 - DNA, 252 bp, Glycine max
tccagagccaaggtaggttaaacgctcttcttcatcgtcgtcgccgcaatgggacgtgtgatccgtgcgcacgtaagggagcaggctcggtcttcaagtcccacacgcaccaccgcaagggccctgcccgcttccggagcctggatttcggagagcgcaacggctacctgaagggtgtcgtcactgacgtcatccacgatcctggccgtggcgcgcctctcgctaaggtcgccttccgccacccgttccgct

SEQ ID NO: 113780 - DNA, 252 bp, Glycine max
atatcctagtataccttaataaataatttaagatactatgatgagagcacggttcccattactgttgctgggacttgttttcctggcttcagtttctgtctcatttggcattgcttactgggaaaaagagaaccccaaacacaacaagtgtctccagagttgcaatagcgagagagactcgtacaggaaccaagcatgccacgctcgttgcaacctccttaaggtggagaaagaagaatgtgcagaaggtga

SEQ ID NO: 113781 - DNA, 252 bp, Glycine max
ccataatttaagatactatgatgagagcacggttcccattactgttgctgggacttgttttcctggcttcagtttctgtctcatttggcattgcttactgggaaaaagagaaccccaaacacaacaagtgtctccagagttgcaatagcgagagagactcgtacaggaaccaagcatgccacgctcgttgcaacctccttaaggtggagaaagaagaatgtgaagaaggtgaaattccacgaccacgaccac

SEQ ID NO: 113782 - DNA, 253 bp, Glycine max
ttaattattaacacttccttagttcaatatggggcagcccttcactctctctctttcttccctttgcttgctactcgtgtcgagtgcatgctttgctattagctccagcaagctcaacgagtgccaactcaacaacctcatcgcgttggaacccgaccaccgcgttgagtccgaagtggtttgattcaaacatggaactctcaacaccctgagctgcaatgcgccggtgtcactgtttccagactcaccctca

SEQ ID NO: 113783 - DNA, 254 bp, Glycine max
gaaagaatatagtcttcagctggacaaggatcatttattttgaaagacaagtttgtgtgacaatcttatagttctaagaagggtgcaagtgagagctttgctgcgatggcaacccgtagatattcttttggaagggctgatgaggccactcatccagactccatgagggccactttggctgaatttgcatccactttcatctttgtctttgctggagaaggctctagccttgctttggttaagatttaccagga

SEQ ID NO: 113784 - DNA, 254 bp, Glycine max
caaattcctgctgttgacaagttgtattctactaaggttaataagtttgcaaaaattatgaaccttagacaaagtgttgttggtgatcttaaacttcttactgatgggaagttgtatgagggtaagcatattcctgtatctaatattagtgcaggggaaaatcatgtagttcaaatacccctaatggcacaggaggaaattctgtcttctagtgcaagtgctttcagaactgcaatggtgagtaaaaatagcaa

SEQ ID NO: 113785 - DNA, 257 bp, Glycine max
gcattcagcgtggacaagcagatagcgaaaaatctacaaggagagaacgaaggggaagacaagggagccattgtgacagtgaaaggaggtctgagcgtgataaaaccacccacggacgagcagcaacaaagaccccaggaagaggaagaagaagaagaggatgagaagccacagtgcaagggtaaagacaaacactgccaacgcccccgaggaagccaaagcaaaagcagaagaaatggcattgacgagaccatatg

SEQ ID NO: 113786 - DNA, 258 bp, Glycine max; identical to SEQ ID NO: 113123

SEQ ID NO: 113787 - DNA, 256 bp, Glycine max
ctcactcttcactcaaaactcttctctttcattttcataattcccacacattatggctgagcttcactaccaaccacaacaccaataccccctccgctaccctaacgatccacaccaacaaacccgttcctccacccaccaggtcgtcaaggccgccaccgccgtcacagcgggcggctccctcttgatcctcgcctcgttgatcctcgccgccaccgtcattgccctcaccatcgtcaccccgctgttcgtcatt

SEQ ID NO: 113788 - DNA, 251 bp, Glycine max
gttcaatatcctagtacaccgtattaaagaatttaagatatactatgatgagagcgcggttcccattactgttgctgggagttgttttcctgggatcagtttctgtctcatttggcattgcgtattgggaaaagcagaaccccaatcacaacaagtgcctccgaagttgcaatagggagaaagactcctacaggaaccaagcatgccacgctcgttgcaacctccttaaggtggaggaagaagaagaatgc

SEQ ID NO: 113789 - DNA, 254 bp, Glycine max
tggcccctcccctctctcacatcaaatccatttcgccaaatttcacatcactcttcacaaacagaaaaatagtcctccgccgccggcaatcctaggtttccggtgacgatgctcccctacgcttccatcccggaggccgtggcggcgctgggccgcaacctcaccttcgcggagaccctctggttcaactactccgccgccaagtccgattacttcctctactgccacaacattctgttcctcttcctcgtctt

SEQ ID NO: 113790 - DNA, 251 bp, Glycine max
acattctctccattgtctttgaacactcatcaccatggccaagcttgttctttccctttgtttccttcttttcagtggctgcttcgctctgagagagcaggcacagcaaaatgagtgccagatccaaaagctgaatgccctcaaaccggataaccgtatagagtcggaaggtgggttcattgagacctggaaccctaacaacaagccattccagtgtgccggtgttgccctctctcgctgcacccttaacc

SEQ ID NO: 113791 - DNA, 250 bp, Glycine max; identical to SEQ ID NO: 110795

SEQ ID NO: 113792 - DNA, 253 bp, Glycine max
cttattaacactttccttagttcaatatggggaagcccttcttcactctctctctttcttccctttgcttgctactcttgtcgagtgcatgctttgctattacctccagcaagttcaacgagtgccaactcaacaacctcaacgcgttggaacccgaccaccgcgttgagtccgaaggtggtcttattgaaacatggaactctcaacaccctgagctgcaatgcgccggtgtcactgtttccaaacgcaccct

SEQ ID NO: 113793 - DNA, 253 bp, Glycine max
ctggggaagcccttcactctctctctttcttccctttgcttgctactcttgtcgagtgcatgctttgctattagctccagcaagctcaacgagtgccaactcaacaacctcaacgcgttggaacccgaccaccgcgttgagtccgaaggtggtttgattcaaacatggaactctcaacaccctgagctgaaatgcgccggtgtcactgtttccaaactcaccctcaaccgcaatggcctccacttgccatctt

SEQ ID NO: 113794 - DNA, 254 bp, Glycine max
cttaataaataatttaagatactatgatgagagcacggttcccattactgttgctgggacttgttttcctggcttcagtttctgtctcatttggcattgcttactgggaattagagaaccccaaacacaacaagtgtctccagagttgctatagcgagagagactcgtacaggaaccaagcatgccacgctcgttgcaacctccttaaggtggagaaagaagaatgtgaagaaggtgaaattccacgaccacga

SEQ ID NO: 113795 - DNA, 251 bp, Glycine max
cggctcgaggttcgtgccacactacaacctgaacgcgaacagcataatatacgcattgaatggacgggcattgatacaagtggtgaattgcaacggtgagagagtgtttgatggagagctgcaagagggacgggtgctgatcgtgccacaaaactttgtggtggctgcaagatcacagagtgacaacttcgagtatgtgtcattcaagaccaatgatacacccatgatcggcactcttgcaggggcaaact

SEQ ID NO: 113796 - DNA, 251 bp, Glycine max
gcaaaggattctacccgccgctcgatgggaattgcgcctcaaggcgtctcgtagggctaatccgcctcacgagggtcaccaacggcacgtgcctttggggggccgaggccccctactgctggtcggcaaacggccggcgggcgcacgcggcgcttctagcccggattctgacttagaggcgttcagtcataatccaacgcacggtagcttcgcgccactggcttttcgcccaagcgcgatgaccaattgtg

SEQ ID NO: 113797 - DNA, 253 bp, Glycine max
gaaaggatctcgaagacccaccaacgcacgaaagccgggatctttcagaaaatggattcctattcgaagggtgcataaccgcatggataagctcacactaacccgtcaatttgggatccaattcggttccttaggaggtatcgggaaggaattttggaatgtaataatatcgattcatacagatacagaagaaagggttctctattgattcaaacgctctacctacgagatagggatagagaaagaggaaaaa

SEQ ID NO: 113798 - DNA, 249 bp, Glycine max
ccttattaacacttccttagttcaatatggggaagcccttcactctctctctttcttccctttgcttgctactcttgtcgagtgcatgctttgctattagctccagcaagctcaacgagtgccaactcaacaacctcaacgcgttggaacccgaccaccgcgttgagtccgaaggtggtttgattcaaacatggaactctcaacaccctgagctgaaatgcgccggtatcactatgtccagactcaccc

SEQ ID NO: 113799 - DNA, 269 bp, Glycine max
ggacttcggctcgagcgactttcagatatactatgatgagagcgcggttcccattactgttgctgggagttgttttcctggcatcagtttctgtctcatttggcattgcgtattgggaaaagcagaaccccagtcacaacaagtgcctccgaagttgcaatagcgagaacgactcctacaggaaccaagcatgccacgctcgttgcaacctccttaaggtggaggacgaagaagaatgcgaagaaggtcaaattccacgaccacgacca

SEQ ID NO: 113800 - DNA, 252 bp, Glycine max
gagaggagtggcaattaaggatccatcaaccccacatggagttcgtcttctgatagaggactatccttatgccgctgatggactggcgatatgggctgcaattaagacatgggttcaagaatatgtgcccttgtactatgcaagagatgatgatgtcaaaaatgattctgaactccaacattggtggaaagaagctgtagagaaaggccatggtgatttgaaagacaagccatggtggcctaagttgcagac

SEQ ID NO: 113801 - DNA, 253 bp, Glycine max
cggctcgagggaagcccttcttcactctctctctttcttccctttgcttgctactcttgtcgagtgcatgctttgctattacctccagcaagttcaacgagtgccaactcaacaacctcaacgcgttggaacccgaccaccgcgttgagtccgaaggtggtcttattgaaacatggaactctcaacaccctgagctgcaatgcgccggtgtcactgtttccaaacgcaccctcaaccgcaacggcctccactt

SEQ ID NO: 113802 - DNA, 172 bp, Glycine max
tgaaggtgtggtgaggccatcttatatgaaataatatcaaaatatattttgtgtaataataaaactatggcctatgtatttaccaccctccgacccagcctatgttaatatctgagtggcgttgtacctttgaatcgccttaataaaatgtcagtcttcaagttttgtcttt

SEQ ID NO: 113803 - DNA, 250 bp, Glycine max
cacttattaacactttccttagttcaatatggggaagcccttcttcactctctctctttcttccctttgcttgctactcttgtcgagtgcatgctttgctattacctccagcaagttcaacgagtgccaactcaacaacctcaacgcgttggaacccgaccaccgcgttgagtccgaaggtggtcttattgaaacatggaactctcaacaccctgagctgcaatgcgccggtgtcactgtttccaaacgc

SEQ ID NO: 113804 - DNA, 246 bp, Glycine max
gaaagcgcaaaaattggagctgcttttgactgctggcattggttctgatcacgttgatctcaaagctgcagctgctgctggtttaactgtggcagaggtcacgggaagcaatgtcgtgtcggttgcggaggatgaactcatgagaatcctcattctaatgaggaatttcttgcctgggtaccatcaggctgttaagggtgaatggaatgttgctggcattgcacatagagcttatgatcttgaagg

SEQ ID NO: 113805 - DNA, 249 bp, Glycine max
cttccatagccccccaaaaatgaagagcaccatcttctttgctctctttctcttttgtgccttcaccacctcatacctaccttcagccatcgctgatttcgtgctcgataatgaaggtaaccctcttgaaaatggtggcacatattatatcttgtcagacataacagcatttggtggaataagagcagtcccaacgggctatgatagatgccctctcactgtggtgcaatctcgcaatgcgctcgagaa

SEQ ID NO: 113806 - DNA, 253 bp, Glycine max
ctagtataccttaataaataatttaagatactatgatgagagcacggttcccattactgttgctgggacttgttttcctggcttcagtttctgtctcatttggcattgcttactgggaaaaagagaaccccaaacacaacaagtgtctccagagttgcaatagcgagagagactcgtacaggaaccaagcatgccacgctcgttgcaacctccttaaggtggagaacagaagaatgtgaagaaggtgaaattc

SEQ ID NO: 113807 - DNA, 251 bp, Glycine max
cacttaattattaacacttccttagttcaatatggggaagcccttcactctctctctttcttccccttgcttgctactcttgtcgagtgcatgctttgctattagctccagcaagctcaacgagtgccaactcaacaacctcaacgcgttggaacccgaccaccgcgttgagtccgaagatggtttgattcaaacatggaactctcaacaccctgagctgaaatgcgccggtgtcactgtttccaaactca

SEQ ID NO: 113808 - DNA, 252 bp, Glycine max
ctcgagccgcaagagtgaccaacgaggctgttcagaaggctgctgctgcattgaagggttcagatcatcgccgtgcaacaaatgtcagtgccagactggattctcaacataagaagctcaaccttccaatcctgccaaccaccactattggatccttccctcagactgtagaactgaggagggtacgccgtgaattcgaggctaacaagatctccgaggaagagtatgtaccgtcaattaaggcggaaattc

SEQ ID NO: 113809 - DNA, 250 bp, Glycine max
ctcgagcgctcgagcggctcgaacggactcgagcggctcgaggaacgatgacagtggacaacgtcggaacgtcattcctgggacttgatctagccaataacggtatgtggtcctaataatggttttgaaatgtggaattctgagtggggcaatcaaacttcatggcatttgagtttccttattgacaatcccaaataggctacagtttttgatattctcttgggaatttctcaagattttgaaattgctg

SEQ ID NO: 113810 - DNA, 251 bp, Glycine max
  unsure (1)..(251): unsure at all n locations
cgcaaacaaagaagttgcaggatatactccctagcattatccaccaattaggaccagataacttggaaaacctgaagangcagggatggnattnnnccctattctcttcagagcaccctgaagagaataggggtgaatgccatccctgctattgaagaggtccatatctttaaggatgncgtagttatccagtttctaaatcccaaagttnnagcatccattgctgctaatacttgggttntcatggttca

SEQ ID NO: 113811 - DNA, 255 bp, Glycine max
gaagtgcaaaggtcccgagctgcattgtctgaagccgatgtatttgtacttccagcagcttatccatttgtcgtcaacgctacctcaaacctcaatttccttgcttttggtctcaatgctgagaacaaccagaggcacttccttgcaggcgagaaagacaatgtggtaaggcagatagaacgccacgtgccggcgcttgcgttccctgggtctgcacacgatgttgagcggctattaaagcagcagagggcatcc

SEQ ID NO: 113812 - DNA, 253 bp, Glycine max
ctcgagccgctcgagccgtgttggcctaaaagaacaacaacaggagcagcaacaggaagaacaacctttagtagtgcggaaatatagagccgaattgtctgaacaagatatatttgtaatcccagcaggttatccagttgtggtcaacgctacctcaaatctgaatttctttgctattggtattaatgccgagaacaaccagaggaacttcctcgcaggttcgcaagacaatgtgataagccagatacctagt

SEQ ID NO: 113813 - DNA, 244 bp, Glycine max
gctttgcagaatgcaatgactgtctgcttcagggcgaagaaccttgccactgctgcaaactttgcccggaggctacttgagacaaatcctaccaatgaaaaccaagctagggcagcaaggcaagtggtagcagctgctgaaaaaaacatgactgatgctacccagttgaactatgatttccggaacccatttgtaatttgcggtgcaacctacatgccaatctatcgaggacagaaggatgtct

SEQ ID NO: 113814 - DNA, 250 bp, Glycine max
attctctccattgtctttgaacactcatcaccatggccaagcttgttctttccctttgtgtccttctgttcagtggctgcgtcgctctgagagagcaggcacagcaaaatgagtgccagatccaaaagctgaatgccctcaaaccggataaccgtatagagtcggaaggtgggttcattgagacctggaaccctaacaacaagccattccagtgtgccggtgttgccctctctcgctgcacccttaaccg

SEQ ID NO: 113815 - DNA, 248 bp, Glycine max
tttttacacaaaacaaaagcattatatgctgatttatttattcatagatggagctcaagtcatagttaaatagcccgatactttcctcgctcactatgagtcattacagcatacattttagtactacatacttattcagtaaaaagccctcaaaattgaagacaaaggaccctttcttcccttgttcccctcctttttctgctgaggctgagcatccacaaagtaggactcactttggctctttatta

SEQ ID NO: 113816 - DNA, 248 bp, Glycine max
aaaggtttgcccgttctttgtacataaacccttgtgggttatatccgaagacatggaaagggatgtttttatgtcagcagcagaagcccaagcttacggaattgtagatcttgtagccgttgaataaaaaataagtggcaaggattattctaaaaaaatacaggatttgaaatttcatttttgaatcttcttactttcattttaatataatatctctattagttaatctattaatatctattagttaa

SEQ ID NO: 113817 - DNA, 252 bp, Glycine max
agcttggagaaccagctcgaccagatgcctaggagattctatcttgctgggaaccaagagcaagagtttctaaaatatcagcagcagcagcaaggaggttcccaaagccagaaaggaaagcaacaagaagaagaaaacgaaggaagcaacatattgagtggcttcgcccctgaattcttgaaagaagcgttcggcgtgaacatgcagatagtgagacacctacaaggtgagaacgaagaggaggatagtgga

SEQ ID NO: 113818 - DNA, 251 bp, Glycine max
cggtagcgtcacaaccgccaccagccttgacttcccagccctctcgtggctcagactcagtgctgagtttggatctctccgcaagaatgcaatgttcgtgccacactacaacctgaacgcgaacagcataatatacgcattgaatggacgggcattgatacaagtggtgaattgcaacggtgagagagtgtttgatggagagctgcaagagggacgggtgctgatcgtgccacaaaactttgtggtggctg

SEQ ID NO: 113819 - DNA, 251 bp, Glycine max
cgcttaattattaacacttccttagttcaatatggggaagcccttcactctctctctttcttccctttgcttgctactcttgccgagtgactgctttgctattagctctagcacgatcaacgagtgccaactcaacaacctcaacgcgttggcatccgactaacgcgttgcgtccgctcgtggtttgattcacacatggaactctcaacaccctgagctgaaatacgccggtgtcactgtttccaaactca

SEQ ID NO: 113820 - DNA, 253 bp, Glycine max
cttcagtctccagacgacgaaaggaagcagatcgtgacagtggaaggaggtctcagcgttatcagccccaagtggcaagaacaacaagatgaagatgaagatgaagacgaagatgatgaagatgaacaaattccctctcaacctcctcgccgaccaagccatggaaagcgtgaacaagacgaggacgaggacgaagatgaagataaacctcgtcctagtcgaccaagccaaggaaagcgtgaacaagaccagg

SEQ ID NO: 113821 - DNA, 250 bp, Glycine max
ctcgtagggctaatccgcctcacgagggtcaccaacggcacgtgcctttggggggccgaggcccccgactgctggtcggcaaacggacggcgggcgcacgcgtcgcttctagcccggattctgacttagaggcgttcaagcataatccaacgcacggtagcttcgcgccactggcttttcaaccaagcgcgatgaccaattgtgcgaatcaacggttcctctcgtactaggttgaattactattgcgaca

SEQ ID NO: 113822 - DNA, 253 bp, Glycine max
agcatttggtggaataagagcagccccaacgggaaatgaaagatgccctctcactgtggtgcaatctcgcaatgagctcgacaaagggattggaacaatcatctcgtccccatatcgaatccgttttatcgccgaaggccatcctttgagccttaagttcgattcatttgcagttataatgctgtgtgttggaattcctaccgagtggtctgttgtggaggatctaccagaaggacctgctgttaaaattggt

SEQ ID NO: 113823 - DNA, 253 bp, Glycine max
gtacaatgatgtcccagaatctactggattcttcaaatcaaatggcacgtatgtcactgagaaagggaagttcttcttgacctggtattctaacaaattgctgaatcatggtgatcaaatactagatgaagccaacaaagctttcctgggctgtaaagtcaaattagcaatcaaagtatctggcattcactggtggtacaaagttgaaaatcatgctgcagagcttactgctggatattacaaccttaatgat

SEQ ID NO: 113824 - DNA, 253 bp, Glycine max
cgaagatgatgaagatgaacaaattccctctcaccctcctcgccgaccaagccatggaaagcgtgaacaagacgaggacgaggacgaagatgaagataaacctcgtcctagtcgaccaagccaaggaaagcgtgaacaagaccaggaccaggacgaggacgaagatgaagatgaagatcaacctcgcaagagccgcgaatggagatcgaaaaagacacaacccagaagacctagacaagagaaccacgtgaaa

SEQ ID NO: 113825 - DNA, 250 bp, Glycine max
tcgggattgtcaagaacgatgactccgatttgtaccggaagcttgttattgcttccgcttggaggaaacagatgccgaagctcgcgctttcgcttggtctcgctcagcaaatgcctgatatgattgaagagttgatcagcaaagggcagcagcttgatgcggttcactttacctatgaagtgggtctggtggaaaagttccctcctgttcccttgttgaagtcttttctcaaggatgcaagaaagttgcg

SEQ ID NO: 113826 - DNA, 249 bp, Glycine max
cgaaacaagaggaagatgaggatgaggagcagcagcgagagagcgaagaaagtgaagattctgagttacgaagacataagaataagaacccttttctcttcggctctaacaggttcgaaactctcttcaaaaaccaatatggtcgcattcgcgtcctccagaggttcaaccaacgctccccacaacttcagaatctccgagactaccgcattttggagttcaactccaaacccaacacctccttcttcc

SEQ ID NO: 113827 - DNA, 245 bp, Glycine max
ctcagaggagagctgtggcttagagagccctttttgcatgtgctaccacacttttgtccttttgggctctagctagtgctggtagcagtaaataagaatgaataaaagaaacaaaggcttagatgccctttgttaagtgtagaataacgggtatagtaactatgtacccttgtgtaatgagtcactcaagtacctatgcgggaaaagcataaataaaagaagaaattccaataaatttctgtcca

SEQ ID NO: 113828 - DNA, 247 bp, Glycine max
aacgaggacatagctgagaaacttcagtctccagacgacgaaaggaagcagatcgtgacagtggaaggaggtctcagcgttatcagccccaagtggcaagaacaacaagatgaagatgaagatgaagacgaagatgatgaagatgaacaaattccctctcaccctcctcgccgaccaagccatggaaagcgtgaacaagacgaggacgaggacgaagatgaagataaacctcgtccagtcgaccaag

SEQ ID NO: 113829 - DNA, 251 bp, Glycine max
ataaataatggcataatctctaaagtccgaatcatctcattctcatcaagttattatcaaataattaattaacattcctcgtggaatcttgttgaagccatgtctacagctggtcaggtcatcaagtgcagagctgcggtggcatgggaagcagggtagccactatcgatagaaaccatagaagtggcaccaccccagaaaggtgaagtgcgtttgaagatcctcttcaactccctttgccgtacagatgt

SEQ ID NO: 113830 - DNA, 250 bp, Glycine max
ctccattggtccttaaacactcatcagtcatcaccatggccaagctagttttttccctttgttttctgcttttcagtggctgctgcttcgctttcagttccagagagcagcctcagcaaaacgagtgccagatccaaaaactcaatgccctcaaaccggataaccgtatagagtcagaaggagggctcattgagacatggaaccctaacaacaagccattccagtgtgccggtgttgcctctctcgctgc

SEQ ID NO: 113831 - DNA, 247 bp, Glycine max
ctccattggtccttaaacactcatcagtcatcaccatggccaagctagtgttttccctttgtgttctgcttttcagtggctgctgcttcgctttcagttccagagagcagcctcagcaaaacgagtgccagatccaaaaactcaatgccctcaaaccggataaccgtatagagtcagaaggagggctcattgagacatggaaccctaacaacaagccattccagtgtgccggtgttgcctctctcgc

SEQ ID NO: 113832 - DNA, 134 bp, Glycine max
gcgatgaaccagttgttgcccatcagtcttcttgacatgctcaacttcaataaccagcttgatcaaacccctagggtattttaccttgctgggaacccagatatagagtacccagagaccatgcacaacaacaa

SEQ ID NO: 113833 - DNA, 238 bp, Glycine max
ccttagttcaatatggggaagcccttcactctctctctttcttccctttgcttgctactcttgtcgagtgcatgctttgctattagctccagcaagctcaacgagtgccaactcaacaacctcaacgcgttggaacccgaccaccgcgttgagtccgaaggtggtttgattcatacatggaactctcaacaccctgagctgaaatgcgccggtgtcactgtttccaaactcacctcaa

SEQ ID NO: 113834 - DNA, 246 bp, Glycine max
atcctagtacaccgtattaaagaatttaagatatactatgatgagagcgcggttcccattactgttgctgggagttgttttcctggcatcagtttctgtctcatttggcattgcgtattgggaaaagcagaatcccagtcacaacaagtgcctccgaagttgcaatagcgagaaagactcctacaggaaccaagcatgccacgctcgttgcaacctccttaaggtggaggaagagaagaatgcgaa

SEQ ID NO: 113835 - DNA, 251 bp, Glycine max
attgtctttgaacactcatcaccatggccaagcttgttctttccctttgtttccttcttttcagtggctgcttcgctctgagagagcaggcacagcaaaatgagtgccagatccaaaagctgaatgccctcaaaccggataaccgtatagagtcggaaggtgggttcattgagacctggaaccctaacaacaagccattccagtgtgccggtgttgccctctctcgctgcacccttaacgcaatgcccttc

SEQ ID NO: 113836 - DNA, 246 bp, Glycine max
ggtccttaaacactcatcagtcatcaccatggccaagctagttttttccctttgttttctgcttttcagtggctgctgcttcgctttcagttccagagagcagcctcagcaaaacgagtgccagatccaaaaactcaatgccctcaaaccggataaccgtatagagtcagaaggagggctcattgagacatggaaccctaacaacaagccattccagtgtgccggtgttgccctctctcgctgcac

SEQ ID NO: 113837 - DNA, 247 bp, Glycine max
ctcgagccgaaataattaattaaattcctcgtggaatcttgttgaagccatgtctacagctggtcaggtcatcaagtgcagagctgcggtggcatgggaagcagggaagccactatcgatagaaaccatagaagtggcaccaccccagaaaggtgaagtgcgtttgaagatcctcttcaactccctttgccgtacagatgtttactggtgggatgctaagggccagactccgctgtttcctcgtatc

SEQ ID NO: 113838 - DNA, 250 bp, Glycine max
cacttccttagttcaatatggggaagcccttcactctctctctttcttccctttgcttgctactcttgtcgagtgcatgctttgctattagctccagcaagctcaacgagtgccaactcaacaacctcaacgcgttggaacccgaccaccgcgttgagtccgaaggtggtttgattcaaacatggaactctcaacaccctgagctgaaatgcgccggtgtcactgtttccaaactcacctcaaccgcaat

SEQ ID NO: 113839 - DNA, 248 bp, Glycine max
tgaacactcatcaccatggccaagcttgttctttccctttgtttccttcttttcagtggctgcttcgctctgagagagcaggcacagcaaaatgagtgccagatccaaaagctgaatgccctcaaaccggataaccgtatagagtcggaaggtgggttcattgagacctggaaccctaacaacaagccattccagtgtgccggtgttgccctctctcgctgcacccttaaccgcaagcccttcgtaga

SEQ ID NO: 113840 - DNA, 245 bp, Glycine max
gttcaatatcctagtacaccgtattaaagaatttaagatatactatgatgagagcgcggttcccattactgttgctgggagttgttttcctggcatcagtttctgtctcatttggcattgcgtattgggaaaagcagaaccccagtcacaacaagtgcctccgaagttgcaatagcgagaaagactcctacaggaaccaagcatgccacgctcgttgcaacctccttaaggtggagaagaagaag

SEQ ID NO: 113841 - DNA, 234 bp, Glycine max
ggctcgagaaaattcttccaccaagttataggtttccttgtgttgcactcttttctccctcttaggtatctcttctagttccagcatatcaactcatcgttccatattggaccttgacctaaccaagtttaccacacagaaacaggtgtcttcactgttccaactatggaagagtgagcatggacgtgtctaccataaccacgaagaagaggcaaagagacttagattttcaaa

SEQ ID NO: 113842 - DNA, 250 bp, Glycine max
gcgcttcaaggcgtctcgtagggctaatccgcctcacgagggtcaccaacggcacgtgcctttggggggccgaggccccctactgctggtcggcaaacggacggcgggcgcacgcgtcgcttctagcccggattctgacttagaggcgttcagtcataatccaacacacggtagcttcgcgccactggcttttcaaccaagcgcgatgaccaattgtgcgaatcaacggttcctctcgtactaggttgaa

SEQ ID NO: 113843 - DNA, 245 bp, Glycine max
tccgctgtttcctcgtatcttaggccacgaagcttcggggattgtggagagcgtgggcaagggtgtgacacatctgaaaccaggtgaccatgctctcccaatattcactggggagtgtggtgaatgcacctattgcaagtctgaagagagcaacctgtgtgagcttctcaggatcaacactgacagaggagtgatgctcagtgatggcaaaacaaggttctccaaaaatggacaactatttacca

SEQ ID NO: 113844 - DNA, 247 bp, Glycine max
caagatctccatatctgttcccaaaagcttgtttgtaagaatggcttccggtgaacagaaattccctcctcaacaacaacaaacacagcctgggaaggagcatgctatgactccagtaccccaattcactagccctgactacaagccttcaaataaacttcaagggaagattgcattagtcactgggggtgattctgggattggacgagcggtgtgtaacttgtttgccttagaagtgctaccgtgg

SEQ ID NO: 113845 - DNA, 248 bp, Glycine max
gcgaagaaggtcaaattccacgaccacgaccacaacacccggagagggaacgtcagcaacacggtgagaaggaggaagacgaaggtgagcagccacgtccattcccattcccacgcccacgccaacctcatcaagaggaagagcacgagcagaaggaggaacacgaatggcatcgcaaggaggaaaaacacggaggaaagggaagtgaagaggaacaagatgaacgtgaacacccacgcccacaccaa

SEQ ID NO: 113846 - DNA, 244 bp, Glycine max
caaggaccgcaaatccttgctcgatcggaaggccaagggtcgcgccgccgccgacaaggaaaagggtaccaagttcgctactgaggatgtcatgcagaccgtcgattaatttctctctttacttttttgccctctctgtactttcttatttgctgcttttgtttgtggtttggatctcaagggttccgctattgtgaggcctttctgttttgtttaatttaatcaaatgcttgacattattaaa

SEQ ID NO: 113847 - DNA, 246 bp, Glycine max
gcaaagcaatggctacttcaaagttgaaaacccagaatgtggttgtatctctctccctaaccttaaccttggtactggtgctactgaccagcaaggcaaactcagcggaaactgtttctttcagctggaacaagttcgtgccgaagcaaccaaacatgatcctccaaggagacgctattgtgacctcctcgggaaagttacaactcaataaggttgacgaaaacggcaccccaaaccctcgtctct

SEQ ID NO: 113848 - DNA, 247 bp, Glycine max
gttaattgtggagtattttggaaggatgtcttacgttgctcataacgttaaccagccccaagagaaagatttgttggagggaaatttttcctttgatattaaatctcgctctagattggaaaaagtttcctctacaaaagcacaatttgttagtggaaaaaccttcaaatatgatataattggtgctggttcacattcttcagaaaattttcctgaaaaggaagatcaagaaaaaccaaaaagattg

SEQ ID NO: 113849 - DNA, 247 bp, Glycine max
ggggaagcccttcactctctctctttcttccctttgcttgctactcttgtcgagtgcatgctttgctattagctccagcaagctcaacgagtgccaactcaacaacctcaacgcgttggaacccgaccaccgcgttgagtccgaaggtggtttgattcaaacatggaactctcaacaccctgagctgaaatgcgccggtgtcactgtttccaaactcaccctcaaccgcaatggctccacttgccat

SEQ ID NO: 113850 - DNA, 243 bp, Glycine max
atcaaagccagaaaggaaagcatcagcaagaagaagaaaacgaaggaggcagcatattgagtggcttcaccctggaattcttggaacatgcattcagcgtggacaagcagatagcgaaaaacctacaaggagagaacgaaggggaagacaagggagccattgtgacagtgaaaggaggtctgagcgtgataaaaccacccacggacgagcagcaacaaagaccccaggaagagaagaagaaga

SEQ ID NO: 113851 - DNA, 244 bp, Glycine max
agtataccttaataaataatttaagatactatgatgagagcacggttcccattactgttgctgggacttgttttcctggcttcagtttctgtctcatttggcattgcttactgggaaaaagagaaccccaaacacaacaagtgtctccagagttgcaatagcgagagagactcgtacaggaaccaagcatgccacgctcgttgcaacctccttaaggtggagaaagaagaatgtgaagaaggtg

SEQ ID NO: 113852 - DNA, 246 bp, Glycine max
gtaacctctctcttcaaccctaacttagggtttatgttctaaaacccttttcaggttgattggaggagataaaaatgctcgtgttgtttgaaacccctgcgggttttgccctgtttaaagtgctggatgaaggcaagctttctaaagttgaggacttgtggaagaacttttccagcgcagatactgctagacaggtggtcaagttgaaagcattttctaaatttgagaacacttagaagctctaga

SEQ ID NO: 113853 - DNA, 91 bp, Glycine max
gaccgagctagctagctagcaagcaagcacagagatggaggcaaagcgaggacatgccctcatgtgcttggcacgtgtttcactcttcctc

SEQ ID NO: 113854 - DNA, 247 bp, Glycine max
aaccactttcttttttcccgcagtcatgggcaaggtcaagatcggaatcaacggatttggaagaattggccgtttggtggccagggtggctctgcagagagacgatgttgaactcgttgccgttaacgatcctttcattaccaccgattacatgacatacatgtttaaatacgacagtgttcacgggcactggaagcatcacgatgtcaccgttaaggatgagaagacccttctctcggtgacaagc

SEQ ID NO: 113855 - DNA, 244 bp, Glycine max
cttaattattaacacttccttagttcaatatggggaagcccttcactctctctctttcttccctttgcttgctactcttgtcgagtgcatgctttgctattagctccagcaagctcaacgagtgccaactcaacaacctcaacgcgttggaacccgaccaccgcgttgagtccgaaggtggtttgattcaaacatggaactctcaacaccctgagctgaaatgcgccggtgtcatgtttccaaa

SEQ ID NO: 113856 - DNA, 244 bp, Glycine max
aagcaaagcaatggctacttcaaagttgaaaacccagaatgtggttgtatctctctccctaaccttaaccttggtactggtgctactgaccagcaaggcaaactcagcggaaactgtttctttcagctggaacaagttcgtgccgaagcaaccaaacatgatcctccaaggagacgctattgtgacctcctcgggaaagttacaactcaataaggttgacgaaaacggcacccaaaaccctcgt

SEQ ID NO: 113857 - DNA, 246 bp, Glycine max
caaatcataaaattcttccaccaagttatgggtttccttgtgttgcttcttttctccctcttaggtctctcttctagttccagcatatcaactcatcgttccatattggaccttgacctaaccaagtttaccacacagaaacaggtgtcttcactgttccaactatggaagagtgagcatggacgtgtctaccataaccacgaagaagaggcaaagagacttgagattttcaagaataacttgaac

SEQ ID NO: 113858 - DNA, 247 bp, Glycine max
gttcaatatcctagtataccttaataaataatttaagatactatgatgagagcacggttcccattactgttgctgggacttgttttcctggcttcagtttctgtctcatttggcattgcttactgggaaaaagagaaccccaaacacaacaagtgtctccagagttgcaatagcgagtgagactcgtacaggaaccaagcatgccactctcgttgcaacctccttaaggtggagaagaagaatgtga

SEQ ID NO: 113859 - DNA, 250 bp, Glycine max
cagcgttatcagccccaagtggcaagaacaacaagatgaagatgaagatgaagacgaagatgatgaagatgaacaaattccctctcaccctcctcgccgaccaagccatggaaagcgtgaacaagacgaggacgaggacgaagatgaagataaacctcgtcctagtcgaccaagccaaggaaagcgtgaacaagaccaggaccaggacgaggacgaagatgaagatgaagatcaacccgcaagagccgcg

SEQ ID NO: 113860 - DNA, 245 bp, Glycine max
gatctccatatctgttcccaaaagcttgtttgtaagaatggcttccggtgaacagaaattccctcctcaacaacaacaaacacagcctgggaaggagcatgctatgactccagtaccccaattcactagccctgactacaagccttcaaataaacttcaagggaagattgcattagtcactgggggtgattctgggattggacgagcggtgtgtaacttgtttgccttagaaggtgtaccgtggc

SEQ ID NO: 113861 - DNA, 246 bp, Glycine max
acggcctccacttgccatcttactcaccttatccccaaatgatcattgtcgttcaagggaagggagcaattggatttgcatttccgggatgtcctgagacgtttgagaagccacaacagcaatcaagcagaagaggctcaaggtcgcagcagcaactacaagacagtcaccagaagattcgtcacttcaatgaaggagacgtactagtgattcctcctggtgttccttactggactataacactgg

SEQ ID NO: 113862 - DNA, 130 bp, Glycine max
cggctcgagggagcacttggagttgcaattccaggatgtcctgagacgtttgaggagccacaagcacaatcaaacagaagaggctcaaggtcgcagaagcagcagctacaggacagtcaccagaagattc

SEQ ID NO: 113863 - DNA, 242 bp, Glycine max
cttcaaacttaattattaacacttccttagttcaatatggggaagcccttcactctctctctttcttccctttgcttgctactcttgtcgagtgcatgctttgctattagctccagcaagctcaacgagtgccaactcaacaacctcaacgcgttggaacccgaccaccgcgttgagtccgaaggtggtttgattcaaacatggaactctcaacaccctgagctgaaatgcgcggtgtcatg

SEQ ID NO: 113864 - DNA, 244 bp, Glycine max
cgctattgtgacctcctcgggaaagttacaactcaataaggttgacgaaaacggcaccccaaaaccctcgtctcttggtcgcgccctctactccacccccatccacatttgggacaaagaaaccggtagcgttgccagcttcgccgcttccttcaacttcaccttctatgcccctgacacaaaaaggcttgcagatgggcttgccttctttctcgcaccaattgacactaagcacaaacacatg

SEQ ID NO: 113865 - DNA, 242 bp, Glycine max
ctaaaacattaattgaacttccattccttaaattttaccaacgagctagttccgacacagacaaagcaatggcaaagactgagttagaggtgactgttgagagcaagaacaaagaactaaagcacctgggatttgtgaggattgctgctattcaaacttttgtgattgtgtcaaatctgtatgagtacgcaaagcagaattctgggcctttgagatccgctgttggaacggttagaacactg

SEQ ID NO: 113866 - DNA, 247 bp, Glycine max
ctccattggtccttaaacactcatcagtcatcaccatggccaagctagttttttccctttgttttctgcttttcagtggctgctgcttcgctttcagttccagagagcagcctcagcaaaacgagtgccagatccaaaaactcaatgccctcaaaccggataaccgtatagagtcagaaggagggctcattgagacatggaaccctaacaacaagccattccagtgtgccggtgtgccctctctcgc

SEQ ID NO: 113867 - DNA, 111 bp, Glycine max
agctcaattttcggctagaggcaaggttcccattactgttgctgggagttgttttcctggcatcagtttctgtctcatttggcattgcgtattgggaaaagcagaacccca

SEQ ID NO: 113868 - DNA, 247 bp, Glycine max; identical to SEQ ID NO: 112300

SEQ ID NO: 113869 - DNA, 243 bp, Glycine max
cttaattattaacacttccttagttcaatatggggaagcccttcactctctctctttcttccctttgcttgctactcttgtcgagtgcatgctttgctattagctccagcaagctcaacgagtgccaactcaacaacctcaacgcgttggaacccgaccaccgcgttgagtccgaaggtggtttgattcaaacatggaactctcaacaccctgagctgaaatgcgccggtgtcctgtttccaa

SEQ ID NO: 113870 - DNA, 247 bp, Glycine max
ggctcgaggtcttccatagccccccaaaaatgaagagcaccatcttctttgctctctttctcttttgtgccttcaccacctcatacctaccttcagccatcgctgatttcgtgctcgataatgaaggtaaccctcttgaaaatggtggcacatattatatcttgtcagacataacagcatttggtggaataagagcagccccaacgggaaatgaaagatgccctctcactgtggtgcaatctcgcaa

SEQ ID NO: 113871 - DNA, 244 bp, Glycine max
ctagttcaatatcctagtataccttaataaataatttaagatactatgatgagagcacggttcccattactgttgctgggacttgttttcctggcttcagtttctgtctcatttggcattgcttactgggaaaaagagaaccccaaacacaacaagtgtctccagagttgcaatagcgagagagactcgtacaggaaccaagcatgccacgctcgttgcaacctccttaaggggagaaagaaga

SEQ ID NO: 113872 - DNA, 242 bp, Glycine max
cttaaacactcatcagtcatcaccatggccaagctagttttttccctttgttttctgcttttcagtggctgctgcttcgctttcagttccagagagcagcctcagcaaaacgagtgccagatccaaaaactcaatgccctcaaaccggataaccgtatagagtcagaaggagggctcattgagacatggaaccctaacaacaagccattccagtgtgccggtgttgccctctctcgctgcac

SEQ ID NO: 113873 - DNA, 242 bp, Glycine max
tatggggaagcccttcactctctctctttcttccctttgcttgctactcttgtcgagtgcatgctttgctattagctccagcaagctcaacgagtgccaactcaacaacctcaacgcgttggaacccgaccaccgcgttgagtccgaaggtggtttgattcaaacatggaactctcaacaccctgagctgaaatgcgccggtgtcactgtttccaaactcaccctcaaccgaatggcctcca

SEQ ID NO: 113874 - DNA, 245 bp, Glycine max
tccaaacccaacaccctccttctccccaaccatgctgacgctgattacctcatcgttatccttaacgggactgccattctttccttggtgaacaacgacgacagagactcctacagacttcaatctggtgatgccctgagagtcccctcaggaaccacatactatgtggtcaaccctgacaacaacgaaaatctcagattaataacactcgccatacccgttaacaagcctggtagatttgagag

SEQ ID NO: 113875 - DNA, 243 bp, Glycine max
gaaaaaaggtgtcatcacccaagtaaagtaccaagggggctgtggaagcggttgggcgttttctgccacgggagccatagaagcagcacatgcaatagcaacaggagaccttgttagcctttctgaacaagaactcgtagactgtgtggaagaaagcgaaggttgttacaatggatggcactatcaatcgttcgaatgggttttagaacatggtgggattgccactgatgatgttatccttac

SEQ ID NO: 113876 - DNA, 245 bp, Glycine max
gttcaatatcctagtacaccgtattaaagaatttaagatatactatgatgagagcgcggttcccattactgttgctgggagttgttttcctggcatcagtttctgtctcatttggcattgcgtattgggaaaagcagaaccccagtcacaacaagtgcctccgaagttgcaatagcgagaaagactcctacaggaaccaagcatgccacgctcgttgcaacctccttaaggtggaggaagaagaa

SEQ ID NO: 113877 - DNA, 244 bp, Glycine max
cacctcctcagcagtcgtcagaaagactccataacccaaaaatgcctttcaagaggtacgttgagattggaagggttgctcagatcaactatggcaaagagtacgggcggctcgtgatcattgtcgatgtcattgaccagaatagggctcttgttgatgctcccgacatggtgaggtcccaagtgaacttcaagaggctctcgctcactgacatcaagattgatattaagaggttcccaagaag

SEQ ID NO: 113878 - DNA, 240 bp, Glycine max
acttccttagttcaatatggggaagcccttcactctctctctttcttccctttgcttgctactcttgtcgagtgcatgctttgctattagctccagcaagctcaacgagtgccaactcaacaacctcaacgcgttggaacccgaccaccgcgttgagtccgaaggtggtttgattcaaacatggaactctcaacaccctgagctgaaatgcgccggtgtcactgtttccaactcaccctc

SEQ ID NO: 113879 - DNA, 243 bp, Glycine max
agagcacccagagaccatgcaacaacagcagcagcagaagagtcatggtggacgcaagcaggggcaacaccagcagcaggaggaagaaggtggcagtgtgctcagtggcttcagcaaacatttcttagcacaatccttcaacaccaacgaggacacagctgagaaacttcggtctccagatgacgaaaggaagcagatcgtgacagtggagggaggcctcagcgttatcagcccaagtggcaa

SEQ ID NO: 113880 - DNA, 245 bp, Glycine max
gtcttccatagccccccaaaaatgaagagcaccatcttctttgctctctttctcttttgtgccttcaccacctcatacctaccttcagccatcgctgatttcgtgctcgataatgaaggtaaccctcttgaaaatggtggcacatattatatcttgtcagacataacagcatttggtggaataagagcagccccaacgggaaatgaaagatgccctctcactgtggtgcaatctcgcaatgagct

SEQ ID NO: 113881 - DNA, 245 bp, Glycine max
gttattatcaaataattaattaaattcctcgtggaatcttgttgaagccatgtctacagctgttcaggtcatcaagtgcagagctgcggtggcatgggaagcagggaagccactatcgatagaaaccatagaagtggcaccaccccagaaaggtgaagtgcgtttgaagatcctcttcaactccctttgccgtacagatgtttactggtgggatgctaagggccagactccgctgtttcctcgta

SEQ ID NO: 113882 - DNA, 247 bp, Glycine max
attctgatcgctccctgagagagctcgtcgcggcggttgcagaagaagattgcaagatgaagttcaacatcgcgaatcccaccactggatgccagaagaagctcgagatcgacgacgatctgaaactgcgagcattttgggacaagaggatctcacaggaggtcatcggagatgcactcggtgaggaatttaagggctatgtcttcaaaattaccggaggttgtgacaaacaaggatttccaatgaa

SEQ ID NO: 113883 - DNA, 244 bp, Glycine max
aggagcttcgcgaacgcactaaagagttacctgatgagtactttgtggtgctggtgggtgatatggtcaccgaggacgcgcttcccacttaccagaccatgatcaacaaccttgatggagtgaaagatgacagcggcacgagcccgagcccgtgggccgtgtggacccgggcctggaccgccgaggaaaacagacacggggatctgctcagaacttatttgtatctctctgtgagggttgacat

SEQ ID NO: 113884 - DNA, 241 bp, Glycine max
  unsure (1)..(241): unsure at all n locations
ttaagatactatgatgagagcacggttcccattactgttgctgggacttgttttcctggnctcagtttctgtctcatttggcattgcttactgggaaaaagagaaccccaaacacaacaagtgtctccagagttgcaatagcgagagagactcgtacaggaaccaagcatgccacgctcgttgcaacctccttaaggtggagaaagaagaatgtgaagaaggtgaaattccacgccacgac

SEQ ID NO: 113885 - DNA, 244 bp, Glycine max
ggtcgcagaagcagcagctacaggacagtcaccagaagattcgtcacttcaatgaaggagacgtactcgtgattcctcctggtgttccttactggacctataacactggcgatgaaccagttgttgccatcagtcttcttgacacctctaacttcaataaccagcttgatcaaacccctagggtattttaccttgctgggaacccagatatagagtacccagagaccatgcacaacaacaacag

SEQ ID NO: 113886 - DNA, 244 bp, Glycine max
gttaccatttgctcccagcactgagcttaaccgagcttcacaaagatgaatcgggaaaaattgatgaagatggccggttcggttagaactgggggaaagggcaccgtgagaagaaagaagaaggctgtccacaagacaacaaccacagatgacaaaaggcttcagagcaccctgaagagaataggggtgaatgccatcccggctattgaggaggtcaatatctttaaggatgacgtagttatcc

SEQ ID NO: 113887 - DNA, 242 bp, Glycine max
ggtggatgtacaacaatgaagacactcctgttgttgccgtttctattattgacaccaacagcttggagaaccagctcgaccagatgcctaggagattctatcttgctgggaaccaagagcaagagtttctaaaatatcagcagcagcagcaaggaggttcccaaagccagaaaggaaagcaacaagaagaagaaaacgaaggaagcaacatattgagtggcttcgcccctgattcttgaaag

SEQ ID NO: 113888 - DNA, 86 bp, Glycine max
gcgtatttggaaaagcagaaccccagtcacaacaagtgcctccgaagttgcaatagcgagaaagactcctacaggaaccaagcatg

SEQ ID NO: 113889 - DNA, 267 bp, Glycine max
cggctcgagcggctcgagggaatcagaaacactggtgtctgctcgcgttaaaggtcatcgaagagttgatcactctcctctttgagccgtaaaggttcaatacatcgagtgcttgttttcttagggacaagcattgtacttatgtatgattctgtgtaaccatgagtcttccacgttgtactaatgtgaagggccgtaatagaacacagaacaagttcgtttttctcaaaaatttcagaatgtaaagggcagccgccgattgtggat

SEQ ID NO: 113890 - DNA, 250 bp, Glycine max
ccaattctctgtgtagaagccatgtctaagggtcctggtctctactctgacattggcaagaaagccagagatctcctgttcaaggactaccacagtgaccagaagtttaccatcactacctactcacccactggagttgctataacatcctcggggaccaagaaaggtgacctttttgtggcggatgttaacacccagttgaagaacaagaacatcaccactgatatcaaagtggacaccggttccaatc

SEQ ID NO: 113891 - DNA, 92 bp, Glycine max
attccttcacttgcagaacttagttctctgttgcatcatcatcatcttcattagtgttagccctaaacttcaccttcaaccatgaccacagt

SEQ ID NO: 113892 - DNA, 253 bp, Glycine max
agcactatcaatcgttcgaatgggttttagaacatggtgggagtgacagtgatgatgattatcgttacagagctaaagagggtagatgcaaagccaataagatacaagacaaggttacaattgacggatatgaaactctaataatgtcagatgagagtacagaatcagagacagagcaagcgttcttaagcgccatccttgagcaagcaattagtggctccattgatgcataagattgtcatttatacaccgg

SEQ ID NO: 113893 - DNA, 255 bp, Glycine max
aaaatgagggatttgttgaggttcttgctgctcagcagagtcctgagaatcctaattggttccagggtactgcagatgctgtgaggcagtatttgtggctttttgaagagcacaatgttttggaattcttggttctggctggtgaccatttgtatcgaatggattacgagaaatttatccaagcgcatagggaaactgatgctgatatcactgtggctgcattgccaatggatgaagcgcgtgccactgcatttg

SEQ ID NO: 113894 - DNA, 257 bp, Glycine max
cggttggatctggttcaccatatgcttatggtgtattggatagcgggtaccggtatgacctgtcagttgaggaagctgctgaacttgctcgacgagcaatttatcatgcaacatttcgtgatggggccagtggtggagttgctagcgtttactatgtgggaccaaatggatggaagaaactgtctggtgatgatgttggggaacttcattaccattactacccagttaccccaagcaccgtggaacaagaaatggtt

SEQ ID NO: 113895 - DNA, 263 bp, Glycine max
agaagttctaaaatatcagcaagagcaaagaggtcatcaaagccagcaagggaagcatccgcaaggagaagacaacgaaggaagcagcatatttagtggcttcaacctggaattcttggaacatgcattcagcgtggacaagcagatagcgaaaaacctacaaggagagaacgaaggggcagacaagggagccattgtgacagtgagaggaggtctgagcgtgataaaaccacccacggaccagcagcaacaaagacaccagg

SEQ ID NO: 113896 - DNA, 107 bp, Glycine max
gtcacctcaagaagagaccaactgagttccgagttgacaaggtccttcaaccctttgatgaaaactaattcaactttaccaaagttgggcaagaagaggtcctcttc

SEQ ID NO: 113897 - DNA, 253 bp, Glycine max
cttattaacactttccttagttcaatatggggaagcccttcttcactctctctctttcttccctttgcttgctactcttgtcgagtgcatgctttgctattacctccagcaagttcaacgagtgccaactcaacaacctcaacgcgttggaacccgaccaccgcgttgagtccgaaggtggtcttattgaaacatggaactctcaacaccctgagctgcaatgcgccggtgtcactgtttccagacgcaccct

SEQ ID NO: 113898 - DNA, 247 bp, Glycine max
attgtctttgaacactcatcaccatcgccaagcttgttctgtccctttgtttccttcttttcagtggctgcttcggtctcaagagagcaggcacagcaaaatgagtgccagatccaaaagctgaatgccctcaaaccggataaccgtatagagtcggaaggtgggttcattgagacctggagccctaacaacaatccataccagtatgccggtgttgcgctctctcgctgtatcttagcacgcaatg

SEQ ID NO: 113899 - DNA, 249 bp, Glycine max
atcaataccaaaatgaccaagcttacaattctcctcatcgctcttgtcttcatcgcccacacctgctgcgactccaaatggcgacagcaccagcaagagagctgccgcgagcagctcatggggatcagcctcaacccctgcgagcacatcgtggatagagtccaagctagccgccgcggcgagcacggcagcgacgaagatcacattctcatcaggagcatgccgtgcagaatcgactacatcgggaag

SEQ ID NO: 113900 - DNA, 209 bp, Glycine max
gaagaaagagagagagtgaagaagggcttccctttgcttgctactcttgtcgagtgcatgctttgctattacctccagcaagttcaacgagtgccaactcaacaacctcaacgcgttggaacccgaccaccgcgttgagtccgaaggtggtcttattgaaacatgggactctcaacaccctgaggctgcaatgcgccggtgtcactgtt

SEQ ID NO: 113901 - DNA, 250 bp, Glycine max
cggtccccaggaaatctacatacaacaaggtaatggtatttttggcatgatattcccgggttgtcctagcacttatcaagagccgcaagaatctcagcaacgaggacgaagccagaggccccaagaccgtcaccaaaaggtacatcgcttcagagagggtgatttgatcgcagtgcctactggtgttgcatggtggatgtacaacaatgaagacactcctgttgttgccgtttctattattgacaccaac

SEQ ID NO: 113902 - DNA, 248 bp, Glycine max
cttcactctctctctttcttccctttgcttgctactcttgtcgagtgcatgctttgctattagctccagcaagctcaacgagtgccaactcaacaacctcaacgcgttggaacccgaccaccgcgttgagtccgaaggtggtttgattcaaacatggaactctcaacaccctgagctgaaatgcgccggtgtcactgtttccaaactcaccctcaaccgcaatggcctccacttgccatcttactcac

SEQ ID NO: 113903 - DNA, 251 bp, Glycine max
cgagaatgacctctgtggattctgctcttaagtccgcaacagaaagggccctttgtaagcctggtgatgcagttgttgccctgcatcgtattggagctgcctctgtcataaagatctgcatagtcaaataatgcatgctcaactcaacgtgccgccaactaatgcagggttatgttttgccttttatttctttctttctgctgtttatccgtatcataaaatggaggatttagttactagctgtagatcga

SEQ ID NO: 113904 - DNA, 252 bp, Glycine max
gcatggctaagcttgttctttccctttgttttctgcttttcagtggctgctgcttcgctttcagtttcagagagcagccacagcaaaacgagtgccagatccaacgcctcaatgccctcaaaccggataaccgtatagagtcagaaggtggcttcattgagacatggaaccctaacaacaagccattccagtgtgccggtgttgccctctctcgctgcaccctcaaccgcaacgcccttcgcagaccttcct

SEQ ID NO: 113905 - DNA, 255 bp, Glycine max
ctggcaccccactgtacatcgttaacagagatgagaatgataagctcttccttgccatgctccatatacctgtctctgtctctactcctggaaaatttgaggaatttttcgggcctggaggacgagacccagaatcggtcctctcagcattcagctggaatgtgctgcaagctgcgctcgaaaccccagaaggaaagttagaaaagcttgttgatcaacagaacgagggaagtattttcgcaataagcagagaac

SEQ ID NO: 113906 - DNA, 260 bp, Glycine max
ctcgagccgattcggctcagtcctggggagcgttggtgtaggccggactgcatccaaaccggtagtggtattgttgagatgatattcccgggttgtcctagcacatttgaagagactcaacaaaaaggacaaagcagcaggccccaagaccgtcaccagaagatctatcacttcagagagggtgatttgattgcagtgccaaccggttttgcatactggatgtacaacaatgaagacactcctgttgttgccgtttctct

SEQ ID NO: 113907 - DNA, 257 bp, Glycine max
caatatcctagtataccttaataaataatttaagatactatgatgagagcacggttcccattactgttgctgggacttgttttcctgtcttcagtgtctgtctcatttggcataccgagtttgaagagtcagttggacaggcattgtttgatctggaaaataccaaccaggagcttaaaagtgatctgaaggatttatacatagactcagctgtgcaagttgatgtttctgggaacgcaatgctgttgttattcatg

SEQ ID NO: 113908 - DNA, 266 bp, Glycine max
actccagttgccattgctgcaacagctatctcatattgtcccgaagaatggaatgatattgcgggctgatacgcttccattctttgcttaacgatgaatatgtcattggttcgacctctcttgacaaagcgagggttcagcacaagctctgagaaccttgttgcttctgtgctctttgagagactgacagtggtcattcccacaattgaccctgtagtctatgcatttcaagaattctcgtctcgatggcgacaacaatatcaacg

SEQ ID NO: 113909 - DNA, 244 bp, Glycine max
attggtccttaaacactcatcagtcatcaccatggccaagctagttttttccctttgctttctgcttttcagtggctgctgcttcgctttcagttccagagagcagcctcagcaaaacgagtgccagatccaaaaactcaatgccctcaaaccggataaccgtatagagtcagaaggagggctcattcagacatggaaccctaacaacaagccattccagtgtgccggtgttgccctctctcgg

SEQ ID NO: 113910 - DNA, 249 bp, Glycine max
taaaattcttccaccaagttatgggtttccttgtgttgcttcttttctccctcttaggtctctcttctagttccagcatatcaactcatcgttccatattggaccttgacctaaccaagtttaccacacagaacacaggtgtcttcactgttccaactatggaagagtgagcatggacgtgtctaccataaccacgtagaagaggcatagagacttgagatcttcaagaataacttgaactatatcagg

SEQ ID NO: 113911 - DNA, 249 bp, Glycine max
cccaactaacaataattccttcacttgcagaacttagttctctgttgcatcatcatcatcttcattagtgttagccctaaacttcaccttcaaccatgaccacagtgccaccacacagtgtccaagtgcacacaacaacacaccgctacgatgccggcgtcgtcccgccggctcgttttgaggcgccgcgttacgcagccggcatcaaggcgccctcttccatttaccattccgagagaggtccgacga

SEQ ID NO: 113912 - DNA, 246 bp, Glycine max
taaagattaaagaggaggtgtgctgagacaggtagggtttcgagttacagccgcaccttgattcagagcagagcgaccttgaagagctatggctgtcggaaagaataagaggatttccaagggaaagaagggtggcaagaagaaagccgctgatccctttgccaagaaggactggtacgatatcaaggccccttccgtctttcaggtcaagaatggtggcaaaaccctcgtctctcgtacccaggg

SEQ ID NO: 113913 - DNA, 250 bp, Glycine max
gtacaccgtattaaagaatttaagatatactatgatgagagcgcggttcccattactgttgctgggagttgttttcctggcatcagtttctgtctcatttggcattgcgtattgggaaaagcagaaccccagtcacaacaagtgcctccgaagttgcaatagcgagaaagactcctacaggaaccaagcatgccacgctcgttgcaacctccttaaggtggaggaagaagaagaatgcgaagaaggtcaa

SEQ ID NO: 113914 - DNA, 246 bp, Glycine max
cttacctcaatctttctcatgggaaagtttgccctagccaatatcctcttggtccttctcttgaacttgagcactttgctcaatgttcttgcttgtccctattgcccttacccttctcccaagcctccaaaaaagcctcccgttgtgaaaccaccggttcacaaaccaccaaaaccatgtccaccacccaagtcatctccaaaaccaccccatgtacaccctccctatgttccaaaacctcctcac

SEQ ID NO: 113915 - DNA, 249 bp, Glycine max
cgacgacagagactcctacagacttcaatctggtgatgccctgagagtcccctcaggaaccacatactatgtggtcaaccctgacaacaacgaaaatctcagattaataacactcgccatacccgttaacaagcctggtagatttgagaacttcttcctatctagcactgaagctcaacaatcatacttgcaaggattcagcaggaacattttagaggcctcctacgataccaaattcgaggagataaa

SEQ ID NO: 113916 - DNA, 248 bp, Glycine max
ctcgagccgttctcttcctcccttggagaaaaagaagagccaccgctgcgacgccgttcgcgcatttttgaggtgccgctgtcatgtttgggcgtggtggaccaaggaggagtgataactccaaatattatgatattctcgggatttccaaaaatgccagtgaagatgagatcaagaaggcctatagaaaggcggctatgaagaaccatccagataagggaggagatcctgaaaagtttaaggagtta

SEQ ID NO: 113917 - DNA, 252 bp, Glycine max
caacttctgctcttccaactcctacaacgcttttctctgcactcatgggcaaggtcaagatcggaatcaacggatttggaagaattggccgtttggttgccagagtcgctctgcaaagagacgatgttgaactcgttgccgttaacgaccctttcattaccaccgattacatgacatacatgtttaaatacgacagtgttcacggacactggaagcatcacgatgtcaccgttaaggacgagaagacccttc

SEQ ID NO: 113918 - DNA, 254 bp, Glycine max
ggaaaggttaactaagaagcaatacttcaatggccacccttgttgttcataaccaaacttcttctgctcaagatgctgaggctctccaacaggctttcaaaggatggggggctgatgacaaggccattatagcaatactgggtcacagaaatgttcatcagaggcaagagatcagacaagcttatgaggagatttaccaagaggatctcatcaaacgccttgagtccgagatctctggtgactttgagagagct

SEQ ID NO: 113919 - DNA, 254 bp, Glycine max; identical to SEQ ID NO: 112200

SEQ ID NO: 113920 - DNA, 251 bp, Glycine max
attgataacacttgtagttgcgcagagttggttctttctttccccaatctgtgagtgctactattgaatcgattggcttgacattgcgagcgcgatggctcaggacgccaacttcgaagatgactagctcgccaatatgaccaccgacgacgtcgtcagagcttctcgtcttctcgacaacgagattcgcatcctcaaagaagagttgcataggaccaatttggagttcgaatcgtacaaggacaagatca

SEQ ID NO: 113921 - DNA, 245 bp, Glycine max
gtcaattgttttctttttctctctttcctgaattgttgcaagagagagcatgccgttgcatgagctgagccttggtatgagggcgttccaaccagggaacttcgtgtacgatgctgaggatataccatttgggacgctgtggtggttcttatatgctggaatctcttgtatgctcgttctatgcgctgggatcatgtctggtctcacccttggattaatgtctctgggtctcgttgatcttgaga

SEQ ID NO: 113922 - DNA, 242 bp, Glycine max
ctccattgtctttgaacactcatcaccatggccaagcttgttctttccctttgtttccttcttttcagtggctgcatcgctctgagagagcaggcacagcaaaatgtctgccagatccaaaagctgaatgcgctcaaaccggatgaccggatagattcggtacgtcggatcattgagacctggaaccctaacttcaagtcattccagtgtgccggtgttgccctctctccctgcacccttaa

SEQ ID NO: 113923 - DNA, 247 bp, Glycine max
gaaaaacccaacgagcccttttgccatttcctgcaaaacccgtttctcttcttcaattcgcgcgtccatggcttcatcctccatcacagacgccgaaacaaagccgttttctgtgctcttcgtgtgcctcggcaacatctgcagaagccccgctgctgaaggagtcttcactgacttagtcaacaaaagggacctcaattcgaagttcaaaatcgactctgctggcaccatcaattagcacgaggga

SEQ ID NO: 113924 - DNA, 245 bp, Glycine max
attctctccattggtccttaaacactcatcagtcatcaccatggccaagctagttttttccctttgttttctgcttttcagtggctgctgcttcgctttcagttccagagagcagcctcagcaaaacgagtgccagatccaaaaactcaatgccctcaaaccggataaccgtatagagtcagaaggagggctcattgagacatggaaccctaacaacaagccattccagtgtgccggtgttgccc

SEQ ID NO: 113925 - DNA, 249 bp, Glycine max
tgcagaccgagctagctagctagcaagcaagcacagagatggaggcaaagcgaggccatgccctcatgtgcttggcacgtgtttcactcttcctctgcgctctaaccctatccgctgctcacggaagcaccacggttcaagacatcgcgagaaagttgaaactcggggacaacgagcttctgcgcacggagaagaagttcaaggttttcatggagaattacgggaggagctactccacagaggaggagt

SEQ ID NO: 113926 - DNA, 253 bp, Glycine max
cttattaacactttccttagttcaatattggggaagcccttcttcactctctctctttcttccctttgcttgctactcttgtcgagtgcatgctttgctattacctccagcaagttcaacgagtgccaactcaacaacctcaacgcgttggaacccgaccaccgcgttgagtccgaaggtggtcttattgaaacatggaactctcaacaccctgagctgcaatgcgccggtgtcactgtttccaaacgcaccc

SEQ ID NO: 113927 - DNA, 253 bp, Glycine max
tctctccattggtccttaaacactcatcagtcatcaccatggccaagctagttttttccctttgttttctgctttgcagtggctgctgcttcgctttcagttccagagagcagcctcagccaaacgagtgccagatccaaaaactcaatgccctcaaaccggataaccgtatagagtcagaaggagggctcattgagacatggaaccctaacaacaagccattccagtgtgcctgtgttgccctctctcgctg

SEQ ID NO: 113928 - DNA, 250 bp, Glycine max
aaagcccaaggtggtttctggtgatgatgatttaccaaagagagatgatattggtgaaaggcgaaggacacacgagcttcgggtgttggctggtgctggaattaggactgaggatgatgatggtgatgatcagatgactgatctcggacctaatgaggttaccgatgaagaggatgacggtggaagtggggactcagaaaatgaattttacaaacaagtggaacaactgcgagctgcaaaacttgcagca

SEQ ID NO: 113929 - DNA, 240 bp, Glycine max
gtcaattttctattgaccttctcggtggaggaattttagtggacaaaactggagattggatcacacttattcgaaattctccaattagtaacttgttgagagttgctgcttggaagaaaggctgtttaatggttaagattgtgatgtctgggaatgcagcagtcaaaaggagtgattgggcctcattggtacaagtgtgtttaacaaacagcaacagtacagagcattttgatgcatgta

SEQ ID NO: 113930 - DNA, 244 bp, Glycine max
cccaaagccagaaaggaaagcaacaagaagaagaaaacgaaggacgcaacatattgagtggcttcgcccctgaattcttgaaagaagcgttcggcgtgaacatgcagatagtgagaaacctacaaggtgagaacgaagaggaggatagtggagccattgtgacagtgaaaggaggtctaagagtcacagctccagccatgaggaagccacagcaagaagaagatgatgatgatgacgcagagca

SEQ ID NO: 113931 - DNA, 239 bp, Glycine max
attctctccattgtctttgaacactcatcaccatggccaagcttgttctttccctttgtttccttcttttcagtggctgcttcgctctgagagagcaggcacagcaaaatgagtgccagatccaaaagctgaatgccctcaaaccggataaccgtatagagtcggaaggtaggttcattgagacctggaaccctaacaacaagccattccagtgtgccggtgttgctctctctcgctgc

SEQ ID NO: 113932 - DNA, 242 bp, Glycine max
cagagaagtaatggcgaacatagacatcgaagggatcttgaagcagcagcagccttatgatgggcgcgttccgaagacgaagatagtgtgtactttgggccctgcttctcgatccgtagaaatgaccgagaagcttctgagggcagggatgaacgttgctcgtttcaatttctctcatggcacccacgactatcaccaggaaaccctcaacaatctcaagactgccatgcacaacactggca

SEQ ID NO: 113933 - DNA, 244 bp, Glycine max
gtctttgaacactcatcaccatggccaagcttgttctttccctttgtctccttcttttcagtggctgcttcgctctgagagagcaggcacagcaaaatgagtgccagatccaaaagctgaatgccctcaaaccggataaccgtatagagtcggaaggtgggttcattgagacctggaaccctaacaacaagccattccagtgtgccggtggttgcctctctcgctgcacccttaagcgcaatgc

SEQ ID NO: 113934 - DNA, 249 bp, Glycine max
acctagtataccttaataaataatttaagatactatgatgagagcacggttcccattactgttgctgggacttgttttcctggcttcagtttctgtctcatttggcattgcttactgggaaaaagagaaccccaaacacaacaagtgtctccagagttgcaatagcgagagagactcgtacaggaaccaagcatgctacgctcgttgcaagctccttaaggtggagaaagaagactgtgaagtaggtgc

SEQ ID NO: 113935 - DNA, 253 bp, Glycine max
agtggacgcaagcaggggcaacaccagcagcaggaggaagaaggtggcagtgtgctcagtggcttcagcaaacatttcttagcacaatccttcaacaccaacgaggacactgctgagaaacttcggtctccagatgacgaaaggcagcagatcgtgacagtggagggcagcctcagcgttatcagccccaagtggcacgaacaagaagacgaagacgacgatgatgacgacgcatatgaacaaactccctctt

SEQ ID NO: 113936 - DNA, 219 bp, Glycine max
gtataccttaataaataatttaagatactatgatgagtgcacggttcccattactgttgctgggacttgctttcctggcttcagtttctgtctcatttggcattgcttactgggaaatcgagaaccccaaacactacaagtgtctccagagttgcaatagcgagagagactcgtacaggaaccaagcatgtcacgctcgttgcaacctccttaaggtgg

SEQ ID NO: 113937 - DNA, 239 bp, Glycine max
gcacctttaaacgccgaaggttcatccaatctccgaaggccttcaccggattgcaaccatgtcgaggagaaaggttagagagccaaaggaggaaaacgtgactctgggcccagctgttagagatggtgaacatgtttttggagtcgctcgcatctttgcctccttcaatgacaccttcattcatgtcactgatctgtctgggagggaaacacttgtccgcatcactggcgggatgaagg

SEQ ID NO: 113938 - DNA, 241 bp, Glycine max
ctaagaaagtcttccatagccccccaaaaatgaagagcaccatcttctttgctctctttctcttttgtgccttcaccacctcatacctaccttcagccatcgctgatttcgtgctcgataatgaaggtaaccctcttgaaaatggtggcacatattatatcttgtcagacataacagcatttggtggaataagagcagccccaacgggacatgaaagatgccctctcactgtggtgcaatc

SEQ ID NO: 113939 - DNA, 240 bp, Glycine max
gaggaacaaatgtgaagattgctacagctccttccaatgtagtggtgcttacatctgaaaattttaatgaggttgtcttagatgaaaccaaagatgtcttggttgagttttatgcaccctggtgtggacattgcaaaagtcttgctcctacttacgagaaagttgccacagcatttaaattggaggaagatgtagtaattgcaaatctggatgctgataaatataaggatctggctgaaa

SEQ ID NO: 113940 - DNA, 242 bp, Glycine max
cactgttgcatcatcatcttcattgcaaaaccctaaacttcaccttcaaccatgaccacacaagtaccaccacacagtgtccaagtccacacaacaacacaccgctacgaagctggcgtcgtcccccccggagcccgtttcgaaccgccgcgttatgaagccggcgtcaaagcgccctccatttaccattccgagagaggtccaacgacttcccaggtcctcgccgtcctcgccggcctccc

SEQ ID NO: 113941 - DNA, 241 bp, Glycine max
agcaaagcaatggctacttcaaagttgaaaacccagaatgtggttgtatctctctccctaaccttaaccttggtactggtgctactgaccagcaaggcaaactcagcggaaactgtttctttcagctggaacaagttcgtgccgaagcaaccaaacatgatcctccaaggagacgctattgtgacctcctcgggaaagttacaactcaataaggttgacgaaaacggcaccccaaaaccct

SEQ ID NO: 113942 - DNA, 242 bp, Glycine max
tccattattaacacttccttagttcaatatggggaagcccttcactctctctctttcttccctttgcttgctactcttgtcgagtgcatgctttgctattagctccagcaagctcgacgagtgccaactcaacaccctcaacgcgttggaacccgaccaccgcgttgagtccgaaggtggtttgattcaaacatggaactctcaacaccctgagctgaaatgcgccggtgtcactgtttcca

SEQ ID NO: 113943 - DNA, 245 bp, Glycine max
ctcactgaaagcactcagtagggtttgcggtttcagagtttgtgacgcacgcatccatggccaccaccaccaacgccgccgcagccccgccgcgccagctctcccagaaggaagccgacatccagatgatgttagccgccgacgtccacctcggcaccaaaaactgcgacttccaaatggaacgttacatcttcaagcgccgcaacgacgggatttacattattaaccttgggaagacatgggag

SEQ ID NO: 113944 - DNA, 246 bp, Glycine max
ctcgagccgaatcggctcgagttcatatcctagtatagcttgatacctactttaagatacgctgatgagcgctcggttcccattactgttgctgggacttgtcttgctggcttcagttactggctcaattggcattgcttactgggaaaactagaatcccaaacacaacaagtgtctccagagttgcaatagcgatcagagagtcgtacaggaaccaagcatgccacgctcgttgcaatctcctta

SEQ ID NO: 113945 - DNA, 226 bp, Glycine max
gtgagggggaagcccttcttcactctctctctttcttccctttgcttgctactcttgtcgagtgtatgctgtgctattacctccagcaagttcaacgagtggcaactcaacaacctcaacgcgttggaacccgagcaccgcgttgaatcctaaggtggtcttattgaaacatggaactctcgagaccctgagctagaatgcggcggtgtcacggtatccaaacgca

SEQ ID NO: 113946 - DNA, 243 bp, Glycine max
cagttgttgccatcagtcttcttgacacctccaacttcaacaatcagcttgatcaaaaccccagagtattttaccttgctgggaacccagatatagagcacccagagaccatgcaacaacagcagcagcagaagagtcatggtggacgcaagcaggggcaacaccagcagccggaggaaggaggtggcagtgtgctcagtggcttcagcaaacatttcttagcacaatccgtcaacaccaacg

SEQ ID NO: 113947 - DNA, 245 bp, Glycine max
ctttccttagttcaatatggggaagcccttcttcactctcactctttcttccctttgcttgctactcttgtcgagtgcatgctttgctattacctccagcaagttcaacgagtgccaactcaacaacctcaacgcgttggaacccgaccaccgcgttgagtccgaaggtggtcttattgacccatggaactctcaacaccctgagctgcaatgcgccggtgtcactgtttccatacgcagcctca

SEQ ID NO: 113948 - DNA, 243 bp, Glycine max
cacaccaccccttcttccttttcatcaggtttattccttttcttttggttcaattttgctgaatggagagtgcaagaatcagccaatggttaaatcttctagtttgtgtactgctattgcttaaggcagaaggatctcttgttccattgactttggtgaagaatgcagaatcacaaggcgctgtttgtttggatggaagccccccagcataccactttgacaacggatttgaagaagggatta

SEQ ID NO: 113949 - DNA, 239 bp, Glycine max
ctagtacaccgtattaaagaatttaagatatactatgatgagagcgcggttcccattactgttgctgggagttgttttcctggcatcagtttctgtctcatttggcattgcgtattgggaaaagcagaaccccagtcagaacaagtgcctccgaagttgcaatagcgagatagactcctacaggaaccaagcatgccacgctcgttgcaacctccttaaggtggaggatgaagaagcat

SEQ ID NO: 113950 - DNA, 242 bp, Glycine max
ccgggtatggcgagtgttattaatctggtagatttgagagtttcttcctatctagcactgaagctcaacaatcctacttgcaaggattcagcaggaacattttagaggcctcctacgataccaaattcgaggagataaacaaggttctgtttagtagagaggaagggcagcagcaaggggagcagaggctgcaagagagcgtgattgtggaaatctcgaaggaacagattcgggcactgagc

SEQ ID NO: 113951 - DNA, 240 bp, Glycine max
aaaattcttccaccaagttatgggtcgacttgtgttgcttcttttctccctcttaggtctctcttctagttccagcatatcaactcatcgttccatattggaccttgacctaaccaagtttaccacacagaaacaggtgccttcactgttccaactatggaagagtgagcatggacgtgtctaccataaccacgaagaagaggcaaagagacttgagattttcaagaataacttgaacta

SEQ ID NO: 113952 - DNA, 243 bp, Glycine max
catttatcaactcactcatcaatctcgtttgttctcactaactattacttcatcatgtcgtcgagcacagttggtcaagtcatcaaatgcaaagctgcggtttcatgggaggcagggaagccacttgtgattgaagaagtagaggtggcaccaccacaagctggtgaagtgcgtttgaagatcctctacacctctctttgccacactgatgtttacttctgggaagccaagggccaaactcca

SEQ ID NO: 113953 - DNA, 243 bp, Glycine max
ggaattcttggaacatgcattcagcgtggacaagcagatagcgaaaaacctacaaggagagaacgaaggggaagacaagggagccattgtgacagtgaaaggaggtctgagcgtgataaaaccacccacggacgagcagcaacaaagaccccaggaagaggaagaagaagaagaggatgagaagccacagtgcaagggtaaagacaaacactgccaacgcccccgaggaagccaaagcaaaag

SEQ ID NO: 113954 - DNA, 244 bp, Glycine max
gtcgcagaagcagcagctacaggacagtcaccagaagattcgtcacttcaatgaaggagacgtactcgtgattcctcctggtgttccttactggacctataacactggcgatgaaccagttgttgccatcagtcttcttgacacctctaacttcaataaccagcttgatcaaacccctagggtattttaccttgctgggaacccagatatagagtacccagagaccatgcaacaacaacaacag

SEQ ID NO: 113955 - DNA, 249 bp, Glycine max
cagttgttgccatcagtcttcttgacacctccaacttcaacaatcagcttgatcaaaaccccagagtattttaccttgctgggaacccagatatagagcacccagagaccatgcaacaacagcagcagcagaagagtcatggtggacgcaagcaggggcaacaccagcagcaggaggaagaaggtggcagtgtgctcagtggcttcagcaaacatttcttagcacaatccttcaacaccaacgaggaca

SEQ ID NO: 113956 - DNA, 244 bp, Glycine max
aaaggattctacccgccgctcgatgggaattgcgcttcaaggcgtctcgtagggctaatccgcctcacgagggtcaccaacggcacgtgcctttggggggccgaggcccctactgctggtcggcaaacggacggcgggcgcacgcgtcgcttctagcccggattctgacttagaggcgttcagtcataatccaacgcacggtagcttcgcgccgctggcttttcaaccaagcgcgatgaccaat

SEQ ID NO: 113957 - DNA, 241 bp, Glycine max
ctagtataccttaatacataatttaagatactatgatgagagcacggttcccattactgttgctgggacttgttttcctggcttcagtttctgtctcatttggcattgcttactgggaaaaagagaaccccaaacacaacaagtgtctccagagttgcaatagcgagagagactcgtacaggaaccaagcatgcgacgctcgttgcaacctccttaaggtgcccccagcagaatgtgaaga

SEQ ID NO: 113958 - DNA, 241 bp, Glycine max
cagaagagcacgagcagagagaggaacaggaatggcctcgcaaggaggaaaaacgcggagaaaagggaagtgaagaggaagatgaggatgaggatgaggaacaagatgaacgtcaattcccattcccacgcccacctcatcagaaggaagagcgaaagcaagaggaagatgaggatgaggagcagcagcgagagagcgaagaaagtgaagattctgagttacgaagacataagaataagaa

SEQ ID NO: 113959 - DNA, 240 bp, Glycine max
cttaattattaacacttccttagttcaatatggggaagcccgtcactctctctctttcttccctttgcttgctactcttgtcgagtgcatgctttgctattagctccagcaagctcaacgagtgccaactcaacaacctcaacgcgttggaacccgaccaccgcgttgagtccgaagtggtttgcttcaaacatggaactctcaacaccctgagctgaaatgcgccggtgtcactgtttc

SEQ ID NO: 113960 - DNA, 238 bp, Glycine max
gttcaatatcctagtataccttaataaataatttaagatactatgatgagagcacggttcccattactgttgctgtgacttgttatcctggcttcagtttctgactcattagaccttgcttactgggaataagagaatcccaaatccaagaaatgtctccagagttgcactagcgtgatagactcgttcaggaaccaagcatgccacgctcgttgcaacctccttaaggtggagaaat

SEQ ID NO: 113961 - DNA, 88 bp, Glycine max
gtcactgtttccaaacgcaccctcaaccgcaacggcctccacttgccatctgactcaccttatccccaaatgatcattgtcgttcaag

SEQ ID NO: 113962 - DNA, 240 bp, Glycine max
gctatgatgaaacgtgctgcttcctctgcgcttcgctctcttattgcctcatcctccaccttcaccagaaaccttcatgcctcaggtgaaaagaagaagattgtgggggtgttctacaaagggaatgaatatgctaaattgaatccaaattttgttggatgtgttgaaggtgcattgggaatacgtgagtggctggaatcacagggtcatcagtacattgtcactgatgacaaagaagga

SEQ ID NO: 113963 - DNA, 240 bp, Glycine max; identical to SEQ ID NO: 111944

SEQ ID NO: 113964 - DNA, 241 bp, Glycine max
catagtagtgttggtgggttgcaaagatgcttgggggtcttctccataggggtcataagataaaagggacagtggtgttgatgcgcaagactgtgttggacgtgaatagcgtaaccagcgttgggggaattattggtcaaggtctcgacttagttggctcaacactcgatactcttactgccttcttgggccgatccgtgtctctccagcttattagtgctaccaaagctgatgccaacgg

SEQ ID NO: 113965 - DNA, 245 bp, Glycine max
aaggacctggacatgtcccaatgcacaagattcctgaaaacatgcagaaacagttaggctggtgtagtgaagcgcctttttacactcttggtcctttgactactgatattgcccctggctatgatcacatcacctctgcaattggtgctgcaaatattggggcacttggtacagctcttctctgttatgtgactccaaaagaacatcttgggttgccaaaccgggatgacgtgaaggctggcgtt

SEQ ID NO: 113966 - DNA, 244 bp, Glycine max
ggaaaggttagagttgtgaactgccaagggaatgcagtgttcgacggtgagcttaggaggggacaattgctggtggtaccacagaacttcgtggtggcggacaagccggagaacaaggattcgaatacatagtattcaagacacaccacaacgcagtcactagctacttgaaggatgtgtttagggcaattccctcagaggttcttgcccattcttacaaccttcgacagagtcaagtgtctga

SEQ ID NO: 113967 - DNA, 244 bp, Glycine max
cggatgggggccggcgatgtgtcccggtcggatgtggaacggtgagagccggtccgccgatcgactcgggacattgaccgacgcggattgcgatggtggcccaagcccgggctgttgatatgctcgtggagacgtcatcatcgcgattgtggatggcagcgcgcgcccttggcgtgcctcggcacctgcgcgctcctggcgtcggcctgtgggctccccattcggcccgtcttggaacacggac

SEQ ID NO: 113968 - DNA, 241 bp, Glycine max
atcaaatggcaacagtgagaacaccattgaattttgattctagcaagcagagcttttgtcaattttctattgaccttctcggtggaggaattttagtggacaaaactggagattggatcacacttatacaaaattctccaattagtaacttgttgagagttgctgcttggaagaaaggctgtttaatggttacgattgtgatgtctgggaatgcagcagtcaaaaggagtgattgggcctc

SEQ ID NO: 113969 - DNA, 240 bp, Glycine max
gtctacaatgatttgggcaatccagatcacggtgaaaattttgctcgcccaattcttggagggtctagcactcatccctaccctcgtaggggaagaactggtcgatatccaacaaggaaagatcagaattctgagaagccaggcgaagtttatgttccaagagatgaaaattttggtcacttgaagtcctcggattttcttgcatatggaataaaatctttatctcaatatgtcttaccg

SEQ ID NO: 113970 - DNA, 237 bp, Glycine max
ccttagttcaatatggggaagcccttcttcactctctctctttcttccctttgcttgctactcttgtcgagtgcatgctttgctattacctccagcaagttcaacgagtgccaactcaacaacctcaacgcgttagaacccgaccaccgcgttgcgtccgaaggtggtcttattgaaacatggaactctcaacaccctgagctgcaatgcgccggtgtcactgtttccaaacgcacc

SEQ ID NO: 113971 - DNA, 239 bp, Glycine max
caacttaattattaacacttccttagttcaatatggggaagcccttcactctctctctttcttccctttgcttgctactcttgtcgagtgcatgctttgctattagctccagcaagctcaacgagtgccaactcaacaacctcaacgcgttggaacccgaccaccgcgttgagtccgaaggtggtttgattcagacatggaactctcaacaccctgagctgaaatgcgccggtgtcact

SEQ ID NO: 113972 - DNA, 238 bp, Glycine max
ctcgagcgaatccgactgtttaattaaaacaaagcattgcgatggtccctgcggatactgacgcaatgtgatttctgcccagtgctctgaatgtcaaagtgaagaaattcaaccaagcgcgggtaaacggcgggagtaactatgactctcttaaggtagccaaatgcctcgtcatctaattagtgacgcgcatgaatggattaacgagtttcccactgtccctgtctactatccagcg

SEQ ID NO: 113973 - DNA, 238 bp, Glycine max
caacaatgaagacactcctgttgttgccgtttctattattgacaccaacagcttggagaaccagctcgaccagatgcctaggagattctatcttgctgggaaccaagagcaagagtttctaaaatatcagcaagagcaaggaggtcatcaaagccagaaaggaaagcatcagcaagaagaagaaaacgaaggaggcagcatattgagtggcttcaccctggaattcttggaacatgca

SEQ ID NO: 113974 - DNA, 240 bp, Glycine max
gccacaacagcaatcaagcagaagaggctcaaggtcgcagcagcaactacaagacagtcaccagaagattcgtcacttcaatgaaggagacgtactagtgattcctcctggtgttccttactggacctataacactggcgatgaaccagttgttgccatcagtcttcttgacacctccaacttcaacaatcagcttgatcaaaaccccagagtattttaccttgctgggaacccagatat

SEQ ID NO: 113975 - DNA, 240 bp, Glycine max
catagtagtgttggtgggttgcaaagatgcttgggggtcttctccataggggtcataagataaaagggacagtggtgttgatgcgcaagaatgtgttggacgtgaatagcgtaaccagcgttgggggaattattggtcaaggtctcgacttagttggctcaacactcgatactcttactaccttcttgggccgatccgtgtctctccagcttattagtgctaccaaagctgatgccaacg

SEQ ID NO: 113976 - DNA, 246 bp, Glycine max
tgctcaatgtttcttgcaccaccatgctcttaccacccctgccagatccctatcacaacgcatcatggttagcaccaagcctaaccagcttgtttgcaaggcacagaagcaagaggatattgatgtcagcccaatctctcgccggttagctctaaccgtgctcattggtgctgctgctgttggctccaaagtccaacctgctgatgcagcttatggggaagctgccaatgtgtttggaaagccaaa

SEQ ID NO: 113977 - DNA, 241 bp, Glycine max
gttcaatatcctagtataccttaataaataatttaagatactatgatgagagcacggttcccattactgttgctgggacttgttttcctggcttcagtttctgtctcatttggcattgcttactgggaaaaagagaaccccaaacacaacaagtgtctccagagtaccactagcgagagagactcgtacaggaaccaagcatgccacgctcgttgcaacctccttaaggtggagaaagaag

SEQ ID NO: 113978 - DNA, 238 bp, Glycine max
gctagctagctagcaagcaagcacagagatggaggcaaagcgaggccatgccctcatgtgcttggcacgtgtttcactcttcctctgcgctctaaccctatccgctgctcacggaagcaccacggttcacaacatcgcgagaaagttgaaactcggggacaacgagcttctgcgcacggagaagaagttcaaggttttcatggagaattacgggaggagctactccacagaggaggag

SEQ ID NO: 113979 - DNA, 235 bp, Glycine max
agaaagtcttccatagccccccaaaaatgaagagcaccatcttctttgctctctttctcttttgtgccttcaccacctcatacctaccttcagccatcgctgatttcgtgctcgataatgaaggtaaccctcttgaaaatggtggcacatattatatcttgtcagacataacagcatttggtggaataagagcagccccaacgggaaatgaaagatgccctctcactgtggtgca

SEQ ID NO: 113980 - DNA, 236 bp, Glycine max
cagatattgttattgcagcagcaggacagccgatgatgatcaagggaaattggatcaaaccaggagctgcagtcatagatgttggcacaaatgctgttgatgacccaacaaagaagtcgggttacaggcttgttggagatgtagattttgaggaagcatctaaagttgctggttggattactcctgttcctggtggtgtaggtccaatgacagtgacaatgttgctgaagaatact

SEQ ID NO: 113981 - DNA, 236 bp, Glycine max
aaacactcatcagtcatcaccatggccaagctagttttttccctttgttttctgcttttcagtggctgctgcttcgctttcagttccagagagcagcctcagcaaaacgagtgccagatccaaaaactcaatgccctcaaaccggataaccgtatagagtcagaaggagggctcattgagacatggaaccctaacaacaagccattccagtgtgccggtgttgccctctctcgctg

SEQ ID NO: 113982 - DNA, 238 bp, Glycine max
gaagaatgtgaagaaggtgaaattccacgaccacgaccacggccacaacacccggagagggaacctcagcaacccggtgagaaggaggaagacgaagatgagcaaccacgtccaatcccattcccacgcccacaacctcgtcaagaagaagagcacgagcagagagaggaacaggaatggcctcgcaaggaggaaaaacgcggagaaaagggaagtgaagaggaagatgaggatgagg

SEQ ID NO: 113983 - DNA, 238 bp, Glycine max
gttctgtggatatcaacgaaggagctcttcttctaccacacttcaattcaaaggccatagtgatactagtgattaatgaaggagatgcaaacattgaacttgttggcattaaagaacaacaacagaagcagaaacaggaagaggaacctttggaagtgcaaaggtacagagctgaattgtctgaagacgatgtatttgtaattccagcagcttatccatttgtcgtcaacgctacctc

SEQ ID NO: 113984 - DNA, 237 bp, Glycine max
gggaagcccttcactctctctctttcttccctttgcttgctactcttgtcgagtgcatgctttgctattagctccagcaagctcaacgagtgccaactcaacaacctcaacgcgttggaacccgaccaccgcgttgagtccgaagtggtttgattcaaacatggaactctcaacaccctgagctgaaatgcgccggtgtcactgtttccaaactcaccctcaaccgcaatggcctcc

SEQ ID NO: 113985 - DNA, 239 bp, Glycine max
ggtccttaaacactcatcagtcatcaccatggccaagctagttttttccctttgtgttctgcttttcagtggctgctgcttcgctttcagttccagagagcagcctcagcaaaacgagtgccagatccaaaaactcaatgccctcaaaccggataaccgtatagagtcagaaggagggctcattgagacatggaaccctaacaacaagccattccagtgtgccggtgttgccctctctc

SEQ ID NO: 113986 - DNA, 236 bp, Glycine max
cgaaagtcttccatagccccccaaaaatgaagagcaccatcttctttgctctctttctcttttgtgccttcaccacctcatacctaccttcagccatcgctgatttcgtgctcgataatgaaggtaaccctcttgaaaatggtggcacatattatatcttgtcagacataacagcatttggtggaataagagcagccccaacgggaaatgaaagatgccctctcactgtggtgcaa

SEQ ID NO: 113987 - DNA, 242 bp, Glycine max
ccttagttcaatatggggaagcccttcactctctctctttcttccctttgcttgctactcttgtcgcgtgcatgctttgctattagctccagcaagctcaacgagtgccaactcaacaacctcaacgcgttggaacccgaccaccgcgttgagtccgaaggtggtttgattcaaacatggaactctcaacaccctgagctgaaatgcgccggtgtcactgtttccaaactcaccctcaaccg

SEQ ID NO: 113988 - DNA, 239 bp, Glycine max
atcctagtataccttaataaataatttaagatactatgatgagagcacggttcccattactgttgctgggacttgttttcctggcttcagtttctgtctcatttggcattgcttactgggaaaaagagaaccccaaacacaacaagtgtctccagagttgcaattgcgagagagactcgtacaggaaccaagcatgccacgctcgttgcaacctccttaaggtggagaaagaagaatgt

SEQ ID NO: 113989 - DNA, 238 bp, Glycine max
aaaattcttccaccaagttatgggtttccttgtgttgcttcttttctccctcttaggtctctcttctagttccagcatatcaactcatcgttccatattggaccttgacctaaccaagtttaccacacagaaacaggtgtcttcactgttccaactatggaagagtgagcatggacgtgtctaccatagccacgaagaagaggcaaagagacttgagattctcaagaataacttgaac

SEQ ID NO: 113990 - DNA, 236 bp, Glycine max
actccttcaaacttaattattaacacttccttagttcaatatggggaagcccttcactctctctctttcttcccattgcttgctactcttgtcgagtgcatgctttgctattagctccagcaagctacacgagtgccaactcaacaacctcaacgcgttggaacccgaccaccgcgttgagtccgaaggtggtttgattcaaacatggaactctcaacaccctgagctgaaatgcg

SEQ ID NO: 113991 - DNA, 236 bp, Glycine max
tctggtgatgccctgagagtcccctcaggaaccacatactatgtggtcaaccctgacaacaacgaaaatctcagattaataacactcgccatacccgttaacaagcctggtagatttgagagtttcttcctatctagcactgaagctcaacaatcctacttgcaaggattcagcaggaacattttagaggcctcctacgataccaaattcgaggagataaacaaggttctgtttag

SEQ ID NO: 113992 - DNA, 83 bp, Glycine max
cattattgcaatctgcttttgatttgaagttcacaccccgtgagtgtcatagctttgatgaagttcatggactctattcaggg

SEQ ID NO: 113993 - DNA, 235 bp, Glycine max
gcaaacattgaacttgttggcctaaaagaacaacaacaggagcagcaacaggaagagcaacctttggaagtgcggaaatatagagccgaattgtctgaacaagatatatttgtaatcccagcaggttatccagttgtggtcaacgctacctcaaatctgaatttctttgctattggtattaatgccgagaacaaccagaggaacttcctcgcaggttcgcaagacaatgtgataa

SEQ ID NO: 113994 - DNA, 235 bp, Glycine max
cttcagcacaatgggtgcctacaagtatgtttcggagctatggcgcaagaagcagtctgatgttatgagattcttgcagcgggtgaggtgctgggagtatcgccagcaaccttctattgtccgtttgacaaggtctactcgcccagataaggctcgtcgcttgggtttcaaggctaagcagggttacgtgatttaccgtgttcgcgtacgaaggggtggccgtaagagaccagtt

SEQ ID NO: 113995 - DNA, 232 bp, Glycine max
tcaatatcctagtataccttaataaataatttaagatactatgatgagagcacggttcccattactgttgctgggacttgttttcctggcttcagtttctgtctcatttggcattgcttactgggaaaaagagaaccccaaacacaacaagtgtctccagagttgcaatagcgagagagactcgtacaggaaccaagcatgccacgctcgttgcaacctccttaaggtggag

SEQ ID NO: 113996 - DNA, 233 bp, Glycine max
ccaagaccaagcctgagactggtgaggttattggggtcttcgagagtgttcagccttctgatactgatttgggggctaaagctcctaaggatgttaagatccaaggcatctggtatgctcagcttgactcatagaccctttttcttaatgctgtatttctactttcttgtaactcccccagttggcgaagactcagagcgttatcacgtgtgtatattatattgacttcgatt

SEQ ID NO: 113997 - DNA, 235 bp, Glycine max
attctctccattgtctttgaacactcatcaccatggccaagcttgttctttccctttgtctccttcttttcagtggctgcttcgctctgagagagcaggcacagcaaaatgagtgccagatccaaaagctgaatgccctaaccggataaccgtatagagtcggaaggtgggttcattgagacctggaaccctaacaacaagccattccagtgtgccggtgttgccctctctcgct

SEQ ID NO: 113998 - DNA, 236 bp, Glycine max
ttctgaaatcttagtttctgcccgaaactgaaactgaatcgaaattcaatacaatgagttcctcaactacagtgaggtcgttgcaggtggtgtcccctgttcctgcggacatagacattgcaaactccgttgaacccgttcatatctcccagattgccaaagacctcaaccttagtcccaatcactatgacctttacggtaaatacaaggctaaggttttgttgtcggttcttgat

SEQ ID NO: 113999 - DNA, 237 bp, Glycine max
cattgtctttgaacactcatcaccatggccaagcttgttctttccctttgtttccttcttttcagtggctgcttcgctctgagagagcaggcacagcaaaatgagtgccagatccaaaagctgaatgccctcaaaccggataaccgtatagagtcggaaggtgggttcattgagacctggaaccctaacaacaagccattccagtgtgccggtgttgccctctctcgctgcaccctt

SEQ ID NO: 114000 - DNA, 241 bp, Glycine max
taacaaattgctgaatcatggtgatcaaatactagatgaagccaacaaagctttcctgggctgtaaagtcaaattagcaatcaaagtatctggaattcactggtggtacaaagttgaaaatcatgctgcagagcttactgctggatattacaaccttaatgatagagacggataccgccccattgcaaggatgctgtctcgccatcatgccattttgaactttacatgtcttgagatgagg

SEQ ID NO: 114001 - DNA, 234 bp, Glycine max
agcgatgcggatgaggcgccactcgatgtttccatttgcctgcatgcctttggtattgtggggtgtggttcgtttagtggtgtcaagtcttgcgaacgtgagggtgcatgagtggtaatcgggatgtttttgttgcacggctccatgcttgcgcatgcaacgtgtgacatgcatccttttcattggcaccttagccttcgtggcttaggtgctgacgattggttcctgtgttgc

SEQ ID NO: 114002 - DNA, 233 bp, Glycine max
ggagccattgtgacagtgaaaggaggtctaagagtcacagctccagccatgaggaagccacagcaagaagaagatgatgatgatgaggaagagcagccacagtgcgtggagacagacaaaggttgccaacgccaaagcaaaaggagcagaaatggcattgatgagaccatttgcacaatgagacttcgccaaaacattggtcagaattcatcacctgacatctacaaccctca

SEQ ID NO: 114003 - DNA, 231 bp, Glycine max
aacggagccctctcttcaggtcaccatctagactgcaatcatggctgatggaccacagcatccatcagttgttcagaagctagctggacagtcttacctggtgtccaggcttagccccaactttaactctaggaattattctgcaactggttcttacgtcaatcgcggaatgcactcgcctgggttggctgttgtgtcacctgtatctccagttactgtgcatgctccagc

SEQ ID NO: 114004 - DNA, 232 bp, Glycine max
aaataatttaagatactatggcgagagcccggttcccattactgttgctgggacttgttttcctggcttcagtttctgtctcatttggcattgcttactgggaaaaagagaaccccaaacaccacaagtgtctccagagttgcaatagcgagagagactcgtacaggaacccagcatgccacgctcgttgcaacctccttaaggtggagatagatgaatgtgatgatggtga

SEQ ID NO: 114005 - DNA, 234 bp, Glycine max
gccagatccaaaagctgaatgccctcaaaccggataaccgtatagagtcggaaggtgggttcattgagacctggaaccctaacaacaagccattccagtgtgccggtgttgccctctctcgctgcacccttaaccgcaatgcccttcgtagaccttcctacaccaacggtccccaggaaatctacatacaacaaggtaatggtatttttggcatgatattcccgggttgtccta

SEQ ID NO: 114006 - DNA, 234 bp, Glycine max
atacccccaactaacaataattccttcacttgcagaacttagttctctgttgcatcatcatcatcttcattagtgttagccctaaacttcaccttcaaccatgaccacagtgccagcacacagtgtccaagtgcacacaacaacacaccgctacgaagccggcgtcgtcccgccggctcgttttgaggcgccgcgttacgaagccggcatcaaggcgccctcttccatttacca

SEQ ID NO: 114007 - DNA, 234 bp, Glycine max
taattattaacacttccttagttcaatatggggacgcccttcactctctctctttcttccctttgcttgctactcttgtcgagtgcatgcttcgctattagctccagcaagctcaacgagtgccaactcaacaacctcaacgcgttggaacccgaccaccgcgttgagtccgaaggtggtttgattcaaacatggaactctcaacaccctgagctgaaatgcgccggtgtcact

SEQ ID NO: 114008 - DNA, 235 bp, Glycine max
gtataccttaataaataatttaagatactatgatgagagcacggttcccattactgttgctgggacttgttttcctggcttcagtttctgtctcatttggcattgcttactgggaaaaagagaaccccaaacacaacaagtgtctccagagttgcaatagcgagagagactcgtacaggaactaagcatgccacgctcgttgcaacctccttaaggtggagaaagaagaatgtga

SEQ ID NO: 114009 - DNA, 230 bp, Glycine max
attgtctttgaacactcatcaccatggccaagcttgttctttccctttgtttccttcttttcagtggctgcttcgctctgagagagcaggcacagcaaaatgagtgccagatccaaaagctgaatgccctcaaaccggataaccgtatagagccggaaggtgggttcattgagacctggaaccctaacaacaagccattccagtgtgccggtgttgccctctctcgctgc

SEQ ID NO: 114010 - DNA, 238 bp, Glycine max
tatactatgatgagagtgcggtttcctttgttggtgttgctgggaactgttttcctggcatcagtttgtgtctcattaaaggtgagagaggatgagaataaccctttctacttgagaagctctaacagcttccaaactctctttgagaaccaaaacggtcgcattcgtctcctccagagattcaacaaacgctccccacaacttgagaaccttcgagactaccggattgtccagtttc

SEQ ID NO: 114011 - DNA, 274 bp, Glycine max
gctgttcttgcgcgtgaacaagcctcaggtaagccaaaaccatggttacgcataacaatgttatcccaaacggacacttccgtaagcactggcagaactatgtgaagacttggttcaatcagccagcacggaagacaaggagacgattggctcgtcagaagaaagctgtgaagatattccccagacctacggctggacctctcaggcccattgtacatggtcaaactttgaaatacaacatgaaagtgagaggtggaaggggattttctcttga

SEQ ID NO: 114012 - DNA, 274 bp, Glycine max
ccaacatgccaaacgacagcgttctgagtcttttcttcttcgttaccctcttcacatgccttctctctgctaattcccacgatgaccatattttcctaccgagtcaactccatgacgatgactcagtgagttgcactgctaccgacccaaaccttaactacaagccggtgatcggaatcctgacccaccccggcgacggtgcctctggccggctcagcaacgccaccggggtttcttacatcgccgcctcctacgttaaattcgtggagtccgg

SEQ ID NO: 114013 - DNA, 140 bp, Glycine max
aacttattaacactttccttagttcaatatggggaagcccgtcttcactctctctctttcttccctttgcttgctactcttgtcgagtgcatgctttgctattacctccagcaagttcaacgagtgccaactcaacaacc

SEQ ID NO: 114014 - DNA, 267 bp, Glycine max
agacgattctgatatcgacgacgacgacgacgatcaccaagtcaagccctttgctttcgccgcctcttctcgtctgtctacggcagcgaaatctgtggcattccaaggtcgggctgagatatctgcaaatagaaagaggaagaatcagtataggggaatccgtcaacgcccttggggaaaatgggcagctgagattcgggatccaagaaagggggttcgtgtctggcttggaaccttcaacactgctgaagaagctgcaagagctta

SEQ ID NO: 114015 - DNA, 270 bp, Glycine max
agacgtttgagaagccacaacagcaatcaagcagaagaggctcaaggtcgcagcagcaactacaagacagtcaccagaagattcgtcacttcaatgaaggagacgtactagtgattcctcctggtgttccttactggacctataacactggcgatgaaccagttgttgccatcagtcttcttgacacctccaacttcaacaatcagcttgatcaaaaccccagagtattttaccttgctgggaacccagatatagagcacccagagacca

SEQ ID NO: 114016 - DNA, 263 bp, Glycine max
aagaaattaagagagttttttttgttcctcactgaccaagcctatagcgatgagaaccaaactttctttagctatctttttcttttttcttttagccttattttcaaacctagcctttggcaaatgtaaagaaaccgaggtagaagaagaagaccctgagctcgtaacatgcaaacaccaatgccaacagccacagcaatacactgagggtgacaagcgggtatgcttgcaaagatgtgacaggtatcatcgtatgaagcaag

SEQ ID NO: 114017 - DNA, 263 bp, Glycine max
cattgtctttgaacacttaataaataatttaagatactatgatgacagcacggctcccattactgttgctgggacgcgctgagagagcaggcacagcaaaatgagtgccagatccaaaagctgaatgccctcaaaccggataaccgtatagagtcggaaggtgggttcattgagacctggaaccctaacaacaatccattccagtgtgccggtgttgccctctctcgctgcacccttaaccgcaatgcccttcgtagaccttc

SEQ ID NO: 114018 - DNA, 92 bp, Glycine max
gttgacaatcctcttcatcttaggtctctcttctagttccagcatatcaactcatcgttccatattggaccttgacctaaccaagtttacca

SEQ ID NO: 114019 - DNA, 265 bp, Glycine max
ttccgttttgcgtttctctgcctaaaaggattgaaagatgggtcaagcactaggttgctatcaagttgatcagtcaaatgtggctatcaaggagcattttggaaaatttgatgatgtcctagaacctggatgtcattgcctgccttggtgtcttgggtaccagattgctggtagtttgtcactgcgtgtgcagcaacttgatgttcgatgtgagacgaaaaccaaggacaatgtctttgtcactgtggttgcatctgtgcaatac

SEQ ID NO: 114020 - DNA, 120 bp, Glycine max
gttcaatatcctagtataccttaataaataatttaagatactatgatgagagcacggttcccattactgttgctgggacttcgattcctggcttcaggttctgtctcatttggcattgct

SEQ ID NO: 114021 - DNA, 282 bp, Glycine max
ttcggctcgagagcaaagcaatggctacttcaaagttgagtacccagcatgtggttgtatctctttccctaaccttaaccttggtactggtgctactggccagcaaggcaaactcagcggaaactgtttctttcagctggaacaagttcgtgccgaagcaaccaaacatgatcctccaaggagaggctattgtgacctcctcgggaaagttacaactcaataaggttgacgaaaacggcaccccaaaaccctcgtctcttggtcgcgccctctactccaccc

SEQ ID NO: 114022 - DNA, 265 bp, Glycine max
caatatcctagtataccttaataaataatttaagatactatgatgagagcacggttcccattactgttgctgggacttgttttcctggcttcagtttctgtctcatttggcattgcttactgggaaaaagagaaccccaaacacaacaagtgtctccagagttgcaatagcgagagagactcgtacgggatccaagctttccaggggggtttcagcttccttaaggctgaggtaccacatgggaccggtcgtgaattacaacatc

SEQ ID NO: 114023 - DNA, 265 bp, Glycine max
gttctgtggatatcaacgaaggagctcttcttctaccacacttcaattcaaaggccatagtgatactagtgattaatgaaggagatgcaaacattgaacttgttggcattaaagaacaacaacagaagcagaaacaggaagaggaacctttggaagtgcaaaggtacagagctgaattgtctgaagacgatgtatttgtaattccagcagcttatccatttgtcgtcaacgctacctcaaacctcaatttccttgcttttggtat

SEQ ID NO: 114024 - DNA, 256 bp, Glycine max
gcacaactgttataattgtggacttgtgcactgccattcatgtagttctaggaaagcattaagagctgccctggctcctaatcctgggaagccatatcgtgtttgtgattcttgttttgtaaaattgaacaaggttgcagaattgggcaacaataatcggaggaatgctatgcctcgtttgtcaggtgaaaacaaggacagattagagaagcctgagctaagattgaccaagacagcagtcccttctaatatggat

SEQ ID NO: 114025 - DNA, 260 bp, Glycine max
gcaatacactgagggtgacaagcgggtatgcttgcaaagatgtgacaggtatcatcgtatgaagcaagagcgagagaaacaaatccaagaggaaactcgtgagaagaaagaggaggaaagccgtgaaagggaagaagaacaacaagagcagcatgaggaacaagatgaaaatccctacatttttgaggaagataaggattttgagaccagagtcgaaactgaaggtggcagaattcgggttctcaagaagttcactgaaa

SEQ ID NO: 114026 - DNA, 273 bp, Glycine max
gctgttcttgcgcgtgaacaagcctcaggtaagccaaaaccatggttaagcataacaatgttatcccaaacggacacttccgtaagcactggcagaactatgtgaagacttggttcaatcagccagcacggaagacaaggagacgattggctcgtcagaagaaagctgtgaagatattccccagacctacggctggacctctcaggcccattgtacatggtcaaactttgaaatacaacatgaaagtgagaggtggaaggggattttctcttg

SEQ ID NO: 114027 - DNA, 269 bp, Glycine max
aaaatgaccaagttcacaatcctcctcatctctcttctcttctgcatcgcccacacttgcagcgcctccaaatggcagcaccagcaagatagctgccgcaagcagctccagggggtgaacctcacgccctgcgagaagcacatcatggagaagatccaaggccgcggcgatgacgatgatgatgatgacgacgacaatcacattctcaggaccatgcggggaagaatcaactacataaggaggaacgaaggaaaagacgaagacgaaga

SEQ ID NO: 114028 - DNA, 264 bp, Glycine max
aaaattcttccaccaagttatgggtttccttgtgttgcttcttttctccctcttaggtctctcttctagttccagcatatcaactcatcgttccatattggaccttgacctaaccaagtttaccacacagaaacaggtgtcttcactgttccaactatggaagagtgagcatggacgtgtctaccataaccacgaagaagaggcaaagagacttgagattttcaagaataacttgaactatatcagggacatgaatgcaaacag

SEQ ID NO: 114029 - DNA, 152 bp, Glycine max
tgatgctggttttgttaagatgattccaaccaaacccatggttgttgaaactttctccgagtatcctccacttggtaggtttgctgttagggacatgcgtcaaactgttgctgtgggagtcatcaagaacgttgagaagaaggatcctaccg

SEQ ID NO: 114030 - DNA, 256 bp, Glycine max
aaaggctccatctttctctggttctgttgttgcctaagaatgggaggaaattccagtttcagggatgaatataccttcgaacaaaggcttggagaatcgcgggatattgtggccaaataccccgatcgagtccccgtgattgtggaaagatatgcgaaatgcgatctgcctgagttggagacgaaaaaataccttgttcctcgagacttgtctgttgggcacggcagtcaacggggtaatggcagatgtatgctgg

SEQ ID NO: 114031 - DNA, 232 bp, Glycine max
caatatcctagtacaccgtattaaagaatttaagatatactatgatgagagcgcggttcccattactgttgctgggagttgttttcctggtatcagtttctggctcatttggcattgcgtattgggcgaagcagaagcccagtcacaacaagtgcctccgaagttgcaatagcgagaaagactcctacaggagccaagcatgccacgctcgttgcaacgtccttaaggtgga

SEQ ID NO: 114032 - DNA, 271 bp, Glycine max
cagcaacccggtgagaaggaggaagacgaagatgagcaaccacgtccaatcccattcccacgcccacaacctcgtcaagaagaagagcacgagcagagagaggaacaggaatggcctcgcaaggaggaaaaacgcggagaaaagggaagtgaagaggaagatgaggatgaggatgaggaacaagatgaacgtcaattcccattcccacgcccacctcatcagaaggaagagcgaaagcaagaggaagatgaggatgaggagcagcagcgag

SEQ ID NO: 114033 - DNA, 268 bp, Glycine max
ggcaagaacaagaagacgaagacgaagatgaagacgaagaatatgaacaaactccctcttatcctccacgacgaccaagccatggaaagcatgaagatgacgaggacgaggacgaagaagaagatcaacctcgtcctgatcaccctccacagcgaccaagcaggcccgaacaacaagaaccacgtggaagaggatgtcagactagaaatggggttgaggaaaatatttgcaccatgaagcttcacgagaacattgctcgcccttcacg

SEQ ID NO: 114034 - DNA, 264 bp, Glycine max
ctcgagccgaatcggctcgagggggaataagggaagaaagggtcacttgtcttcaattttgagggctttttactgaataagtatgtactaaaatgtatgctgtaatagctcatagtgagcgaggaaagtatcgggctatgtagctatgccaagaacatcaactacaacaacgtgtcctccgacctgaaggcgttctccgccgcgctggccctctcctccatcctcctctccgcccctctccccgccggcgccgacatctcgggg

SEQ ID NO: 114035 - DNA, 266 bp, Glycine max
gtaggcacctagctagtagctacaatatcagcacttctctctattgataaacaattggctgtaatgccgcagtagaggacgatcacaacatttcgtgctggttactttttgttttatgggtctagcaaaggaaacaacaatgggaggtagaggtcgtgtggccaaagtggaagttcaagggaagaagcctctctcaagggttccaaacacaaagccaccattcactgttggccaactcaagaaagcaattccaccacactgctttc

SEQ ID NO: 114036 - DNA, 271 bp, Glycine max
tccttgtgttgcttcttttctccctcttaggtctctcttctagttccagcatatcaactcatcgttccatattggaccttgacctaaccaagtttaccacacagaaacaggtgtcttcactgttccaactatggaagagtgagcatggacgtgtctaccataaccacgaagaagaggcatagagacttgagattttcaagaataacttgaactatatcagggacatgaatgcaaacagaaaatcaccccattctcatcgtttaggattgaa

SEQ ID NO: 114037 - DNA, 259 bp, Glycine max; identical to SEQ ID NO: 103670

SEQ ID NO: 114038 - DNA, 265 bp, Glycine max
gttcttggaatcaatggaggatatagcggtttctatgctcgcaatacaatcactttaacccctaaaagtgtgaatgatatacataagcgtgggggaactgtcctcggaacatcacgaggtggacatgacaccaaaaagatagttgacagtattcaagatcggggaatcaatcaggtttatataattggaggagatggaactcagaagggtgcatctgcaatttttgaggaagtcagaaagcgtggtctcaaagtttcagttgtag

SEQ ID NO: 114039 - DNA, 263 bp, Glycine max
ggatagggatggagaaagtgaaggtgcttcggcgactccttgagacaccaggggttcaccaggggccagcctgtttcgacgctctgggtgcgaactcatagaatccgctggcttcccctactgcatcaccagtggcttctccatcgccgcttccaggttggctctgcccgacaccggcttcatctcctacggcgaaatgctggagcagggccaactcatcacccaagccgtttccattcccgtcattggcgacgccgacaacg

SEQ ID NO: 114040 - DNA, 199 bp, Glycine max
caatatcctagtataccttaataaataatttaagatactatgatgcgagcacggttcccattagtggtgctgggacttgctttcctggcttcagtatctgactcatttggcattgcttactgggaaaaagagttcccgggacacaacaagtgtctccagagttgcaatagtgagaaagacttgtagaggctccaagcat

SEQ ID NO: 114041 - DNA, 270 bp, Glycine max
cttcttcttcttttcaagataacatctctgaagtgatctttcatggagagagagattgaacattgtgacaaggtgatgagccaaagcagcatggatgcttgtcccaaatcagggcctggttatgcttcaccactagcagccatttctggtcccagagagactctcctttatgtcactgctatctactcaggaacaggaagggataagcctgactttctggccacagtggatgtggatccaagctctccaacgtattcaaaagttatccat

SEQ ID NO: 114042 - DNA, 261 bp, Glycine max
gccagatccaaaagctgaatgccctcaaaccggataaccgtatagagtcggaaggtgggttcattgagacctggaaccctaacaacaagccattccagtgtgccggtgttgccctctctcgctgcacccttaaccgcaatgcccttcgtagaccttcctacaccaacggtccccaggaaatctacatacaacaaggtaatggtatttttggtctgatattcccgggttgtcctagcacttatcaagagccgcaagaatctc

SEQ ID NO: 114043 - DNA, 268 bp, Glycine max
cccaacaatcccaaaagcgcgtttcaattaccattgcgaactcaatagcaatagccaatgcgcagaacaaagagagagcgaggcttaagaaactcttcgaagaagcctacgagagatgccgcaatgctccaatggaaggtgtttccttcaccatcgaagacttcactgctgctcttgacaagtacgacttcgattctgaagttggcggcaagattaaaggcactgtgttctacacagataacaatggagcagttgttgatatcactgc

SEQ ID NO: 114044 - DNA, 270 bp, Glycine max
cccaacaatcccaaaagcgcgtttcaattaccattgcgaactcaatagcaatagccaatgcgcagaacaaagagagagcgaggcttaagaaactcttcgaagaagcctacgagagatgccgcaatgctccaatggaaggtgtttccttcaccatcgaagacttcactgctgctcttgacaagtacgacttcgattctgaagttggcggcaagattaaaggcactgtgttctacacagataacaatggagcagttgttgatatcactgcaa

SEQ ID NO: 114045 - DNA, 273 bp, Glycine max
ggaaggtgagggtggggagaggaaaagaggcgcacgtttatgctgcgtgtgcaagaaatcaagagcttcggtgaagaggccgaaaaccctagagcagatatgcagggagtgcttctacgatgcttttgagtctgagatccatcaggtaattcttgagaatcagctcttcagccctggtgaacgcgtcgcaatcggcgcttctggcggaaaggattccaccgtccttgcctacgtcctctccaagctcaaccgcctccacaattacggcctcca

SEQ ID NO: 114046 - DNA, 122 bp, Glycine max
cttgaggttcacaatcctcctcatctctcttctcttctgcatcgcccacacttgcagcgcctccaaatggcagcaccagcaagatagctgccgcaagcagctccagggggtgaacctcacgc

SEQ ID NO: 114047 - DNA, 268 bp, Glycine max
cagcatatgaagaagggagaagccgtgagtgactttgctaagtcaaaaacccttgcagagcaaaggcaatatctgcctattttttcagtgagagaagagttattacaggtggttcgtgaaaatcaggtggtggtggtggttggagaaaccggttcaggaaagacaacacaattgacacagtatctgcatgaggatggctatactataggtggtatagtaggctgcacccaaccaaggcgtgtggcagctatgagtgttgccaagagag

SEQ ID NO: 114048 - DNA, 263 bp, Glycine max
tgatgctggttttgttaagatgattccaaccaaacccatggttgttgaaactttctccgagtatcctccacttggtaggtttgctgttagggacatgcgtcaaactgttgctgtgggagtcatcaagaacgttgagaagaaggatcctaccggagccaaggtcaccaaggctgcccagaagaagaagtgaatcgtgcgggctggttcatcaggggatgttggttacaataaatgttggtttcttttctgtactcttgtgtctt

SEQ ID NO: 114049 - DNA, 265 bp, Glycine max
ggaaagcaacaagaagaagaaaacgaaggaagcaacatattgagtggcttcgcccctgaattcttgaaagaagcgttcggcgtgaacatgcagatagtgagaaacctacaaggtgagaacgaagaggaggatagtggagccattgtgacagtgaaaggaggtctaagagtcacagctccagccatgaggaagccacagcaagaagaagatgatgatgatgaggaagagcagccacagtgcgtggagacagacaaaggttgccaac

SEQ ID NO: 114050 - DNA, 231 bp, Glycine max
aaaggctccatctttctctggttctgttgttgcctaagaatgggaggaaattccagtttcagggatgaatataccttcgaacaaaggcttggagaatcgcgggatattgtggccaaataccccgatcgagtccccgtgattgtggaaagatatgcgaaatgcgatctgcctgagttggagaagaaaaaataccttgttcctcgagacttgtctgttgggcatttcattcat

SEQ ID NO: 114051 - DNA, 261 bp, Glycine max
gtgtttgttgtgccaagatacttccccttctgtcaagtagcatcaagggatggacccttagagttctttggcttctccacttctgcaaggaagaacaagccacagtttctggctggtgctgcgtcccttctaaggaccttgatggggccggagctttcggcggcgttcggagtgagcgaggacacgttgcggcgcgctgttgatgctcagcatgaggctgtgatactgccatcagcatgggctgcaccaccggaaaatgca

SEQ ID NO: 114052 - DNA, 272 bp, Glycine max
aagaaatgaagagtactatcttctttgctctctttctagtttgtgccttcaccatctcatacctgccttcagccaccgctcagttcgtgctcgacactgatgatgatcctcttcaaaacggtggcacatactatatgttgccagttatgagaggaaagggcggtggaatagaagtagattcaactggaaaagaaatatgccctctcactgttgtgcaatcacccaatgagctcgataaggggattggactagtctttacatctccattacat

SEQ ID NO: 114053 - DNA, 296 bp, Glycine max
cgtacgtgaactggcatccggctcgagcttaagtatcaagacttccttagttcaatatggggaagccctcactctctctctttcttccctttgcttgctactcttgtcgagtgcatgctttgctattagctccagcaagctcaacgagtgccaactcaacaacctcaacgcgttggaacccgaccaccgcgttgagtccgaaggtggtttgattcaaacatggaactctcaacaccctgagctgaaatgcgccggtgtcactgtttccaaactcaccctcaaccgcaatggcctcc

SEQ ID NO: 114054 - DNA, 270 bp, Glycine max
cttcttcttcttttcaagataacatctctgaagtgatctttcatggagagagagattgaacattgtgacaaggtgctgagccaaagcagcatggatgcttgtcccaaatcagggcctggttatgcttcaccactagcagccatttctggtcccagagagactctcctttatgtcactgctatctactcaggaacaggaagggataagcctgactttctggccacagtggatgtggatccaagctctccaacgtattcaaaagttatccat

SEQ ID NO: 114055 - DNA, 272 bp, Glycine max
tccacgatcgaggtcagatcccttatctgaatgtcttcacaccggctaagggcacacagctagtatctgcgtaactactcatcgttccatattggaccttgacctaaccaagtttaccacacagaaacaggtgtcctcactgttccaactatggaagagtgagcatggacgtgtctaccataaccacgaagaagaggcaaagagacttgagattttcaagaataacttgaactatatcagggacatgaatgcaaacagaaaatcaccccatt

SEQ ID NO: 114056 - DNA, 264 bp, Glycine max
cacaacccagaagacctagacaagaagaaccacgtgaaagaggatgcgagacaagaaacggggttgaggaaaatatctgcaccttgaagcttcacgagaacattgctcgcccttcacgcgctgacttctacaaccctaaagctggtcgcattagtaccctcaacagcctcaccctcccagccctccgccaattccaactcagtgcccaatatgttgtcctctacaagaatggaatttactctccacattggaatctgaatgcaa

SEQ ID NO: 114057 - DNA, 266 bp, Glycine max
gggctccggggggcggagatgtaagaaaaataaccaatttgacccttagtccaagtattatatttggatatttattaaaatcaccttttgggggagaagggtggattgttagtgtggacgatttggaagatataattggggggcatgtatggttgggttccatttgtatacttggtggaatctggcatatcttaaccaaaccttttgcatgggctcggcgtgcacttgtatggtctggagaagcttacttatcttatagtttaggt

SEQ ID NO: 114058 - DNA, 267 bp, Glycine max
gttcaatatcctagtataccttaataaataatttaagatactatgatgagagcacggttcccattactgttgctgggacttgttttcctggcttcagtttctgtctcatttggcattgcttactgggaaaaagagaaccccaaacacaacaagtgtctccagagttgcaatagcgagagagactcgtacaggaaccaagcatgccacgctcgttgcaacctccttaaggtggagaaagaagaatgtgaagaaggtgaaattccacga

SEQ ID NO: 114059 - DNA, 104 bp, Glycine max
ctctctctctctctgaagatggcttcacgcaggctcgtatcttctctgattcgatcctcccttcgtagatctcaatcgaagccctcaatttccacatcgcaaac

SEQ ID NO: 114060 - DNA, 269 bp, Glycine max
gcatggacgtgtctaccataaccacgaagaagaggcaaagagacttgagattttcaagaataacttgaactatatcagggacatgaatgcaaacagaaaatcaccccattctcatcgtttaggattgaacaagtttgctgacatcactcctcaagagttcagcaaaaagtacttgcaagctcccaaggatgtgtcgcagcaaatcaaaatggccaacaagaaaatgaagaagggacaatattcttgtgaccatccacctgcatcatggg

SEQ ID NO: 114061 - DNA, 261 bp, Glycine max; identical to SEQ ID NO: 103835

SEQ ID NO: 114062 - DNA, 263 bp, Glycine max
cggctcgagtcctagtataccttaataaataatttaagatactatgatgagagcacggttcccattattgttgctgggacttgttttcctggcttcagtttctgtctcatttggcattgcttactgggaaaaagagaaccacaaacacaacaagtgtctccagagttgcaatagcgagagagactcgtacaggaaccaagcatgccacgctcgttgcaacctccttaaggtggagaaagaagaatgtgaagaaggtgaaattc

SEQ ID NO: 114063 - DNA, 261 bp, Glycine max
cggctcgagctagttcaatatcctagtataccttaataaataatttaagatactatgatgagagcacggttcccattactgttgctgggacttgttttcctggcttcagtttctgtctcatttggcattgcttactgggaaaaagagaaccccaaacacaacaagtgtctccagagttgcaatagcgagagagactcgtacaggaaccaagcatgccacgctcgttgcaacctccttaaggtggagaaagaagaatgtgaa

SEQ ID NO: 114064 - DNA, 262 bp, Glycine max
aaagagttggcttcaaagactcaatctcatgcttacctttaccaacatcacccagagatctatgagtactattcactacaactcacatgcaacgaagatagcactggtgatcgatggcagagggcatcttcaaatatcatgtccacacatgtcatcaaggtcgtcacactcgaagcatgataagagtagcccttcataccatagaatcagttccgatttgaagcctggaatggtgtttgttgtccctcccggtcatcccttc

SEQ ID NO: 114065 - DNA, 260 bp, Glycine max
ctgcgccgcatgcgtgggcggcggcttctgaagctgcggctagcagcgagcgacaacaggggacagcttctgctgtttgtggtaacgccggctattgcttgggtgctttacaacatcttgcagcctgctctcaaccagctcaacaggatgagatcacagtgatttgagctttgtgaaatttaaaatagggaaggggcttaaatgctctgggatatcaattatcatcatcactaatagttttcatgcaacttgtatctaat

SEQ ID NO: 114066 - DNA, 260 bp, Glycine max
ccattggtccttaaacactcatcagtcatcaccatggccaagctagttttttccctttgttatctgcttttcagtggctgctgcttcgctttcagttccagagagcagcctcagtaaaacgagtgccagatccaaaaactcaatgccctcaaaccggataaccgtatagagtcagaaggagggctcattgagacatggaaccctaacaacaagccattccagtgtgccggtgttgccctctctcgctgcaccctcaaccg

SEQ ID NO: 114067 - DNA, 161 bp, Glycine max
ggaagaaagggtcctttgtcttcaattttgagggctttttactgaataagtatgtactaaaatgtatgctgtaatagctcatagtgagcgaggaaagtatcgggctatgtaactatgactagagcttcaactatgaataaataaatcgacagcatatgatg

SEQ ID NO: 114068 - DNA, 258 bp, Glycine max
gcaaaaagtacttgcaagctcccaaggatgtgtcgcagcaaatcaaaatggccaacaagaaaatgaagaaggaacaatattcttgtgaccatccacctgcatcatgggattggaggaaaaaaggtgtcatcacccaagtaaagtaccaagggggctgtggaagcggttgggcgttttctgccacgggagccatagaagcagcacatgcaatagcaacaggagaccttgttagcctttctgaacaagaactcgtagact

SEQ ID NO: 114069 - DNA, 260 bp, Glycine max
acgaagatgagcaaccacgtccaatcccattcccacgcccacaacctcgtcaagaagaagagcacgagcagagagaggaacaggaatggcctcgcaaggaggaaaaacgcggagaaaagggaagtgaagaggaagatgaggatgaggatgaggaacaagatgaacgtcaattcccattcccacgcccacctcatcagaaggaagagcgaaagcaagaggaagatgaggatgaggagcagcagcgagagagcgaagaaagt

SEQ ID NO: 114070 - DNA, 256 bp, Glycine max
tcagtcataatccaacgcacggtagcttcgcgccactggcttttcaaccaagcgcgatgaccaattgtgcgaatcaacggttcctctcgtactaggttgaattactattgcgacactgtcatcagtagggtaaaactaacctgtctcacgacggtctaatcccagctcacgttccctattggtgggtgaacaatccaacacttggtgaattctgcttcacaatgataggaagagccgacatcgaaggatcaaaaag

SEQ ID NO: 114071 - DNA, 252 bp, Glycine max
gggcagtagccgagattccgtgagttgcaaaaatgaagacgattctttccaccgagaccatgaacatcccggacggcgtgagcatcaaagttcatgccaaggtcatcgaagttgagggcccccgcggaaaattggtgcgagacttcaagcatttgaatctcgattttcagctcattactgacgaaaacggtaaaagaaagctgaaaatcgacgcgtggtttggttctcggaaaacatccgccgccattcgca

SEQ ID NO: 114072 - DNA, 180 bp, Glycine max
tagtactaaaatgtatgctgtaatagctcatagtgagcgaggaaagtatcgggctatttaactatgacttgagctccatctatgaataaataaatcagcatatgatgcttttgttttgtgtacaaaaaaaagaaaaaaaaaaagaaaaataaaaataaaggggggaacggggaaaactaa

SEQ ID NO: 114073 - DNA, 253 bp, Glycine max
ttcatagcgacgttgctttttgatccttcgatgtttccagctcccacttatcctacacctctccagtcatttcacaaagtcggactagagtcaagctcatcagggtcttctttccccgctgattccgccaagcccgttcccgtggctgtggtatcgctggatagtagacagggacagtgggaatctcgttaatccattcatgcgcgtcactaattagatgacgatgcatttggctaccttaagagagtcatag

SEQ ID NO: 114074 - DNA, 245 bp, Glycine max
gttcctcactgaccaagccaacgcgatgagaaccaaactttctttagctatctttttcttttttcttttagccttattttcaaacctagcctttggcaaatgtaaagaaaccgaggtagaagaagaagaccctgagctcgtaacatgcaaacaccaatgccaacagccacagcaatacactgagggtgacaagcgggtatgcttgcaaagatgtgacaggtatcatcgtatgaagcaagagcgag

SEQ ID NO: 114075 - DNA, 255 bp, Glycine max
gttaacggatattaaagacacctctaaagaaggatatagttttgaagagatatgcatcaagaaagaagcgtttgagggagaagagaagttttgtgcaaaatccttgggaacagtaattggttttgccatttcaaagctgggaaagaacattcaagtactttcaagttcctttgtcaataagcaagagcaatacactgtggaaggagtgcagaatcttggagacaaagcagtgatgtgtcatgggctaaatttcag

SEQ ID NO: 114076 - DNA, 249 bp, Glycine max
agtataccttaataaataatttaagatactatgatgagagcacggttcccattactgttgctgggacttgttttcctggcttcagtttctgtctcatttggcattgcttactgggaaaaagagaaccccaaacacaacaagtgtctccagagttgcaatagcgagagagactcgtacaggaaccaagcatgccacgctcgttgcaacctccttaaggtggagaaagaagaatgtgaagaaggtgaaatt

SEQ ID NO: 114077 - DNA, 254 bp, Glycine max
tggagatgctgactctgcaaattccatattctggactttcagattcacacttccttgatagtctgcagatgggtaaacgaccacaattgactgatgagctgagagtattgagttcaatgaatggacccacaatgattccatctggtgaagagctggaaaaatcagatgctggggtagacatgctgaaattccttgttgatttgtttcataagtgcgtggaagaaaatccaagcaaacgtcctacagctgaagaa

SEQ ID NO: 114078 - DNA, 238 bp, Glycine max; identical to SEQ ID NO: 112114

SEQ ID NO: 114079 - DNA, 254 bp, Glycine max
attggtccttaaacactcatcagtcatcaccatggccaagctagttttttccctttgttttctgcttatcagtggctgctgcttcgctttcagttccagagagcagcctcagcaaaacgagtgccagatccaaaaactcaatgccctcaaaccggataaccgtatagagtcagaaggagggctcattgagacatggaaccctaacaacaagccattccagtgtgccgatgttgccctctctcgctgtaccctca

SEQ ID NO: 114080 - DNA, 257 bp, Glycine max
cctcgatcggaaaccttgcaggggcaaactcattgttgaacatgcagatagtgagaaacctacaaggtgagaacgaagaggaggatagtggagccattgtgacagtgaaaggaggtctaagagtcacagctccagccatgaggaagccacagcaagaagaagatgatgatgatgaggaagagcagccacagtgcgtggagacagacaaaggttgccaacgccaaagcaaaaggagcagaaatggcattgatgagacc

SEQ ID NO: 114081 - DNA, 254 bp, Glycine max
taaaattcttccaccaagttatgggtttccttgtgttgcttcttttctccctcttaggtctctcttctagttccagcatatcaactcatcgttccatattggaccttgacctaaccaagtttaccacacagaaacaggtgtcttcactgttccaactatggaagagtgagcatggacgtgtctaccataaccacgaagaagaggcaaagagacttgagattttcaagaataacttgaactatatcagggacatg

SEQ ID NO: 114082 - DNA, 256 bp, Glycine max
aataagaacccttttctcttcggctctaacaggttcgaaactctcttcaaaaaccaatatggtcgcattcgcgtcctccagaggttcaaccaacgctccccacaacttcagaatctccgagactaccgcattttggagttcaactccaaacccaacctcctccttctccccaaccatgctgacgctgattacctcatcgttatccttaacgggactgccattctttccttggtgaacaacgacgacagagactcct

SEQ ID NO: 114083 - DNA, 252 bp, Glycine max; identical to SEQ ID NO: 113413

SEQ ID NO: 114084 - DNA, 256 bp, Glycine max
tggtacaccgtattaaagaatttaagatatactatgatgagagcgcggttcccattactgttgctgggagttgttttcctggcatcagtttctgtctcatttggcattgcgtattgggaaaagcagaaccccagtcacaacaagtgcctccgaagttgcaatagcgagaaagactcctacaggaaccaagcatgccacgctcgttgcaacctccttaaggtggaggaagaagaagaatgcgaagaaggtcaaattc

SEQ ID NO: 114085 - DNA, 252 bp, Glycine max
cacgaatggcaacacaagcaggaaaagcaccaaggaaaggaaagtgaagaagaagaagaagaccaagacgaggatgaggagcaagacaaagagagccaagaaagtgaaggttctgagtctcaaagagaaccacgaagacataagaataagaacccttttcacttcaactctaaaaggttccaaactctcttcaaaaaccaatatggccacgttcgcgtcctccagaggttcaacaaacgctcccaacagctt

SEQ ID NO: 114086 - DNA, 251 bp, Glycine max
cttgaaaatccggaggaccgagtgcctcccacgcccggtcgtactcataaccgcatcaggtctccaaggtgaacagcctctggtcgatggaacaatgtaggcaagggaagtcggcaaaatggatccgtaacctcgggaaaaggattggctctgagggctgggcacgggggtcccagtcccgaacccgtcggctgtcggtggactgctcgagctgcttccgcggcgagagcgggtcgtcgcgtgccggtcgg

SEQ ID NO: 114087 - DNA, 252 bp, Glycine max
cttcttcactctctctctttcttccctttgcttgctactcttgtcgagtgcatgctttgctattacctccagcaagttcaacgagtgccaactcaacaacctcaacgcgttggaacccgaccaccgcgttgagtccgaaggtggtcttattgaaacatggaactctcaacaccctgagctgcaatgcgccggtgtcactgtttccaaacgcaccctcaaccgcaacggcctccacttgccatcttactcacc

SEQ ID NO: 114088 - DNA, 252 bp, Glycine max; identical to SEQ ID NO: 111967

SEQ ID NO: 114089 - DNA, 254 bp, Glycine max
ctcgagccgaaagtcttccatagccccccaaaaatgaagagcaccatcttctttgctctcattctcttttgtgccttcaccacctcatacctaccttcagccatcgctgatttcgtgctcgataatgaaggtaaccctcttgaaaatggtggcacatattatatcttgtcagacataacagcatttggtggaataagagcagccccaacgggaaatgaaagatgccctctcactgtggtgcaatctcgcaatga

SEQ ID NO: 114090 - DNA, 256 bp, Glycine max
ttctctccattggtccttaaacactcatcagtcatcaccatggccaagctagttttttccctttgttttctgcttttcagtggctgctgcttcgctttcagttccagagagcagcctcagcaaaacgagtgccagatccaaaaactcaatgccctcaaaccggataaccgtatagagtcagaaggagggctcattgagacatggaaccctaacaacaagccattccagtgtgccggtgttgccctctctcgctgca

SEQ ID NO: 114091 - DNA, 254 bp, Glycine max
caatatcctagtacaccgtattaaagaatttaagatatactatgatgagagcgcggttcccattactgttgctgggagttgttttcctggcatcagtttctgtctcatttggcattgcgtattgggaaaagcagaaccccagtcacaacaagtgcctccgaagttgcaatagcgagaaagattcctacaggaaccaagcatgccacgctcgttgcaacctccttaaggtggaggatgaagaagaatgcgaacaa

SEQ ID NO: 114092 - DNA, 252 bp, Glycine max
actcaccttatccccaaatgatcattgtcgttcaagggaagggagcaattggatttgcatttccgggatgtcctgagacgtttgagaagccacaacagcaatcaagcagaagaggctcaaggtcgcagcagcaactacaagacagtcaccagaagattcgtcacttcaatgaaggagacgtactagtgattcctcctggtgttccttactggacctataacactggcgatgaaccagttgttgccatcagtc

SEQ ID NO: 114093 - DNA, 251 bp, Glycine max
ataaaattcttccaccaagttatgggtttccttgtgttgcttcttttctccctcttaggtctctcttctagttccagcatatcaactcatcgttccatattggaccttgacctaaccaagtttaccacacagaaacaggtgtcttcactgttccaactatggaagagtgagcatggacgtgtctaccataaccacgaagaagaggcaaagagacttgagattttcaagaataacttgaactatatcaggga

SEQ ID NO: 114094 - DNA, 254 bp, Glycine max
actgccagtagtcatatgcttgtctcaaagattaagccatgcatgtgtaagtatgaactaattcagactgtgaaactgcgaatggctcattaaatcagttatagtttgtttgatggtatctactactcggataaccgtagtaattctagagctaatacgtgcaacaaaccccgacttctggaagggatgcatttattagataaaaggtcaacacaggctctgcctgttgctttgatgattcatgataactcgtc

SEQ ID NO: 114095 - DNA, 250 bp, Glycine max
ccggcgcttcgtgcgccaaggaactcaaatctgttaagtgcgactcccgggggcccggagacggtgtcccgcgggagtcgtcacgacacaacatttacatacaatgactctcggcaacggatatctcggctcttgcatcgatgaagaacgtagcgaaatgcgatacttggtgtgaattgcagaatcccgtgaaccatcgagtctttgaacgcaagttgcgcccgaagccattaggccgagggcacgcctg

SEQ ID NO: 114096 - DNA, 249 bp, Glycine max
atcaataccaaaatgaccaagcttacaattctcctcatcgctcttctcttcatcgcccacacctgctgcgcctccaaatggcaacagcaccagcaagagagctgccgcgagcagctcaaggggatcaacctcaacccctgtgagcacatcatggagaagatccaagctggccgccgcggcgaggacggcagcgacgaagatcacattctcatcaggaccatgccgggaagaatcaactacatcaggaag

SEQ ID NO: 114097 - DNA, 253 bp, Glycine max
aacttattaacactttccttagttcaatatggggaagcccttcttcactctctctctatcttccctttgcttgctactcttgtcgagtgcatgctttgctattagctccagcaagttcaacgagtgccaactcaacaagctcaacgcgttggaactcgaccaccgcgttgagtccgaaggtggtcttattgaaacatggaactctcaacaccctgagctgcaatgcgccggtgtcactgtttccaaacgcacc

SEQ ID NO: 114098 - DNA, 253 bp, Glycine max
ttattatcaaataattaattaaattcctcgtggaatcttgttgaagccatgtctacagctggtcaggtcatcaagtgcagagctgcggtggcatgggaagcagggaagccactatcgatagaaaccatagaagtggcaccaccccagaaaggtgaagtgcgtttgaagatcctcttcaactccctttgccgtacagatgtttactggtgggatgctaagggccagactccgctgtttcctcgtatcttaggcc

SEQ ID NO: 114099 - DNA, 250 bp, Glycine max
agatagtcttccatagccccccaaaaatgaagagcaccatcttctttgctctctttctcttttgtgccttcaccacctcatacctaccttcagccatcgctgatttcgtgctcgataatgaaggtaaccctcttgaaaatggtggcacatattatatcttgtcagacataacagcatttggtggaataagagcagccccaacgggaaatgaaagatgccctctcactgtggtgcaatctcgcaatgagct

SEQ ID NO: 114100 - DNA, 251 bp, Glycine max
  unsure (1)..(251): unsure at all n locations
gagaaccccaaacacaacaagtgtctccagagttgcaatagcgagagagactcgtacaggaaccaagcatgccacgctcgttgcaacctccttaaggtggagaaagaagaatgtgaagaaggtgaaattccacgaccacgaccacccccacaacacccggagagggaacctcagcaacccggtgagaaggaggaagacgaagatgagcaaccacgtccaatcccattcccacgcccacaactncgtcaaga

SEQ ID NO: 114101 - DNA, 246 bp, Glycine max; identical to SEQ ID NO: 113368

SEQ ID NO: 114102 - DNA, 245 bp, Glycine max
aaaattcttccaccaagttatgggtttccttgtgttgcttcttttctccctcttaggtctctcttctagttccagcatatcaactcatcgttccatattggaccttgacctaaccaagtttaccacacagaaacaggtgtcttcactgttccaactatggaagagtgagcatggacgtgtctaccataaccacgaagaagaggcaaagagacttgagattttcaagaataacttgaactatatca

SEQ ID NO: 114103 - DNA, 247 bp, Glycine max
acaagagctcttcagattccacgttgggcccgggacgcctggacctctcccaggccttcttcaggcccataaacaacgccgcccctccctccccgaccaagcgccacaacaagatctccgtcatcggcgccggcaacgtgggaatggccatcgcgcagaccatcctcactcaggacctcaccgacgagctcgtcctcgtcgacaccaactccgacaagctccgcggcgagatgctcgacctccagca

SEQ ID NO: 114104 - DNA, 248 bp, Glycine max
cttgattattaacacttccttagttcaatatggggaagcccttcactctctctctgtcttccctttgcttgctacgcttgtcgagtgcatgctttgctattagctccagcaagctcaacgagtgccaactcaacaacctcaacgcgttggatcccgaccaccgcgttgagtccgaaggtggtttgattcaaacatggaactctcaacaccctgagctgaaatgcgccggtgtcactgtttccaaactc

SEQ ID NO: 114105 - DNA, 245 bp, Glycine max
gggcactgccctctttttggacccaaggtcggcttcggccggtcgatccgggcggaagacattgtcaggtggggagtttggctggggcggcacatctgttaaaagataacgcaggtgtcctaagatgagctcaacgagaacagaaatctcgtgtggaacaaaagggtaaaagctcgtttgattctgatttccagtacgaatacgaaccgtgaaagcgtggcctatcgatcctttagtccttcgga

SEQ ID NO: 114106 - DNA, 249 bp, Glycine max
ctcgagccgcttaattattaacacttccttagttcaatatggggaagcccttcactctctctctttcttccctttgcttgctactcttgtcgagtgcatgctttgctattagctccagcaagctacacgagtgccaactcaacaacctcaacgcgttggaacccgaccaccgcgttgagtccgaaggtggtttgattcaaacatggaactctcaacaccctgagctgaaatgcgccggtgtcactgttt

SEQ ID NO: 114107 - DNA, 251 bp, Glycine max
attggtccttaaacactcatcagtcatcaccatggccaagctagttttttccctttgttttctgcttttcagtggctgctgcttcgctttcagttccagagagcagcctcagcaaaacgagtgccagatccaaaaactcaatgccctcaaaccggataaccgtatagagtcagaaggagggctcattgagacatggaaccctaacaacaagccattccagtgtgccggtgttgccctctctcgctgcaccc

SEQ ID NO: 114108 - DNA, 252 bp, Glycine max
aaagaggacaaagcagcagaccacaagaccgtcaccagaagatctataacttcagagagggtgatttgatcgcagtgcctactggtgttgcatggtggatgtacaacaatgaagacactcctgttgttgccgtttctattattgacaccaacagcttggagaaccagctcgaccagatgcctaggagattctatcttgctgggaaccaagagcaagagtttctaaaatatcagcaagagcaaggaggtcatc

SEQ ID NO: 114109 - DNA, 250 bp, Glycine max
atacgctgtcatatgccaggagaatggcctggttcccattgttgagcctgagatccttgttgatggacctcatgacattcacaagtgtgccgccgtcaccgagcgtgtccttgcagcatgctacaaggctttgaatgatcaccatgtccttcttgagggtaccctattgaagccaaacatggtcacccctggatcccaatctgctaaggtttcccctcaggtggttgccgagcacactgtcagagccctt

SEQ ID NO: 114110 - DNA, 242 bp, Glycine max
aagaagaagatgggtttgaagaacaacatggtggtgctaaaggtgtgtttggtgctacttttccttgtggggggtactactagtgccaacttgaggctgagtaagcttggcctgctcatgaaaagtgatcatcatcaacactcaaatgatgatgagtcttcaaaaccatgctgtgatcaatgcgcatgcacaaagtcaaaccctcctcaatgccgctgttcagatatgaggctgaattcgtg

SEQ ID NO: 114111 - DNA, 246 bp, Glycine max
tgtttctgtctctgtgtttgcggctgaggattccgaacgagcgaccttcttcgtttctcgcaaagtttaagtcatcatgggtaaggaaaagactcacatcaacattgtcgtcattggacatgtcgactctgggaagtcaactaccactggtcatttgatctacaagcttggaggtattgacaagcgtgtgattgagaggttcgagaaggaggctgctgagatgaacaagaggtcattcaagtatgc

SEQ ID NO: 114112 - DNA, 245 bp, Glycine max
gaacgagggagctcttcttctaccacacttcaattcaaaggcgatagtgatactggtaattaatgaaggagatgcaaacattgaacttgttggcctaaaagaacaacaacaggagcagcaacaggaagagcaacctttggaagtgcggaaatatagagccgaattgtctgaacaagatatatttgtaatcccagcaggttatccagttgtggtcaacgctacctcaaatctgaatttctttgcta

SEQ ID NO: 114113 - DNA, 244 bp, Glycine max
ggcattcacagcgtaattcgttgctgcattttaatcgatttatctaaccaggactgaatgacctaatggagtctaaaggtgggaaaaagaagtctagtagtagtagtagtaaatcaattttttacgaagctcccctcggatacagcattgaagacgttagaccaaacggtggaatcaagaaattcagatctgctgcttactctaactgttctcgcaaaccatcctgatacacatccggattgat

SEQ ID NO: 114114 - DNA, 245 bp, Glycine max
ttagttcaatatcctagtataccttaataaataatttaagatactatgatgagagcacggttcccattactgttgctggaacttgttttcctggcttcagtatctgtctcatttggcattgcttactgggaaaaagagaaccccaaacacaacaagtgtctccagagttgcaatagcgagagagactcgtacaggaaccaagcatgccacgctcgttgcaacctccttaaggtggagaaagaaga

SEQ ID NO: 114115 - DNA, 248 bp, Glycine max
ctttgaacactcatcaccatggccaagcttgttctttccctttgtgtccttcttttcagtggctgcttcgctctgagagagcaggcacagcaaaatgagtgccagatccaaaagctgaatgccctcaaaccggataaccgtatagagtcggaaggtgggttcattgagacctggaaccctaacaacaagccattccagtgtgccggtgttgccctctctcgctgcacccttaaccgcaatgcccttcg

SEQ ID NO: 114116 - DNA, 252 bp, Glycine max
cttccatagccccccaaaaatgaagagcaccatcttctttgctctctttctcttttgtgccttcaccacctcatacctaccttcagccatcgctgatttcgtgctcgataatgaaggtaaccctcttgaaaatggtggcacatattatatcttgtcagacataacagcatttggtggaataagagcagccccaacgggaaatgaaagatgccctctcactgtggtgcaatctcgcaatgagctcgacaaagg

SEQ ID NO: 114117 - DNA, 239 bp, Glycine max
ttgtctcgacgtctagactcaaaatcaagaacaatggcttatgctaggcttgctcctatggctggtctcgtgcttgccacttccaccataatgttcccaacgaagatagaagcagcagattgtaatggtgcatgttcacctttcgagatgccaccgtgccgctcacgtgattgtcgttgtgtccctataggactagttgctggtttctgcatacatccaactggactttcatctgttgc

SEQ ID NO: 114118 - DNA, 247 bp, Glycine max
ggactacccttatgctgttgatgggctagagatatgggctgcaattaagacatgggtccaagaatatgtgtccttgtactatgcaagagatgatgatgtcaaacctgattctgaactccaacagtggtggaaagaagctgtagagaaaggtcatggtgatctgaaagacaagccatggtggcctaagttgcaaacaattgaagagcttgttgaaatttgcaccattatcatatggactgcttcagcc

SEQ ID NO: 114119 - DNA, 252 bp, Glycine max
tgttcaaacttaattattaacacttccttagttcaatatggggaagccctgtcactctgcctctctttacttccctttgcttgctactcttgttgagtgcatgctttgctattagctccagcaagctcaacgagtgccaactcaacaacctcaacgcgttggaacccgaccaccgcgttgagtccgaaggtggtttgattcaaacatggaactctcaacaccctgagctgaaatgcgccggtgtcactgttt

SEQ ID NO: 114120 - DNA, 246 bp, Glycine max
ctgccatacactttgctccatcctaacagtgaggaagggttgacttgcagggggattcctaatagcatctctatctaagggagcatgtggtctactttaattacagtactgtacctaccttccaataaaaaagatgcaaggctagagatccaataaatcttgcatcctatctaatgtttcaattatcttgtgttttaatgctgtaatggagcctacaatttgcaaattaattaagagcaccgagca

SEQ ID NO: 114121 - DNA, 251 bp, Glycine max
caaatcataaaattcttccaccaagttatgggtacacttgtgttgcttcttttctccctcttaggtctctcttctagttccagcatatcaactcatcgttccatattggaccttgacctaaccaagtttaccacacagaaacaggtgtccttcactgttccaactatggaagagtgagcatggacgtgtctaccataaccacgaagaagaggcaaagagacttgagattttcaagaataacttgaactata

SEQ ID NO: 114122 - DNA, 254 bp, Glycine max; identical to SEQ ID NO: 112200

SEQ ID NO: 114123 - DNA, 250 bp, Glycine max
gaaagccaaaaatttggagctgcttttgactgctggcattggttctgatcatgttgatctcaaagctgcagctgctgctggtttaactgtggcagaggtcacaggaagcaacgttgtgtcggttgcggaggacgaactcatgagaatcctcattctaatgaggaatttcttgccagggtaccatcaggctgttaatggggaatggaatgttgctggcattgcacatagagcttatgatcttgaaggaaag

SEQ ID NO: 114124 - DNA, 256 bp, Glycine max
caaagcaatggctacttcaaagttgaaaacccagaatgtggttgtatctctctccctaaccttaaccttggtactggtgctactgaccagcaaggcaaactcagcggaaactgtttctttcagctggaacaagttcgtgccgaagcaaccaaacatgatcctccaaggagacgctattgtgacctcctcgggaaagttacaactcaataaggttgacgaaaacggcaccccaaaaccctcgtctcttggtcgcgcc

SEQ ID NO: 114125 - DNA, 261 bp, Glycine max
gcacaatccttcaacaccaacgaggacacagctgagaaacttcggtctccagatgacgaaaggaagcagatcgtgacagtggagggaggcctcagcgttatcagccccaagtggcaagaacaagaagacgaagacgaagatgaagacgaagaatatgaacaaactccctcttatcctccacgacgaccaagccatggaaagcatgaagatgacgaggacgaggacgaagaagaagatcaacctcgtcctgatcaccctcca

SEQ ID NO: 114126 - DNA, 260 bp, Glycine max
ctgactttcccccagggcacttcccgaagtgttaaaagaatgcctctttctataggggtaggagctggtgcaaagaatgccattctcatgaatatgccaaatgctgttctttcaatgtggagatattttgttggagatctcgtctttgaagtttctaagatgacttctccctacatcaaatgtacagtctctttcttcatagcatttggaaatttggctgatgacaccatcaattttgaggcttttccccacaagctggt

SEQ ID NO: 114127 - DNA, 261 bp, Glycine max
ctcatcaccatggccaagcttgttctttccctttgtttccttcttttcagtggctgcttcgctctgagagagcaggcacagcaaaatgagtgccagatccaaaagctgaatgccctcaaaccggataaccgtatagagtcggaaggtgggttcattgagacctggaaccctaacaacaagccattccagtgtgccggtgttgccctctctcgctgcacccttaaccgcaatgcccttcgtagaccttcctacaccaacggt

SEQ ID NO: 114128 - DNA, 255 bp, Glycine max
cgcattcggctcgagcttgtgaacaacgacgacagagactcctacagacttcaatctggtgatgccctgcgagtcccctcagcatccacatactatgtggtcaaccctgacaacaactcaaatctcagattcataatactcgccatacccgtgaacaagcctggtagatttgagagtatcttcctatctagcactgaagctcaacaatcctacttgcaaggattcagcaggaacattttagaggcctcctacgat

SEQ ID NO: 114129 - DNA, 244 bp, Glycine max
ggtgaattgcaatggtgagagagtgtttgatggagagctgcaagagggaggggtgctgatcgttccacaaaactttgcggtggctgcaaaatcccagagcgataactttgagtatgtgtcattcaagaccaatgatagaccctcgatcggaaaccttgcaggggcaaactcattgttgaacgcattgccagaggaagtgattcagcacacttttaacctaaagagccagcaggccaggcaggtg

SEQ ID NO: 114130 - DNA, 246 bp, Glycine max
aaaatatcagcagcagcagcaaggaggttcccaaagccagaaaggaaagcaacaagaagaagaaaacgaaggaagcaacatattgagtggcttcgcccctgaattcttgaaagaagcgttcggcgtgaacatgcagatagtgagaaacctacaaggtgagaacgaagaggaggatagtggagccattgtgacagtgaaaggaggtctaagagtcacagctccagccatgaggaagccacagcaaga

SEQ ID NO: 114131 - DNA, 247 bp, Glycine max
atcataaaattcttccaccaagttatgggtacacatgtgttgcttcttttctccctcttaggtctctcttctagttccagcatatcaactcatcgttccatattggaccttgacctaaccaagtttaccacacagaaacaggtgccttcactgttccaactatggaagagtgagcatggacgtgtctaccataaccacgaagaagaggcaaagagacttgagattttcaagaataacttgaactata

SEQ ID NO: 114132 - DNA, 248 bp, Glycine max
gagaaacttcagtctccagacgacgaaaggaagcagatcgtgacagtggaaggaggtctcagcgttatcagccccaagtggcaagaacaacaagatgaagatgaagatgaagacgaagatgatgaagatgaacaaattccctctcaccctcctcgccgaccaagccatggaaagcgtgaacaagacgaggacgaggacgaagatgaagataaacctcgtcctagtcgaccaagccaaggaaagcgtga

SEQ ID NO: 114133 - DNA, 251 bp, Glycine max
caacaaggtaatggtatttttggcatgatattcccgggttgtcctagcacttatcaagagccgcaagaatctcagcaacgaggacgaagccagaggccccaagaccgtcaccaaaaggtacatcgcttcagagagggtgatttgatcgcagtgcctactggtgttgcatggtggatgtacaacaatgaagacactcctgttgttgccgtttctattattgacaccaacagcttggagaaccagctcgacca

SEQ ID NO: 114134 - DNA, 251 bp, Glycine max
gtgcaacgtactttgcaaaaaccctaaaccctctctttctctctccgcgactctgtactcatcaatggcgacgcaatcgttagacgaagaaacaactaagaaagtcatacgacaggtcgagttttatttcggcgacacaaccttctcaccgatggtttcatgaggaagagtatcactgaaagcgaagatggcatgattagtttggcgctgatttgctcgtttaatcgaatgcgaaaacaccttaatttggg

SEQ ID NO: 114135 - DNA, 252 bp, Glycine max
tctagctagggtttcgcaagtgcgatccaagaagaacaacgacgatggcgatggctgcagctctgcgtcgcgaaggaaggcgtttgacccaaccaatcaacgccctccactcttctctcaattcctccctcatctctcaagaccaagcccctcatggcgcgcgctccatttccactcaagttgtgaggaaccgaatgaagagtgtgaggactatccagaagatcaccaaggccatgaagatggttgccgcgt

SEQ ID NO: 114136 - DNA, 251 bp, Glycine max
cgctcacatgcaacgaagatatcactggtgatggatggtagagggcatcttccaatatcatgtccacacatgtcatcaaggtcagactcaaagcatgataagagtagcccctcataccatagaatcagtgcggacttgaagcctggaatggtgtttgttgtccctcctggtcatcccttcgtcactatagcttccaataaagagaatctcctcataatttgcttcgaggttaacgttcgagacaacaagaa

SEQ ID NO: 114137 - DNA, 254 bp, Glycine max
gaaatatagagctgaattgtctgaacaagatatatttgtaatcccagcaggttatccagttgtggtcatcgctacctcagatctgaatttctttgcttttggtatcaatgccgagaacaaccagaggaacttccttgcaggttcgaaagacaatgtgataagccagatacctagtcaagtgcaggagcttgcgttccctgggtctgcaaaagatattgagaacctaataaagagccaaagtgagtcctactttg

SEQ ID NO: 114138 - DNA, 247 bp, Glycine max
tctctccattggtccttaaacactcatcagtcatcaccatggccaagctagttttttccctttgttttctgcttttcagtggctgctgcttcgctttcagttccagagagcagcctcagcaaaacgagtgccagatccaaaaactcaatgccctcaaaccggataaccgtatagagtcagaaggagggctcattgagacatggaaccctaacaacaagccattccagtgtgccggtgttgccctctc

SEQ ID NO: 114139 - DNA, 242 bp, Glycine max
gctcaacgagtgccaactcaacaacctcaacgcgttggaacccgaccaccgcgttgagtccgaaggtggtttgattcaaacatggaactctcaacaccctgagctgaaatgcgccggtgtcactgtttccaaactcaccctcaaccgcaatggcctccacttgccatcttactcaccttatccccggatgatcatcatcgcccaagggaaaggagcacttggagttgcaattccaggatgtc

SEQ ID NO: 114140 - DNA, 239 bp, Glycine max
caatatcctagtataccttaataaataatttaagatactatgatgagagcacggttcccattactgttgctgggacttgttttcctggcttcagtttctgtctcatttggcattgcttactgggaaaaagagaaccccaaacacaacaagtgtctccagagttgcaatagcgagagagactcgtacaggaaccaagcatgccacgctcgttgcaacctccttaaggtggagaaagaaga

SEQ ID NO: 114141 - DNA, 240 bp, Glycine max
gaaggatgttgatgaagacaatcaacagtttactgatcaggaactggaagaaattaaacggatgaggagcacaccagattttttcaccaaacttgttgaaagcattgctccaactgtttttggtcatccagatataaagagagctatccttcttatgcttttgggtggtgtgcacaaatttactcatgaaggcatcaacctcagaggagacataaacgtttgtgttgttggagatcccag

SEQ ID NO: 114142 - DNA, 239 bp, Glycine max
ccttaataaatccttccagatactatgatgagagcacgcgttcccattagtgttgctgggacttgttttcctggcttcagtttctgtctcatttggcattgcttactgggaaaaagagaaccccaaacacaacaagtgtctccagagttgcaatagcgagagagactcgtacaggaaccaagcatgccacgctcgttgcaacctccttaaggtggagacagatgaatgtgaagaacgtg

SEQ ID NO: 114143 - DNA, 246 bp, Glycine max
ccctgacaacaacgaaaatctcagattactaacactcgccatacccgttaacaagcctggtagatttgagagtttcttcctatctagcactgaagctcaacaatcctacttgcaaggattcagcaggaacattttagaggcctcctacgataccaaattcgaggagataaacaaggttctgtttagtagagaggaagggcagcagcaaggggagcagaggctgcaagagagcgtgattgtggaaat

SEQ ID NO: 114144 - DNA, 247 bp, Glycine max
actctctccattgtctttgaacactcatcaccatggccaagcttgttctttccctttgtttccttcctttcagtggctgcttcgctctgagagagcaggcacagcaaaatgagtgccagatccaaaagctgaatgccctcaaaccggataaccgtatagagtcggaaggtgggttcattgagacctggaaccctaacaacaagccattccagtgtgccggtgttgccctctctcgctgcacccttaa

SEQ ID NO: 114145 - DNA, 249 bp, Glycine max
ataaaattcttccaccaagttatgggtacacttgtgttgcttcttttctccctcttaggtctctcttctagttccagcatatcaactcatcgttccatattggaccttgacctaaccaagtttaccacacagaaacaggtgtcttcactgttccaactatggaagagtgagcatggacgtgtctaccataaccacgaagaagaggcaaagagacttgagattttcaagaataacttgaactatatcagg

SEQ ID NO: 114146 - DNA, 249 bp, Glycine max
aaaagccatttccatagcagcctaagaaaatgaagaccactagcttgttcgctatctttctactttgcgccttcacctcatacctaccttccgccaccgcccaggacgtgctcgacgtggatggcgatccgattcggaacggtttcatatactacgttttgccggcaataagaggaaacggtggcggaatagaacgagccgcactcgggaaagacacttgccctatcactgtagtgcaatctcccaatc

SEQ ID NO: 114147 - DNA, 249 bp, Glycine max; identical to SEQ ID NO: 111421

SEQ ID NO: 114148 - DNA, 252 bp, Glycine max
ctcgagccgaaacaaatcaaaaagatggtagaacatctctcatatgttaattcatgttgtccttcccgaaggtgaccacctcttgtggtgagtggctctgatgacggaactgctaaattatgggatatgcgtcagaggggttccatccaaacattcccagataaataccagattacggctgttggcttctctgatgcatcggataagatcttcactggtggtattgataatgatgtaaagatttgggatttg

SEQ ID NO: 114149 - DNA, 253 bp, Glycine max
atatggaaagaattcctcttgccacatctgagggttttcctcatgtgctttcacgcaaaaatggtgacaaaggcataaggagatttgtttctggggatggtgaaaagatgacattgattccgggaactagtgttgaagaggcttacaacaagctaatagttgaacttgagaaaagtgttcctacattggttggcattgaatgtcccaaggatgagaaacttccccgtcgcaaaatttttgacaaacctaagac

SEQ ID NO: 114150 - DNA, 254 bp, Glycine max
aacttattaacactttccttagttcaatatggggaagcccttcttcactctctctctttcttccctttgcttgctactcttgtcgagtgcatgctttgctattacctccagcaagttcaacgagtgccaactcaacaacctcaacgcgttggaacccgaccaccgcgttgagtccgaaggtggtcttattgaaacatggaactctcaacaccctgagctgcaatgcgccggtgtcactgtttccaaacgcaccc

SEQ ID NO: 114151 - DNA, 254 bp, Glycine max
cttattaacactttccttagttcaatatggggaagcccttcttcactctctctctttcttccctttgcttgctactcttgtcgagtgcatgctttgctattacctccagcaagttcaacgagtgccaactcaacaacctcaacgcgttggaacccgaccaccgcgttgagtccgaaggtggtcttattgaaacatggaactctcaacaccctgagctgcactgcgccggtgtcactgtttccaaacgcaccctc

SEQ ID NO: 114152 - DNA, 244 bp, Glycine max
aaaagccatttccatagcagcctaagaaaatgaagagcactagcttgttcgctatctttctactttgcgccttcacctcatacctaccttccgccaccgcccaggacgtgctcgacgtggatggcgatccgattcggaacggtttcatatactacgttttgccggcaataagaggaaacggtggcggaatagaacgagccgcactcgggaaagacacttgtcatatcactgtagtgcaatctcc

SEQ ID NO: 114153 - DNA, 239 bp, Glycine max
attttgtgtctaagaaactgaagaaaaaatataacattactgatgaacgtgctgctctttatgaggcagcagaaacatgggtagatgctctggatggccgggagttccttggagggtctaagcctaacttagctgacctggctgtcttcggggttttaaagccgatccgctatttgaggtctggcaaggatatggtggagcatacacgtattggcgagtggtatgcaagaatggagagt

SEQ ID NO: 114154 - DNA, 247 bp, Glycine max
cactgaccaagccatggcgatgagaaccaaactttctttagctatctttttcttttttcttttagccttattttcaaacctagcctttggcaaatgtaaagaaaccgaggtagaagaagaagaccctgagctcgtaacatgcaaacaccaatgccaacagccacagcaatacactgagggtgacaagcgggtatgcttgcaaagatgtgacaggtatcatcgtatgaagcaagagcgctagaaacaa

SEQ ID NO: 114155 - DNA, 247 bp, Glycine max
agctaacacacttaaaacgaccaataatggcgtttgctcacgacttggagttggaatcctcttcttcccctctggtgttctcagtacggaggagtgaaccggagctggtggctccggccaagcccactccccgcgaaattaagatcctatctgagatagattctcaggcgggtcttcgtacccaaattccaatcatacagttctaccgtaacgacccatcattggcaggcaaggacccagttcaagc

SEQ ID NO: 114156 - DNA, 248 bp, Glycine max
ggaattcttggaacatgcattcagcgtggacaagcagatagcgaaaaacctacaaggagagaacgaaggggaagacaagggagccattgtgacagtgaaaggaggtctgagcgtgataaaaccacccacggacgagcagcaacaaagaccccaggaagaggaagaagaagaagaggatgagaagccacagtgcaagggtaaagacaaacactgccaacgcccccgaggaagccaaagcaaaagcagaa

SEQ ID NO: 114157 - DNA, 251 bp, Glycine max
cgggaaatgaaagatgccctctcactgtggtgcaatctcgcaatgagctcgacaaagggattggaacaatcatctcgtccccatatcgaatccgttttatcgccgaaggccatcctttgagccttaagttcgattcatttgcagttataatgctgtgtgttggaattcctaccgagtggtctgttgtggaggatctaccagaaggacctgctgttaaaattggtgagaacaaagatgcaatggatggttgg

SEQ ID NO: 114158 - DNA, 252 bp, Glycine max
tgaatctgagatatactatgatgagagcgcggttctcattactggtgctgggagttgttttcctggcatcagcatctctctcattcggcattgcgtattgggaaaagcagaaccccagtcagaacaagtgcctccgatgttgcaatagcgagatagactcctacaggaaccaagcatgccacgctcgttgcaacctccttaaggtggaggaagaagaagaatgcgaagacggtcaaattccacgaccacgag

SEQ ID NO: 114159 - DNA, 252 bp, Glycine max
ttattaacactttccttagttcactatggggaagcccttcttcactctctctctttcttccctttgcttgctactcttgtcgagtgcatgctttgctattacctccagcaagttcaacgagtgccaactcaacaacctcaacgcgttggaacccgaccaccgcgttgagtccgaaggtggtcttattgaaacatggaactctcaacaccctgagctgcaatgcgccggtgtcactgtttccaaacgcaccct

SEQ ID NO: 114160 - DNA, 255 bp, Glycine max
tgttagccctaaacttcaccttcaaccatgaccacagtgccaccacacagtgtccaagtgcacacaacaacacaccgctacgaagccggcgtcgtcccgccggctcgttttgaggcgccgcgttacgaagccggcatcaaggcgccctcttccatttaccattccgagagaggtccgacgacctctcaggttctcgcagttgtcgccggccttccggtcggcggcatcctcctgctcctggcaggactgaccctg

SEQ ID NO: 114161 - DNA, 232 bp, Glycine max
cacagcttcaatcctcgaccacaccacccatcagcgacatgcttcctctttcccttctcaagactgcccaaggccaccctatgttggtggaactgaaaaatggggagacatataacgggcatttggttaattgcgatacatggatgaacatccatctccgagaagtcatttgtacatctaaagacggagatagattttggaggatgcctgaatgctaatatacgaagccata

SEQ ID NO: 114162 - DNA, 253 bp, Glycine max
tacggtccgacaaattaccgccctatcaactttcgatggtaggatagtggcctaccatggtggtgacgggtgacggagaattagggttcgattccggagagggagcctgagaaacggctaccacatccaaggaaggcagcaggcgcgcaaattacccaatcctgacacggggaggtagtgacaataaataacaataccgggctcattgagtctggtaattggaatgagcccaatctaaatcccttaacgagga

SEQ ID NO: 114163 - DNA, 235 bp, Glycine max
ccgaagcaaccaaacatgatcctccaaggagacgctattgtgacctcctcgggaaagttacaactcaataaggttgacgaaaacggcaccccaaaaccctcgtctcttggtcgcgccctctactccacccccatccacatttgggacaaagaaaccggtagcgttgccagcttcgccgcttccttcaacttcaccttctatgcccctgacacaaaaaggcttgcagatgggcttg

SEQ ID NO: 114164 - DNA, 239 bp, Glycine max
cttcagcacaatgggtgcctacaagtatgtttcggagctatggcgcaagaagcagtctgatgttatgagattcttgcagcgggtgaggtgctgggagtatcgccagcaaccttctattgtccgtttgacaaggtctactcgcccagataaggctcgtcgcttgggtttcaaggctaagcagggttacgtgatttaccgtgttcgcgtacgaaggggtggccgtaagagaccagttccaa

SEQ ID NO: 114165 - DNA, 244 bp, Glycine max
accagatgcctaggagattctatcttgctgggaaccaagagcaagagtttctacagtatcagccacagaagcagcaaggaggtactcaaagccagaaaggaaagcgtcagacagaagaagaaaacgaaggaggcagcatattgagtggcttcgccccggaattcttggaacatgcgttcgtcgtggacaggcagatagtgagaaagctacaaggtgagaacgaagaggaagagaagggtgccat

SEQ ID NO: 114166 - DNA, 244 bp, Glycine max
cttaaacactcatcagtcatcaccatggccaagctagttttttccctttgttttctgcttttcagtggctgctgcttcgctttcagttccagagagcagcctcagcaaaacgagtgccagatccaaaaactcaatgccctcaaaccggataaccgtatagagtcagaaggagggctcattgagacatggaaccctaacaacaagccattccagtgtgccggtgttgccctctctcgctgcaccc

SEQ ID NO: 114167 - DNA, 246 bp, Glycine max
ttctattattgacaccaacagcttggagaaccagctcgaccagatgcctaggagattctatcttgctgggaaccaagagcaagagtttctaaaatatcagcagcagcagcaaggaggttcccaaagccagaaaggaaagcaacaagaagaagaaaacgaaggaagcaacatattgagtggcttcgcccctgaattcttgaaagaagcgttcggcgtgaacatgcagatagtgagaaacctacaagg

SEQ ID NO: 114168 - DNA, 242 bp, Glycine max
atcataaaattcttccaccaagttatggatatacttgtgttgcttcttttctccctcttaggtctctcttctagttcttgcatatcaactcatcgttccatattggaccttgacctaaccaagtttaccacacagaaacaggtacattcactgttccaactatggaagagtgagcatggacgtgtctaccataaccacgaagaagaggcaaagagacttgagattttcaagaataacttgaa

SEQ ID NO: 114169 - DNA, 243 bp, Glycine max
ggcttatgcgacaaggactatcctttttctgagagaaaatggaaccttaaagccagtggccatcgaattaagtttgccacatcctgctggggacctgtcaggtgctgtcagtcaagtcatcttacctgcaaaagaaggtgttgaaagtacaatttggctactggccaaagcttatgtggtcgtaaatgactcttgctatcatcaactcatgagccattggttaaatactcatgcggtgattga

SEQ ID NO: 114170 - DNA, 246 bp, Glycine max
ctcacatgcaacgaagatagcactggtgatggatggtagagggcatcttcaaatatcatgtccacacatgtcatcaaggtcagactcaaagcatgataagagtagcccctcataccatagaatcagtgcggacttgaagcctggaatggtgtttgttgtccctcctggtcatcccttcgtcactatagcttccaataaagagaatctcctcataatttgcttcgaggttaacgttcgagacaacaa

SEQ ID NO: 114171 - DNA, 249 bp, Glycine max
gtcggaaggtgggttcattgagacctggaaccctaacaacaagccattccagtgtgccggtgttgccctctctcgctgcacccttaaccgcaatgcccttcgtagaccttcctacaccaacggtccccaggaaatctacatacaacaaggtaatggtatttttggcatgatattcccgggttgtcctagcacttatcaagagccgcaagaatctcagcaacgaggacgaagccagaggccccaagaccg

SEQ ID NO: 114172 - DNA, 251 bp, Glycine max
cttcaaacttaattattaacacttccttagttcaatatggataaacccttcactctctctctttcttccctttgcttgctactcttgtcgagtgcatgctttgctattagctccagcaagctcaacgagtgccaactcaacaacctcaacgcgttggaacccgaccaccgcgttgagtccgaaggtggtttgattcaaacatggaactctcaacaccctgagctgaaatgcgccggtgtcactgtttccaa

SEQ ID NO: 114173 - DNA, 253 bp, Glycine max
gatgagtttgaagaacaacatggtggtgctaaaggtgtgtttgttgcttcttttccttgtgggggttacagctgcacgcatggaactgagcttcttcaaaagtgatcagtcatcaagttatgatgatgatgagtattcaaaaccatgctgtgatctctgcatgtgcacacgctcaatgcctcctcaatgcagctgtgaagatattaggctgaattcatgccactcagattgtaagagctgtatgtgcacacgc

SEQ ID NO: 114174 - DNA, 254 bp, Glycine max
cccgaccaccgcgttgagtccgaaggtggtcttattgaaacatggaactctcaacaccctgagctgcaatgcgccggtgtcactgtttccaaacgcaccctcaaatacaacatactccacttgccatcttactcaccttatccccaaatgatcattgtcgttcaagggaagggagcaattggatttgcatttccgggatgtcctgagacgtttgagaagccacaacagcaatcaagcagaagaggctcaaggtc

SEQ ID NO: 114175 - DNA, 237 bp, Glycine max
agaaaatgaagaaggaacaatattcttgtgaccatccacctgcatcatgggattggaggaaaaaaggtgtcatcacccaagtaaagtaccaagggggctgtggaagcggttgggcgttttctgccacgggagccatagaagcagcacatgcaatagcaacaggagaccttgttagcctttctgaacaagaactcgtagactgtgtggaagaaagcgaaggttgttacaatggatggc

SEQ ID NO: 114176 - DNA, 236 bp, Glycine max
  unsure (1)..(236): unsure at all n locations
aagctcaagaaggcgacactcgaaagcgcggcgaggcggctagggggaggaaaagaagccatgaagcagttgctgncagctgattcttgagtgggttcaaaccagccatcttcagaataagcgccgnaaggagaataatgntagtagtatnagggntgtacttcaggcacagtttcaggatcctagtggccagaacaacaaccagaatacacaaagtggtccatttgcacctgaat

SEQ ID NO: 114177 - DNA, 233 bp, Glycine max
taattattaacacttccttatttcaatatgggcaagcccttcactctctctctttcttccctttgcttgctactcttgtcgagtgcatgctttgctattagctccagcaagctcaacgagtgccaactcaacaacctcaacgcgttggaacccgaccaccgcgttgagtccgaaggtggtttgattcaaacatggaactctcaacaccctgagctgaaatgcgccggtgtcac

SEQ ID NO: 114178 - DNA, 236 bp, Glycine max
ggggtctggctcgctatgctgcaattgctcaggacaatgggttggtcccaattgtggagccagagatcttgcttgatggggagcatggtattgatagaacttttgaagtagcccaaaaggtctgggcagaggttttcttctaccttgctgagaacaatgtcctttttgagggtattctccttaagcctagcatggttacacctggagccgagtccaaggacaaggccagtcctcag

SEQ ID NO: 114179 - DNA, 240 bp, Glycine max
attgtctttgaacactcatcaccatggccaagcttgttctttccctttgtttccttcttttcagtggctgcttcgctctgagagagcaggcacagcaaaatgagtgccagatccaaaagctgaatgccctcaaaccggataaccgtatagagtcggaaggtgggttcattgagacctggaaccctaacaacaagccattccagtgtgccggtgttgccctctctcgctgcacccttaacc

SEQ ID NO: 114180 - DNA, 243 bp, Glycine max
gttcaatatcctagtataccttaataaataatttaagatactatgatgagagcacggttcccattactgttgctgctacttgttttcctggcttcagtttctgtctcatttggcattgcttactgggaaaaagagaaccccaaacacaacaagtgtctccagagttgcaatagcgagagagactcgtacaggaaccaagcatgccacgctcgttgcaacctccttaaggtggagaaagaagaa

SEQ ID NO: 114181 - DNA, 247 bp, Glycine max
aagcaaagcaatggctacttcaaagttgaaaacccagaatgtggttgtatctctctccctaaccttaaccttggtactggtgctactgaccagcaaggcaaactcagcggaaactgtttctttcagctggaacaagttcgtgccgaagcaaccaaacatgatcctccaaggagacgctattgtgacctcctcgggaaagttacaactcaataaggttgacgaaaacggcaccccaaaaccctcgtct

SEQ ID NO: 114182 - DNA, 247 bp, Glycine max
ggaatatacccatactccatggagtggactggtttggccaatagattactgagtaagggcaacgatattctgtgttgcgattatgctagttttgatggtttgattaccaagcaagttatgagcatgatggcagaaatgataaacagtctttgtggtggtgatgaaaaattgatgcgtgaaaggacgcacctgctgttggcttgttgttcaaggatggcaatttgtaaaaaagatgtttggagggttg

SEQ ID NO: 114183 - DNA, 238 bp, Glycine max
catcgcccaagggacaggagcacttggagttgcaattccacgatgtcctgagacctttgaggagccacaagaacaatcaaacagaagaggctcaaggtcgcagaagcagcagctacaggacagtcaccagaagattcgtcacttcaatgaaggacacgtactcgtgattcctcctggtgttccttactggacctataacactggcgatgaaccagttgttgccatcagtcttcttgac

SEQ ID NO: 114184 - DNA, 270 bp, Glycine max
  unsure (1)..(270): unsure at all n locations
agaatagcaatgggagcagaggctgcaagagagcgtgattgcggaaatctcgaaggaatagattcgggcactgagcaaacgtgccaaatctagttcaaggaaaaccattagttctgaagataaaccttttaacttgagaagccgcgacccatctactccaacaagcttggcaagttctttgagatcaccccagttctnaacccccagcttcgggacttggatatcttcctcagtattgtggatatgaacgagggagctcttcttctacca

SEQ ID NO: 114185 - DNA, 267 bp, Glycine max
gaaaaagttagggtttgtaactttgtcttttgtttgcgaatctgaatcgaataataatcaatgaatcatcatgtcgtcggcgaagaagatcacactgaagagttcggacggcgaggctttcgaggtggacgatgcggtggcgctggagtctcagacgataaagcacatgatcgaggacgactgcgccgacagcggcatccctctgccgaacgtgacgagcaagatcctggcgaaggtgatcgagtactgcaagaagcacgtcgaggc

SEQ ID NO: 114186 - DNA, 266 bp, Glycine max
caacaatgaagacactcctgttgttgccgtttctattattgacaccaacagcttggagaaccagctcgaccagatgcctaggagattctatcttgctgggaaccaagagcaagagtttctaaaatatcagcagcagcagcaaggaggttcccaaagccagaaaggaaagcaacaagaagaagaaaacgaaggaagcaacatattgagtggcttcgcccctgaattcttgcaagaagcgttcggcgtgaacatgcagatagtgagaa

SEQ ID NO: 114187 - DNA, 263 bp, Glycine max
tcttgagcaaccaattagtgtctccattgatgcaaaagattttcatttatacaccgggggaatttatgatggagaaaactgtacaagtccgtatgggattaatcactttgttttacttgtgggttatggttcagcggatggtgtagattactggatagcgaaaaattcatggggagaagattggggagaagatggttacatttggatccaaagaaacacgggtaatttattaggagtgtgtgggatgaattatttcgcttcat

SEQ ID NO: 114188 - DNA, 254 bp, Glycine max
  unsure (1)..(254): unsure at all n locations
accttaatatataatttaagatactatgatgagagcacggttcccattactgttgctgggacttgttttcctggcttcagtttctgtctcatttggcattgcttactgggaaaaagagaaccccaaacacaacaagtgtctccagagttgcaatagcgagagagactcgtacaggaaccaagcatgccacgctcgttgcaacctccttaaggtggagaaagaagaatgttanagaggtgaaattccacacaaca

SEQ ID NO: 114189 - DNA, 160 bp, Glycine max
ggagaattttcacctactctaaatttccgaggacatgcgaaaaatgataatagatctcgtcgttaacgttaattttaacataaatttttaaatcgtaatttataactaaatattacaaaatggaattcttattaaaatgaaattcaatcatttcttttat

SEQ ID NO: 114190 - DNA, 266 bp, Glycine max
tcgagactaccgcattttggagttcacttccaaacccaacaccctccttctccccaaccatgctgatcctgatatactcatcgttatccttaacgggactgccattactttccttggtgaacaacgacgacagagactcctacagactcaaatctggtgatgccctgagagtcccctcaggaaccacatactatgtgctcaaccctgacaacaacgaaaatctcagattaataacaccagccatacccgttaacaagcctggtaga

SEQ ID NO: 114191 - DNA, 267 bp, Glycine max
gtcctctacaagaatggaatttactctccacattggaatctgaatgcaaacagtgtgatctatgtgactcgaggacaaggaaaggttagagttgtgaactgccaagggaatgcagtgttcgacagtgagcttaggaggggacaattgctggtggtaccacagaacttcgtggtggcggacaagccggagaacaaggattcgaatacatagtattcaagacacaccacaacgcagtcactagctacttgaaggatgtgtttagggcaa

SEQ ID NO: 114192 - DNA, 269 bp, Glycine max
gccatcttactcaccttatccccggatgatcatcatcgctcaagggaaaggagcacttggattctcaattccaggatttcctgagacttctgaggagccacaagaacaatcaaacagaacaggctcaaggtcgcagaagcagcagctacaggacagtcaccagaagattcgtcacttcaatgaaggagacgtactcgtgattcctcctggtgttccttactggacctataacactggcgatgaaccagttgttgccatcagtcttcttg

SEQ ID NO: 114193 - DNA, 263 bp, Glycine max
ctctgttccgtcgatgacgatggcgtttagggtgcgaaaccctgacctccgctttctcattcttctctctctcttgtccatcacttccgccaaggtcttcttcgaggagcgtttcgatgacggatggggaaatcgttgggttaatcagattggaaaaaagatgagaacctggctggggagtggaaccacacctctggccaatggaatggagacgctaacgacaaaggtattcaaaccagtgaggattacagattctacgctat

SEQ ID NO: 114194 - DNA, 261 bp, Glycine max
gggaaacaaaactacccttttgcttttgctctttgttctttgccatggagtggccacaacaacaatggccttccatgatgatgagggtggtgataaaaagtcaccaaaaagtttgttttcaatgagcaactccacgagggttttcaagactgatgcaggggaaatgcgtgtgctgaaaagccatggtggtaggatattttataggcacatgcacattggcttcatctctatggaaccaaagtccttgtttgttcctcagta

SEQ ID NO: 114195 - DNA, 264 bp, Glycine max
tatcaatgctgagaacaaccagaggaacttccttgcaggcgagaaagacaatgtggtaaggcagatagaaagacaagtgcaggagcttgcgttccctgggtctgcacaagatgttgagaggctattaaagaagcagagggaatccactttgttgatgctcagcctcagcagaaggaggaggggagtaagggaagaaagggtccttttccttcaatcttaggtgctctctactgaataactacgtaaatgtatgctgtaagagct

SEQ ID NO: 114196 - DNA, 265 bp, Glycine max
gagcaattggatttgcatttccgggatgtcctgagacgtttgagaagccacaacagcaatcaagcagaagaggctcaaggtcgcagcagcaactacaagacagtcaccagaagattcgtcacttcaatgaaggagacgtactagtgattcctcctggtgttccttactggacctataacactggcgatgaaccagttgttgccatcagtcttcttgacacctccaacttcaacaatcagcttgatcaaaaccccagagtatttta

SEQ ID NO: 114197 - DNA, 262 bp, Glycine max
ggattctcttctttattccttttgtaatttcattcattcttaatctttgtgaaaaataatgttcatcgagaattttaaggttgagtgtcctaatgtgaagtacaccgagactgagattcagtccgtgtacaactacgaaaccacgaacttgttcacgagaacaggaatggcacctatcagtggattgtcacacccaaatctgtcaaatacgaatttaaaaccaacatccatgttcctaaattaggggtaatgcttgtgggtt

SEQ ID NO: 114198 - DNA, 258 bp, Glycine max
gctcggcactcggctcgacctatcatcagcacttccttagttcaatatgggcttagcccttcactctctctctttcttcccttatgattgctactcttgtcgagtgcatgctttgcctttagctccagcaagctcaacgagtgccatactcaacaatctcaacgcgctggaacccgtccatcgcgttgagtccgaaggtggtgtgattcatccatggtactctcaacaccctgagctgtattgagctggtgtcactgt

SEQ ID NO: 114199 - DNA, 98 bp, Glycine max
tttgaacactcatcaccatggccaagcttgtgctttccctttgtttccttcttttcagtaggtgcttcgctctgagagagcaggcacagcaaaatgag

SEQ ID NO: 114200 - DNA, 264 bp, Glycine max
gggaccaagaccacctattggaatacatcgctatatctttgtgttgtttcaacagaaaggacctttaggtcttgtggagcaaccaccaactcgagcaagcttcaacactcgttattttgccaggcaattggacttgggacttccagtggccactgtctacttcaactctcaaaaagaacctgctgttaagaggcgctgaatctagctatattgtaaccatcagtgtctctcttgagatatgcatggttggaatatacttttaag

SEQ ID NO: 114201 - DNA, 278 bp, Glycine max
caaaaacattcttgtataaagaagaccttcatccaggcaaaacaatgaaagtacaattcaccaagcgtccctatgcacaaccttatggtgtatatacatggttaacggatattaaagacacctctaaagaaggatatagttttgaagagatatgcatcagaaagaagcgtttgagggagaagagaagttttgtgcaaaatccttgggaacagtaattggttttgccatttcaaagctgggaaagaacattcaagtactttcaagttcctttgtcaata

SEQ ID NO: 114202 - DNA, 266 bp, Glycine max
tgatgtcacatgcaaaacgcattgagagagcaataactgagtctgcttgtaatacccttcttcttaaggtcaaccaagtgggaacacttacagaagtcattgaagtggtgaagctggcaaaggaagcacattggggggtggtaacactcatagatgtggagaaactatagactatttcatagctgatttatctgttggccttgcttctggtgtaattaaagcaggtgctccttgcagaggagaacggctagaaaagtacaaccagt

SEQ ID NO: 114203 - DNA, 112 bp, Glycine max
ataagaatgaataaaagaaacaaaggcttagatgccctttgttaagtgtagaataacgggtatagtaactatgtacagcttgtgtaatgagtcactcaagtacctatgcggg

SEQ ID NO: 114204 - DNA, 264 bp, Glycine max
ccccaactaacaataattccttcacttgcagaacttagttctctgttgcatcatcatcatcttcattagtgttagccctaaacttcaccttcaaccatgaccacagtgccaccacacagtgtccaagtgcacacaacaacacactctacgaagccggcgtcgtcccgccggctcgttttgaggcgccgcgttacgaagccggcatcaaggcgccctcttccatttaccattccgagagaggtccgacgacctctcaggttctcg

SEQ ID NO: 114205 - DNA, 261 bp, Glycine max
gagcgagcgagcagtttcaaagagaggatttgggattgggaaggcgagggattgcgctgcgtctcttcctcttctctttcgattcatccctcattcataatcttccaatccaacaacctcatcctcacactcacacatacacaatctgaacgcgtatcgtccctcccatggcttcaaagcgcatcctcaaggagctcaaggacttgcagaaagacccaccaacttcttgcagcgctggtccagtagctgaggacatgttcc

SEQ ID NO: 114206 - DNA, 262 bp, Glycine max
ggaagagttagagtggtgaactgccaagggaatgcagtgttcgacggtgagctaaggaggggacaattgctagtggtgccgcagaactttgtggtggctgagcaagggggagaacaaggattggaatacgtagtgttcaagacacaccacaacgccgtgagcagctacattaaggatgtgtttagggcaatcccttcggaggttctttccaattcttacaaccttggccagagtcaagtgcgtcagctcaagtatcaaggaa

SEQ ID NO: 114207 - DNA, 140 bp, Glycine max
ttcgagccgcaaaaacttgataaagaatcactggccaagaaaaatcatggcctttctcgcagtgagtgagacacaagtgtgagagtactacataaatgctttggttgtacgaaatcattacactacataaaataatcaaa

SEQ ID NO: 114208 - DNA, 263 bp, Glycine max
gttatgggtttccttgtgttgcttcttttctccctcttaggtctctcttctagttccagcatatcaactcactcttccatattggaccttgactccaccaagtttaccacacagaaacaggcctcttcactgttccaactatggaagagtgagcatggacgtgtctaccataaccacgaagaagaggcaaagagacttgagattttcaagaataacttgaactatatcagggacatgaatgcaaacagaaaatcaccccattc

SEQ ID NO: 114209 - DNA, 261 bp, Glycine max
gaggaagaatccccagaaggcttacttgaagactattacaccaaagtttcagacccttattgacctttctgttatagaaatcttgtcaaggcatgcatctgatgaggtgtaccttggggagagggacaatccaaattggacactgatacaagagcgttagaggcttttaaaaggtttggaaataaactggcacaaattgagaataaactctcagagagaaacaacgatgagaaactgagaaaccgttgtggaccagttcaa

SEQ ID NO: 114210 - DNA, 261 bp, Glycine max
ctcgagccgccaagctgtaagatattcctcttggtcaactcaggtgcgtcctacaacaactctgttggctgatgggtgtccatatttgtatgctatggtgcatgatagttcagtgtctacaataccaggtgattttgtcattggtgttaagttgacaaccataaacaatatgtgtgcatatgggctcaatcctggtatttcaggttctcgtcttttgggcaccattcctcagtctatttcacagcaaactgtttggaatca

SEQ ID NO: 114211 - DNA, 264 bp, Glycine max
ctcgagccgctcgagccgcttaaacactcatcagtcatcaccatggccaagctagttttttccctttgttatctgcttttcagtggctgctgcttcgctttcagttccagagagcagcctcagcaaaacgagtgccagatccaaaaactcaatgccctcaaaccggataaccgtatagagtcagaaggagggctcattgagacatggaaccctaacaacaagccattccagtgtgccggtgttgccctctctcgctgcaccctc

SEQ ID NO: 114212 - DNA, 261 bp, Glycine max
cactcttcttctcttgcggctagggttttagcgcagttcttctagatttaaggaagatgggtaaggaaaaggttcacatcagtattgtggtcattggccatgtcgactctgggaaatccactaccactggtcacctgatttacaagcttggaggcattgacaagcgtgttattgagaggtttgagaaggaagctgctgagatgaacaagaggtctttcaagtatgcctgggtgctggacaaacttaaggctgagcgtgaaa

SEQ ID NO: 114213 - DNA, 262 bp, Glycine max
gcctaaagaacatatacaaagatccagatgatgggcagcagcgctttttgcttgaattggagtttgttcagtgccttgccaatcctacctacatccactatttggcccaaaatcgatactttgaggatgaagcattcattggatacttaaagtatcttcaatattggcaacgccctgaatatattaaatttattatgtatcctcattgcctctattttcttgagctgcttcagaatgcaaattttcgcaatgcaatggcgca

SEQ ID NO: 114214 - DNA, 223 bp, Glycine max
taagtgacaacacatgatgtgatagtttatgctagctagctataacataagctgtctctgagtgtgttgtatattaataaagatcatcactggtgaatggtgatcgtgtacgtaccctacttagtaggcaatggaagcacttagagtgtgctttgtgcatggccttgcctctgttttgagacttttgtaatgttttcgagtttaaatctttgcctttgcgaat

SEQ ID NO: 114215 - DNA, 263 bp, Glycine max
acaaaggttgctgtaggagataagattgcagtagtgctaagtgctaacacctgcagtgaacaatggcctctgcatcagcatctctgctcaagtcttcacttgttcttgacaagtctgagtgggtgaagggacaaacccttcgtcaaccttctgcatcagttgtgagatgcaaccccaccaccccatcaggcctcaccatcagagctggttcctatgctgatgagctcgttaagaccgcgaaaacagtggcttcaccagggagg

SEQ ID NO: 114216 - DNA, 250 bp, Glycine max
aacttattaacactttccttagtctaatatggggaagcccttcttcactctctctctttcttccctttgcttgctactcttgtcgagtgcatgctttgctattacctccagcaagttcaacgagtgccaactcaacaacctcacgcgttggaacccgaccaccgcgttgagtccgaaggtggtcttattgaaacatggaactctcaacaccctgagctgcaatgcgccggtgtcactgttttcaaacgca

SEQ ID NO: 114217 - DNA, 262 bp, Glycine max
gcaagagtttctaaaatatcagcaagagcaaggaggtcatcaaagccagaaaggaaagcatcagcaagaagaagaaaacgaaggaggcagcatattgagtggcttcaccctggaattcttggaacatgcattcagcgtggacagcagatagcgaaaaacctacaaggagagaacgaaggggaagacaagggagccattgtgacagtgaaaggaggtctgagcgtgataaaaccacccacggacgagcagcaacaaagacccc

SEQ ID NO: 114218 - DNA, 260 bp, Glycine max
caatatcctagtataccttaataaataatttaagatactatgatgagagcacggttcccattactgttgctgggacttgttttcctggcttcattttctgtctcatttggcattgcttactgggaaaaagagaaccccaaacacaacaagtgtctccagagttgcaatagcgagagagactcgctcaggaaccaagcatgccacgctcgttgcaacctccttaaggtggagaaagaagaatgtgaagaaggtgaaattcc

SEQ ID NO: 114219 - DNA, 259 bp, Glycine max
cttaattattaacacttccttagttcaatatggggaagcccttcactctctctctttcttccctttgcttgctactcttgtcgagtgcatgctttgctattagctccagcaagctcaacgagtgccaactcaacaacctcaagcgttggaacccgaccaccgcgttgagtccgaaggtggtttgattcaaacatggaactctcaacaccctgagctgaaatgcgccggtgtcactgtttccaaactcaccctcaactgc

SEQ ID NO: 114220 - DNA, 262 bp, Glycine max
gtccccaggaaatctacatccaaccaggtaagggtatttttggcatgatatacccgggttgtcctagcacatttgaagagcctcaacaacctcaacaaagaggacaaagcagcagaccacaagaccgtcaccagaagatctataacttcagagagggtgatttgatcgcagtgcctactggtgttgcatggtggcagtacaacaatgaagacactcctgttgttgccgtttctactattgacaccaacagcttggagaacca

SEQ ID NO: 114221 - DNA, 270 bp, Glycine max
atcactcttcactcaaaactcttctctttcattttcataattcccacacattatggctcatcttcactaccaaccacaacaccaataccccctccgctaccctaacgatccacaccaacaaacccgttcctccacccaccaggtcgtcaaggccgccaccgccgtcacagcgggcggctccctcttgatcctcgcctcgttgatcctcgccgccaccgtcattgccctcaccatcgtcaccccgctgttcgtcattttcagtccggttct

SEQ ID NO: 114222 - DNA, 262 bp, Glycine max
attgtctttgaacactcatcaccatggccaagcttgttctttccctttgtatccttctattcagtggctgcttcgctctgagagagcaggcacagcaaaatgagtgccagatccaaaagctgaatgccctcaaaccggataacgtatagagtcggaaggtgggttcattgagacctggaaccctaacaacaagccattccagtgtgccggtgttgccctctctcgctgcacccttaaccgcaatgcccttcgtagaccttcc

SEQ ID NO: 114223 - DNA, 263 bp, Glycine max
ctaaaatggagacccacaaaaatggagaaccaacaaccggcacctatctccgtgacactgctacatctgctatccaaaacttcgctcccatcaacaaaatccaccaacatctctgcgcgtttcacttttactcatatgacatgagccggcaagtggaggcacaccatttttgcgcgcaccagaacgaggagatgaggcagtgccttatctacgacagccccgagaagaaagccaggctcatagggctggaatacatcatctcc

SEQ ID NO: 114224 - DNA, 259 bp, Glycine max
gaaagtgaaggctgagattggtgaagcttccaaaaatccccaagacttgcttttggaagcaattcattctgctggtttttctggtgccttggcaaatcctcttttagcttcagaatcagctctaaatagactaaatggtaaattctggaggagtttgttgctgagaactatacagcacctcggatagtacttgcagcatctggtgttgaacatgaggaattgttatctgttgcagaacctctcttgtctgatctaccca

SEQ ID NO: 114225 - DNA, 259 bp, Glycine max; identical to SEQ ID NO: 111625

SEQ ID NO: 114226 - DNA, 260 bp, Glycine max
tgaatataatactcagcatggctaagcttgttctttccctttgttttctgcttttcagtggctgctgcttcgctttcagtttcagagagcagccacagcaaaacgactgccagatccaacgcctcaatgccctcaaaccggataaccgtatagagtcagaaggtggcttcattgagacatggaaccctaacaacaagccattccagtgtgccggtgttgccctctctcgctgcaccctcaaccgcaacgcccttcgcaga

SEQ ID NO: 114227 - DNA, 238 bp, Glycine max
  unsure (1)..(238): unsure at all n locations
aacattctaaaacaaaggacccaantttacattttttttanttcctgagttccaatggctattcaggctgcttccttggtttctgcttctttttctattgctaaagagggaaagtctggtgtatctctcagggacaccacaatgtttggtgtttcattgtcggatactctcaaatctgacttcagctctgccctcatcgacttgcaaaagggaattccaacaaaaatttggcccttga

SEQ ID NO: 114228 - DNA, 258 bp, Glycine max
atagttcaatatcctagtataccttaataaataatttaagatacctatgatgagagcacggttccgattactgttgctgggacttgttttcctggcctccactcctgtgtcatctggcattgcttactgggaaaaagagaacccaaagacaacaagtgtgtccagagtcgcaatagcgagagagactcgtacaggaaccaagcatgccacgctcgttgcaacgtccttaaggtggagaaagaagaatgtgaagaaggt

SEQ ID NO: 114229 - DNA, 261 bp, Glycine max
cccagagtattttaccttgctgggactccagatatagagcacccagagaccatgcaacaacagcagcagcagaagagtcatggtggacgcaagcaggggcaacaccagcagcaggaggaagaaggtggcagtgtgctcagtggcttcagcaaacatttcttagcacaatccttcaacaccaacgaggacacagctgagaaacttcggtctccagatgacgaaaggaagcagatcgtgacagtggagggaggcctcagcgtt

SEQ ID NO: 114230 - DNA, 259 bp, Glycine max
gtcagccctaaagaggaattacgaggttagcgaggagattggtcgcggtcgtttcggcaccatcttccgctgcttccacccactctccaacctaccctacgcctgcaaactcatcgacaaatccctcctccttgactccacgaccgccactgcctccagaacgaacccaaattcatgtccctcctctctcctcaccccaacatcctccaaatcttccatgtcttcgaggacgaccactatctctccatcgtaatggacc

SEQ ID NO: 114231 - DNA, 259 bp, Glycine max
ttataataataactccattttccctctgtcttccccccctcctctacacaaaaatatattattagcatggagaaggtgaattttgtgaagaacggagagcttagattgcctccggggttccgtttccacccgactgatgagtgctggttctgcaatacttgaagcgcaaggtcttctcctgccctttgccagcctctatcattcctgagcttcatgtttgcaagtgatttggagcaagagagatacttctttagcacca

SEQ ID NO: 114232 - DNA, 264 bp, Glycine max
ccctgagctgcaatgcgccggtgtcactgtttccaaacgcaccctcaacagtaacgggctccacttgccatgttactcaccttatccctaaatgatcactgtcgatcaagggaagggagctattggatttgcatgtccgggatgtcctgagacgtttgagaagccacaacagcaatcaagcagtagatgctcaaggtcgcagcagcaactacaagacagtcaccagtagattcgtcacttcactgaaggagacgtactagtgat

SEQ ID NO: 114233 - DNA, 260 bp, Glycine max
ttattccattccattccagcacaatacagtgcatacagaataaatcagtaaaatacaacatacagtatatcagagtcagaattgagaacaatcgttggtgtggaacgtgacaatggtggcgacgaacgtgaaggcagaaacctgtctctgatggacaagcgtcggcctatggaggctgagatgaactccatcatcgcccgcctctcccagcccggcgctcctggcctctccggaaatctcgtcgactctgagggttttcc

SEQ ID NO: 114234 - DNA, 251 bp, Glycine max
tcttccaacactcatcacaatggccaagcttgttctttccctccacctccttcttttcagtggctgcttcgctctgagagagcaggcacagcaaaatgagtgccagatccaaaagctgaatgccctcaaaccggataaccgtatagagtcggaaggtgggttcattgagacctggaaccctaacaacaagccattccagtgtgccggtgttgccctctctcgctgcacccttaaccgcaatgcccttcgta

SEQ ID NO: 114235 - DNA, 258 bp, Glycine max
gagcgagcgagcgagcagtttcaaagagaggatttgggattgggaaggcgacggattgcgctgcgtctcttcctcttctctttcgattcatccctcattcataatcttccaatccaacaacctcatcctcacactcacacatacacacatctgaacgcgtatcgtccctcccatggcttcaaagcgcatcctcaaggagctcaaggacttgcagaaagacccaccaacttcttgcagcgctggtccagtagctgagga

SEQ ID NO: 114236 - DNA, 261 bp, Glycine max
ctctcgagccgctcgagccgctcgagcggctcgaggatcaaaaaaaacactagccaacacaaccatcatggccacttctgctattcagcaatcagacttcactggtcaaactgctctgaagcagctcaatgagttcgtccgccactcggtggcgccggcaaaggtcgcactaacatgcgccgcaccgtcaagagtgctcctcagagcatttggtatggccctgaccgtcccaagtacttgggtccattctcggagcagatt

SEQ ID NO: 114237 - DNA, 258 bp, Glycine max
  unsure (1)..(258): unsure at all n locations
cactcatcaccatggccgagcttgtactgtccctttgtatccttctttacagtggctgcttcgctctgagagagcaggcacagcaaaacgagtgccagatccaaaagctgaatgccctcaaaccggataaccgtatagagtcggaaggtgggtgcattgagacctggaaccctaacaacaagccattccagtgtgccggtgttgccctctctcgcagcacngttaaccgcaatgcccttcgtagaccttcctacacca

SEQ ID NO: 114238 - DNA, 279 bp, Glycine max
ctctcactgtggtgcaatctcgcaatgagctcgacaaagggattggaacaatcatctcgtccccatatcgaatccgttttatcgccgaaggccatcctttgagccttaagttcgattcatttgcagttataatgctgtgtgttggaattcctaccgagtggtctgttgtggaggatctaccagaaggacctgctgttaaaattggtgagaacaaagatgcaatggatggttggtttagacttgagagagtttctgatgatgaattcaataactataagc

SEQ ID NO: 114239 - DNA, 279 bp, Glycine max
ctcgagccgattcggctcgagtgagtggcgtcgcccctgaattagtgaaagaagcgttcggcgtgaacatgcagatagtaggaaacctacaaggtgagaacgaagaggaggatagtggagccattgtgacagtgaaaggaggtctaagagtcacagctcgagccatgaggaagccacagcaagaagaagatgatgatgatgaggaagagcagccacagtgcgttgagacagacaaaggttgccaacgccagagcaaaaggagcagacatggcattgatg

SEQ ID NO: 114240 - DNA, 283 bp, Glycine max
ggaagagcacgagcagaaggaggaacacgaatggcatcgcaaggaggaaaaacacggaggaaagggaagtgaagaggaacaagatgaacgtgaacacccacgcccacaccaacctcatcagaaggaagaggaaaagcacgaatggcaacacaagcaggaaaagcaccaaggaaaggaaagtgaagtaggagaggaagaccaagacgaggatgaggagcaagacaaagagagccaagatagtgaaggttctgagtctcatagagaaccacgaagacataagagt

SEQ ID NO: 114241 - DNA, 285 bp, Glycine max
caagaagaagaaaacgaaggaggcagcatattgagtggcttcaccctggaattcttggaacatgcattcagcgtggacaagcagatagcgaaaaacctacaaggagagaacgaaggggaagacaagggagccattgtgacagtgaaaggaggtctgagcgtgataaaaccacccacggacgagcagcaacaaagaccccaggaagaggaagaagaagaagaggatgagaagccacagtgcaagggtaaagacaacactgccaacgcccccgaggaggccaaagca

SEQ ID NO: 114242 - DNA, 285 bp, Glycine max
gtagaaacaacaactacagaagaagccaagccagaggagcctatagaagttgcagttgagaccgaggaggtggtgacaaaggagacagaggaagagaagccagcagcagaagagaaatcagaggagaaaactgaagaagtgaaagaagaagcagaagagcctaaagaaactactgaaacagaaacagaatcagcaccagcagcaaccacagaggaagagaacaaaccagctgagacagtggaagccccagtagaggttcctgttgagaaaactgaagcttagact

SEQ ID NO: 114243 - DNA, 86 bp, Glycine max
ctcgagccgcaaaaacttgataaagaatcactggccaagaaaaatcatggcctttctcgcactgagtgagacacaagtgtgagagt

SEQ ID NO: 114244 - DNA, 281 bp, Glycine max
gtcgaccaagccaaggaaagcgtgaacaagaccaggaccaggacgaggacgaagatgaagatgaagatcaacctcgcaagagccgcgaatggagatcgaaaaagacacaacccagaagacctagacaagaagaaccacgtgaaagaggatgcgagacaagaaacggggttgaggaaaatatctgcaccttgaagcttcacgagaacattgctcgcccttcacgcgctgacttctacaaccctaaagctggtcgcattagtaccctcaacagcctcaccctc

SEQ ID NO: 114245 - DNA, 276 bp, Glycine max
gatgccctgagagtcccctcaggaaccacatgctatgtggtcaaccctgacaacaacgaaaatctcagattaataacactcgccatacccgttaacaagcctggtagatttgagagtttctacctatctagcactgaagctcaacaatcctacttgcaaggattcagcaggaacattttagaggcctcctacgataccaaattcgaggagataaacaaggttctgtttagtagagaggaagggcagcagcaaggggagcagaggctgcaagagagc

SEQ ID NO: 114246 - DNA, 275 bp, Glycine max
gggaaccagatatagagcacccagagaccatgcaacaacagcagcagcagaagagtcatggtggacgcaagcatgggcaacaccagcagcaggaggaagaaggtggcagtgtgctcagtggcttcagcaaacatttcttagcacaatccttcaacaccaacgaggacacagctgagaaacttcggtctccagatgacgaaaggaagcagatcgtgacagtggagggaggcctcagcgttatcagccccaagtggcaagaacaagaagacgaagac

SEQ ID NO: 114247 - DNA, 278 bp, Glycine max
tgtgcggtttcctttgttggtgttgctgggaactgttttcctggcatcagtttgtgtctcattaaaggtgagagaggatgagaataaccctttctacttgagaagctctaacagcttccaaactctctttgagaaccaaaacggtcgcattcgtctcctccagagattcaacaaacgctccccacaacttgagaaccttcgagactaccggattgtccagtttcagtcaaaacccaacacaatccttctcccccaccatgctgacgccgatttcctcc

SEQ ID NO: 114248 - DNA, 280 bp, Glycine max
caagaaagtcttccatagccccccaaaaatgaagagcaccatcttctttgctctctttctcttttgtgccttcaccacctcatacctaccttcagccatcgctgatttcgtgctcgataatgaaggtaaccctcttgaaaatggtggcacatattatatcttgtcagacataacagcatttggtggaataagagcagccccaacgggaaatgaaagatgccctctcactgtggtgcaatctcgcaatgagctcgacaaagggattggaacaatcatctcg

SEQ ID NO: 114249 - DNA, 147 bp, Glycine max
cttggtgcctcactgaccaagccagggcgagtgagaaccaaactagcggtagctatctgggtcgaagcacttgtagccttatggtcaaacctagcctttggcaagatgtagaggaaccgaggtagaggaagaagaccctgagctcgt

SEQ ID NO: 114250 - DNA, 280 bp, Glycine max
aggggctccaattcctactcttagccgcagatctctcagggcttgcatcttctcagttgtgaagatgtacacatcaaggaagaaaatccacaaggataaggatgctgaaccaactgagtttgaagagtcagttggacaggcattgtttgatctggaaaataccaaccaggagcttaaaagtgatctgaaggatttatacataaactcagctgtgcaagttgctgtttctgggaaccgcaaggctgttgttattcatgtcccttacagattaaggaaaggt

SEQ ID NO: 114251 - DNA, 280 bp, Glycine max
gaaagtcttccatagccccccaaaaatgaagagcaccatcttctttgctctctttctcttttgtgccttcaccacctcatacctaccttcagccatcgctgatttcgtgctcgataatgaaggtaaccctcttgaaaatggtggcacatattatatcttgtcagacataacagcatttggtggaataagagcagccccaacgggaaatgaaagatgccctctcactgtggtgcaatctcgcaatgagctcgacaaagggattggaacaatcttctcgtcc

SEQ ID NO: 114252 - DNA, 280 bp, Glycine max
ggctctccattggtcgttaaacactcatcagtcatcaccaaggccaagctagttttttcccttggtttgctgctggtgagtggctggtgcttcgctttcagttccagagagtcgcctcaggaaaacgagtgccagatccagaaactcaatgccctcaaaccggataaccgtatagagtcagagggagggctcattgagacatggaaccctaacaacaagccattccagtgtgccggtgttgccctctctcgctgcaccctcaaccgcaacggccttcgta

SEQ ID NO: 114253 - DNA, 279 bp, Glycine max
aaacatttcttagcacaatccttcaacaccaacgaggacatagctgagaaacttcggtctccagatgacgaaaggaagcagatcgtgacagtggagggaggcctcagcgttatcagccccaagtggcaagaacaagaagacgaagacgaagatgaagacgaagaatatgaacaaactccctcttatcctccacgacgaccaagccatggaaagcatgaagatgacgaggacgaggacgaagaagaagatcaacctcgtcctgatcaccctccacagcga

SEQ ID NO: 114254 - DNA, 269 bp, Glycine max
tgcactcattctttcattctcattgccgtcacagagagatacaagaaacaatgaagtttaaccctagggtttcctcaagccgtcgcaagagccgcaaggctcacttcaccgctccgtcgagcgtgcgccgcgtcctgatgagcgcgcctctctccatcgatctccggtcaaagtacaacgtgcggtccattccggttcgcaaggacgacgaggttcatgtcgtgagacggacctacaatgcgcccgagggcacagtggtccaggtctat

SEQ ID NO: 114255 - DNA, 275 bp, Glycine max
cagtagcaaggttcatcttagcgaaaggtgagtgaggggaagagggggcagccctcggcccgatcatccaattcgctccaacagtcaggcatggttctgtagtcaaagcaacttcgtcactttcggctcgagcaattcggctctatatttgtaatcccagcaggttatccagttgtggtcaacgctacctcaaatctgaatttctttgctattggtattaatgccgagaacaaccagaggaacttcctcgcaggttcgcaagacaatgtgataag

SEQ ID NO: 114256 - DNA, 273 bp, Glycine max
gagttgaaaagggtggttacaccatttcggacaactccactggcaacaagcctgatgtcattttgatcggaactggttcggaattggaaatcgctgccaaagctgctgatgacctaaggaaggaagggaaggctgttagagttgtttcccttgtttcttgggaactttttgatgagcaatcagaagcctacaaggagagtgttttccctgctgctgtttcagccagagttagcattgaggcaggatcaacatttgggtgggagaaaattgttg

SEQ ID NO: 114257 - DNA, 277 bp, Glycine max
cttgacatgagtgaattcatggaaaggcacacagtctcgaaacttattggttcacctcctggatacgttggttacactgagggtggtcaactgactgaggcagttcgccgtcgtccctatactgttgtactctttgatgagattgagaaagcccatcctgatgtattcaacatgatgcttcagatcctggaagtggaaaatttacagacagcaaaggaagaactgtggacttcaagaacacgcttcttataatgacatcaaatgttggaagcagtgt

SEQ ID NO: 114258 - DNA, 279 bp, Glycine max
gcttggattcgtgtgtgggtcaagaaaggaggaatgatcatcttacctgccggaatttatcatcgctttacgctagatgagagcaactacattaaggctttgcgtttttttgttggtgagccagtttggactccatacaatcgtccaaatgaccatctccctgcaagacaacaatatgtcaaggattttgtggaaaaggatgttagcaaccatgctgttgatgccgccgcgtaagatctggttctgcctaatcatagtaccacatgaaaaggaccaaga

SEQ ID NO: 114259 - DNA, 278 bp, Glycine max
aaggtaatggtatttttggcatgatattcccgggttgtcctagcacttatcaagagccgcaagaatctcagcaacgaggacgaagccagaggccccaagaccgtcaccaaaaggtacatcgcttcagagagggtgatttgatcgcagtgcctactggtgttgcatggtggatgtacaacaatgaagacactcctgttgttgccgtttctattattgacaccaacagcttggagaaccagctcgaccagatgcctaggagattctatcttgctgggaac

SEQ ID NO: 114260 - DNA, 280 bp, Glycine max
ccttaatcaataatttaagatactatgatgacagcacggttcccattactgttgctgggacttgttttcctggcttcagtttctgtctcatttggcattgcttactgggaaaaagagaaccccaaacacaacaagtgtctccagagttgcaatagcgagagagactcgtacaggaaccaagcatgccacgctcgttgcaacctccttaaggtggagaaagaagaatgtgaagaaggtgaaattccacgaccacgaccacgttcacaacacccggagaggg

SEQ ID NO: 114261 - DNA, 285 bp, Glycine max
tgagcatggacctccgtgaatcgataagcaaccaaaccgacgtcgctctgagcatcacaaagctcctgttgtcgaaaaacgctcgggacagtaacctcgtgtactcgccgctgtcgttgcacgttgttctgagcatcatcgcttctggctccaagggccccacactcgatcagcttctctccttcctccgatccaagtccaccgaccatctcaactccttcgcctctcagctcgtcgccgtcgtgctctccgacgccgctcccgccggcgggcctttgctctcct

SEQ ID NO: 114262 - DNA, 277 bp, Glycine max
atttgtccttgaatctaatactcagcatggctaagcttgttctttccctttgttttctgcttttcagtggctgctgcttcgctttcagtttcagagagcagccacagcaaaacgagtgccagatccaacgcctcaatgccctcaaaccggataaccgtatagagtcagaaggtggcttcattgagacatggaaccctaacaacaagccattccagtgtgccggtgttgccctctctcgctgcaccctcaaccgcaacgcccttcgcagaccttccta

SEQ ID NO: 114263 - DNA, 186 bp, Glycine max
attcaaaccttgctctatactacacagtacatacactagaagaataatggcttccatcctccactactttttagccctctctctttcttgctcttttctttacttcttatccgactcagtcacccctacaaatccaataaaccttgttgttctacccgttcaaaatgatggttccacacaacatat

SEQ ID NO: 114264 - DNA, 274 bp, Glycine max
gaggcctcatacgacaccaaattcgaggagataaacaaggttctgtttggtagagaggaggggcagcaacaaggggaggagaggctgcaagagagtgtgattgtggaaatctcaaagaaacaaattcgggaactgagcaaacatgccaaatctagttcaaggaaaaccatttcttctgaagataaacctttcaacttgagaagccgcgaccccatctattccaacaagcttggcaagttgtttgagattaccccagagaaaaaccctcagcttc

SEQ ID NO: 114265 - DNA, 273 bp, Glycine max
ctctccattgtctttgaacactcatcaccatggccaagcttgttctttccctttgtttccttcttttcagtggctgcttcgctctgtgagagcaggcacagcaaaatgagtgccagatccaaaagctgaatgccctcaaaccggataaccgtatagagtcggaaggtgggttcattgagacctggaaccctaacaacaagccattccagtgtgccggtgttgccctctctcgctgcacccttaaccgcaatgcccttcgtagaccttcctaca

SEQ ID NO: 114266 - DNA, 269 bp, Glycine max
tcctagtataccttaataaataatttaagatactatgatgagagcacggttcccattactgttgctgggacttgttttcctggcttcagtttctgtctcatttggcattgcttactgggaaaaagagaaccccaaacacaacaagtgtctccagagttgcaatagcgagagagactcgtacaggaaccaagcatgccacgctcgttgcaacctccttaaggtggagatagaagaatgtgaagaaggtgaaattccacgaccacgaccac

SEQ ID NO: 114267 - DNA, 275 bp, Glycine max
gttcaatatcctagtataccttaataaataatttaagatactatgatgagagcacggttcccattactgttgctgggacttgttttcctggcttcagtttctgtctcatttggcattgcttactgggaaaaagagaaccccaaacacaacaagtgtctccagagttgcaatagcgagagagactcgtacaggaaccaagcatgccacgctcgttgcaacctccttaaggtggagaaagaagaatgtgaagaaggtgaaattccacgaccacgact

SEQ ID NO: 114268 - DNA, 276 bp, Glycine max
ggacaacagagcacttggaaagctgaggagagaggctgagcgtgcaaagagggctctcagcagccagcaccaggtccgcgtggaaattgaatcactttttgatggtgttgatttttctgagccactcactcgagctaggtttgaggagttgaacaatgacttgttccggaagaccatgggtccagtgaagaaggctatggaagatgctggattacagaagagtcagattgatgagattgttcttgttggtggaagcacaaggattccaaaggtaca

SEQ ID NO: 114269 - DNA, 280 bp, Glycine max
gctaagtgcaagacaggtgtcctgattgttaacaatgctcgaggggcaattgcggacactcaagcaattgctgatgcttgctccagtggccacgttgcaggttatagtggtgatgtttggttcccacaaccagctccaaaggatcatccatggcgctacatgccaaaccatgccatgactcctcatatttctggtaccaccattgatgcacagttacgttatgctgctggtgtcaaagacatgcttgataggcacttcaagggtgaagactttccagaac

SEQ ID NO: 114270 - DNA, 275 bp, Glycine max
caagggaccaactctccttgaggctcttgaccaaatcaatgagcccaagaggccctcagacaagccactcaggcttccattgcaggatgtctacaaaattggtggtattggtaccgtgccagtgggacgtgttgagactggtgtcgtgaagcccggtatggtggtgacttttggtcccactgggctgacaactgaggttaagtctgttgagatgcaccatgaggctctcacagaggctcttccaggtgacaatgttggctttaatgtgaagaatg

SEQ ID NO: 114271 - DNA, 253 bp, Glycine max
ccagagccaaggtacgttaaacaatcttcttcatcgtcgtcgccgcaatgggacgtgtgatccgtgcgcacgtaagggagcaggctcggtcttcaagtcccacacgcaccaccgctacggctctgcccgcttccggagcctggatttctgacagcgcaacggctacctgactggtatcgtcactgacgtcatccacgatcctggacgttgcgcgcatctcgctaaggaccccttgcgataaccgttccgctac

SEQ ID NO: 114272 - DNA, 271 bp, Glycine max
ctccattgtctttgaacactcatcaccatggccaagcttgttctatccctttgtttccttcttttcagtggctgcttcgctctgagagagcaggcacagcaaaatgagtgccagatccaaaagctgaatgccctcaaaccggataaccgtatatagtcggaaggtgggttcattgagacctggaaccctaacaacaagccattccagtgtgccggtgttgccctctctcgctgcacccttaaccgcaatgcccttcgtagaccttcctaca

SEQ ID NO: 114273 - DNA, 272 bp, Glycine max
gtccagagtctacaattgcagagaagttgggtgtggagcgagacaacaggtcaaacttcaaggccgattatggccgcttctcaactaatgtcaaaggggtgtttgcagccggtgattgtcgccgcggtcagtccctggtggtgtgggcgatttcagagggacggcaagcggcagcacaggtggaaaactacctcatcaaagaagaccaagaccacaggaatcaagatgggcttgtcaagaggcagcagggcctcaacatgaagcagcagggc

SEQ ID NO: 114274 - DNA, 274 bp, Glycine max
cggctcgagattgtctttgaacactcatcaccatggccaagcttgttctttccctttgtgtccttctttgcagtggctgcttcgcgctgagagagcaggcacagcaaaatgagtgccagatccaaaagctgaatgccctcaaaccggataaccgtatagagtcggaaggtgggttcattgagacctggaaccctaacaacaagccattccagtgtgccggtgttgccctctctcgctgcacccttatccgcaatgcccttcgtagaccttccta

SEQ ID NO: 114275 - DNA, 281 bp, Glycine max
agaggaccctagagaaagagattgcttgaaaacaattctgcacagagtctatgggaaattcatgattcataggcctttcatacggaaatctgttagcaacatcatctaccggtttgttttcgagaccgagcgacataatggaatcgtcggactgttggagatttttgggagtgtcattagcgggtttgccttgccattgaaggaagagcacaagatatttttgttgagggctttggttcctttgcacaaacctaaatctgttggcatttatcatcagcagt

SEQ ID NO: 114276 - DNA, 140 bp, Glycine max
ctgcttcgctctgagagagcaggcacagcaaaatgggtgccagatccagaagctgaatgcccacaaaccggataaccgtatagagtctgaaggttggttcattgagacctggaaccctaacaacaagccattccagtgtg

SEQ ID NO: 114277 - DNA, 278 bp, Glycine max
cgagcagagagaggaacaggaatggcctcgcaaggaggaaaaacgcggagaaaagggaagtgaagaggaagatgaggatgaggatgaggaacaagatgaacgtcaattcccattcccacgcccacctcatcagaaggaagagcgaaagcaagaggaagatgaggatgaggagcagcagcgagagagcgaagaaagtgaagattctgagttacgaagacataagaataagaacccttttctcttcggctctaacaggttcgaaactctcttcaaaaacc

SEQ ID NO: 114278 - DNA, 271 bp, Glycine max
caacaatgaagacactcctgttgttgccgtttctattattgacaccaacagcttggagaaccagctcgacgagatgcctaggagattctatcttgctgggaaccaagagcaagagtctctaaaatatcagcagcagcagcaaggaggttcccaaagccagctaggaaagcaacaagaagatgcctacgaaggcagcaacatattgagtggcttcgccctgaattcttgaaagaagcgttcggcgtgaacatgcagatagtgagcaacctac

SEQ ID NO: 114279 - DNA, 276 bp, Glycine max
gaagagcatcactgaactaacaaagcaaccctatgtcgaaggtggtttgtgtcaccggagccagcggcgccatcggatcatgggtggtcctactcctcctccagcgtggttacaccgtccatgccaccgtccaagatatcaaggatgacaatgagacgaaacatttggaggaaatggaaggagcaaagagtcatctccatttttttgaaatggatcttcttgacatcgactccattgccgctgccataaagggttgttccggcgtaatccaccttg

SEQ ID NO: 114280 - DNA, 270 bp, Glycine max
gccgctgcgtgatgcatcaatctcccagcaaatacctgttggggctctggcaacggctctggctaatgcttctccagagcagcaaaggacgatgctgggtgagaatctctacccccttgtggaacagttagagcctgataatgctgccaaagtgacaggcatgcttcttgagatggaccagactgaagttctgcatttgcttgagtcgccagaagccctgaacatgcaggtggctgaggcaatggacgtcctaaggaatgttgctcagca

SEQ ID NO: 114281 - DNA, 267 bp, Glycine max
ctcgagccgaatcggcacgagcggctcgagccattttggaagctagagcacacacgttcgagtctcctcgccactttgattccgaggatgtttcggacaacatcaaggagcgaagcgtacttgggttggagtttaaagtgaaacagaaaaaatcacccttgaacctggggacatgatacacataccagctggcaccccactgtacatcgttaacagagatgagaatgataagctcttccttgccatgctccatatacctgtctctgt

SEQ ID NO: 114282 - DNA, 269 bp, Glycine max
gttcaatttcctagtacaccgtattaaagaatttaagatatactatgatgagagcgcggttcccattactgttgctggtagttgttttccttgcttcagtttctgtctcatttggcattgcgtattgggaaaagcagaaccccagtcacaacaagtgcctccgaagttgcaatagcgagaaagactcctacaggaaccaagtatgccacgctcgttgcaacctccttaaggtggaggaagaagaagaatgcgaagaaggtcaaattcca

SEQ ID NO: 114283 - DNA, 262 bp, Glycine max
tgctgaagacatcatcaaagaacaagtcaagcttctctacaagcgccacaagaacactgctttctcctggctcagaaacatcttccatgactgtgctgttcagagttgtgatgcttcactgttgctggactccacaagaaggagcttgtctgagaaggaaacagatagaagctttgggttgagaaatttcaggtacattgagaccatcaaagaagctttggaaagggaatgcccaggagttgtttcctgtgctgatatcctc

SEQ ID NO: 114284 - DNA, 261 bp, Glycine max
ctcgagaacactggtgagcttctttgctttgaatttggctccacacaatagttaatgacctttcgtttttccaccactttcattttcaaggaacatggtttttcatacacacatccatatttccttgtgcaggtgactttgtgagagccaatggactccaagagggagatttcatagtgatatactcagatgtgaagtgtggcaaatatgtaagaccctttcttattttccatttttcatttcttaacatgttttgaggta

SEQ ID NO: 114285 - DNA, 129 bp, Glycine max
gatttgaaattttgataaaccgcgatcacaggttgccgcaccttaaaaccggaaacaaaagcaatcgttacttgatttcaagaatttctcaatttcttcctacttctttgtgcacgatttcttaaggga

SEQ ID NO: 114286 - DNA, 256 bp, Glycine max
ggaaaatctgagtcaacgagtcagccgagtcgcaactcaacccaactcggttaccgttagcctctgaacttcccatcaccaccgccaacacctgcttatacgcgtagaagaatctcttcatcgccgcctcaatcgcctgcatcgcctgcaacaagtgaaccttctcgaactcgctcttcgaaacgtagagcttcatcgccgcctcttgaatcctcggtcctcccttcggatccacctccacctccaatatctccgg

SEQ ID NO: 114287 - DNA, 254 bp, Glycine max
catgcaacaggttatgcagaatcctaattttatgaccatggctgagcgcctgggtaatgcattgatgcaggatccgtctatgtctgcctgcttgaaagtttttctaatccatcaaataaagaccagcttgaagaaagaatggcacgcatcaaggaggatccatctctgaaacatattttggaggagatagagactggcggtcctgctgctatgatgaggtactggaataatgaggaggttttgcagaagttggg

SEQ ID NO: 114288 - DNA, 253 bp, Glycine max
caaacccggtagatttgagagtttcttcctatctagcactcaagctcaacagtcctacttgcaagggttcagcaagaatattctagaggcctcatacgacaccaaattcgaggagataaacaaggttctgtttggtagagaggaggggcagcaacaaggggaggagaggctgcaagagagtgtgattgtggaaatctcaaagaaacaaattcgggaactgagcaaacatgccaaatctagttcaaggaaaacc

SEQ ID NO: 114289 - DNA, 254 bp, Glycine max
gaacttttgaagtagcaaaaaaggtctgggcagaggttttcttctaccttgctgagaacaatgtcctttttgagggtattcttcttaagcctagcatggttacacctggagctgagtccaaggacatggccagtcctcagacagttgctgattacaccctcaagctccttcacaggagaattccccctgctgtccctggaattatgtttttgtctggtggacagtctgaggttgaagctaccctcaacttgaat

SEQ ID NO: 114290 - DNA, 255 bp, Glycine max
tgctttgctattacctccagcaagttcaacgagtgccaactcaacaacctcaacgcgttggaacccgaccaccgcgttgagtccgaagtggtcttattgaaacatggaactctcaacaccctgagctgcaatgcgccggtgtcactgtttccaaacgcaccctcaaacacaacggcctccagttgccatcttactcaccttatccccaaatgatcattgtcgttcaagggaagggagcaattggatttgcatttc

SEQ ID NO: 114291 - DNA, 248 bp, Glycine max
gttcctcactgactaagacatagcgatgagaaccaaactttctttagctatctttttctttttgcttttagccatattttcaaacctagcctttggcaaatgtaaagaaaccgaggtagaagaagaagaccctgagctcgtaacatgcaaacaccaatgccaacagccacagcaatacactgagggtgacaagcgggtatgcttgcaaagatgtgacaggtatcatcgtatgaagcaagagcgagaga

SEQ ID NO: 114292 - DNA, 106 bp, Glycine max
attgcaccataaacactcatcagtcatcaccatggccaagctagattttaccctttgtaccgtgcttttcagtggctgctgcttcgctttcagttccagagagcag

SEQ ID NO: 114293 - DNA, 259 bp, Glycine max
gtttgtgtgtgacaatctttatagttctaaggagggtgcaagagagaactgaatttgctgtgatggcaactcgtagatatgcttttggaagagctgatgaggccactcatccagactccatgagggccactttggctgaatttgtttctactttcatctttgtctttgctggagaaggctctggccttgctttggttaaaatttaccaggattcagctttctcagctggtaaattgttggcagttgcacttgcacatgg

SEQ ID NO: 114294 - DNA, 259 bp, Glycine max
gggttgtcgtcttcatcggcgatcgcgcagaaaacatgggaactcgagaacaacatcatcccgatggacactccgggcggcgccgctactcctccaccgctaccaccacgaccaacgccgacgactcgatcttctactacgacgaggcggggcagaacgagttccagcgcgacaagccctgggccaacgacccccactacttcaagcgcgtgaagatctccgcactcgcgctcctcaagatggtcgtccacgcgcgctc

SEQ ID NO: 114295 - DNA, 253 bp, Glycine max
caataatctagtataccttaataaataatttaagatactatgatgagagtacggttcccattactgttgctgggacttgttttcctggttcagtttctgtctcatttggcattgcttactgggaaaaagagaaccccacacacaacaagtgtctccagagttgcaatagcgagagagactcgtacaggaaccaagcatgccacgctcgttgcaatattactaaggtggagaaagaagaatgtgaagaaggtga

SEQ ID NO: 114296 - DNA, 254 bp, Glycine max
caaaacttttgtttttgatgagcaactctacgagggttttcaagactgatgcaggggaaatgcgtgtgctgaaaagccatggtggtagatattttataggcacatgcacattggcttcatctctatggaaccaaagtccttgtttgttcctcagtacctcgactcaaatctcatcatattcatccgtagaggggaagcaaagctgggattcatatatgatgatgaactagcggaaaggagattgaagacagggg

SEQ ID NO: 114297 - DNA, 253 bp, Glycine max
aatatattaaagaatttaagatatactatgatgagagcgcggttcccattactgttgctgacctatgtcttcctggcatcagtttctgtctcattcggccatgcgtattgggaaaagcagtaccccagtcacaacaagtgcctccgaagttgcaatagcgagaaagactcctacaggaaccaagcatgccacgctcgttgcaacctccttaaggtggaggaagaagaagaatgcgaagaaggtcaaattccac

SEQ ID NO: 114298 - DNA, 250 bp, Glycine max
ctttgaacactcatcaccatggccaagcttgttctttccctttgtttccttcttttcagtggctgcttcgctctgagagagcaggacagcaaaatgagtgccagatccaaaagctgaatgccctcaaaccggataaccgtatagagtcggaaggtgggttcattgagacctggaaccctaacaacaagccattccagtgtgccggtgttgccctctctcgctgcacccttaaccgcaatgcccttcgtag

SEQ ID NO: 114299 - DNA, 252 bp, Glycine max
gaatcaaatcatgatatcttctacaccaaccgctcagtaacccggaacaaggaatatctaactgttggtgtggacaacgagcctatattccatggaagaacagccattgagatatacagtgactacatgaagagtttcagagaaaacatgtcagattttttagaatctggacttattatagacattgaagttgggcttggcccagcaggagagctcagatacccctcttatccacaaagccaaggatgggaa

SEQ ID NO: 114300 - DNA, 227 bp, Glycine max
cagtggctgctgcttcgctttcagttccagagagcagcctcagcaaaacgagtgccagatccaaaaactcaatgccctcaaaccggataaccgtatagagtcagaaggagggctcattgagacatggaaccctaacaacaagccattccagtgtgccggtgttgccctctctcgctgcaccctcaaccgcaacgcccttcgtagaccttcctacaccaacggtcccc

SEQ ID NO: 114301 - DNA, 256 bp, Glycine max
caacaacacaacacaggataaataaattaaattaaaaactagctaaattcctctctctctctctttctcttcgagggtttgggtttctcttcctcccttggagaaaaagaagagccaccgctgcgacgccgttcgtgcatttttgaggtgccgctgtcatgtttgggcgtggtggaccaaggaggagtgataactccaaatattatgatattctcgggatttccaaaaatgccagtgaagctgaaatcaagaaggc

SEQ ID NO: 114302 - DNA, 260 bp, Glycine max
tctcgagccgattcggctcgaggttgttcctcactgacctcaccattgcgaccagagccaagctttctttagctatcttccgtttctttctttagccttgatttcaaacctagccttgggcaaacttaaagaaaccgaggtcgaagaagatcccgagctcgtaacatgcaaacaccagtgccaacagcaacggcaatacactgagagtgacaagcgaacatgcttgcaacaatgtgacagtatgaagcaagagcgagaga

SEQ ID NO: 114303 - DNA, 257 bp, Glycine max
gaggaggatagtggagccattgtgacagtgaaaggaggtctaagagtcacagctccagccatgaggaagccacagcaagaagaagatgatgatgatgaggaagagcagccacagtgcgtggagacagacaaaggttgccaacgccaaagcaaaaggagcagaaatggcattgatgagaccatttgcacaatgagacttcgccaaaacattggtcagaattcatcacctgacatctacaaccctcaagctggtagcat

SEQ ID NO: 114304 - DNA, 255 bp, Glycine max
tgaacactcatcaccatggccaagcttgttctttccctttgtttccttcttttcagtggctgcttcgctctgagagagcaggcacagcacaatgagtgccagatccaaaagctgaatgccctgcaaaccggataaccgtatagagtcggaaggtgggttcattgagacctggaaccctaacaacaagccattccagtgtgccggtgttgccctgctctcgctgcacccttaaccgcaatgcccttcgtagacctt

SEQ ID NO: 114305 - DNA, 256 bp, Glycine max
ggcgatagtgatactggtaattaatgaaggagatgcaaacattgaacttgttggcctaaaagaacaacaacaggagcagcaacaggaagagcaacctttggaagtgcggaaatatagagccgaattgtctgaacaagatatatttgtaatcccagcaggttatccagttgtggtcaacgctacctcaaatctgaatttctttgctattggtattaatgccgagaacaaccagaggaacttcctcgcaggttcgcaa

SEQ ID NO: 114306 - DNA, 255 bp, Glycine max
  unsure (1)..(255): unsure at all n locations
cttattaacactttccttagttcaatatggggaagcccttcttcactctctctctttcttcccnttgcttgctactcttgtcgagtgcatgctttgctattacctccagcaagttcaacgagtgccaactcaacaacctcaacgcgttggaacccgaccaccgcgttgagtccgtcggtggtcttattgaaacatggaactctcaacaccctgagctgcaatgcgccggtgtcactgtttccaaacgcaccctca

SEQ ID NO: 114307 - DNA, 254 bp, Glycine max
actagttcaatatcctagtataccttaataaataatttaagatattatgatgagagcacggttcccattactgttgctgggacttgttttcctggcttcagtttctgtctcatttggcattgcttactgggaaaaagataaccccaaacacaacaagtgtctccagagttgcaatagcgagagagactcgtacaggaaccaagcatgccacgctcgttgcaacctccttaaggtggagaaagaagaatgtgaag

SEQ ID NO: 114308 - DNA, 254 bp, Glycine max
aaaattcttccaccaagttaacgaaacaattgtgttgcttcttttctccctcttaggtctctcttctagattcagcatatactctcacagttccatattggaccttgacctaaccaagtttaccacacagaaacaggtacattcactgttccaactatggaagagtgagcatggacgtgtctaccataaccacgaagaagaggcaaagagacttgagattttcaagaataacttgaactatatcagggacatga

SEQ ID NO: 114309 - DNA, 251 bp, Glycine max
tttgaacactcatcaccatggccaagcttgttctttccctttgtttccttcttttcagtggctgcttcgctctgagagagcaggccagcaaaatgagtgccagatccaaaagctgaatgccctcaaaccggataaccgtatagagtcggaaggtgggttcattgagacctggaaccctaacaacaagccattccagtgtgccggtgttgccctctctcgctgcacccttaaccgcaatgcccttcgtagac

SEQ ID NO: 114310 - DNA, 249 bp, Glycine max
gagttgaaaagggtggttacaccatttcggacaactccactggcaacaagcctgatgtcattttgatcggaactggttcggaattggaaatcgctgccaaagctgctgatgacctaaggaaggaagggaaggctgttagagttgtttcccttgtttcttgggaactttttgatgagcaatcagaagcctacaaggagagtgttttccctgctgctgtttcagccagagttagcattgaggcaggatcaa

SEQ ID NO: 114311 - DNA, 251 bp, Glycine max
aaggaaaggttaactaagaagcaatacttcaatggccacccttgttgttcataaccaaacttcttctgctcaagatgctgaggcctccaacaggctttcaaaggatggggggctgatgacaaggccattatagcaatactgggtcacagaaatgttcatcagaggcaagaaatcagaaaagcttatgaggagatttaccaagaggatctcatcaaacgccttgagtccgagatctctggtgactttgagag

SEQ ID NO: 114312 - DNA, 253 bp, Glycine max
actgaccaagccatggcgatgagaaccaaactttctttagctatctttttcttttttcttttagccttattttcaaacctagcctttggcaaatgtaaagaaaccgaggtagaagaagaagaccctgagctcgtaacatgcaaacaccaatgccaacagccacagtaatacactgagggtgacaagcgggtatgcttgcaaagatgtgacaggtatcatcgtatgaagcaagagcgagagaaacaaatccaag

SEQ ID NO: 114313 - DNA, 254 bp, Glycine max
cgatattattaacacttccttagttcaatatggggaagcccttcactctctctctttcttccctttgcttgctactcttgtcgagtgcatgctttgctattagctccagtaagctcaacgagtgccaactcaacaacctcaacgcgttggaacccgaccaccgcgttgagtccgaagtggtttgattcaaacatggaactctcaacaccctgagctgaaatgcgccggtgtcactgtttccaaactcaccctca

SEQ ID NO: 114314 - DNA, 255 bp, Glycine max
cattggtccttaaacactcatcagtcatcaccatggccaagctagttttttccctttgttttctgcttttcagaggctgctgcttcgtttcagttccagagagcagcctcagcaaaacgagtgccagatccaaaaactcaatgccctcaaaccggataaccgtatagagtcagaaggagggctcattgagacatggaaccctaacaacaagccattccagtgtgccggtgttgccctctctcgctgcaccctcaa

SEQ ID NO: 114315 - DNA, 254 bp, Glycine max
taaacactcatcagtcatcaccatggccaagctagttttttccctttgttttctgcttttcagtggctgctgcttcgctttcagttcagagagcagcctcagcaaaacgagtgccagatccaaaaactcaatgccctcaaaccggataaccgtatagagtcagaaggagggctcattgagacatggaaccctaacaacaagccattccagtgtggcggtgttgccctctctcgctgcaccctcaaccgcaacgc

SEQ ID NO: 114316 - DNA, 254 bp, Glycine max
attgtcgtcattggacatgtcgactctgggaagtcaactaccactggtcacttgatctacaagcttggaggtattgacaagcgtgtgattgagaggttcgagaaggaggctgccgagatgaacaagaggtcattcaagtatgcctgggtgctcgacaagctcaaagctgagcgtgaaagaggaattaccattgatattgctttgtggaagtttgaaaccaccaagtactactgcacggtcattgatgctcctgg

SEQ ID NO: 114317 - DNA, 256 bp, Glycine max
aacattctctccattgtctttgaacactcatcaccatggccaagcttgttctttccctttgtatccttcttttcagtggctgcttcgctctgagagagcaggcacagcaaaatgagtgccagatccaaaagctgaatgccctcaaaccggataaccgtatagagacggaaggtgggttcattgagacctggaaccctaacaacaagccattccagtgtgccggtgtcgaactctctcgctgcacccttaaccgcaa

SEQ ID NO: 114318 - DNA, 253 bp, Glycine max
attcttaccttggtgaacaacgacgaccgagactcttacaaccttcaatctggcgatgccctaagagtccctgcaggaaccacatactatgtggttaaccctgacaacgacgagaatctcagaatgataacactcgataatacccgttaacaaacccggtagatttgagagtttcttcctatctagcactcaagctcaacagtcctacttgcaagggttcagcaagaatattctagaggcctcatacgacacc

SEQ ID NO: 114319 - DNA, 252 bp, Glycine max
tctctccattggtccttaaacactcatcagtcatcaccatggccaagctagttttttccctttgttttctgcttttcagtggctgctgcttcgctttcagttccagagagcagcctcagcaaaacgagtgccagatccaaaaactcaatgccctcaaaccggataaccgtatagagtcagaaggagggctcattgagacatggaaccctaacaacaagccattccagtgtgccggtgttgccctctctcgct

SEQ ID NO: 114320 - DNA, 254 bp, Glycine max
gtgaagaggaacaagatgaacgtgaacacccacgcccacaccaacctcatcaaaaggaagaggaaaagcacgaatggcaacacaagcaggaaaagcaccaaggaaaggaaagtgaagaagaagaagaagaccaagacgaggatgaggagcaagacaaagagagccaagaaagtgaaggttctgagtctcaaagagaaccacgaagacataagaataagaacccttttcacttcaactctaaaaggttccaaact

SEQ ID NO: 114321 - DNA, 254 bp, Glycine max
cttattaacactttccttagttcaatatggggatatccttcttcactctctctctttcttccctttgcttgctgactcttctcgagtgcatgctttgctattacctccagcaagttcaacgagtgccaactcaacaacctcaacgcgttggaacccgactaccgcgttgagtccgaaggtggtcttattgaaacatggaactctcaacaccctgagctgcaatgcgccggtgtcactgtttccaaacgcaccct

SEQ ID NO: 114322 - DNA, 246 bp, Glycine max
ctagttctgagtattctgatcgctccctgagagagctcgtcgcggcggttgcagaagaagattgcaagatgaagttcaacatcgcgaatcccaccactggatgccagaagaagctcgagatcgacgacgatctgaaactgcgagcattttgggacaagaggatctcacaggaggtcatcggagatgcactcggtgaggaatttaagggctatgtcttcaaaattaccggagggttgtgacaaacaa

SEQ ID NO: 114323 - DNA, 250 bp, Glycine max
tgtaatttctgccagcctcaaaaaagacttgctctgcctctgccactctctgagtaggactacactgccatggctgcctcagtctccactgttggagctgtcaacggagctccactgagcttgaacagctctggagctggagcttcagttcccagttcagccttctttggcaccagcttgaagaaggttattgcctcaagggtccctaacgtcaagatttcttctggaagtttcaaaatcgttgccgcgg

SEQ ID NO: 114324 - DNA, 251 bp, Glycine max
gacgctgattacctcatcgttatccttaacgggactgccattctttccttggtgaacaacgacgacagagactcctacagacttcaatctggtgatgccctgagagtcccctcaggaaccacatactatgtggtcaaccctgacaacaacgaaaatctcagattaataacactcgccatacccgttaacaagcctggtagatttgagagtttcttcctatctagcactgaagctcaacaatcctacttgca

SEQ ID NO: 114325 - DNA, 248 bp, Glycine max
gcggcggcaacagggagagaagatgaagttcaatccacgtgtgtcgagcagccgccgcaagagccgaaaggctcatttcacggcgcgtcgagcgtgcggcgggtgcttatgagcgcccctctgtcggcggactgcggtccaagtacaacgtgaggtcgatcccagtacggaaggaggacgaggtgcaggtggtgcgaggaacatacaagggtcgcgaggggaaggtgactcaggtctaccgtcgaaag

SEQ ID NO: 114326 - DNA, 251 bp, Glycine max
gttcaatatcctagtatatcttaataaataatttaagatactatgatgagactacggttcccattactgttgctgggacttgttttcctggcttcagtttctgtctcatttgtaattgcttactgggaaaaagagaaccccaaacacaacaagtgtctccagagttgcaatagcgagagagactcgtacaggaaccaagcatgccacgctcgttgcaacctccttaaggtggagaaagaagaatgtgaaga

SEQ ID NO: 114327 - DNA, 244 bp, Glycine max
gttcctcattgaccaagccagagcgatgagaaccaaactttctttagctatctttttcttttttgttttagccatttttcaaacctagcctttggcaaatgtaaagaaaccgaggtagaagaagaagaccctgagctcgtaacatgcaaacaccaatgccaacagccacagcaatacactgagggtgacaagcgggtatgcttgcaaagatgtgacaggtatcatcgtatgaagcaagagcgag

SEQ ID NO: 114328 - DNA, 256 bp, Glycine max
tggaactgagcttcttcaaaagtgatcagtcatcaagttatgatgatgatgagtattcaaaaccatgctgtgatctctgcatgtgcaacgctcaatgcctcctcaatgcagctgtgaagatattaggctgaattcatgccactcagattgtaagagctgtatgtgcacacgctcacagccaggacagtgtcgttgtcttgacaccaacgacttctgctacaaaccttgcaagtccagagatgactagaaaaactaa

SEQ ID NO: 114329 - DNA, 255 bp, Glycine max
ctatcttgctgggaaccaagagcaagagtttctaaaatatcagcagcagcagcaaggaggttcccaaagccagaaaggaaagcaacagaagaagaaaacgaaggaagcaacatattgagtggcttcgcccctgaattcttgaaagaagcgttcggcgtgaacatgcagatagtgagaaacctacaaggtgagaacgaagaggaggatagtggagccattgtgacagtgaaaggaggtctaagattcacagctcca

SEQ ID NO: 114330 - DNA, 253 bp, Glycine max
aaggaagcctcctacgatgaaattaaaaatgctatcaaggaggaatcagagggcaagttgaagggaattcttggttacactgaagatgatgtggtctccaccgactttgtgggcgatagcagatcaagtatttttgatgcaaaggctggaattgcattgaataagaactttgtgaagcttgtttcttggtacgacaacgagtggggatacagctcacgtgtcattgacctgcttgtattcgttgccaagaagt

SEQ ID NO: 114331 - DNA, 256 bp, Glycine max
cccttccctattgtaatttctgccagcctcaaaaaagacttgctctgcctctgccactctctgagtaggactacactgccatggctgcctcagtctccactgttggagctgtcaacggagctccactgagcttgaacagctctggagctggagcttcagttcccagttcagccttctttggcaccagcttgaagaaggttattgcctcaagggtccctaacgtcaagatttcttctggaagtttcaaaatcgttgc

SEQ ID NO: 114332 - DNA, 253 bp, Glycine max
gggggctgatgacaaggccattatagcaatactgggtcacagaaatgttcatcagaggcaagaaatcagaaaagcttatgaggagtttaccaagaggatctcatcaaacgccttgagtccgagatctctggtgatcatgagagagctatgtaccggtggatgttgcagcctgcggatcgtgatgctgttttggtgaatgtggcaatcaagaatggcaccaaagactaccatgtgattgcagagattgcttgtg

SEQ ID NO: 114333 - DNA, 252 bp, Glycine max
gttcaatatcctagtataccttaataaataatttaagatactatgatgagagcacggttcccattactgttgctgggacttgttttcctggcttcagtttctgtctcatttggcattgcttactgggaaaaagagaaccccaaacacaacaagtgtctccagagttgcaatagcgagagagactcgtacaggaaccaagcatgccacgctcgttgcaacctccttaaggaggagaaagaagaatgtgaagaa

SEQ ID NO: 114334 - DNA, 252 bp, Glycine max
aacaattccttcacttgcagcactgttgcatcatcatcttcattgcaaaaccctaaacttcaccttcaaccatgaccacacaagtaccaccacacagtgtccaagtccacacaacaacacacacatacgaagctggcgtcgtcccccccggagcccgtttcgaaccgccgcgttatgaagccggcgtcaaagcgccctccatttaccattccgagagaggtccaacgacttcccaggtcctcgccgtcctcg

SEQ ID NO: 114335 - DNA, 247 bp, Glycine max
tctcaacaaggctcaccccgtgttaagactcagggttgaccaaaggaccccaatttccttcatacttaagctcagacacttgactctgtcgaaggttgtaagaatgggcaagaacctctgagggaattgccctaaacacatccttcaagtagctagtgactgcgttgtggtgtgtcttgaatactatgtattcgaatccttgttctccggcttgctccgtcaccacgaagttctgtggtaccaccag

SEQ ID NO: 114336 - DNA, 248 bp, Glycine max
attatcaaataattaattaaattcctcgtggaatcttgttgaagccatgtctacagctggtcaggtcatcaagtgcagagctgcggtggcatgggaagcagggaagccactatcgatagaaaccatagaagtggcaccaccccagaaaggtgaagtgcgtttgaagatcctcttcaactccctttgccgtacagatgtttactggtgggatgctaagggccagactccgctgtttcctcgtatcttag

SEQ ID NO: 114337 - DNA, 250 bp, Glycine max
tgtagacactcctgttgttgccgtttctattattgacaccaacagcttggagaaccagctcgaccagatgcctaggagattcatcttgctgggaaccaagagcaagagtttctaaaatatcagcaagagcaaggaggtcatcaaagccagaaaggaaagcatcagcaagaagaagaaaacgaaggaggcagcatattgagtggcttcactctggaattcttggaacatgcattcagcgtggacaagcaga

SEQ ID NO: 114338 - DNA, 250 bp, Glycine max
ctttccaaatcccaactactattcacactcactgcagatctcaatccatggctaccattgttagcatcaaggcccgccagatctttgacagtcgtggcaatccaaccgtcgaggtggatttgacatgctccgatggtacttttgctagagctgctgttccaagtggtgcatccactgggatttatgaggcccttgaattgagagatggaggatctgactaccttggaaagggtgtatcaaaggctgttga

SEQ ID NO: 114339 - DNA, 256 bp, Glycine max
gagcgagcgagcgagcagtttcaaagagaggatttgggattggctaggcgagggattgcgctgcgtctcttcctcttctctttcgattcatccctcattcataatcttccaatccaacaacctcagcctcacactcacacatacacacatctgaacgcgtatcgtccctcccatggcttcaaagcgcatcctcaaggagctcaaggacttgcagacagacccaccaacttctcgcagcgctggtccagtagctgag

SEQ ID NO: 114340 - DNA, 248 bp, Glycine max
ggaggggtattttggtcatggatgagtccaatgctacctgtgggaagcgtttggcttcaattgggctagagaacactgaagctaaccgccaggcataccgtaccctccttgtgacagttccaggacttggtcagttcatctctggtgccattctctttgaggaaactctctaccaatccacaactgatggcaggaagattgtcgacgtgctcctcgagcaaaacattgtacccggtattaaagtcgac

SEQ ID NO: 114341 - DNA, 250 bp, Glycine max
cattggtgcttaaacactcatcagtcatcaccatggccaagctagttttttccctttgttttctgcttttcagtggctgctgctcgctttcagttccagagagcagcctcagaaaaacgagtgccagatccaaaaactcaatgccctcaaaccggataaccgtatagagtcagaaggagggctcattgagacatggaaccctaacaacaagccattccagtgtgccggtgttgccctctctcgctgcacc

SEQ ID NO: 114342 - DNA, 247 bp, Glycine max
ggagacaagaaaaatgagccatggtggcctaagatgcaaactcgtgaagagctagttgaagcttgcgctatcatcatatggactgcttcagcacttcatgcagctgttaattttggacagtatccctatggaggtttaatcttaaaccgtccaactcttagtaggcgattcatgcctgagaaaggttctgctgagtatgaggagctgaggaagaatccccagaaggcttacttgaagactattacac

SEQ ID NO: 114343 - DNA, 248 bp, Glycine max
tcagtacattgtcactgatgacaaagaaggaccagattctgaacttgagaaacacattccagatgcccatgtcatcatatctactccatttcaccccgcctatgtcaccgcggaaagaataaagaaagcgcaaaaattggagctgcttttgactgctggcattggttctgatcacgttgatctcaaagctgcagctgctgctggtttaactgtggcagaggtcacgggaagcaatgtcgtgtcggttg

SEQ ID NO: 114344 - DNA, 249 bp, Glycine max
gcaagagtttctaaaatatcagcagcagcagcaaggaggttcccaaagccagaaaggaaagcaacaagaagaagaaaacgaagaagcaacatattgagtggcttcgcccctgaattcttgaaagaagcgttcggcgtgaacatgcagatagtgagaaacctacaaggtgagaacgaagaggaggatagtggagccattgtgacagtgaaaggaggtctaagagtcacagctccagccatgaggaagcca

SEQ ID NO: 114345 - DNA, 249 bp, Glycine max; identical to SEQ ID NO: 102444

SEQ ID NO: 114346 - DNA, 250 bp, Glycine max; identical to SEQ ID NO: 113262

SEQ ID NO: 114347 - DNA, 263 bp, Glycine max
gttcaatatcctagtataccttaataaataatttaagatactatgatgagagcacggttcccattactgttgctgggacttgttttcctggcttcagtttctgtctcatttggcattgcttactgggaaaaagagaaccccaaacacaacaagtgtctccagagttgcaatagcgagagagactcgtacaggaaccaagcatgccacgctcgttgcaacctccttaaggtggagaaagaagaatgtgaagaaggtgaaattcc

SEQ ID NO: 114348 - DNA, 238 bp, Glycine max
ggctcgagcccattcccacgcacacaacctcgtcaagcggaagagcactagcagagagaggaacaggaatggcctagcaaggaggaaaaacgcggagaaaagggaagtgaagaggaagatgaggatgaggatgaggaacaagatgaacgtcaattcccattcccacgcccacctcatcagaaggaagagcgaaagcaagaggaagatgaggatgaggagcagcagcgagagagcgaag

SEQ ID NO: 114349 - DNA, 248 bp, Glycine max
cttattaacactttccttagttcaatatggggaagcccttcttcactctctctctttcttccctttgctttctactgttgtccagtgcatgctttgctattacctccagcaagttcaacgagtgccaactcaacaacctcaacgcgttggaacccgaccaccgcgttgagtccgaaggtggtcttattgaaacatggaactctcaacaccctgagctgcaatgcgccggtgtcactgtttccatacgc

SEQ ID NO: 114350 - DNA, 260 bp, Glycine max
cgcaaggaggaaaaacgcggagaaaagggaagtgaagaggaagatgaggatgaggatgaggaacaagatgaacgtcaattcccattcccacgcccacctcatcagaaggaagagcgaaagcaagaggaagatgaggatgaggagcagcagcgagagagcgaagaaagtgaagattctgagttacgaagacataagaataagaacccttttctcttcggctctaacaggttcgaaactctcttcaaaaaccaatatggtcg

SEQ ID NO: 114351 - DNA, 154 bp, Glycine max
agcttactgggaaaaagagaaccccaaacacaacaagtgtctccagagttgcaatagcgagagagactcgtacaggaaccaagcatgccacgctcgttgcaacctccttaaggtggaaaaagaagaatgtgaagaaggtgaaattccacacaac

SEQ ID NO: 114352 - DNA, 98 bp, Glycine max
tgaaattttgataaacggcgatcacaggttgccgcatcttaaaaccggaaacaaaagcaatcgttacttgatttcaagagtctctcaatttctttcta

SEQ ID NO: 114353 - DNA, 258 bp, Glycine max
ctagttcaatatcctagtataccttaataaataatttaagatactatgatgagagcacggttcccattactgttgctgggacttgttttcctggcttcagtttctgtctcatttggcattgcttactgggaaaaagagaaccccaaacacaacaagtgtctccagagttgcaatagcgagagagactcgtacaggaaccaagcatgccacgctcgttgcaacctccttaaggtggagaaagaagaatgtgaagaaggt

SEQ ID NO: 114354 - DNA, 254 bp, Glycine max
gtggattgtactggggaaggtgttttgttcattgaggctgatgcagatgtcactcttaagcaatttggtgatgctcttcaacctcctttcccgtgctgggaggaactcctttatgatgtacctggttctcaaggagtgcttaacactccccttctgcttattcaggtaacgcggctcaagtgcgggggtttcatattagctgtccggctgaaccacacgatgagcgacgcagccggtctggttcagttcatgag

SEQ ID NO: 114355 - DNA, 247 bp, Glycine max
tctgggatcaggggagtctgcattcaatattcagtttgaatgggacgaaagcatgggaatccccggtgcgttttacataaagaactacatgcaagttcagttttacctcaagagtttgactcttgaagacgttccaaaccaaggaaccattcgctttgtttgcaactcatgggtttataacactaaactttacaaaagcgtgcgcattttctttgccaaccatacatatgttccaagtgagacacca

SEQ ID NO: 114356 - DNA, 256 bp, Glycine max
caaaatgaccaagttcacaatcctcctcatctctcttctcttctgcatcgcccacacttgcagcgcctccaaatggcagcaccagcaagatagctgccgcaagcagctccagggggtgaacctcacgccctgcgagaagcacatcatggagaagatccaaggccgcggcgatgacgatgatgatgatgacgacgacaatcacattctcaggaccatgcggggaagaatcaactacataaggaggaacgaaggaaaa

SEQ ID NO: 114357 - DNA, 256 bp, Glycine max
cggcgacgcatcattcaaatttctgccctatcaactttcgatggtaggatagtggcctaccatggtggtgacgggtgacggagaattagggttcgattccggagagggagcctgagaaacggctaccacatccaaggaaggcagcaggcgcgcaaattacccaatcctgacacggggaggtagtgacaataaataacaataccgggctcattgagtctggtaattggaatgagtacaatctaaatcccttaacgag

SEQ ID NO: 114358 - DNA, 259 bp, Glycine max
tgccgtttcgaaccgccgcgttatgaagccggcgtcaaagcgccctccatttaccattccgagagaggtccaacgacttcccaggtcctcgccgtcctcgccggcctcccggtcggtggcatcctgctcctcctggcgggattgaccctggcaggaaccctcaccggactggcagttgccacgccgctcttcgtcctcttcagcccggtgctggttccagccacggtcgccatcggcctggccgtggccgggttcctga

SEQ ID NO: 114359 - DNA, 255 bp, Glycine max
tgcttttgactgctggcattggttctgatcatgttgatctcaaagctgcagctgctgctggtttaactgtggcagaggtcacaggaagcaacgttgtgtcggttgcggaggacgaactcatgagaatcctcattctaatgaggaatttcttgccagggtaccatcaggctgttaatggggaatggaatgttgctggcattgcacatagagcttatgatcttgaaggaaagacagtaggaaccgttggcgcgggtc

SEQ ID NO: 114360 - DNA, 258 bp, Glycine max
attctctccattgtctttgaacactcatcaccatggccaagcttgttctttccctttgtttccttcttttcagtggctgcttcgctctgagagagcaggcacagcaaaatgagtgccagatccaaaagctgaatgccctcaaaccggataaccgtatagagtcggaaggtgggttcattgagacctggaaccctaacaacaagccattccagtgtgccggtgttgccctctctcgctgcacccttaacgccaatgccc

SEQ ID NO: 114361 - DNA, 256 bp, Glycine max
gttcaatatcctagtacaccgtattaaagaatttaagatatactatgatgagagcgtggttcccatttatagttgctgggagttgttttcctggcatcagtttctgtctcatttggcattgcgtattgggaaaagcagaaccccagtcacaacaagtgcctccgaagttgcaatagcgagaaagactcctacaggaaccaagcatgccacgctcgttgcaacctccttaaggtggaggaagaagaagaatgcgaag

SEQ ID NO: 114362 - DNA, 257 bp, Glycine max
caagttcacaatcctcctcatctctcttctcttctgcatcgcccacacttgcagcgcctccaaatggcagcaccagcaagatagctgccgcaagcagctccagggggtgaacctcacgccctgcgagaagcacatcatggagaagatccaaggccgcggcgatgacgatgatgatgatgacgacgacaatcacattctcaggaccatgcggggaagaatcaactacataaggaggaacgaaggaaaagacgaagacg

SEQ ID NO: 114363 - DNA, 256 bp, Glycine max; identical to SEQ ID NO: 114357

SEQ ID NO: 114364 - DNA, 250 bp, Glycine max
tcaggcctcaccatcagagctggttcctatgctgatgagctcgttaagaccgcgaaaacagtggcttcaccagggaggggtattttggccatggatgagtccaatgctacctgtgggaagcgtttggcttcaattgggctagagaacactgaagctaaccgccaggcataccgtaccctcctcgtgacagttccaggccttggtcagtacatctctggtgccattctctttgaggaaacactctacatcc

SEQ ID NO: 114365 - DNA, 252 bp, Glycine max
ctgtgtttgcggctgaggattccgaacgagcgaccttcttcgtttctcgcaaagtttaagtcatcatgggtaaggaaaagactcacatcaacattgtcgtcattggacatgtcgactctgggaagtcaactaccactggtcatttgatctacaagcttggaggtattgacaagcgtgtgattgagaggttcgagaaggaggctgctgagatgaacaagaggtcattcaagtatgcctgggtgcttgacaagc

SEQ ID NO: 114366 - DNA, 254 bp, Glycine max
cagaaaaacaagtagttgagaactaagaagaaggaaatggcttcctcaatgatctcctccccagctgttaccaccgtcaaccgtgccggtgccggcatggttgctccattcaccggcctcaaatccatggctggcttccccacgaggaagaccaacaatgacattacctccattgctagcaacggtggaagagttggccagcagcaggtgtggccaactattggcaagaagaagttcgagactctttcctactt

SEQ ID NO: 114367 - DNA, 255 bp, Glycine max
attcccattcccacgcccacctcatcagaaggaagagcgaaagcaagaggaagatgaggatgaggagcagcagcgagagagcgaagaaagtgaagattctgagttacgaagacataagaataagaacccttttctcttcggctctaacaggttcgaaactctcttcaaaaaccaatatggtcgcattcgcgtcctccagaggttcaaccaacgctccccacaacttcagaatctccgagactaccgcattttgga

SEQ ID NO: 114368 - DNA, 173 bp, Glycine max
tgatattttgataaaccgcgatcacaggttgccgcacattaaaaccggaaacaaaagcaatcgttacttgatttcaagaatctctcaatttctttctacttctttgtgtacgatttcttaagggaaagaaaatcactctctgtgctggccacagacttcgtgaatcattttct

SEQ ID NO: 114369 - DNA, 241 bp, Glycine max
ggctcgagtgcaaacattgaacttgttggcgctaaagaacaacaacaggagcagcaacaggaagagcaacctttggaagtgcggaaatatagagccgaattgtctgaacaagatatatttgtaatcccagcaggttatccagttgtaggtcaacgctacctcaaatctgaatttctttgctattggtattaatgccgagaacaaccagaggaacttcctcgcaggttcgcaagacaatgtg

SEQ ID NO: 114370 - DNA, 251 bp, Glycine max
aacttattaacactttccttagttcaatatggggaagcccttcttcactctctctctttcttccctttgcttgctactcttgtcgagtgcatgctttgctattacctccagcaagttcaacgagtgccaactcaacaacctcaacgcgttggaacccgaccaccgcgttgagtccgaggtggtcttattgaaacatggaactctcaacaccctgagctgcaatgcgccggtgtcactgtttccaaacgcac

SEQ ID NO: 114371 - DNA, 253 bp, Glycine max
aacattctctccattgtctttgaacactcatcaccatggccaagcttgttctttccctttgtttccttcttttcagtggctgcttcgctctgagagagcaggcacagcaaaatgagtgccagatccaaaagctgaatgccctcaaaccggataaccgtatagagtcggaaggtgggttcattgagacctggaaccctaacaacaagccattccagtgtgccggtgttgccctctctcgctgcacccttaaccg

SEQ ID NO: 114372 - DNA, 252 bp, Glycine max
gagagagagagcgagcagtttcagacacagagagaggggtttgggattggagggattgacgctgcgtctcttcctcttctctttcgatccatccctcattcctaatcctccaatccaaccacctcagcctcacactcacatatacacatatctgaacgcgtatcgtccctcctatggcttcaaagcgcatcctcaaggagctcaaggacttgcagaaagacccaccaacttcttgcagcgctggtccagtag

SEQ ID NO: 114373 - DNA, 251 bp, Glycine max; identical to SEQ ID NO: 110869

SEQ ID NO: 114374 - DNA, 252 bp, Glycine max
cttaattattaacacttccttagttcaatatggggaagcccttcactctctctctttcttccctttgcttgctactcttgtcgagtgcatgctttgctattagctccagcaacttcaacgagtgccaactcaacaacctcaacgcgttggaacccgaccaccgcgttgagtccgaaggtggtttgattcaaacatggaactctcaacaccctgagctgaaatgcgccggtgtcactgtttccaaactcaccc

SEQ ID NO: 114375 - DNA, 248 bp, Glycine max
cttaattattaacacttccttagttcaatatggggaatcccttcactctctctctttcttccctttgcttgctactcttgtcgagtgcatgctttgctattagctccagcaagctcaacgagtgccaactcaacaacctcaacgcgttggaacccgaccaccgcgttgagtccgaaggtggtttgattcaaatattaactctcaacaccctgagctgaaatgcgccggtgtcactgtttccaaactca

SEQ ID NO: 114376 - DNA, 251 bp, Glycine max
ctaaccttgctctatactacacagtacacacactagaagaataatggcttccatcctccactactttttagccctctctctttcttgctcttttcttttcttcttatccgactcagtcacccctacaaaaccaataaaccttgttgttctacccgttcaaaatgatggttccacagggctccattgggccaacctccaaaaaagaacccctctaatgcaagtaccagtcctggtggacctcaatggaaatc

SEQ ID NO: 114377 - DNA, 256 bp, Glycine max
tccttaaacactcatcagtcatcaccatggccaagctagttttttccctttgttttctgcttttcagtggctgctgcttcgctttcagttccagagagcagcctcagcaaaacgagtgccagatccaaaaactcaatgccctcaaaccggataaccgtatagagtcagaaggagggctcattgagacatggaaccctaacaacaagccattccagtgtgccggtgttgccctctctcgctgcaccctcaaccgcaa

SEQ ID NO: 114378 - DNA, 238 bp, Glycine max
ggctcgagtgcaaacattgaacttgttggcattaaagaacaacaacaggagcagcaacaggaagagcaacctttggaagtgcggaaatatagagccgaattgtctgaacaagatatatttgtaatcccagcaggttatccagttgtggtcaacgctacctcaaatctgaatttctttgctattggtattaatgccgagaacaaccagaggaacttcctcgcaggttcgcaagacaagt

SEQ ID NO: 114379 - DNA, 251 bp, Glycine max
aacttattaacactttccttagttcaatatggggaagcccttcttcactctctctctttcttccctttgcttgctactcttgtcgagtgcatgctttgctattacctccagcaagttcaacgagtgccaactcaacaacctcaacgcgttggaacccgaccaccgcgttgagtccgaagtggtcttattgaaacatggaactctcaacaccctgagctgcaatgcgccggtgtcactggttccaaacgcac

SEQ ID NO: 114380 - DNA, 252 bp, Glycine max
gggatttccaaaagaatactcccgaagagcgcaatgttaggtttggtgttagagaacatggaatgggagcaatctgtaacggtattgctcttcatagccccggattcattccatactgtgcaactttctttgtcttcactgactatatgagagctgccataaggatttctgcactgtgtgaagctggagttatttatgtgatgactcatgattcgattggacttggagaggatggaccaactcatcagccaa

SEQ ID NO: 114381 - DNA, 249 bp, Glycine max
  unsure (1)..(249): unsure at all n locations
cacactaacaccaccacttcatcaactttacttgacaacaatattgtaaaactcaaaatctagtttcatactttttttcttcttcttgaaatggctctccaggctgcttctcttgttcctgcttctttctcggttcttaaagagggaaagagtggtgtgtctctcaaggactccaccttgttcggtctttcattttcagaacctatcaaagctaacttcagctcttctgcatgaggttnagagggaatc

SEQ ID NO: 114382 - DNA, 251 bp, Glycine max
gaagaagaagaccaagacgaggatgaggagcaagacaaagagagccaagacagtgaaggttctgagtctcaaagagaaccacgaagacataagaataagaacccttttcacttcaactctaaaaggttccaaactctcttcaaaaaccaatatggccacgttcgcgtcctccagaggttcaacaaacgctcccaacagcttcagaatctccgagactaccgcattttggagttcaactccaaacccaacac

SEQ ID NO: 114383 - DNA, 254 bp, Glycine max
aggagataagattgcagtagtgctaagtgctaacacctgcagtgaacaatggcctctgcatcagcatctctgctcaagtcttcacttgttcttgacaagtctgagtgggtgaagggacaaacccttcgccaaccttctgcatcagttgtgagatgcaaccccaccaccccatcaggcctcaccatcagagctggttcctatgctgatgagctcgttaagaccgcgaaaacagtggcttcaccagggaggggtat

SEQ ID NO: 114384 - DNA, 256 bp, Glycine max
cggattccaatcgcctgtaagggaaccggatcttttctctttaagctcaccaaagcttgatgagaagccactcttccctttgcttcctactaaagacgggatttgctcgtcggggcagaaagctgttgtttctggcaacaaaagaggttttgctgataccatggatgagttttctcaggggaagtttgctggcaatacagggatgaacgcggtgctatcacctagaccttctggagctcagccttctgctatgaaa

SEQ ID NO: 114385 - DNA, 256 bp, Glycine max
caagaatgctatgttcgtgccacactacaccctgaacgcgaacagcataatatacgcattgaatgcggcgggcattggtacaagtggtgaattgcaatggtgagagagtgtttgatggagagctgcaagagggaggggtgctgatcgttccacaaaactttgcggtggctgcaaaatcccagagcgataactttgagtatgtgtcattcaagaccaatgatagaccctcgatcggaaaccttgcaggggcaaactc

SEQ ID NO: 114386 - DNA, 255 bp, Glycine max
tattaacactttccttagttcaatatggggaagcccttcttcactctctctctttcttccctttgcttgctactcttgtcgagtgcatgctttgctattacctccagcaagttcaacgagtgccaactcaacaacctcaacgcgttggaacccgaccaccgcgttgagtccgaaggtggtcttattgaaacatggaactctcaacaccctgagctgcaatgcgccggtgtcactgtttccaaacgcaccctcaac

SEQ ID NO: 114387 - DNA, 253 bp, Glycine max
atatagtcttccatagccccccaaaaatgaagagcaccatcttctttgctctctttctcttttgtgccttcaccacctcatacctaccttcagccatcgctgatttcgtgctcgataatgaaggtaaccctcttgaaaatggtggcacatattatatcttgtcagacataacagcatttggtggaataagagcagccccaacgggaaatgaaagatgccctctcactgtggtgcaatctcgcaatgagctcga

SEQ ID NO: 114388 - DNA, 253 bp, Glycine max
cacttattaacactttccttagttcaatatgcggaagcccttcttcactctctctctttcttccctttgcttgctactcttgtcgagtgcatgctttgctattacctccagcaagttcaacgagtgccaactcaacaacctcaacgcgttggaacccgaccaccgcgttgagtccgaaggtggtcttattgaaacatggaactctcaacaccctgagctgcaatgcgccggtgtcactgtttccaaacgcacc

SEQ ID NO: 114389 - DNA, 249 bp, Glycine max
cggctcgagatgagtttgaagaacaacatggtggtgctaaaggtgtgtttgttgcttcttttccatgtgggggttacagctgcacgcatggaactgagcttcttcaaaagtgatcagtcatcaagttatgatgatgatgagtattcaaaaccatgctgtgatctctgcatgtgcacacgctcaatgcctcctcaatgcagctgtgaagacattaggctgaattcatgccactcagattgtaagagctgt

SEQ ID NO: 114390 - DNA, 250 bp, Glycine max
ctactaacaataattccttcacttgcagaacttagttctctgttgcatcatcatcatcttcattagtgttagccctaaacttcaccttcaaccatgaccacagtgccaccacacagtgtccaagtgcacacaacaacacaccgctacgaagccggcgtcgtcccgccggctcgttttgaggcgccgcgttacgaagccggcatcaaggcgccctcttccatttaccattccgagagaggtccgacgacct

SEQ ID NO: 114391 - DNA, 248 bp, Glycine max
gtgcatggggttgatttggagcctgccattaacaatgctgtttttcctggtctacaggggggtcctcataaccacacaattggaggactagcagtttgcttgaagtatgctcagtctccagaatttaaaaattatcaaaatcaggtggttgctaactgtagagctcttgctaagcgattaattgagcatggatataaactggtttctggtggtagtgacaatcacctggttcttgtcgatctaaggcc

SEQ ID NO: 114392 - DNA, 249 bp, Glycine max
tgaataattaagaaaagccatttccatagcagcctaagaaaatgaagagcactagcttgttcgctatctttctactttgcgccttcacctcatacctaccttccgccaccgcccaggacgtgctcgacgtggatggcgatccgattcggaacggtttcatatactacgttttgccggcaataagaggaaacggtggcggaatagaacgagccgcactcgggaaagacacttgccctatcactgtagtgc

SEQ ID NO: 114393 - DNA, 253 bp, Glycine max
tggaagatgaggatgaggatgaggaacaagatgaacgtcaattcccattcccacgcccacctcatcagaaggaagagcgaaagcaagaggaagatgaggatgaggagcagcagcgagagagcgaacaaagtgaagattctgagttacgaagacataagaataagaacccttttctcttcggctctaacaggttcgaaactctcttcaaaaaccaatatggtcgcattcgcgtcctccagaggttcaaccaacg

SEQ ID NO: 114394 - DNA, 250 bp, Glycine max
gcacaaaactgttgggttcgcaaaggtggtgcttataccggtgaggttagtgctgaaatgcttgttaatttgggaattccttgggttattattggtcactctgaacggaggcagcttttaaatgaatcaaacgagtttgtgggagataaagttgcctatgcacttcaacaaggtctaaaagttattgcatgcattggggagactctcgaacagcgtgaagctggtacaacaacggctgttgtttctgagc

SEQ ID NO: 114395 - DNA, 254 bp, Glycine max
cggctcgagagagggtcagagtgagaaagagagagagagagagagaaactgagagaaattcgcaaaccctaatttcggaaagatcggcgatggctgcctccaaggatcgcgagatcttcgtctacatcgccaagctcgccgaacaggccgagcgatacgaagagatggtggaatcaatgaagaacgttgcgcatctcgacgttgaactgactgtggaagagcggaatttactttctgttgggtacaagaatgtg

SEQ ID NO: 114396 - DNA, 257 bp, Glycine max
cataaaattcttccaccaagttatgggttcacttgtgttgcttcttttctccctcttaggtctctcttctagtaccagcatatcaactcatcgttccatattggaccttgacctaaccaagtttaccacacagaaacaggtgacttcactgttccaactatggaagagtgagcatggacgtgtctaccataaccacgaagaagaggcaaagagacttgagattttcaagaataacttgaactatatcagggacatga

SEQ ID NO: 114397 - DNA, 250 bp, Glycine max
tattaacacttccttagttcaatatggggttgcccttcactctctctctttcttccctttgcttgctactcttgtcgagtgcatgctttgctattagctccagcaagctcaacgagtgccaactcaacaacctcaacgcgttggaacccgaccaccgcgttgagtccgaaggtggtttgattcaaacatggaactctcaacaccctgagctgaaatgcgccggtgtcactgtttccaaactcaccctcaa

SEQ ID NO: 114398 - DNA, 253 bp, Glycine max
cctgatgataaggtcactcccatggagtctccatctttgctgcagacaggtttgtctggtgcacacatggatgttagcagaaagccctctctttgtattgcagtcataggggccactggcgagctggcaaagaggaagattttccctgctttatttgccctctactacagtggcttccttcccgagaatgtaggcatttttggttattcaaggaaggatataactgatgaagacctgcaatctattatagctt

SEQ ID NO: 114399 - DNA, 253 bp, Glycine max
cactcatcaccatggccaagcttgttctttccctttgtttccttcttttcagtggctgcttcgctctgagagagcaggcacagcaaaatgagtgccagatccaaaagctgaatgccctcaaaccggataaccgtatagagtcggaaggtgggttctctgagacctggaaccctaacaacaagccattccagtgtgccggtgttgccctctctcgctgcacccttaaccgcaatgcccttcgtagaccttccta

SEQ ID NO: 114400 - DNA, 246 bp, Glycine max
ctaatcgtgagaggcttttgatctatgtctctgatgttgctttgttttctgtgacttacttgctctaccgtgttgcaactatgaaagggttggtttggctgctatgtgtttatggggtgccattgctcattgtgaacggttttcttgtgaccatcacatatctgcagcacacacactatgccttgcctcactatgattcatcagaatgggattggctgaggggtgctttggcaactatggacagag

SEQ ID NO: 114401 - DNA, 247 bp, Glycine max
ctaagccagataggaaagcaacaagaagaagaaaacgaaggaagcaacatattgagtggcttcgcccctgaattcttgaaagaagcgttcggcgtgaacatgcagatagtgagaaacctacaaggtgagaacgaagaggaggatagtggagccattgtgacagtgaaaggaggtctaagagtcacagctccagccatgaggaagccacagcaagaagaagatgatgatgatgaggaagagcagccac

SEQ ID NO: 114402 - DNA, 249 bp, Glycine max
cttaattattaacacttccttagttcaatatggggaagcccttcactctctctctaccttccctctgcttgctactcttgtcgagtgcatgctttgctattagctccagcaagctcaacgagtgccaactcaacaacctcaacgcgttggaacccgaccaccgcgttgagtccgaaggtggtttgattcaaacatggaactctcaacaccctgagctgaaatgcgccggtgtcactgtttccaaactca

SEQ ID NO: 114403 - DNA, 251 bp, Glycine max
taccatggccaagcttgttctttccctttgtttccttcttttcagtggctgcttcgctctgagagagcaggcacagcaaaatgagtgccagatccaaaagctgaatgccctcaaaccggataaccgtatagagtcggaaggtgggttcattgagacctggaaccctaacaacaagccattccagtgtgccggtgttgccctctctcgctgcacccttaatcgcaatgcccttcgtagaccttcctacacca

SEQ ID NO: 114404 - DNA, 250 bp, Glycine max
tgagaatttccatggcggcggcgacgaacttgttagcaacactgggggatctggagagggactccttcgtggctcttctttcgaagctgatcgctgaatcgaagtacgtccagaacaacccgccggagctcattccccaagaggacagagtggtgaagcacgtcttggacgttctgttaccgttcagcaccaccaccggcggtggacccttgctcgtaaaccacgtcacctaccacgccggcagagggaa

SEQ ID NO: 114405 - DNA, 255 bp, Glycine max
agtttctaaaatatcagcaagagcaaggaggtcatcaaagccagaaaggaaagcatcagcaagaagaagaaaacgaaggaggcagcatattgagtggcttcaccctggaattcttggaacatgcattcagcgtggacaagcagatagcgaaaaacctacaaggagagaacgaaggggaagacaagggagccattgtgacagtgaaaggaggtctgagcgtgataaaaccacccacggacgagcagcaacaaagac

SEQ ID NO: 114406 - DNA, 160 bp, Glycine max
gttcgtgccacactacaacctgaacgcgaacagcataatatacgcattgaatggacgggcattgatacaagtggtgaattgcaacggtgagagagtgtttgatggagagctgcaagagggacgggtgctgatcgtgccacaaaactttgtggtggctgca

SEQ ID NO: 114407 - DNA, 148 bp, Glycine max
tgatcctattgtgttggccttcgggatcggagtaatgattaacagggacagtcgggggcattcgtatttcatagtcagaggtgaaattcttggatttatgaaagacgaacaactgcgaaagcatttgccaaggatgttttcattaatc

SEQ ID NO: 114408 - DNA, 158 bp, Glycine max
cttaattattaacacttccttagttcaatatggggaagcccttcactctctctctttcttccctttgcttgctactcttgtcgagtgcatgctttgctattagctccagcaagctcaacgagtgccaactcaacaacctcaacgcgttggaacccgac

SEQ ID NO: 114409 - DNA, 112 bp, Glycine max
attggtccttaaacactcatcagtcatcaccatggccaagctagttttttccctttgttttctgcttttcagtggctgctgcttcgctttcagttccagagagcagcctcag

SEQ ID NO: 114410 - DNA, 158 bp, Glycine max
aacattggaaggcatcgatttcgacattgaacttggttccaacctctattggggcgaccttgccaaggaactagatgctctcaggcaccaaaacgaccactacttctacttgtccgcagccccacaatgttttatgcctgattaccacctcgacaatg

SEQ ID NO: 114411 - DNA, 158 bp, Glycine max
ctcgagccgcttaattattaacacttccttagttcaatatggggaagcccttcactctctctctttcttccctttgcttgctactcttgtcgagtgcatgctttgctattagctccagcaagctcaacgagtgccaactcaacaacctcaacgcgttg

SEQ ID NO: 114412 - DNA, 148 bp, Glycine max; identical to SEQ ID NO: 114407

SEQ ID NO: 114413 - DNA, 108 bp, Glycine max
ctcgagccgttttagaggcctcctacgataccaaattcgaggagataaacaaggttctgtctagtagagaggaagggcagcagcaaggggagcagaggctgcaagaga

SEQ ID NO: 114414 - DNA, 112 bp, Glycine max
atgatgagagcgcggttcccattactgttgctgggagttgttttcctggcatcagtttctgtctcatttggcattgcgtattgggaaaagcagaaccccagtcacaacaagt

SEQ ID NO: 114415 - DNA, 104 bp, Glycine max
gttcctcactgaccaagccatggcgatgagaaccaaactttctttagctatctttttcttttttcttttagccttattttcaaacctagcctttggcaaatgta

SEQ ID NO: 114416 - DNA, 97 bp, Glycine max
ggctcgagttctctccattggtccttaaaagctcatcagtcatcaccatggccaagctagttttttacctttgttttctgcttttcagtggctgctg

SEQ ID NO: 114417 - DNA, 112 bp, Glycine max
atgattctgtgtaaccatgagtcttccacgttgtactaatgtgaagggcaaaaataaaacacagaacaagttcgtttttctcaaaaaaaaaaaaaaaggggcggccgccgat

SEQ ID NO: 114418 - DNA, 112 bp, Glycine max
gttcaatatcctagtataccttaataaataatttaagatactatgatgagagcacggttcccattactgttgctgggacttgttttcctggcttcagtttctgtctcatttg

SEQ ID NO: 114419 - DNA, 112 bp, Glycine max
gcccttcactctctctctttcttccctttgcttgctactcttgtcgagtgcatgctttgctattagctccagcaagctcaacgagtgccaactcaacaacctcaacgcgttg

SEQ ID NO: 114420 - DNA, 111 bp, Glycine max
cggctcgaggaatttaagatatactatgatgagagcgcggttcccattactgttgctgggagttgttttcctggcatcagtttctgtctcatttggcattgcgtattggga

SEQ ID NO: 114421 - DNA, 110 bp, Glycine max
cttcaaacttaattattaacacttccttagttcaatatggggaagcccttcactctctctctttcttccctttgcttgctactcttgtcgagtgcatgcttggcaattag

SEQ ID NO: 114422 - DNA, 114 bp, Glycine max
gttccatttccccctttcctccgcccggcgagaaaatgagagaaatcctccacatccagggcggccaatgcggcaaccagatcggagccaagttctgggaagtaatctgcgacg

SEQ ID NO: 114423 - DNA, 112 bp, Glycine max
acttattaacactttccttagttcaatatggggaagcccttcttcactctctctctttcttccctttgcttgctactcttgtcgagtgcatgctttgctattacctccagca

SEQ ID NO: 114424 - DNA, 156 bp, Glycine max
aagaaaatgaagaaggaacaatattcttgtgaccatccacctgcatcatgggattggaggaaaaaaggtgtcatcacccaagtaaagtaccaagggggctgtggaagcggttgggcgttttctgccacgggagccatagaagcagcacatgcaata

SEQ ID NO: 114425 - DNA, 122 bp, Glycine max
tgctgatgatgtaagggttatgaccagaaagagtgtggatgaccctggaagaccccctggcatagttctcagtgctgccacttctttttggcttcctgttccacctaaacgagtctttgact

SEQ ID NO: 114426 - DNA, 111 bp, Glycine max
taccttaataaataatttaagatactatgatgagagcacggttcccattactgttgctgggacttgttttcctggcttcagtttctgtctcatttggcattgcttactggg

SEQ ID NO: 114427 - DNA, 109 bp, Glycine max
aaattttgtgaaaatgatccacaatggaattgagtatggtgacatgcagctcattgctgaggcctatgatgtgctaaagtcggttggaaagttgtcaaatgaggagctg

SEQ ID NO: 114428 - DNA, 111 bp, Glycine max
acttattaacactttccttagttcaatatggggaagcccttcttcactctctctctttcttccctttgcttgctactcttgtcgagtgcatgctttgctattacctccagc

SEQ ID NO: 114429 - DNA, 112 bp, Glycine max; identical to SEQ ID NO: 111641

SEQ ID NO: 114430 - DNA, 111 bp, Glycine max
ctagggtattttaccttgctgggaacccagatatagagtacccagagaccatgcaacaacaacaacagcagaaaattcatggtggacgcaagcaggggcaacaccagcagg

SEQ ID NO: 114431 - DNA, 111 bp, Glycine max
tctagatcgcgagcggccgcccgcgattctagaacctcaccagttttgcaaccacctttgttcccctttctcgaaattacttcctcttttaagtactagctcccataaata

SEQ ID NO: 114432 - DNA, 110 bp, Glycine max
ctccattggtccttaaacactcatcagtcatcaccatggccaagctagttttttccctttgttttctgcttttcagtggctgctgcttcgctttcagttccagagagcag

SEQ ID NO: 114433 - DNA, 110 bp, Glycine max
atttgtccttgaatataatactcagcatggctaagcttgttctttccctttgttttctgcttttcagtggctgctgcttcgctttcagtttcagagagcagccacagcaa

SEQ ID NO: 114434 - DNA, 103 bp, Glycine max; identical to SEQ ID NO: 112471

SEQ ID NO: 114435 - DNA, 113 bp, Glycine max
ggcctaaaagaacagcaacagggagaggaaacaagggaagtgcgaaagtatagagccgagttgtctgaagacgatatatttgtaatcccagcagcttatccatttgtggtcaa

SEQ ID NO: 114436 - DNA, 111 bp, Glycine max
ctcgagccgattcggctcgaggccaacaagaaaatgaagaaggaacaatattcttgtgaccatccacctgcatcatgggattggaggaaaaaaggtgtcatcacccaagta

SEQ ID NO: 114437 - DNA, 110 bp, Glycine max
ctctccattggtccttaaacactcatcagtcatcaccatggccaagctagttttttccctttgttttctgcttttcagtggctgctgcttcgctttcagttccagagagc

SEQ ID NO: 114438 - DNA, 110 bp, Glycine max
ttaattattaacacttccttagttcaatatggggaagcccttcactctctctctttcttccctttgcttgctactcttgtcgagtgcatgctttgctattagctccagca

SEQ ID NO: 114439 - DNA, 122 bp, Glycine max
gttcctcactgaccaagccatggcgatgagaaccaaactttctttagctatctttttcttttttcttttagccttattttcaaacctagcctttggcaaatgtaaagaaaccgaggtagaag

SEQ ID NO: 114440 - DNA, 132 bp, Glycine max
cacatacccccaactaacaataattccttcacttgcagaacttagttctctgttgcatcatcatcatcttcattagtgttagccctaaacttcaccttcaaccatgaccacagtgccaccacacagtgtcca

SEQ ID NO: 114441 - DNA, 131 bp, Glycine max
ggagaattttcacctactctaaatttccgaggacatgcgaaaaatgataatagatctcgtcgttaacgttaattttaacataaatttttaaatcgtaatttataactaaatattacaaaatggaattctta

SEQ ID NO: 114442 - DNA, 131 bp, Glycine max
gttcaatatcctagtataccttaataaataatttaagatactatgatgagagcacggttcccattactgttgctgggacttgttttcctggcttcagtttctgtctcatttggcattgcttactgggaaaa

SEQ ID NO: 114443 - DNA, 114 bp, Glycine max
gcagcatgaggaacaagatgaaaatccctacatttttgaggaagataaggattttgagaccagagtcgaaactgaaggtggcagaattcgggttctcaagaagttcactgaaaa

SEQ ID NO: 114444 - DNA, 133 bp, Glycine max
agcaaaacgagtgccagatccaaaaactcaatgccctcaaaccggataaccgtatagagtcagaaggagggctcattgagacatggaaccctaacaacaagccattccagtgtgccggtgttgccctctctcg

SEQ ID NO: 114445 - DNA, 134 bp, Glycine max
aattattaacacttccttagttcaatatggggaagcccttcactctctctctttcttccctttgcttgctactcttgtcgagtgcatgctttgctattagctccagcaagctcaacgagtgccaactcaacaac

SEQ ID NO: 114446 - DNA, 131 bp, Glycine max
aaaattcttccaccaagttatgggtttccttgtgttgcttcttttctccctcttaggtctctcttctagttccagcatatcaactcatcgttccatattggaccttgacctaaccaagtttaccacacaga

SEQ ID NO: 114447 - DNA, 129 bp, Glycine max
ctcgagccgctcgagccgcgagaatctcagattaataacactcgccatacgcgttaacaaggctggtagagttgagagtctcttcctatctagcactgaagctcaacaatcctactggcaaggtttcag

SEQ ID NO: 114448 - DNA, 130 bp, Glycine max
tgaaaagtttatgaacattaagtgtcgttatagtggtttgacacctcaatgtgcgattattgtggcaactatcagagcactaaaaatgcatggtggagggcctgcagttgttgctggaagacctcttgac

SEQ ID NO: 114449 - DNA, 131 bp, Glycine max
taagggtatttttggcatgatatacccgggttgtcctagcacatttcgaagagcctcaacaacctcaacaaagaggacaaagcagcagaccacaagaccgtcaccagaagatctataacttcagagagggt

SEQ ID NO: 114450 - DNA, 130 bp, Glycine max
gaagaagatgggtttgaagaacaacatggtggtgctaaaggtgtgtttggtgctacttttccttgtggggggtactactagtgccaacttgaggctgagtaagcttggcctgctcatgaaaagtgatcat

SEQ ID NO: 114451 - DNA, 132 bp, Glycine max
caataccaaaatgaccaagcttacaattctcctcatcgctcttctcttcatcgcccacacctgctgcgcctccaaatggcaacagcaccagcaagagagctgccgcgagcagctcaaggggatcaacctcaa

SEQ ID NO: 114452 - DNA, 129 bp, Glycine max
gttcaatatcctagtataccttaataaataatttaagatactatgatgagagcacggttcccattactgttgctgggacttgttttcctggcttcagtttctgtctcatttggcattgcttactgggaa

SEQ ID NO: 114453 - DNA, 130 bp, Glycine max
ctccattgtctttgaacactcatcaccatggccaagcttgttctttccctttgtttccttcttttcagtggctgcttcgctctgagagagcaggcacagcaaaatgagtgccagatccaaaagctgaatg

SEQ ID NO: 114454 - DNA, 129 bp, Glycine max
tgagagcacggttcccattactgttgctgggacttgttttcctggcttcagtttctgtctcatttggcattgcttactgggaaaaagagaaccccaaacacaacaagtgtctccagagttgcaatagcg

SEQ ID NO: 114455 - DNA, 129 bp, Glycine max
ggatattaaagacacctctaaagaaggatatagttttgaagagatatgcatcaagaaagaagcgtttgagggagaagagaagttttgtgcaaaatccttgggaacagtaattggttttgccatttcaaa

SEQ ID NO: 114456 - DNA, 131 bp, Glycine max
cttaattattaacacttccttagttcaatatggggaagcccttcactctctctctgtcttccctttgcttgctactcttgtcgagtgcatgctttgctattagctccagcaagctcaacgagtgccaactc

SEQ ID NO: 114457 - DNA, 131 bp, Glycine max
aagagcacgagcagagagaggaacaggaatggcctcgcaaggaggaaaaacgcggagaaaagggaagtgaagaggaagatgaggatgaggatgaggaacaagatgaacgtcaattcccattcccacgccct

SEQ ID NO: 114458 - DNA, 130 bp, Glycine max
gtgatttcagaactgcaatggtgagtaaaaatagcaagcctcaagctactgcaatgcatgtgggagctatagaaattatcattgatagtttcgcaagtcctgactgcaacatagttggtgcaatgctttt

SEQ ID NO: 114459 - DNA, 130 bp, Glycine max
aagcaaagcaatggctacttcaaagttgaaaacccagaatgtggttgtatctctctccctaaccttaaccttggtactggtgctactgaccagcaaggcaaactcagcggaaactgtttctttcagctgg

SEQ ID NO: 114460 - DNA, 121 bp, Glycine max
tttgagatcaccccagagaaaaacccccagcttcgggacttggatatcttcctcagtattgtggatatgaacgagggagctcttcttctaccacacttcaattcaaaggcgatagtgatac

SEQ ID NO: 114461 - DNA, 106 bp, Glycine max
ctcgagccgattaacacttccttagttcaatatggggaagcccttcactctctctctttcttccctttgcatgctactcttgtcgagtgcatgctttgctattagc

SEQ ID NO: 114462 - DNA, 127 bp, Glycine max
cttccttagttcaatatggggaagcccttcactctctctcttgcttccctttgcttgcgactcttgtcgagtgcatgctttgctattagctccagcaagctcaacgagtgccagctcaacaacctca

SEQ ID NO: 114463 - DNA, 128 bp, Glycine max
ctccattgtctttgaacactcatcaccatggccaagcttgttctttccctttgtttccttcttttcagtggctgcttcgctctgagagagcaggcacagcaaaatgagtgccagatccaaaagctgaa

SEQ ID NO: 114464 - DNA, 128 bp, Glycine max; identical to SEQ ID NO: 103108

SEQ ID NO: 114465 - DNA, 113 bp, Glycine max
ctagtacaccgtattaaagaatttaagatatactatgatgagagcgcggttcccactactgttgctgggagttgttttcctggcatcagtttctgtctcatttggcattgcgt

SEQ ID NO: 114466 - DNA, 131 bp, Glycine max
atccgcagctgcttttattcgcaccgcaaacagtgagccatggccgtcggaaagaacaagcgcatctccaaggggaagaagggtggcaagaagaaggcagctgatccctttgccaagaaggattggtatga

SEQ ID NO: 114467 - DNA, 131 bp, Glycine max
gcaacggatatctcggctcttgcatcgatgaagaacgtagcgaaatgcgatacttggtgtgaattgcagaatcccgtgaaccatcgagtctttgaacgcaagttgcgcccgaagccattaggccgagggca

SEQ ID NO: 114468 - DNA, 149 bp, Glycine max
attaatgccgagaacaaccagaggaacttcctcgcaggttcgcaagacaatgtgataagccagatacctagtcaagtgcaggagcttgcattccctgggtctgcacaagctgttgagaagctattaaagaaccaagagaatctattttg

SEQ ID NO: 114469 - DNA, 100 bp, Glycine max
cttccttagttcaatatggggaagcccttcactctctctctttcttccctttgcttgctactcttgtcgagtgcatgctttgcgattagctccagaaagt

SEQ ID NO: 114470 - DNA, 111 bp, Glycine max
caaacccctagggtattttaccttgctgggaacccagatatagagtacccagagaccatgcaacaacaacaacagcagaaaagtcatggtggacgcaagcaggggcaacac

SEQ ID NO: 114471 - DNA, 165 bp, Glycine max
cggctcgagggaagatgaggatgaggagcagcagcgagagagcgaagaaagtgaagattctgagttacgaagacataagaataagaacccttttctcttcggctctaacaggttcgaaactctcttcaaaaaccaatatggtcgcattcgcgtcctccagaggtt

SEQ ID NO: 114472 - DNA, 153 bp, Glycine max
caaaaaccaatatggccacgttcgcgtcctccagaggttcaacaaacgctcccaacagcttacagaatctccgagactaccgcattttggagttcaactccaaacccaacacccttcttctcccccaccatgctgacgctgattacctcatcg

SEQ ID NO: 114473 - DNA, 153 bp, Glycine max
ggggaagcccttcactctctctctttcttccctttgcttgctactcttgtcgagtgcatgctttgctattagctccagcaagctcaacgagtgccaactcaacaacctcaacgcgttggaacccgaccaccgcgttgagtccgaaggtggttt

SEQ ID NO: 114474 - DNA, 145 bp, Glycine max
cacaagcttttctttttcttgttctttaattttctgattttagcaaattaaaatagtagtgttattggtaagttttggcaaagatgttttcagttccaggggtgtcgggaatcctgaacagaggaggatggcataagataaaagg

SEQ ID NO: 114475 - DNA, 155 bp, Glycine max
ctcagtctctgtgtttgcggctgaggattccgaacgagtgaccttcttcgtttctcgcaaagtttaagtaatcatgggtaaggacaaggttcacatcaacattgtcgtcattggacatgtcgactctgggaagtcaactaccactggtcacttga

SEQ ID NO: 114476 - DNA, 156 bp, Glycine max
agaagattcgtcacttcaatgaaggagacgtactcgtgattcctcctggtgttccttactggacctataacactggcgatgaaccagttgttgccatcagtcttcttgacacctctaacttcaataaccagcttgatcaaacccctagggtatttt

SEQ ID NO: 114477 - DNA, 107 bp, Glycine max
ggagttgcaattccaggatgtcctgagacgtttgaggagccacaagaacaatcaaacagaagaggctcaaggtcgcagaagcagcagctacaggacagtcaccaaag

SEQ ID NO: 114478 - DNA, 99 bp, Glycine max
tgtgaacggcacttgcacatgggttagtcgatcctaagggacgggggaagcccgtctgatagcgctctgtgcgcgtactccgaaagggaatcgggttaa

SEQ ID NO: 114479 - DNA, 97 bp, Glycine max
ataaaattcttccaccaagttatgggtttccttgtgttgcttcttttctccctcttaggtctctcttctagttccagcatatcaactcatcgttcca

SEQ ID NO: 114480 - DNA, 147 bp, Glycine max
ctgcaaaggattctacccgccgctcgatgggaattgcgcttcaaggcgtctcgtagggctaatccgcctcacgagggtcaccaacggcacgtgcctttggggggccgaggcccctactgctggtcggcaaacggacggcgggcgcac

SEQ ID NO: 114481 - DNA, 155 bp, Glycine max
attggtccttaaacactcatcagtcatcaccatggccaagctagttttttccctttgttttctgcttttcagtggctgctgcttcgctttcagttccagagagcagcctcagcaaaacgagtgccagatccaaaaactcaatgccctcaaaccgg

SEQ ID NO: 114482 - DNA, 153 bp, Glycine max
ctcatcaccatggccaagcttgttctttccctttgtttccttcttttcagtggctgcttcgctctgagagagcaggcacagcaaaatgagtgccagatccaaaagctgaatgccctcaaaccggataaccgtatagagtcggaaggtgggttc

SEQ ID NO: 114483 - DNA, 152 bp, Glycine max
caatatcctagtacaccgtattaaagaatttaagatatactatgatgagagcgcggttcccattactgttgctgggagttgttttcctggcatcagtttctgtctcatttggcattgcgtattgggaaaagcagaaccccagtcacaacaag

SEQ ID NO: 114484 - DNA, 150 bp, Glycine max
cctgtacctccctctggaattgatactgtccaaccatctggctgggattaaactagtgttttttgatgctatgattttgccccgtccctcaattttagtttacctgtctttctttgaagtaaaatatggatttttttttgtagcaaagga

SEQ ID NO: 114485 - DNA, 152 bp, Glycine max
gttcaatatcctagtacaccgtattaaagaatttaagatatactatgatgagagcgcggttcccattactgttgctgggagttgttttcctggcatcagtttctgtctcatttggcattgcgtattgggaaaagcagaaccccagtcacaac

SEQ ID NO: 114486 - DNA, 149 bp, Glycine max
gttggagggaaatttttcctttgatattaaatctcgctctagattagaaaaaatttcctctacaaaagcacaatttgttagtggaaaaaccttcaaatatgatataattggtgctggttcacattcttcagaagattttcctgaaaagg

SEQ ID NO: 114487 - DNA, 103 bp, Glycine max
gtctttgaacactcatcaccatggccaagcttgttctttccctttgtttccttcttttcagtggctgcttcgctctgagagagcaggcacagcaaaatgagtg

SEQ ID NO: 114488 - DNA, 102 bp, Glycine max
cttattaacactttccttagttcaatatggggaagcccttcttcactctctctctttcttccctttgcttgcgactcttgtcgagtgcatgcttggcaataa

SEQ ID NO: 114489 - DNA, 103 bp, Glycine max
tcaataccaaaatgaccaagcttacaattctcctcatcgctcttctcttcatcgcccacacctgctgcgcctccaaatggcaacagcaccagcaagagagctg

SEQ ID NO: 114490 - DNA, 146 bp, Glycine max
ctcgagccggaaattttgataaaccgcgatcacaggttgccgcaccttaaaaccggaaacagaagcaatcgttacttgatttcaagaatttctcaatttcttcctacttctttgtgcacgatttcttaagggaaggaaatcactct

SEQ ID NO: 114491 - DNA, 111 bp, Glycine max
gcatctcctttaccaccattctagatatcagagaactttgcagctctcttaggtttttaaaaaacaccacgcaaacagcaagatggccacttccgacagtaacatgctact

SEQ ID NO: 114492 - DNA, 149 bp, Glycine max
atggaatttactctccacattggaatctgaatgcaaacagtgtgatctatgtgactcgaggacaaggaaaggttagagttgtgaactgccaagggaatgcagtgttcgacggtgagcttaggaggggacaattgctggtggtaccacag

SEQ ID NO: 114493 - DNA, 192 bp, Glycine max
ggtggatgtacaacaatgaagacactcctgttgttgccgtttctattattgacaccaacagcttggagaaccagctcgaccagatgcctaggagattctatcttgctgggaaccaagagcaagagtttctaaaatatcagcagcagcagcaaggaggttcccaaagcagaaaggaagcaacaagaagaagaa

SEQ ID NO: 114494 - DNA, 151 bp, Glycine max
ccaaatgatcattgtcgttcaagggaagggagcaattggatttgcatttccgggatgtcctgagacgtttgagaagccacaacagcaatcaagcagaagaggctcaaggtcgcagcagcaactacaagacagtcaccagaagattcgtcac

SEQ ID NO: 114495 - DNA, 151 bp, Glycine max
ctccattggtccttaaacactcatcagtcatcaccatggccaagctagttttttccctttgttttctgcttttcagtggctgctgcttcgctttcagttccagagagcagcctcagcaaaacgagtgccagatccaaaaactcaatgccct

SEQ ID NO: 114496 - DNA, 147 bp, Glycine max
ctttgaacactcatcaccatggccaagcttgttctttccctttgtttccttcttttcagtggctgcttcgctctgagagagcaggcacagcaaaatgagtgccagatccaaaagctgaatgccctcaaaccggataaccgtatagag

SEQ ID NO: 114497 - DNA, 151 bp, Glycine max
cagcctcagcaaaacgagtgccagatccaaaaactcaatgccctcaaaccggataaccgtatagagtcagaaggagggctcattgagacatggaaccctaacaacaagccattccagtgtgccggtgttgccctctctcgctgcaccctca

SEQ ID NO: 114498 - DNA, 148 bp, Glycine max
ttctctccattgtctttgaacactcatcaccatggccaagcttgttctttccctttgtttccttcttttcagtggctgcttcgctctgagagagcaggcacagcaaaatgagtgccagatccaaaagctgaatgccctcaaaccggat

SEQ ID NO: 114499 - DNA, 97 bp, Glycine max
tgaacactcatcaccatggccaagcttgttctttccctttgtgtccttcttttcagtggctgcttcgctctgagagagcaggcacagcaaaatgagt

SEQ ID NO: 114500 - DNA, 105 bp, Glycine max
ggtaattaatgaaggagatgcaaacattgaacttgttggcctaaaagaacaacaacaggagcagcaacaggaagagcaacctttggaagtgcggaaatatagagc

SEQ ID NO: 114501 - DNA, 144 bp, Glycine max
tcctcgccgtcctcgccggcctcccggtcggtggcatcctgctcctcctggcgggattgaccctggcaggaaccctcaccggactggcagttgccacgccgctcttcgtcctcttcagcccggtgctggttccagccacggtcg

SEQ ID NO: 114502 - DNA, 109 bp, Glycine max
gagggggaagcccttcttcactctctctctttcttccctttgcttgctactcttgtcgagtgcatgctttgctattacctccagcaagtgcaacgagtgccaactcaac

SEQ ID NO: 114503 - DNA, 150 bp, Glycine max
gcaaagcaatggctacttcaaagttgaaaacccagaatgtggttgtatctctctccctaaccttaaccttggtactggtgctactgaccagcaaggcaaactcagcggaaactgtttctttcagctggaacaagttcgtgccgaagcaac

SEQ ID NO: 114504 - DNA, 147 bp, Glycine max
agaatcgctcttcttccatcctttcctctcctctctccgcatttcccaagagcagatattagaagatggcagacgctgaggatattcaaccccttgtttgcgacaatggaacaggaatggttaaggcaggatttgcaggagatgatg

SEQ ID NO: 114505 - DNA, 150 bp, Glycine max
gttcaatatcctagtacaccgtattaaagaatttaagatatactatgatgagagcgcggttcccattactgttgctgggagttgttttcctggcatcagtttctgtctcatttggcattgcgtattgggaaaagcagaaccccagtcaca

SEQ ID NO: 114506 - DNA, 150 bp, Glycine max
tcttaactcaacttctgctacccactctcttcttccaagtccaaccacgcttttctctacagtcatgggcaaggtcaagatcggaatcaacggatttggaagaattggccgtttggttgccagagtcgctctgcaaagagacgatgtgga

SEQ ID NO: 114507 - DNA, 102 bp, Glycine max
ctccatttgtccttgaatataatactcagcatggctaagcttgttctttccctttgttttctgcttttcagtggctgctgcttcgctttcagtttcagagag

SEQ ID NO: 114508 - DNA, 131 bp, Glycine max
cctgtcgggacccgaaagatggtgaactatgcctgagcggggcgaagcagaggaaactctggtggaggcccgcagcgatactgacgtgcaaatcgttcgtctgactttggtataagggcgaaaactaatcg

SEQ ID NO: 114509 - DNA, 146 bp, Glycine max
cggctcgaggcaaatgagagggtcgtcgctgtgatcatggttggaggacccactaaaggtactagattccgaccattgtcattcaacgtacccaagccactttttccattagcaggacaacccatggttcatcatccaatttctgc

SEQ ID NO: 114510 - DNA, 105 bp, Glycine max
tgacattttgataaaccgcgatcacaggttgccgcaccttaaaaccggaaacaaaagcaatcgtgacttgatttcaagaatctctcaatttctttctacttcttt

SEQ ID NO: 114511 - DNA, 148 bp, Glycine max
cttcagagagggtgatttgatcgcagtgcctactggtgttgcatggtggatgtacaacaatgaagacactcctgttgttgccgtttctattattgacaccaacagcttggagaaccagctcgaccagatgcctaggagattctatctt

SEQ ID NO: 114512 - DNA, 149 bp, Glycine max
acccccctctctattttgcgttcattctgttttccagttgaagtctttccctagccaatggccactgatcgtttgacccgggttcacagtctccgtgagaggcttgatgaaaccctcactgccaacaggaacgaaattttggcccttct

SEQ ID NO: 114513 - DNA, 99 bp, Glycine max
tcctgccagtagtcatatgcttgtctcaaagattaagccatgcatgtgtaagtatgaactaattcagactgtgaaactgcgaatggctcattagatcag

SEQ ID NO: 114514 - DNA, 149 bp, Glycine max
gtctttgaacactcatcaccatggccaagcttgttctttccctttgtttccttcttttcagtggctgcttcgctctgagagagcaggcacagcaaaatgagtgccagatccaaaagctgaatgccctcaaaccggataaccgtatagag

SEQ ID NO: 114515 - DNA, 150 bp, Glycine max
cctcgagccgaatcggctcgagattgtctttgaacactcatcaccacggccaagcttgttctacccctttgtttccttctttacagtggctgcttcgctctgagagagcaggcacagcaaaatgagtgccagatccaaaagctgaatgcc

SEQ ID NO: 114516 - DNA, 93 bp, Glycine max
tagagacctccttccatagcgaattcgaggagataaacagggttttgttgggagaggaagaggagcagaggcagcaagagggagtgatcgtgg

SEQ ID NO: 114517 - DNA, 101 bp, Glycine max
cggctcgagcgcattttggagttcaactccaaacccaacaccctccttctccccaaccatgctgacgctgattacctcatcgttatccttaacgggactgc

SEQ ID NO: 114518 - DNA, 146 bp, Glycine max
gtccttaaacactcatcagtcatcaccatggccaagctagttttttccctttgttttctgcttttcagtggctgctgcttcgctttcagttccagagagcagcctcagcaaaacgagtgccagatccaaaaactcaatgccctcaa

SEQ ID NO: 114519 - DNA, 146 bp, Glycine max
gttcaatatcctagtataccttaataaataatttaagatactatgatgagagcacggttcccattactgttgctgggacttgttttcctggcttcagtttctgtctcatttggcattgcttactgggaaaaagagaaccccaaaca

SEQ ID NO: 114520 - DNA, 147 bp, Glycine max
gtctttgaacactcatcaccatggccaagcttgttctttccctttgtttccttcttttcagtggctgcttcgctctgagagagcaggcacagcaaaatgagtgccagatccaaaagctgaatgccctcaaaccggataaccgtatag

SEQ ID NO: 114521 - DNA, 148 bp, Glycine max
aacagaagaggctcaaggtcgcagaagcagcagctacaggacagtcaccagaagattcgtcacttcaatgaaggagacgtactcgtgattcctcctggtgttccttactggacctataacactggcgatgaaccagttgttgccatca

SEQ ID NO: 114522 - DNA, 119 bp, Glycine max
gtctttgaacactcatcaccatggccaatcttgttctttgcctttgtttccttcttttcagtggatgcttcgctctgagtatagcaggcacagcaaaatgagtgccagatccaaaagct

SEQ ID NO: 114523 - DNA, 264 bp, Glycine max
taattattaacacttccttagttcaatatggggaagcccttcactctctctctttcttccctttgcttgctactcttgtcgagtgcatgctttgctattagctccagcaagctcaacgagtgccaactcaacaacctcaacgcgttggaacccgaccaccgcgttgagtccgaaggtggtttgattcaaacatggaactctcaacaccctgagctgaaatgcgccggtgtcactgtttccaaactcaccctcaaccgcaatggc

SEQ ID NO: 114524 - DNA, 259 bp, Glycine max
gtctttgaacactcatcaccatggccaagcttgttctttccctttgtttccttcttttcagtggctgcttcgctctgagagagcaggcacagcaaaatgagtgccagatccaaaagctgaatgccctcaaaccggataaccgtatagagtcggaaggtgggttcattgagacctggaaccctaacaacaagccattccagtgtgccggtgttgccctctctcgctgcacccttaaccgcaatgcccttcgtagaccttc

SEQ ID NO: 114525 - DNA, 259 bp, Glycine max
gaagacgaagacgaagatgaagacgaagaatatgaacaaactccctcttatcctccacgacgaccaagccatggaaagcatgaagatgacgaggacgaggacgaagaagaagatcaacctcgtcctgatcaccctccacagcgaccaagcaggcccgaacaacaagaaccacgtggaagaggatgtcagactagaaatggggttgaggaaaatatttgcaccatgaagcttcatgagaacattgctcgcccttcacgtg

SEQ ID NO: 114526 - DNA, 261 bp, Glycine max
cggctcgagaacttattaacactttccttagttcaatatggggaagcccttcttcactctctctctttcttccctttgcttgctactcttgtcgagtgcatgctttgctattacctccagcaagttcaacgagtgccagctcaacaacctcaacgcgttggaacccgaccaccgcgttgagtccgaaggtggtcttattgaaacatggaactctcaacaccctgagctgcaatgcgccggtgtcactgtttccaaacgcac

SEQ ID NO: 114527 - DNA, 260 bp, Glycine max
gaacaaactccctcttatcctccacgacgaccaagccatggaaagcatgaagatgacgaggacgaggacgaagaagaagatcaacctcgtcctgatcaccctccacagcgaccaagcaggcccgaacaacaagaaccacgtggaagaggatgtcagactagaaatggggttgaggaaaatatttgcaccatgaagcttcacgagaacattgctcgcccttcacgtgctgacttctacaacccaaaagctggtcgcattag

SEQ ID NO: 114528 - DNA, 259 bp, Glycine max
  unsure (1)..(259): unsure at all n locations
gtcttgggataccctgacactggtggacaggttgtttacatcttggatcaagttncgtgccttggagaatgagatgctcaaccgcatcaagaaacaaggccttgntatcacccctcgtattctcattatcactcgtcttctccctgatgcagtaggaactacctgtggccaacgtctagagagggtatatgatactgaatattgtgacattctcagagttcttncnagaantggananggggnntgtccccnaanggnt

SEQ ID NO: 114529 - DNA, 258 bp, Glycine max
ggtaattaatgaaggagatgcaaacattgaacttgttggcctaaaagaacaacaacaggagcagcaacaggaagagcaacctttggaagtgcggaaatatagagccgaattgtctgaacaagatatatttgtaatcccagcaggttatccagttgtggtcaacgctacctcaaatctgaatttctttgctattggtattaatgccgagaacaaccagaggaacttcctcgcaggttcgcaagacaatgtgataagcca

SEQ ID NO: 114530 - DNA, 259 bp, Glycine max
gggagtgcaaaggttggtctgcatattgctgcaatgagactatctccgactacttccagacataccagtttgagaacctcttcgcgaagcgcaattcgccggtggcacatgctgttggtttctgggactaccgttctttcatcaccgctgctgcactgtaccagcctcacggctttggcaccactgggggaaagaccagtggccagaaggaacttgctgctttctttggccatgttggcagcaagacctcttgtaagta

SEQ ID NO: 114531 - DNA, 259 bp, Glycine max
gagaatggctcccaagggtttaacctttctggctgtgttaatatgcgtttcagcactgtcactgagtccttctgttgcgggggaagggcaaaataatggccttgttatgaacttctacaaggaatcatgccctcaggctgaagacatcatcacagaacaagtcaagcttctctacaagcgccacaagaacactgctttctcctggctcaggaacatcttccatgactgtgctgttcagagttgtgatgcttcactgttg

SEQ ID NO: 114532 - DNA, 260 bp, Glycine max
actcgagccgaatcggctcgagcaatatcctagtataccttaatacataatttaagatactatgatgagagcacggttcccattactgttgctgggacttgttttcctggcttcagtttctgtctcatttggcattgcttactgggaaaaagagaaccccaaacacaacaagtgtctccagagttgcaatagcgagagagactcgtacaggaaccaagcatgccacgctcgttgcaacctccttaaggtggagaaagaag

SEQ ID NO: 114533 - DNA, 253 bp, Glycine max
cctcgagccgattcggctcgagattggtccttaaacactcatcagtcatcaccatggccaagctagttttttccctttgttcatctgcttttcagtggctgctgcttcgctttcagttccagagagcagcctcagcaaaacgagtgccagatccaaaaactcaatgccctcaaaccggataaccgtatagagtcagaaggagggctcattgagacatggaaccctaccaacaagccattccagtttgccggtg

SEQ ID NO: 114534 - DNA, 264 bp, Glycine max
atacaaaaatgtctcctgtggaggtagcaaggaatgccagtgaggatgcacgtgctatatgttgtcgcgaatatggaagtgcccctgatgtgcatatttatggagatcctgattttacttttccgtatgttccagctcacttgcatcttatggtatttgagttggttaagaactcactgcgtgccgtacaagagcgttttatggattctgataaagttgcacctcccattagaataatagttgctgatggaatagaggatgtta

SEQ ID NO: 114535 - DNA, 140 bp, Glycine max
gttcaatatcctagtataccttaataaataatttaagatactatgatgagagcacggttcccattactgttgctgggacttgttttcctggcttcagtttctgtctcatttggcatggcttattgggaaaaagagaaccc

SEQ ID NO: 114536 - DNA, 260 bp, Glycine max
ctcgagtcacatagatcacactgttcgcgtggtgaactgccaagggaatgcagtgttcgacggtgagctaaggaggggacaattgctagtggtgccgcagaactttgtggtggctgagcaagggggagaacaaggattggaatacgtagtgttcaagacacaccacaacgccgtgagcagctacattaaggatgtgtttagggcaatcccttcggaggttctttccaattcttacaaccttggccagagtcaagtgcgtc

SEQ ID NO: 114537 - DNA, 259 bp, Glycine max
cagacataacagcatttggtggaataagagcagccccaacgggaaatgaaagatgccctctcactgtggtgcaatctcgcaatgagctcgacaaagggattggaacaatcatctcgtccccatatcgaatccgttttatcgccgaaggccatcctttgagccttaagttcgattcatttgcagttataatgctgtgtgttggaattcctaccgagtggtctgttgtggaggatctaccagaaggacctgctgttaaaat

SEQ ID NO: 114538 - DNA, 258 bp, Glycine max
gtgttggtgggttgcaaagatgcttgggggtcttctccataggggtcataagataaaagggacagtggtgttgatgcgcaagaatgtgttggacgtgaatagcgtaaccagcgttgggggaattattggtcaaggtctcgacttagttggctcaacactcgatactcttactgccttcttgggccgatccgtgtctctccagcttattagtgctaccaaagctgatgccaacggaaaagggaaacttggaaaggctac

SEQ ID NO: 114539 - DNA, 253 bp, Glycine max
catacatagtagtgttggtgggttgcaaagatgcttgggggtcttctccataggggtcataagataaaagggacagtggtgttgatgcgcaagaatgtgttggacgtgaatagcgtaaccagcgttgggggaattattggtcaaggtctcgacttagttggctcaacactcgatactcttactgccttcttgggccgatccgtgtctctccagcttattagtgctaccaaagctgatgccaacggaaaaggga

SEQ ID NO: 114540 - DNA, 259 bp, Glycine max; identical to SEQ ID NO: 103670

SEQ ID NO: 114541 - DNA, 251 bp, Glycine max
cgttaaggttgcatgtgtggttgcgatgatgtgcatggttgttcccatgagtgttacacccatggcacaggccgcaatcacgtgcgggcaggtcgccggcgacgtgtctccgtgcctcagttatcttcgaagcggcggaaaaccgtcggacgcctgctgcaacggagtgaagtcgctcagcggcgcggcgaagaccaccgccgaccgccacgcagcctgcaattgcctgaaaaaccttgccaataatatgg

SEQ ID NO: 114542 - DNA, 256 bp, Glycine max
ttgcttgctactcttgtcgagtgcatgctttgctattagctccagcaagctcaacgagtgccaactcaacaacctcaacgcgttggaacccgaccaccgcgttgagtccgaaggtggtttgattcaaacatggaactctcaacaccctgagctgaaatgcgccggtgtcactgtttccaaactcaccctcaaccgcaatggcctccacttgccatcttactcaccttatccccggatgatcatcatcgcccaaggg

SEQ ID NO: 114543 - DNA, 257 bp, Glycine max
gaacactcatcaccatggccaagcttgttctttccctttgtttccttcttttcagtggctgcttcgctctgagagagcaggcacagcaaaatgagtgccagatccaaaagctgaatgccctcaaaccggataaccgtatagagtcggaaggtgggttcattgagacctggaaccctaacaacaagccattccagtgtgccggtgttgccctctctcgctgcacccttaaccgcaatgcccttcgtagaccttcctac

SEQ ID NO: 114544 - DNA, 258 bp, Glycine max
cttgctccctcagaagcgaagaagaagccacagagaactagtctcctactctcacccgcaagaaaaaaatggcatctcacatcgttggatacccccgtatgggtcccaagagagagctcaagttcgctctcgagtctttctgggatggcaagagcagcgccgaggatttgcagaaggtgtcttctgatctcagggcatccatctggaagcagatggctgatgctgggatcaagtacatccccagcaacactttctctc

SEQ ID NO: 114545 - DNA, 258 bp, Glycine max
catggctaagcttgttctttccctttgttttctgcttttcagtggctgctgcttcgctttcagtttcagagagcagccacagcaaaacgagtgccagatccaacgcctcaatgccctcaaaccggataaccgtatagagtcagaaggtggcttcattgagacatggaaccctaacaacaagccattccagtgtgccggtgttgccctctctcgctgcaccctcaaccgcaacgcccttcgcagaccttcctacaccaa

SEQ ID NO: 114546 - DNA, 257 bp, Glycine max
tccgaactgatggtgaacaggcccttaagtttcctcctcctaaagtaattcaagtgagtaagtctgcatggatgactgatgaagaatttgcaagagaaatgcttgctggtgtaaatccaaacttgattcgttgtcttaaggagttccctccacgaagcaagctagatagccaagtctatggtgatcatactagtcaaataaccaaagaacacctagagcccaacttagaagggctcactgtagatgaggcaattcaa

SEQ ID NO: 114547 - DNA, 259 bp, Glycine max
aagcacatcatggagaagatccaaggccgcggcgatgacgatgatgatgatgacgacgacaatcacattctcaggaccatgcggggaagaatcaactacataaggaggaacgaaggaaaagacgaagacgaagaagaagaaggacacatgcagaagtgctgcacagaaatgagcgagctgagaagccccaaatgccagtgcaaagcgctgcagaagataatggagaaccagagcgaggaactggaggagaagcagaaga

SEQ ID NO: 114548 - DNA, 155 bp, Glycine max
gccatggaaagcgtgaacaagacgaggacgaggacgaagatgaagataaacctcgtcctagtcgaccaagccaaggaaagcgtgaacaagaccaggaccaggacgaggacgaagatgaagatgaagatcaacctcgcaagagccgcgaatggaga

SEQ ID NO: 114549 - DNA, 264 bp, Glycine max
cggctcgagtcttgtcaaggcatgcatctgatgaggtgtaccttggggagagggacaatccaaattggacatctgatacaagagcgttagaggcttttaaaaggtttggaaataaactggcacaaattgagaataaactctcagagagaaacaacgatgagaaactgagaaaccgttgtggaccagttcaaatgccttatactctgcttttgccttctagtaaggaaggattaactttcagaggaattcccaacagtatctcta

SEQ ID NO: 114550 - DNA, 266 bp, Glycine max
ctcgagccgaaaaaaaatcgtagttggaggcgccgcactccactccactccaatcaatcagatactagcgatggggaggaagcgaaaggtagcaccgaaatcttctgtatccgccgagcccccgctgaagcaacaccaaccaaaacccgaaaatgccgctcaggaatacgaagaagaggtcgaagaggaagttgaggaagaagaggtagaggaagaggtcgaagaggaagaagaagaagaggaggacgaagaggacgaggaagaag

SEQ ID NO: 114551 - DNA, 262 bp, Glycine max
tctcgagccgaatcggctcgagcaaacagtgtgatctatgtgactacaggacaaggaaaggttagagttgtgaactgccaagggaatgcagtgttcgacggtgagcttaggaggggacaattgctggtggtaccacagaacttcgtggtggcggagcaagccggagaacaaggattcgaatacatagtattcaagacacaccacaacgcagtcactagctacttgaaggatgtgtttagggcaattccctcagaggttcttg

SEQ ID NO: 114552 - DNA, 260 bp, Glycine max
attccaacaagcttggcaagttgtttgagattaccccagagaaaaaccctcagcttcgggacttggatgtcttcctcagtgttgtggatatgaacgagggagctctttttctgccacacttcaattcaaaggccatagtggtactagtgattaatgaaggagaagcaaacattgaacttgttggcattaaagaacaacaacagaggcagcaacaggaagagcaacctttggaagtgcggaaatatagagctgaattgtct

SEQ ID NO: 114553 - DNA, 258 bp, Glycine max
tcaatatcctagtataccttaataaataatttaagatactatgatgagagcacggttcccattactgttgctgggacttgttttcctggcttcagtttctgtctcatttggcattgcttactgggaaaaagagaaccccaaacacaacaagtgtctccagagttgcaatagcgagagagactcgtacaggaaccaagcatgccacgctcgttgcaacctccttaaggtggagagagaagaatgtgaagaaggtgaaat

SEQ ID NO: 114554 - DNA, 259 bp, Glycine max
attttatctttattccactgaatagaacatctgcatataaatggataccctttatattatctatctttatattatctataaagggtaaagatatccgatgtgaatctatttgtttagttttctatcggtatgtatataggtgaataatccaacatgcctttttgtgaagtaaaaaaactaccctcgatccatgcctcaaaagggttgataataagtaaaaaaaatcaatgaattcatgataaaacccttctgcgttttt

SEQ ID NO: 114555 - DNA, 254 bp, Glycine max
aaaattcttccaccaagttatgggtttccttgtgttgcttcttttctccctcttaggtctctcttctagttccagcatatcaactcatcgttccatattggatcttgacctaaccaagtttaccacacagaaacaggtgtcttcactgttccaactatggaagagtgagcatggacgtgtctaccataaccacgaagaagaggcaaagagacttgagattttcaagaataacttgaactatatcagggacatga

SEQ ID NO: 114556 - DNA, 255 bp, Glycine max
catgctctcccaatattcactggggagtgtggtgaatgcacctattgcaagtctgaagagagcaacctgtgtgagcttctcaggatcaacactgacagaggagtgatgctcagtgatggcaaaacaaggttctccaaaaatggacaacctatttaccacttcgttggaacctccactttcagtgaatacactgttctccatgaaggatgtgtcgccaagatcaaccctgctgcacctcttgacaaagttgctgtt

SEQ ID NO: 114557 - DNA, 257 bp, Glycine max
actgaccaagccatggcgatgagaaccaaactttctttagctatctttttcttttttcttttagccttattttcaaacctagcctttggcaaatgtaaagaaaccgaggtagaagaagaagaccctgagctcgtaacatgcaaacaccaatgccaacagccacagcaatacactgagggtgacaagcgggtatgcttgcaaagatgtgacaggtatcatcgtatgaagcaagagcgagagaaacaaatccaagagga

SEQ ID NO: 114558 - DNA, 253 bp, Glycine max
gcatgaggaggctagggctaaggaagatgctgactctgataggaagaaggatctttttgatattttgttgaacctcattgaagctgatggtgctgacaataagctcactagagagagtgccaaagcctttgctctggacatgttcatcgccggcacaaacggccccgcaagcgtcctagagtggtcactggcggagctggtgagaaacccccacgttttcaagaaggcaagagaagagattgagtcagtggta

SEQ ID NO: 114559 - DNA, 257 bp, Glycine max
tcctagtataccttaataaataatttaagatactatgatgagagcacggttcccattactgttgctgggacttgttttcctggcttcagtttctgtctcatttggcattgcttactgggaaaaagagaaccccaaacacaacaagtgtctccagagttgcaatagcgagagagactcgtacaggaaccaagcatgccacgctcgttgcaacctccttaaggtggagaaagaagaatgtgaagaaggtgaaattccac

SEQ ID NO: 114560 - DNA, 257 bp, Glycine max
gaaaaagagaaccccaaacacaacaagtgtctccagagttgcaatagcgagagagactcgtacaggaaccaagcatgccacgctcgttgcaacctccttaaggtggagaaagaagaatgtgaagaaggtgaaattccacgaccacgaccacgaccacaacacccggagagggaacctcagcaacccggtgagaaggaggaagacgaagatgagcaaccacgtccaatcccattcccacgcccacaacctcgtcaaga

SEQ ID NO: 114561 - DNA, 266 bp, Glycine max
caaaactcattttccaactacatttcttccaccaactcataaaatcctcatatctgttcccaaaagcttgtttgtgagaatggcttcgggtgaaaagaaattcccacctcaacaacaacaaacacagcctgggaaggagcatgctatgaatccagtaccccaattcactagccctgactacaagccttcaaataaacttcaaggaaagatagcattagtgactgggggtgactctgggattggacgagcggtgtgtaacttgtttg

SEQ ID NO: 114562 - DNA, 263 bp, Glycine max
aacttattaacactttccttagttcaatatggggaagcccttcttcactctctctctttcttccctttgcttgctactcttgtcgagtgcatgctttgctattacctccagcaagttcaacgagtgccaactcaacaacctcaacgcgttggaacccgaccaccgcgttgagtccgaaggtggtcttattgaaacatggaactctcaacaccctgagctgcaatgcgccggtgtcactgtttccaaacgcaccctcaaccgca

SEQ ID NO: 114563 - DNA, 258 bp, Glycine max
cttttcctttgtcaattgagaattgttcctctcttccattcgtgtacccgcaaaagaatcatgacgagttcctctgctgccgctcgcaagaatctgagtaagattgcctgcaataggctccagaaagagctcgtggagtggcaggtcaatcccccaactggtttcaagcacaaagtcaccgacaatctccagaggtgggtggttgaagtcactggagctcctgggacactttacgctaacgagacctaccagcttcag

SEQ ID NO: 114564 - DNA, 257 bp, Glycine max; identical to SEQ ID NO: 104639

SEQ ID NO: 114565 - DNA, 259 bp, Glycine max
tgaagaaggtgaaattccacgaccacgaccacgaccacaacacccggagagggaacctcagcaacccggtgagaaggaggaagacgaagatgagcaaccacgtccaatcccattcccacgcccacaacctcgtcaagaagaagagcacgagcagagagaggaacaggaatggcctcgcaaggaggaaaaacgcggagaaaagggaagtgaagaggaagatgaggatgaggatgaggaacaagatgaacgtcaattccca

SEQ ID NO: 114566 - DNA, 256 bp, Glycine max
tgcaaaagatattgagaacctaataaagagccaaagtgagtcctactttgtggatgctcagcctcagcagaaagaggaggggaacaagggaagaaagggtcctttgtcttcaattttgagggctttttactgaataagtatgtagtactaaaatgtatgctgtaatagctcatagtgagcgaggaaagtatcgggctatttaactatgacttgagctccatctatgaataaacaaaagcatcatatgctgatttat

SEQ ID NO: 114567 - DNA, 251 bp, Glycine max; identical to SEQ ID NO: 111401

SEQ ID NO: 114568 - DNA, 246 bp, Glycine max
attggtccttaaacactcatcagtcatcaccatggccaagctagttttttccctttgttttctgcttttcagtggctgctgcttcgctttcagttccagagagcagcctcagcaaaacgagtgccagatccaaaaactcaatgccctcaaaccggataaccgtatagagtcagaaggagggctcattgagacatggaaccctaacaacaagccattccagtgtgccggtgttgcccctctctcgct

SEQ ID NO: 114569 - DNA, 252 bp, Glycine max
gttcaatatcctagtacaccgtattaaagaatttaagatatactatgatgagagcgcggttcccattactgttgctgggagttgttttcctggcatcagtttctgtctcatttggcattgcgtattgggaaaagcagatccccagtcacaacaagtgcctccgaagttgcaatagcgagaaagactcctacaggaaccaagcatgccacgctcgttgcaacctccttaaggtggaggaagaagaagaatgcg

SEQ ID NO: 114570 - DNA, 252 bp, Glycine max
cggctcgaggttcaatatcctagtataccttaataaataatttaagatactatgatgagagcacggttcccattactgttgctgggacttgttttcctggcttcagtttctgtctcatttggcattgcttactgggaaaaagagaaccccaaacacaacaagtgtctccagagttgcaatagcgagagagactcgtacaggaaccaagcatgccacgctcgttgcaacctccttaaggtggagaaagaagaa

SEQ ID NO: 114571 - DNA, 256 bp, Glycine max
agaaaaacccccagcttcgggacttggatatcttcctcagtattgtggatatgaacgagggagctcttcttctaccacacttcaattcaaaggcgatagtgatactggtaattaatgaaggagatgcaaacattgaacttgttggcctaaaagaacaacaacaggagcagcaacaggaagagcaacctttggaagtgcggaaatatagagccgaattgtctgaacaagatatatttgtaatcccagcaggttatcc

SEQ ID NO: 114572 - DNA, 258 bp, Glycine max
ctaacaataattccttcacttgcagaacttagttctctgttgcatcatcatcatcttcattagtgttagccctaaacttcaccttcaaccatgaccacagtgccaccacacagtgtccaagtgcacacaacaacacaccgctacgaagccggcgtcgtcccgccggctcgttttgaggcgccgcgttacgaagccggcatcaaggcgccctcttccatttaccattccgagagaggtccgacgacctctcaggttctc

SEQ ID NO: 114573 - DNA, 241 bp, Glycine max; identical to SEQ ID NO: 111926

SEQ ID NO: 114574 - DNA, 262 bp, Glycine max
attgtctttgaacactcatcaccatggccaagcttgttctttccctttgtttccttcttttcagtggctgcttcgctctgagagagcaggcacagcaaaatgagtgccagatccaaaagctgaatgccctcaaaccggataaccgtatagagtcggaaggtgggttcattgagacctggaaccctaacaacaagccattccagtgtgccggtgttgccctctctcgctgcacccttaaccgcaatgcccttcgtagaccttc

SEQ ID NO: 114575 - DNA, 256 bp, Glycine max
attgtctttgaacactcatcaccatggccaagcttgttctttccctttgtttccttcttttcagtgagtgtttcgctctgagagagcaggcacagcaaaatgagtgccagatccaaaagctgaatgccctcaaaccggataaccgtatagagtcggaaggtgggttcattgagacctggaaccctaacaacaagccattccagtgtgccggtgttgccctctctcgctgcacccttaaccgcaatgcccttcgtag

SEQ ID NO: 114576 - DNA, 258 bp, Glycine max
tcctcactgaccaagccatggcgatgagaaccaaactttctttagctatctttttcttttttcttttagccttattttcaaacctagcctttggcaaatgtaaagaaaccgaggtagaagaagaagaccctgagctcgtaacatgcaaacaccaatgccaacagccacagcaatacactgagggtgacaagcgggtatgcttgcaaagatgtgacaggtatcatcgtatgaagcaagagcgagagaaacaaatccaag

SEQ ID NO: 114577 - DNA, 257 bp, Glycine max
caatatcctagtacaccgtattaaagaatttaagatatactatgatgagagcgcggttcccattactgttgctgggagttgttttcctggcatcagtttctgtctcatttggcattgcgtattgggaaaagcagaaccccagtcacaacaagtgcctccgaagttgcaatagcgagaaagactcctacaggaaccaagcatgccacgctcgttgcaacctccttaaggtggaggaagaagaagaatgcgaagaaggt

SEQ ID NO: 114578 - DNA, 257 bp, Glycine max
actcaaagttgaacaaaactcattttccaactacatttcttccaccaactcataaaatcctcatatctgttcccaaaagcttgtttgtgagaatggcttcgggtgaaaagaaattcccacctcaacaacaacaaacacagcctgggaaggagcatgctatgaatccagtaccccaattcactagccctgactacaagccttcaaataaacttcaaggaaagatagcattagtgactgggggtgactctgggattgga

SEQ ID NO: 114579 - DNA, 256 bp, Glycine max
cagtcacggcacacgcgccggctgagaaaggggtgtctggatttttgttggatttcctgatgggcggagtgtcggcggctgtgtccaagacagctgcggctccaatcgaacgagttaagttgctcatccaaaaccaggatgaaatgatcaagagtggtcggttgtctgaaccatacaaaggaattggcgattgtttcactcgaaccatgaaggatgaaggggtgattgctctttggagaggaaacactgctaatgt

SEQ ID NO: 114580 - DNA, 254 bp, Glycine max
caaacacaacaagtgtctccagagttgcaatagcgagagagactcgtacaggaaccaagcatgccacgctcgttgcaacctccttaaggtggagaaagaagaatgtgaagaaggtgaaattccacgaccacgaccacgaccacaacacccggagagggaacctcagcaacccggtgagaaggaggaagacgaagatgagcaaccacgtccaatcccattcccacgcccacaacctcgtcaagaagaagagcacg

SEQ ID NO: 114581 - DNA, 250 bp, Glycine max
gttcaatatcctagtataccttaataaataatttaagatactatgatgagagcacggttcccattactgttgctgggacttgttttcctggcttcagtttctgtctcatttggcattgcttactgggaaaaagagaaccccaaacacaacaagtgtctccagagttgcaatagcgagagagactcgtacaggaaccaagcatgccacgctcgttgcaacctccttagggtggagaaagaagaatgtgaag

SEQ ID NO: 114582 - DNA, 255 bp, Glycine max
aaatgatactacaagccactagggtctagcaaaggaaacaataatgggaggtggaggccgtgtggccaaagttgaaattcagcagaagaagcctctctcaagggttccaaacacaaagccaccgttcactgttggccaactcaagaaagccattccaccgcactgctttcagcgttccctcctcacttcattgtcctatgttgtttatgacctttcattggctttcattttctacattgccaccacctacttcca

SEQ ID NO: 114583 - DNA, 256 bp, Glycine max
attggtccttaaacactcatcagtcatcaccatggccaagctagttttttccctttgttttctgcttttcagtggctgctgcttcgctttcagttccagagagcagcctcagcaaaacgagtgccagatccaaaaactcaatgccctcaaaccggataaccgtatagagtcagaaggagggctcattgagacatggaaccctaacaacaagccattccagtgtgccggtgttgccctctctcgctgcaccctcaac

SEQ ID NO: 114584 - DNA, 255 bp, Glycine max
gatgtacaacaatgaagacactcctgttgttgccgtttctattattgacaccaacagcttggagaaccagctcgaccagatgcctaggagattctatcttgctgggaaccaagagcaagagtttctaaaatatcagcagcagcagcaaggaggttcccaaagccagaaaggaaagcaacaagaagaagaaaacgaaggaagcaacatattgagtggcttcgcccctgaattcttgaaagaagcgttcggcgtgaa

SEQ ID NO: 114585 - DNA, 262 bp, Glycine max
cttaattattaacacttccttagttcaatatggggaagcccttcactctctctctttcttccctttgcttgctactcttgtcgagtgcatgctttgctattagctccagcaagctcaacgagtgccaactcaacaacctcaacgcgttggaacccgaccaccgcgttgagtccgaaggtggtttgattcaaacatggaactctcaacaccctgagctgaaatgcgccggtgtcactgtttccatactcaccctcaaccgcaa

SEQ ID NO: 114586 - DNA, 259 bp, Glycine max
caagagcgatagtaatctcaaccaatctctgaaaccaactctttctccgtccgtagaggctgtcagtaatatcgataggttcttggagtttacaacaccgtcagttcctgctcagtatttctccaagacaacgatgagaggatggaagttttgcgatgtggagtatcagtcttactttacattgagtgatctgtgggagtcttttaaggagtggagtgcgtatggagctggagtgcctttggtgcttgaccaaagtgat

SEQ ID NO: 114587 - DNA, 249 bp, Glycine max; identical to SEQ ID NO: 112170

SEQ ID NO: 114588 - DNA, 258 bp, Glycine max
actcgagccgattcggctcgagctaacaattccttcacttgcagcacacgttgcatcatcatcttcattgcaaaaccctaaactacaccttcaaccatgaccacacaagtaccaccacacagtgtccaagtccacacaacaacacaccgctacgaagctggcgtcgtcccccccggagcccgtttcgaaccgccgcgttatgaagccggcgtcaaagcgccctccatttaccattccgagagaggtccaacgacttcc

SEQ ID NO: 114589 - DNA, 255 bp, Glycine max; identical to SEQ ID NO: 102867

SEQ ID NO: 114590 - DNA, 250 bp, Glycine max
gtgacttgattggtcttccattgaagtctccactttcattcaacgaggtcatttatgctctacccatgttgtctattctgatggataagggtactggggttgtcaccagtgtgcccagtgatgctcctgatgactacatggcattgcatgatttgaaggcaaaacccgcgctcagggagaagtatggggttaaggatgagtgggtgctgccttttgagattgtgcccatcattgaggttcgccagtttgg

SEQ ID NO: 114591 - DNA, 252 bp, Glycine max
aaaaagagaaccccaaacacaacaagtgtctccagagttgcaatagcgagagagactcgtacaggaaccaagcatgccacgctcgttgcaacctccttaaggtggagaaagaagaatgtgaagaaggtgaaattccacgaccacgaccacgaccacaacacccggagagggaacctcagcaacccggtgagaaggaggaagacgaagatgagcaaccacgtccattcccattcccacgcccacaacctcgtc

SEQ ID NO: 114592 - DNA, 251 bp, Glycine max
ggtagtgacaataaataacaataccgggctcattgagtctggtaattggaatgagtacaatctaaatcccttaacgaggatccattggagggcaagtctggtgccagcagccgcggtaattccagctccaatagcgtatatttaagttgttgcagttaaaaagctcgtagttggaccttgggttgggtcgatcggtccgcctccggtgtgcaccggtcggctcgtcccttctgccggcgatgcgctcctgt

SEQ ID NO: 114593 - DNA, 254 bp, Glycine max
ctcgagccgctcgagccggttgcctcaaactcaaaggatgaccctgcaaaggaggctgctaacttcacagcacaagtcatcatcatgaaccaccctggtcagattggaaatggctatgcccctgtcctcgactgccacacttctcacattgctgtcaagtttgctgaactcatgaccaagattgacaggcgatccggcaaagagcttgagaaggagcccaagtttttgaagaacggtgatgctggttttgttaa

SEQ ID NO: 114594 - DNA, 104 bp, Glycine max
gttttggggtcacaactgccgaaacctagttgagtgtgtagtttttgtattttgtcttctacacattgaataaaatgtgtgaaaacctattttgtatagggatg

SEQ ID NO: 114595 - DNA, 135 bp, Glycine max
gagcacaaatggttcaagcacagcctctacaacatgttggtaatggtgcagggaaagaagatcaagcttattttgatccaagtgctccaccacccttcaagattgcaaatatcagagcagcaattccaaaacatt

SEQ ID NO: 114596 - DNA, 121 bp, Glycine max
gagttgtttgtgttcctcactgaccaagccatggcgatgagaaccagactttctttagctatcttcttctttgttctgttagccttattgtcaaacctagcctttggcaaatgtaaagaaa

SEQ ID NO: 114597 - DNA, 278 bp, Glycine max
ggaggggcagcaacaaggggaggagaggctgcaagagagtgtgattgtggaaatctcaaagaaacaagttcgggaactgagcaaacatgccaaatctagttcaaggaaaaccatttcttctgaagataaacctttcaacttgagaagccgcgaccccatctattccaacaagcttggcaagttgtttgagattaccccagagaaaaaccctcagcttcgggacttggatgtcttcctcagtgttgtggatatgaacgagggagtctttttctgccaca

SEQ ID NO: 114598 - DNA, 159 bp, Glycine max
atttgatgtggagctgttgtcttggactagtgtgaaagacatatgtaaggatggaggtttatttaagaagatacttaccaagggggagaaatgggagaacccaaaggatcctgatgaagttttagtcaagtatgaagcatgccttgaagatggaactct

SEQ ID NO: 114599 - DNA, 277 bp, Glycine max
gcttgttctttccctttgtttccttcttttcagtggctgcttcgctctgagagagcaggcacagcaaaatgagtgccagatccaaaagctgaatgccctcaaaccggataaccgtatagagtcggaaggtgggttcattgagacctggaaccctaacaacaagccattccagtgtgccggtgttgccctctctcgctgcacccttaaccgcaatgcccttcgtagaccttcctacaccaacggtccccaggaaatctacatacaacaaggtaatggt

SEQ ID NO: 114600 - DNA, 274 bp, Glycine max
ggcaagtggaggccattgcggttgaggggccacaagaacaatcaaacagaagaggctcaaggtcgcagaagcagcagctacaggacagtcaccagaagattcgtcacttcaatgaaggagacgtactcgtgattcctcctggtgttccttactggacctataacactggcgatgaaccagttgttgccatcagtcttcttgacacctctaacttcaataaccagcttgatcaaaccctagggtattttaccttgctgggaacccagatatagag

SEQ ID NO: 114601 - DNA, 278 bp, Glycine max
ctcatcagtcatcaccatggccaagctagttttttccctttgtgttctgcttttcagtggctgctgcttcgctttcagttccagagagcagcctcagcaaaacgagtgccagatccaaaaactcaatgccctcaaaccggataaccgtatagagtcagaaggagggctcattgagacatggaaccctaacaacaagccattccagtgtgccggtgttgccctctctcgctgcaccctcaaccgcaacgcccttcgtagaccttcctacaccaacggtc

SEQ ID NO: 114602 - DNA, 122 bp, Glycine max
ggggaagcccttcactctctctctttcttccctttgcttgctactcttgtcgagtgcatgctttgctattagctccagcaagctcaacgagtgccaactcaacaacctcaacgcgttggaac

SEQ ID NO: 114603 - DNA, 100 bp, Glycine max
ccgagaacaaccagaggaacttccttgcaggttcgaaagacaatgtgataagccagatacctagtcaagtgcaggagcttgcgttccctgggtctgcaaa

SEQ ID NO: 114604 - DNA, 246 bp, Glycine max
ctcgagcccttcaaacttaattattaacacttccttagttcaatatggggaagcccttcactctctctctttcttccctttgcttgctactcttgtcgagtgcatgctttgctattagctccagcaagctcaacgagtgccaactcaacaacctcaacgcgttggaacccgaccaccgcgttgagtccgaaggtggtttgattcaaacatggaactctcaacaccctgagctgaaatgcgccggtg

SEQ ID NO: 114605 - DNA, 167 bp, Glycine max
gcagaaatggcattgatgagaccatttgcacaatgagacttcgccaaaacattggtcagaattcatcacctgacatctacaaccctcaagctggtagcatcacaaccgccaccagccttgacttcccagccctctggcttctcaaactcagtgcccagtatggatca

SEQ ID NO: 114606 - DNA, 247 bp, Glycine max; identical to SEQ ID NO: 104138

SEQ ID NO: 114607 - DNA, 231 bp, Glycine max
gttcaatatcctagtataccttaataaataatttaagatactatgatgagagcacggttcccattactgttgctgggacttgttttcctggcttcagtttctgtctcatttggcattgcttactgggaaaaagagaaccccaaacacaacaagtgtctccagagttgcaatagcgagagagactcgtacaggaaccaagcatgccacgctcgttgcaacctccttaaggtg

SEQ ID NO: 114608 - DNA, 191 bp, Glycine max
tacaagaatggaatttactctccacattggaatctgaatgcaaacagtgtgatctatgtgactcgaggacaaggaaaggttagagttgtgaactgccaagggaatgcagtgttcgacggtgagcttaggaggggacaattgctggtggtaccacagaacttcgtggtggcggacaagccggaagacaagga

SEQ ID NO: 114609 - DNA, 209 bp, Glycine max
tattcattcaagattcagcaagtgcgttttggaagcagagaccgaaatacttcgagatggcccgtacaaagcaaactgctcgtaagtcaactggaggaaaagctcccaggaagcagcttgcaaccaaggctgcacgtaagtctgcaccaacaactggtggtgtgaagaagcctcatcgttatcgccctggaactgttgctcttcgtgag

SEQ ID NO: 114610 - DNA, 249 bp, Glycine max
attggtccttaaacactcatcagtcatcaccatggccaagctagttttttccctttgttttctgcttttcagtggctgctgcttcgctttcagttccagagagcagcctcagcaaaacgagtgccagatccaaaaactcaatgccctcaaaccggataaccgtatagagtcagaaggagggctcattgagacatggaaccctaacaacaagccattccagtggtgccggtgttgccctctctcgctgca

SEQ ID NO: 114611 - DNA, 276 bp, Glycine max
gaggctgctgagcaagagtatgagaaagaaaagctgaatgagagaattgctaaattgtctggtggtgtggctgtgatacaggttggcgcacaaactgagacagagctcaaggaaaagaaattgagagttgaagacgctcttaatgctacaaaggcagctgtagaggaaggtattgttgttggtggtggttgcactcttctgagacttgcatcaaaggtggatgcaatcaaggatagccttgataatgatgaagaaaaagttggagctgatattgtg

SEQ ID NO: 114612 - DNA, 135 bp, Glycine max
ctcgagccgtgcaaacagaaaatcaccccattctcatcgtttaggattgaacaagtttgctgacatcactcctcaagagttcagcaaaaagtacttgcaagctcccaaggatgtgtcgcagcaaatccaaatggc

SEQ ID NO: 114613 - DNA, 111 bp, Glycine max
tctctctctttcttccctttgcttgctactcttgtcgagtgcatgctttgctattagctccagcaagctcaacgagtgccaactcaacaacctcaacgcgttggaacccga

SEQ ID NO: 114614 - DNA, 137 bp, Glycine max
atatattccattctctctgtgtatttccctacctctcccttcaagatgcagatcttcgtcaagaccctcaccggcaagaccatcacccttgatgtggaaagctctgaaaccatcgacaacgtcaaggccaagatcca

SEQ ID NO: 114615 - DNA, 284 bp, Glycine max
attggatcacacttatacaaaattctccaattagtaacttgttgagagttgctgcttggaagaaaggctgtttaatggttaagattgtgatgtctgggaatgcagcagtcaaaaggagtgattgggcctcattggtacaagtgtttttaacaaacagcaacagtacagagcattttgatgcatgtaagtggacaaaatcggaaccacattcctgggaattgatcttcccaatagaggtatgtggtcctaataatggttttgaaatgtggagttctgagtgggca

SEQ ID NO: 114616 - DNA, 165 bp, Glycine max
ctcgagccgcccgaccaccgcgttgagtccgaaggtggtttgattcaaacatggaactctcaacaccctgagctgaaatgcgccggtgtcactgtttccaaactcaccctcaaccgcaatggcctccacttgccatcttactcaccttatccccggatgatcatc

SEQ ID NO: 114617 - DNA, 134 bp, Glycine max
  unsure (1)..(134): unsure at all n locations
cttctctttacacccccctctctattttgcgttcattctgtttaccagttgaagtctttccctagccaatggccactgatcgtttgacccgggttcacagtctccgtgagaggcttgatgaaaccctcactgnc

SEQ ID NO: 114618 - DNA, 187 bp, Glycine max
attgtcgtcattggacatgtcgactctgggaagtcaactaccactggtcacttgatctacaagcttggaggtattgacaagcgtgtgattgagaggttcgagaaggaggctgccgagatgaacaagaggtcattcaagtatgcctgggtgctcgacaagctcaaagctgagcgtgaaagaggattta

SEQ ID NO: 114619 - DNA, 275 bp, Glycine max
ggtctcagcgttatcagccccaagtggcaagaacaacaagatgaagatgaagatgaagacgaagatgatgaagatgaacaaattccctctcaccctcctcgccgaccaagccatggaaagcgtgaacaagacgaggacgaggacgaagatgaagataaacctcgtcctagtcgaccaagccaaggaaagcgtgaacaagaccaggaccaggacgaggacgaagatgaagatgaagatcaacctcgcaagagccgcgaatggagatcgaaaaagac

SEQ ID NO: 114620 - DNA, 200 bp, Glycine max
tctctctctccttctcgctctttcagctttgacttttgttggaaactaaggcctaatcaaaatggtgaagttcacagctgaagagctacgtcgtattatggactataagcataatatccgtaatatgtctgtcattgctcatgttgatcacggaaaatcaaccctcactgattctcttgtggctgctgctggtattatgg

SEQ ID NO: 114621 - DNA, 165 bp, Glycine max
tcctagtacaccgtattaaagaatttaagatatactatgatgagagcgcggttcccattactgttgctgggagttgttttcctggcatcagtttctgtctcatttggcattgcgtattgggaaaagcagaaccccagtcacaacaagtgcctccgaagttgcaat

SEQ ID NO: 114622 - DNA, 109 bp, Glycine max
ctagtataccttaataaataatttaagatactatgatgagagcacggttcccattactgttgctgggacttgttttcctggcttcagtttctgtctcatttggcattgc

SEQ ID NO: 114623 - DNA, 281 bp, Glycine max
taattattaacacttccttagttcaatatggggaagcccttcactctctctctttcttccctttgcttgctactcttgtcgagtgcatgctttgctattagctccagcaagctcaacgagtgccaactcaacaacctcaacgcgttggaacccgaccaccgcgttgagtccgaaggtggtttgattcaaacatggaactctcaacaccctgagctgaaatgcgccggtgtcactgtttccaaactcaccctcaaccgcaatggcctccacttgccatctta

SEQ ID NO: 114624 - DNA, 174 bp, Glycine max
cgaaggaggcagcatattgagtggcttcgccccggaattcttggaacatgcgttcgtcgtggacaggcagatagtgagaaagctacaaggtgagaacgaagaggaagagaagggtgccattgtgacagtgaaaggaggtctcagcgtgataagcccacccacggaagagcagca

SEQ ID NO: 114625 - DNA, 153 bp, Glycine max
gttcaatatcctagtataccttaataaataatttaagatactatgatgagagcacggttcccattactgttgctgggacttgttttcctggcttcagtttctgtctcatttggcattgcttactgggaaaaagagaaccccaaacacaacaag

SEQ ID NO: 114626 - DNA, 250 bp, Glycine max
agaagatgatgatgatgaggaagagcagccacagtgcgtggagacagacaaaggttgccaacgccaaagcaaaaggagcagaaatggcattgatgagaccatttgcacaatgagacttcgccaaaacattggtcagaattcatcacctgacatctacaaccctcaagctggtagcatcacaaccgccaccagccttgacttcccagccctctggcttctcaaactcagtgcccagtatggatcactccgc

SEQ ID NO: 114627 - DNA, 221 bp, Glycine max
tcctcgccgtcctcgccggcctcccggtcggtggcatcctgctcctcctggcgggattgaccctggcaggaaccctcaccggactggcagttgccacgccgctcttcgtcctcttcagcccggtgctggttccagccacggtcgccatcggcctggccgtggccgggttcctgacgtcgggggccttcgggctcacggcgctgtcttccttctcctggatc

SEQ ID NO: 114628 - DNA, 273 bp, Glycine max
aaagaatttaagatatactatgatgagagcgcggttcccattactgttgctgggagttgttttcctggcatcagtttctgtctcatttggcattgcgtattgggaaaagcagaaccccagtcacaacaagtgcctccgaagttgcaatagcgagaaagactcctacaggaaccaagcatgccacgctcgttgcaacctccttaaggtggaggaagaagaagaatgcgaagaaggtcaaattccacgaccacgaccacaacacccggagaggga

SEQ ID NO: 114629 - DNA, 215 bp, Glycine max
attccaactcagtgcccaatatgttgtcctctacaagaatggaatttactctccacattggaatctgaatgcaaacagtgtgatctatgtgactcgaggacaaggaaaggttagagttgtgaactgccaagggaatgcagtgttcgacggtgagcttaggaggggacaattgctggtggtaccacagaacttcgtggtggcggacaagccggaga

SEQ ID NO: 114630 - DNA, 294 bp, Glycine max
tttcgagtaaaagtaaaacacagttcctgatccatggcatctcgccgccgcatcgttgttgaaggtcataatgcctacggagatcagcgggcgttgagtaagaacagtcactagatggagatcagtaagtgtgaatgcgtagaattctagtacatcacgtatagaggcaaccagtcggcgcagattttcttaccaaggaagttcaatttgaagataggttgttcacattgcagatttgggatactgctggtcaagagcggtttcagagtcttggcgtggctttctaccgtggtg

SEQ ID NO: 114631 - DNA, 137 bp, Glycine max
acttaattattaacacttccttagttcaatatggggaagcccttcactctctctctttcttccctttgcttgctactcttgtcgagtgcatgctttgctattagctccagcaagctcaacgagtgccaactcaacaa

SEQ ID NO: 114632 - DNA, 220 bp, Glycine max
gcgatttttgtagatctcgagcctactgtgattgatgaagttaggactgggacataccgccaactatttcatcctgagcagctcattagcggaaaggaggatgctgcaaacaactttgcccgtggccactataccattggaaaggagattgttgagctttgcttggatcgcatcagaaagcttgctgacaactgcactggtctccaaggtttcctggttt

SEQ ID NO: 114633 - DNA, 282 bp, Glycine max
cttaattattaacacttccttagttcaatatggggaagcccttcactctctctctttcttccctttgcttgctactcttgtcgagtgcatgctttgctattagctccagcaagctcaacgagtgccaactcaacaacctcaacgcgttggaacccgaccaccgcgttgagtccgaaggtggtttgattcaaacatggaactctcaacaccctgagctgaaatgcgccggtgtcactgtttccaaactcaccctcaaccgcaatggcctccacttgccatctt

SEQ ID NO: 114634 - DNA, 187 bp, Glycine max
cttcactctctctctttcttccctttgcttgctactcttgtcgagtgcatgctttgctattagctccagcaagctcaacgagtgccaactcaacaacctcaacgcgttggaacccgaccaccgcgttgagtccgaaggtggtttgattcaaacatggaactctcaacaccctgagctgaaatgccgc

SEQ ID NO: 114635 - DNA, 176 bp, Glycine max
caaaagctgaatgccctcaaaccggataaccgtatagagtcggaaggtgggttcattgagacctggaaccctaacaacaagccattccagtgtgccggtgttgccctctctcgctgcacccttaaccgcaatgcccttcgtagaccttcctacaccaacggtccccaggaaatcta

SEQ ID NO: 114636 - DNA, 159 bp, Glycine max
cagtacacacactagaagaataatggcttccatcctccactactttttagccctctctctttcttgctcttttcttttcttcttatccgactcagtcacccctacaaaaccaataaaccttgttgttctacccgttcaaaatgatggttccacagggct

SEQ ID NO: 114637 - DNA, 174 bp, Glycine max
agcaggcaagcgatgtgggtttgtccaattcgcagacaggagctgtgccgaagaggcacttcgggtgttgaatgggaccctgttgggtggtcaaaatgttcgtctttcatggggccgcagtccttcaaacaaacaggctcaggcagatccacaccagtggaatggtggtgctgg

SEQ ID NO: 114638 - DNA, 229 bp, Glycine max
atttataaactccttcaccctcactatcgtgacaccatgaacataaatggccttgctcggttatcactggtcaacgacggtggcgttatagaacaaacatttttgtggggaaggtattctgtggaaatgtctgctgtagtttacaaggattgggtttttacagatcaagcattgcctgctgatcttataaaaagaggaatggcaattgaggatccatcgtgccctcatg

SEQ ID NO: 114639 - DNA, 243 bp, Glycine max
gcaaagcaatggctacttcaaagttgaaaacccagaatgtggttgtatctctctccctaaccttaaccttggtactggtgctactgaccagcaaggcaaactcagcggaaactgtttctttcagctggaacaagttcgtgccgaagcaaccaaacatgatcctccaaggagacgctattgtgacctcctcgggaaagttacaactcaataaggttgacgaaaacggcaccccaaacctcgctc

SEQ ID NO: 114640 - DNA, 207 bp, Glycine max
catagatgtcgtcgaacttgtggtgagggaattggaaacggatccgctgttcaattcgggccgtggatctgccctgacagaaaaaggaacggtggagatggaggctagcatcatggatggtccaaaacgacgatgcggcgccgtttcgggtcttaccaccgttaagaacccgatctcgcttgctcgtttggttatggacaaatcccc

SEQ ID NO: 114641 - DNA, 221 bp, Glycine max
gaatatgtcaagccttactttagtggttctaaattgaaaagctttctagctggtcataatatcaccattactgatggtattgacaaaactagtgcaactttgcagtttagaaagttagcagattgtgactttctcaagagaaactttaagcagatgtcgaatgtcttgtgggtggctcctgaggacaaggcgagtctatggtcacaacttcattatggttc

SEQ ID NO: 114642 - DNA, 230 bp, Glycine max
cttattaacactttccttagttcaatatggggaagcccttcttcactctctctctttcttccctttgcttgctactcttgtcgagtgcatgctttgctattacctccagcaagttcaacgagtgccaactcaacaacctcaacgcgttggaacccgaccaccgcgttgagtccgaagtggtcttattgaaacatggaactctcaacacctgagctgaatgcgccggtgtc

SEQ ID NO: 114643 - DNA, 240 bp, Glycine max
ggctcgagcggctcgagcaaaactttgcggatcgtgcaaaatcccagcgcgataactttgagtatgagtcattcaagaccaatgatagaccctcgatcggaaaccttgcaggggcaaactcattgttgaacgcattgccagaggaagtgattcagcacacttttaacctaaagagccagcaggccaggcaggtgaagaacaacaaccctttaagcttcctggttccacctcaggattctc

SEQ ID NO: 114644 - DNA, 272 bp, Glycine max
ctccacattggaatctgaatgcaaacagtgtgatctatgtgactcgaggacaaggaaaggttagagttgtgaactgccaagggaatgcagtgttcgacggtgagcttaggaggggacaattgctggtggtaccacagaacttcgtggtggcggacaagccggagaacaaggattcgaatacatagtattcaagacacaccacaacgcagtcactagctacttgaaggatgtgtttagggcaattccctcagaggttcttgcccattcttaca

SEQ ID NO: 114645 - DNA, 165 bp, Glycine max
gataaacctcgtcctagtcgaccaagccaaggaaagcgtgaacaagaccaggaccaggacgaggacgaagatgaagatgaagatcaacctcgcaagagccgcgaatggagatcgaaaaagacacaacccagaagacctagacaagaagaaccacgtgaaagaggt

SEQ ID NO: 114646 - DNA, 270 bp, Glycine max
gcagagtagagcagcagagaagagagaaaacggcactgcagccgtagaaggaaaaccgaccatggtgcacgtctccttttacaggaactatggtaagacgtttaagaagccccgccgtccgtacgagaaggagcgtctagacgcggagctcgaagctggtgggggagtacgggctgcggtgcaagagggagctgtggagggtgcagtacgcgctcagccgcatccgcaacaacgcgcggaatctccttaccctcgacgagaagaacccgc

SEQ ID NO: 114647 - DNA, 116 bp, Glycine max
ggctcgagcggctcgagcaaaactttgcggacgctgcaaaatcccagagcgataactttgagtatgagtcattcaagaccaatgatagaccctcgatcggaaaccttgcaggggca

SEQ ID NO: 114648 - DNA, 141 bp, Glycine max
aaaatgaccaagcttacaattctcctcatcgctcttctcttcatcgcccacacctgctgcgcctccaaatggcaacagcaccagcaagagagctgccgcgagcagctcaaggggatcaacctcaacccctgtgagcacatc

SEQ ID NO: 114649 - DNA, 204 bp, Glycine max
acaacaacacaccgctacgaagctggcgtcgtcccccccggagcccgtttcgaaccgccgcgttatgaagccggcgtcaaagcgccctccatttaccattccgagagaggtccaacgacttcccaggtcctcgccgtcctcgccggcctcccggtcggtggcatcctgctcctcctggcgggattgaccctggcaggaacctca

SEQ ID NO: 114650 - DNA, 198 bp, Glycine max
agcgtggacaagcagatagcgaaaaacctacaaggagagaacgaaggggaagacaagggagccattgtgacagtgaaaggaggtctgagcgtgataaaaccacccacggacgagcagcaacaaagaccccaggaagaggaagaagaagaagaggatgagaagccacagtgcaagggtaaagacaaacactgccaacgc

SEQ ID NO: 114651 - DNA, 272 bp, Glycine max
caagaatattctagaggcctcatacgacaccaaattcgaggagataaacaaggttctgtttggtagagaggaggggcagcaacaaggggaggagaggctgcaagagagtgtgattgtggaaatctcaaagaaacaaattcgggaactgagcaaacatgccaaatctagttcaaggaaaaccatttcttctgaagataaacctttcaacttgagaagccgcgaccccatctattccaacaagcttggcaagttgtttgagattaccccagaga

SEQ ID NO: 114652 - DNA, 199 bp, Glycine max
gcttcgccccggaattcttggaacatgcgttcgtcgtggacaggcagatagtgagaaagctacaaggtgagaacgaagaggaagagaagggtgccattgtgacagtgaaaggaggtctcagcgtgataagcccacccacggaagagcagcaacaaagacccgaggaagaggagaagccagattgtgacgagaaagacaa

SEQ ID NO: 114653 - DNA, 266 bp, Glycine max
cgagaacattgctcgcccttcacgcgctgacttctacaaccctaaagctggtcgcattagtaccctcaacagcctcaccctcccagccctccgccaattccattcttgtagaggacaacatattgggcactacaagaatggaatttactctccacattggaatctgaatgcaaacagtgtgatctatgtgactcgaggacaaggaaaggttagagttgtgaactgccaagggaatgcagtgttcgacggtgagcttaggaggggac

SEQ ID NO: 114654 - DNA, 272 bp, Glycine max
cggctcgagcgcatcgtgatggagctctacgccgacgtgactccgagcaccgccgagaacttccgcgcgctctgcaccggcgagaagggcgccgggcggagcggcaagcccctccactacaaaggctcgtccttccaccgcgtgatcccgaacttcatgtgccagggcggcgacttcaccgccggaaacggcaccggaggcgagtcgatctacggcgccaagttcgccgacgagaacttcgtgaagaagcacactggtcccggcatcctctc

SEQ ID NO: 114655 - DNA, 149 bp, Glycine max
cttgatcatgatgatactgaaaagcagatgttgaggaaattaagtaaacaactgagtggtgaggattggacatggaacaatttgaatacactctgctgggcaattggttctatatcaggttccatgatggaagaacaggaaaacagatt

SEQ ID NO: 114656 - DNA, 278 bp, Glycine max
tagagacctccgtccatagcgaattcgaggagataaacagggttttgttgggagaggaagaggagcagaggcagcaagagggagtgatcgtggaactctcaaaggaacaaattcggcaactgagcagacgtgccagatctagttcaaggaaaagcatttcctccgaagatgaaccattcaacttgagaagccgcaaccccatctattccaacaactttggaaagttctttgagatcacccctgagaaaaagccacagcttcgggacttggatatcttc

SEQ ID NO: 114657 - DNA, 279 bp, Glycine max; identical to SEQ ID NO: 102817

SEQ ID NO: 114658 - DNA, 104 bp, Glycine max
tagaggagtggaaggaacatctcaagaagggagacgagtccaagaaattgattgtggtggattttactgcttcttggtgcggtccatgccgtttcattgcccca

SEQ ID NO: 114659 - DNA, 258 bp, Glycine max
agctaatacaatcaacaaagctagaagagttgaaaaagctgcgcaagccggcctttattcctgtaaatcctgaaacagatgctacaaagcttcatgatgaggaaactgggatcacccggcgccgtctcgctaatggaattcctgttaattataagatatcaaaaactgaaacacaaagcggtgtgatgcggctgattgttggtggtggacgagcagctgagagtcctgagtcaagaggatctgtgattgtgggtgtta

SEQ ID NO: 114660 - DNA, 260 bp, Glycine max
tccttcctaagtggctctacagcattgacaattatcaaacagggtgaatatcttactatagcaaacataggtgattgtagggctgtcttggcaactacttcagatgatggcatattaactccacatcagcttaccactgacttcaagccaaatttacctcaggaggcagaacgcataacacaatccagagggagggtattttgtatggaagatgaaccaggagtgtacagggtctggatgccaaatggtaaaacaccagg

SEQ ID NO: 114661 - DNA, 261 bp, Glycine max
cgaaaatatttgaacaatccactcacaattgatttggttggtgatgaagaggaaaagcttgctgaagggataaaactttatgctatagcagccactgccacttcaaagcggacaattctttctgatcttgtaactgtttatgcaaagggtgggaagactatagtttttacacagacaaaaagagatgctgatgaagtatcattgtcattaacaaatagtataatgtctgaagcactgcatggtgatatatctcagcatcag

SEQ ID NO: 114662 - DNA, 256 bp, Glycine max
  unsure (1)..(256): unsure at all n locations
gcaaggagtcattgaggccgctcgtcaccctgatgccaccactgtagttacaggcatagttggttgtgcaggattaaagccaacagttgcagcaattgaagcagggaaagacatagcattggccaacaaagagacaatgattgcgggagccccttttgttcttcctacttgctcacaaacataacataaaaattcttcccgctgattcggaacattctgcaatttttcagtctatccaggggttgccanagggtgc

SEQ ID NO: 114663 - DNA, 257 bp, Glycine max
caccaatcatctttagttcttcagtaatttattgtgggattctattctaagattttgagaatgtctagctgtgggtgtggaagcagctgcaactgtggcagcaactgcggttgcaacaagtactcttttgacttgagttacgttgagaagacaaccacagagactctagttttgggtgttgggcctgtgaaggcccaattggagggtgctgaaatgggtgttgcatctgagaacggtggctgcaactgtggatcaag

SEQ ID NO: 114664 - DNA, 253 bp, Glycine max
tgttactcttaacagagaacaattaaaatacctggttattgaagctttacggggcggttgccagggacatagagctgatctatttgctgcccgtgttgcaaagtgcttagctgctttggagggacgtgaaaaggtttatgtggatgacctaaaaaaagctgtagaattggtcattctaccccggtcaatcgttactgagaacccaccagatcaacaaaaccagcctcctccccctccgcctcctccacaaaat

SEQ ID NO: 114665 - DNA, 254 bp, Glycine max
agatattagggtttttgagtgcggtgcggcgatcctagcactctcttctgcagctttcgccgacagcttcattcaccatggctgagcaaaccgagaaggcttttttgaaacaaccaaaagtgtttctcagctcgaagaaaactgggaagggaaagagacccggaaagggtgggaaccgcttttggaaatccattgggcttggatttaagactcccagggaagccatcgaaggaacctacattgacaagaagtgc

SEQ ID NO: 114666 - DNA, 252 bp, Glycine max
gctcgagctcgagcgcaagtgctatctgttaccacagtgttaggcagagaaacaagctcttggagaagtggatgctgagcttcttgacacccaagtgaatcctgctgtgtgggaaattagtgggcacatggttctaaagaggaagaaggattatgatgaggcatctgaaggcaatgcttggaggcttcttgcagaggtgtccctctctcaagagaggtttcaagaagtcaatgatcttatttttgaagccat

SEQ ID NO: 114667 - DNA, 258 bp, Glycine max
ggagagccagcaaaactgatcaggcagagataccgtgaagccgcagacttgatcaagaagggaaagatgtgtgctctcttcatcaacgatcttgatgcaggagctggtcgtcttggtggaaccacccaatacactgtcaacaaccagatggtgaatgccaccctcatgaacattgctgataaccccaccaatgtgcagcttcctggtatgtataacaaggaagagaatccccgtgtgcccatcatcgtcaccggtaac

SEQ ID NO: 114668 - DNA, 106 bp, Glycine max
ctcgagccgctcgagccggtagaataccttcttaggaagggatggattccttgcttggaagtcgagttggatcacggtttcgtgtaccgtgagttcaacatgtcat

SEQ ID NO: 114669 - DNA, 256 bp, Glycine max
caacaacacaaggccatcatcatggcagctgcttctcctatggcaagccaactcaagtccaccttcactaaaactcttgtagctcccaagggcctctctgcctcttcaccactccacctcctgccttctaagaggcaatttagcttcactgttagggccatccaatcagaaaagccaacctatcaagtgattcaaccaatcaacggtgatcccttcattggaagccttgaaaccccagttacatccagccccttga

SEQ ID NO: 114670 - DNA, 255 bp, Glycine max
ggacgggagaaattcttctactagcaaggatgagaatgaaactagcaagaaccccatggctgattcagaaagatatatcagtgtcagggatagttgttcgactcgagttgccatactcagagatagggaaaaggatcgcagtgatccagattatgaccgtagttatggaaggtatgctaggagtatcccagcctctgctgttaacttggtgccatttaacttgcaaaaagctcaaccttcatttgctcaatacga

SEQ ID NO: 114671 - DNA, 254 bp, Glycine max
gagggagggagccgtagcagcggaagctctagcttgggtagcgaatcacaatggcgagaggattaaagaagcatctgaagaggcttaatgccccaaagcattggatgcttgacaaactgggtggtgcatttgctcctaagccctcatctggaccacacaaatcgagggaatgcctgccactcatactcattttgcgaaaccggctgaagtatgctctaacataccgtgaagtcattgctattctgatgcagcga

SEQ ID NO: 114672 - DNA, 248 bp, Glycine max
gttttcttccaaatctcaccagtacctgtacctcgcacaaaagaaggaagaaatggcaggagaatcatacgaggaagccatcgcgagtctgaccaagcttctcagtgaaaaagctgacctcggtggtgttgccgccgcaaagatcaaggatctgacggcggagcttgatgccgccggttcgaagccgtttaacccggaggagaggatcagaaccggcttcatccaatttaagaatgagaaatttgaga

SEQ ID NO: 114673 - DNA, 254 bp, Glycine max
caacaacacaaggccatcatcatggcagctgcttctcctatggcaagccaactcaagtccaccttcactaaaactcttgtagctcccaagggcctctctgcctcttcaccactccacctcctgccttctaagaggcaatttagcttcactgttagggccatccaatcagaaaagccaacctatcaagtgattcaaccaatcaacggtgatcccttcattggaagccttgaaaccccagttacatccagcccctt

SEQ ID NO: 114674 - DNA, 254 bp, Glycine max
ggacgtgattgtgatgttattgcacacctgtacgaggatcatggagaagactttgtggacatgctggatggtatctttccatttgttctactggacacccgtgacaacagttttatagtggctcgggatgctattggggtcacttccttgtacattggatgggggttagatggctctgtttggatttcatcagaaatgaaaggtctgaatgatgattgtgaacactttgagtgttttccacctggtcacttgta

SEQ ID NO: 114675 - DNA, 102 bp, Glycine max
cgaggtggttatggtggcggccaaggaggtggagcaggtggagggtatggtgctggtggggagcatggtggtggatatggcggtggtgaaggaggtggagca

SEQ ID NO: 114676 - DNA, 255 bp, Glycine max
ggctgcctcactacaagctgcagctaccttcatgcaacccaccaaggttggcatagcctctcgcaacctcaaatctacacaatgcatttctaaggcttttggcttggaacctgctgcagctaaactcacttgctcccttcagcctgatctcaaagaatttgctcaaaaatgtgtcgacgctaccaaaattgcaggattcgcccttgccacctctgctctcgttgtttctggagcaagtgcagaaggtgttccaaa

SEQ ID NO: 114677 - DNA, 252 bp, Glycine max
gagaaatatggagggcgagtggatatggcgaaagcatattacaaagctctcactgcttccgtgagaaaacattttaagggcaacggcgtcattgccagcatggagcattgcaacgatttcatgttgctgggaactgaagcaatatcccttggtcgtgttggggatgatttctggtgcactgacccttatggtgatccaaatggtacattttggctacaagggtgtcacatggtgcattgtgcatacaacagc

SEQ ID NO: 114678 - DNA, 251 bp, Glycine max
gcttaaccgccaccacaaaccggcgcacgatagcaccgccggcgtacggaatagaacgccatacgtagtttcctctgaaagaagcagcactgcttcgacgcgaaggtagatgattaccacgccactctcaaagctctcaactccaaaggcagattccccagaaaatcacttggccagcattatatgttgaatgctgacataaatgaccaacttgctggtgcggctggtgttgaacaaggtgatgtggtgtt

SEQ ID NO: 114679 - DNA, 253 bp, Glycine max
gttgagaactacgaaggagccgcatctggcttcctcaatgatctcttccccagctgttaccactgtcaaccgtgccggtgccggcatggttgctccattcactggcctcaagtccatggctggcttccccaccagagagaccaacaatgacattacctccattgctagcaacggtggaagagtgcaatgcatgcaggtgtggccaccagttggcatgacgaagtttgagactctttcctacctgccagacctt

SEQ ID NO: 114680 - DNA, 251 bp, Glycine max
gggagttgatgtggcaataactggctcccagaaggccctttcccttcccactgggataggtattgtggttgcaggccctaaagctattgaggcctcaaaacatgctaaatcacttagagttttctttgactggaaagactacctcaaattctaccagctaggaacctattggccatacactccttccatacatttgctgtatggtctgagagctgctcttgatctgatttttgaggaaggactcgaaaatg

SEQ ID NO: 114681 - DNA, 253 bp, Glycine max
aaaccctaatccctatttttcttcctcagtagtgtcatttacgcttctcttctctgcagcaactatgcctaaccctaaggtcttcttcgacatgaccatcggcggtcaatctgctggccgcatcgtgatggagctctacgccgacgtcactccccgcaccgccgagaacttccgcgcgctttgcaccggcgagaagggcgtagggcggagcggcaagcccctccactacaagggctcgtccttccaccgcgtg

SEQ ID NO: 114682 - DNA, 254 bp, Glycine max
gcacattcttcatcacttcattcaacatttctctctcccttagctagtttttaccaatggctgctgcggttagtgctgcagtctcttttccatccaccaagtctacctctctcccaagcaggacctccatcattaccccagagagagttgtattcaagaaggcttcattgcaatacagagatgtttgtagcagtggaagggtagtttccatcagagctcaagtcaccactgaggctccagccaaggttgaaaaa

SEQ ID NO: 114683 - DNA, 253 bp, Glycine max
ggcattgattatacatctcaccatgccaatcccataactggcaagaacttggattcttcattcttcaacatgaatcccggtggaagactccctgttttccaaaatgggtctcacatcctttacaagactattgatataatccagtacatagaaagaattgctgtgttctcctcagggtctgagaatatcagtagcagtagcagggaagtgattgaatggatgcagaagatacaagagtgggatcctaagtatt

SEQ ID NO: 114684 - DNA, 253 bp, Glycine max
gcagcagcggcggcaacagggagagaagatgaagttcaatccacgtgtgtcgagcagccgccgcaagagccgaaaggctcatttcacggcgccatcgagcgtgcggcgggtgcttatgagcgcccctctgtcggcggactgcggtctaagtacaacgtgaggtcgatcccagtacggaaggaggacgaggtgcaggtgatgcgaggaacatacaagggtcgcgaggggaaggtgactcaggtctaccgtcgaa

SEQ ID NO: 114685 - DNA, 253 bp, Glycine max
ctctctctctctctctctctctctctctagaaaccctattgcacgttttgcaatcgaactcgacaatggccaacagcaacctccctcgaagaatcatcaaggaaacgcagcgtttgctcagtgagccagcacctggtattagtgcctccccctctgaagagaatatgcgatatttcaatgtgatgatccttgggcctacccagtcgccttatgaaggaggcgttttcaagttagaactatttgtgccagaaga

SEQ ID NO: 114686 - DNA, 250 bp, Glycine max
gattcacggacaagataattgctgagtacatttggattggggggacaggaattgatgtgcgcagtaaatcaagaacaatatcaaagcctgttgaacatccctctgagctccctaaatggaactatgatggatctagcactggacaggcaccgggtgatgatagtgaagtaatcctatatcctcaagcaattttcaaagatcctttccgtggtggtaacaatattttggtcatttgcgattcttacacccc

SEQ ID NO: 114687 - DNA, 252 bp, Glycine max
ggaagttggaagtcatggcagcaacattgatggcagcaacaagttctggcactcttaaagcaactcctttcctaggccaaggcaagggtgccaatgccaatgctcttagggatgttgtttccatgggaactgggaagtacaccatgggcaatgatttgtggtatggaccagacagagtgaaatacttgggacccttttcagctcagaccccttcatacttgaaaggagaattcccaggggattatggatggg

SEQ ID NO: 114688 - DNA, 255 bp, Glycine max
atcgtagcaaagaaagaaagaaagaaaaccctagcttaccttttcaactttcaagatgcaaatctttgttaagacactcactggtaagacaatcacccttgaggtggagagttcagataccatagataatgtaaagtccaagattcaagacaaggaagggatcccaccagaccagcaacgtctcatttttgctggcaagcagcttgaggatggacgtacacttgctgattacaacattcaaaaggagtccactct

SEQ ID NO: 114689 - DNA, 254 bp, Glycine max
atctgtttcccgccatatatccaataagctttaaccatgtctgcctttgttggaaagtacgcagatgagcttatcaagaatgccaagtacatagccacacctgggaagggcatcttggcagcagatgagagcactggcaccattgggaagcgcctatcgagcattaacgttgagaacattgaggccaaccgccaagctcttcgcgagcttctcttcaccgctccagatgccctccaatacctctctggtgtcat

SEQ ID NO: 114690 - DNA, 250 bp, Glycine max
ccgtactgtattgtgaagggaaaggcccgcttgggaacggttgtccacaagaaaactgcatccgttttgtgtttgaccactgttaagaatgaagataaattggagttcagcagagttttggaggctatcaaggctaacttcaacgacaaatatgacgagtacagaaagaagtggggtggtgggatcatgggatccaaatcccaagcgaaaaccagagcaaaggagaagcttcttgccaaggaagctgctc

SEQ ID NO: 114691 - DNA, 249 bp, Glycine max
atttacgatttcactgtcaaggacatcagtggaaatgatgtgagtctgaatgattacagcgggaaggttctactgattgtgaatgtcgcctctcaatgtggtttgacacagacaaattacaaagaattgaatgtattgtacgagaagtacaagaatcaaggatttgaaatcttggcatttccgtgcaaccagtttgctggacaggaaccaggaaacaatgaagaaattcaggaagtagtttgcacaagg

SEQ ID NO: 114692 - DNA, 251 bp, Glycine max
ctggcttaaaagaaatgttcaagatgatagatgcagacaacagtggtcaaatcacttttgaagaacttaaagctggtttgaaaagagtgggtgctaatcttaaggagtctgaaatttatgatttaatgcaagcggctgatgttgataacagtgggacaattgattacggcgagttccttgctgcaacattgcaccgcaacaaaattgaaagagaagataatctatttgcagccttttcttactttgataaa

SEQ ID NO: 114693 - DNA, 250 bp, Glycine max
actgttgccaaggatgccgttggaaatgatgtaattgccgagaattggctcaaggcacatggacctggtgaccgaacccttacacaaggattgaagggagatcctacctatcttgttgtggagaaagacagaacccttgcaacatttgcaattaatgccgtgtgcactcatcttggatgtgtcgtgccatggaatcaagcggagaacaagttcatctgcccttgccatggatctcagtacaatgaccaag

SEQ ID NO: 114694 - DNA, 255 bp, Glycine max
gggttgtgaaagcagagaagtgagatacactaagttatcctcataaatacactctaattaggtggcaagataagtgtctaaccttagtaacattgccacatattgtgttcattttggaattgtgccactaaaattctattcaattcatctatggctgcctcttcttatgctatgcaatcaatcctggcaaaccctttgatccgcatttccagcgggtctagggtgaaccaatttggcgttcctgctttgcacatg

SEQ ID NO: 114695 - DNA, 223 bp, Glycine max
  unsure (1)..(223): unsure at all n locations
ctcgccctggtcttacatcggtaatcctcttccctatcccccccctcccactcgcgaagacacgctaggctcatcacataccaccttggtaaatctcccataagtacttcactgtcagagccaaatgactcgacagactcatgtctggctcggcaagacatcctagacattttgacatgaatggacagacagtctanttccattaagtgctttattagataat

SEQ ID NO: 114696 - DNA, 251 bp, Glycine max
  unsure (1)..(251): unsure at all n locations
gtgagtctatgttatttgtngcggagcatgaactcctccaccaacacctcgaattctcagtcaatggctgcagcagccagtgatgggtctgggaagaaggtaagaaaaccttacaccataaccaagtccagggagagttggactgaggaagagcacgacaagtttctcgaagctcttcaattatttgacagggactggaagnnaattgaagattttgtnggttcaanaacagttattcagattcgaagcca

SEQ ID NO: 114697 - DNA, 248 bp, Glycine max
gttttagcgcagttcttctagatttaaggaagatgggtaaggaaaaggttcacatcagtattgtggtcattggccatgtcgactctgggaaatccactaccactggtcacctgatttacaagcttggaggcattgacaagcgtgttattgagaggtttgagaaggaagctgctgagatgaacaagaggtctttcaagtatgcctgggtgctggacaaacttaaggctgagcgtgaaagaggaatcacc

SEQ ID NO: 114698 - DNA, 251 bp, Glycine max
cttagagatccaaggcgtctgtatgcacctggccgactctatcacattgtggagcgaaagccatttaggataggaagacttccacctgtcgttaggacagcagtacctgttgatgggaggtttgagcatttagttctttcttgcaatgcaacttctgaccatgccatcatttggatagagagagaatcccgacgggctctcgatttaatgcgagataaagatgagcagcatatggagatcccagaagagca

SEQ ID NO: 114699 - DNA, 248 bp, Glycine max
ccaacggaaatcgctccaacagagccacaaattcgggttattggaaggcaactggcttggacaaacaaattgttacttcaaaaggcaacaaccaagttgtcggaatgaagaagacacttgttttctacagaggcaagcctcctaatggatccagaactgattggatcatgcacgagtatcgcctcatccttaacgcctctcagtctcagagccatgttgttcccatggaaaattgggttctgtgtcgc

SEQ ID NO: 114700 - DNA, 262 bp, Glycine max
ccgatccacttcgaaagggttaggtttacgaagaaacaccaatcctctccgagaagaaatcaacgatgcctcgctatgatgataaatatggtaatacccgcctctatgttggacgcttgtcttcgaggacacgttcccgtgacctggagcgtgtcttcagcagatatggaagaattcgaggtgtagatatgaagaatgattttgcctttgttgaatttagcgatcctcgggatgctgatgatgctagatatagcttggatgg

SEQ ID NO: 114701 - DNA, 256 bp, Glycine max
tgctgatttccccggcagcaacaatggaacaggtctcttccaaaccatagttggtttgaagataagagatttatatgagcagctaatagccaccaaggctgagactccagtggctgcaaaagcttaggaattgaattgaacctgccataataatatatatacatatcgaccgagcgacgcagtcaaattgcattagttctcatcaaaatcatcattttctttcttctttcatgttttccacaatttcactgtgttt

SEQ ID NO: 114702 - DNA, 253 bp, Glycine max
caaattctctgtgttgtgttgtgtacttgtgttaattgtgttgttgttgtaggaaatttaagtgaagagagaatgatgatgaagtctgctatgtgtgcattggtgcttgtggcactggttgtggttgaagtggggcccatggctgaggctgcggtgacttgcaacccaacacagttgactccttgtcttccggcaattaattcaggttctgcaccttcgagtgcttgttgccagaagctgaaggagcaaaagc

SEQ ID NO: 114703 - DNA, 251 bp, Glycine max
ggaagctgaaccccctgagtggctccctgatagttctactactgtttgtatgcaatgtagtgctccttttactgcgattacccgtggtagacatcattgcaggttttgtggggggattttctgtcgaacatgtacaaaggggcggtgtttaatgcctgttgggttcagggaaagaaatccccaaagggtttgtgatgcctgctatgatcggcttgatcctttacagggcgttctgatcaacaccataagca

SEQ ID NO: 114704 - DNA, 252 bp, Glycine max
gttccccctgcaggtaaaggttccctgtatattagacctttgctaatgggaagtggaccggtacttggtcttgcacctgctccagagtacacctttctaatatacgtttcacctgttgggaactacttcaaggaaggtttggccccaatcaatttgattgtggaaaatgaattacatcgtgcaactcctggtggcactggaggtgtgaagaccattggaaactatgctgcagttctgaaggcacagtctgaa

SEQ ID NO: 114705 - DNA, 254 bp, Glycine max
gggagccgtagcagcggaagctctagcttgggtagcgaatcacaatggcgagaggattaaagaagcatctgaagaggcttaatgccccaaagcattggatgcttgacaaactgggtggtgcatttgctcctaagccctcatctggaccacacaaatcgagggaatgcctgccactcatactcattttgcgaaaccggctgaagtatgctctaacataccgtgaagtcattgctattctgatgcagcgacatgtc

SEQ ID NO: 114706 - DNA, 253 bp, Glycine max
cttcaattcattctagttctggattccgactagccgcgttgactcggttccgtttttcattctcgcggatctaatattaaggaatagcttaagggcacattacaatgaaggcattgattctggttgggggatttggaacaaggctgaggccactgacactcagtttccctaagcctcttgttgattttgctaacaagcctatgattttgcatcagatagaagcccttaaggccattggagtgactgaggtagt

SEQ ID NO: 114707 - DNA, 254 bp, Glycine max
agaagaacaagtagttgagaactaagaaggagaagcaaatggcttcctcaatgatctcttccccagctgttaccactgtcaaccgtgccggtgccggcatggttgctccattcactggcctcaagtccatggctggcttccccaccagaaagaccaacaatgacattacctccattgctagcaacggtggaagagtgcaatgcatgcaggtgtggccaccagttggcaagaagaactttgagactctttcctac

SEQ ID NO: 114708 - DNA, 252 bp, Glycine max
tctaaaccctaaacaactctttctcttcttccttcgctcgttgttctccctcgcgtagatcgacaatggcggagacagagacgtttgctttccaggctgagatcaaccagctcctcagtctcatcatcaacaccttctactccaacaaggagattttccttcgtgaactcatcagcaacgcctccgatgctttggacaagattcgatttgagagtttgacagataagagcaagctcgatgctcagccagagt

SEQ ID NO: 114709 - DNA, 250 bp, Glycine max
tggatcacttgcaaggaaggctataagagaattgatggctaggggttcaatcaggatggtgtctgcccatgcaagccagcaaatttacaccagggcaacaaacacctaggtgtggaactgatcttagcttacggagtattggtaggaatagtaatgaagtattgttcttttgcactttgggaagcatctcatatggttctatcagttctagattgtcgctgaatccgatgctcagattgtatttttggtt

SEQ ID NO: 114710 - DNA, 252 bp, Glycine max
ggcgtatggagaagttctactgggcaccaacaagggatgaccgcattggtgtctgcactggaatttttcgcaccgattcaattcctgaacaggacgttgtcaagattgttgacaccttccctggccaatccattgatttctttggtgcactgagggccagagtatatgatgacgaagtgaggaagtggatttctggtgttggtgttgacggcattgggaagaagcttgtgaactcaaaagatggacctccaa

SEQ ID NO: 114711 - DNA, 250 bp, Glycine max
cctttgttcactcttcttctcttgcggctagggttttagcgcagttcttctagatttaaggaagatgggtaaggaaaaggttcacatcagtattgtggtcattggccatgtcgactctgggaaatccactaccactggtcacctgatttacaagcttggaggcattgacaagcgtgttattgagaggtttgagaaggaagctgctgagatgaacaagaggtctttcaagtatgcctgggtgctggacaaa

SEQ ID NO: 114712 - DNA, 252 bp, Glycine max
gcagaaagcaagctcatcctagagttttaaaaatggcagcagcctcctccatggctctctcttccccatccttggctggcaaggccgtgaagctgggcccatcagcccccgaagtcgggagggtcagcatgaggaagaccgtcaccaagcaggcctcctccggaagcccatggtacggcccagaccgcgtcaagtacttgggcccattctctggcgagcccccgtcctacctcactggcgagttcccaggtg

SEQ ID NO: 114713 - DNA, 249 bp, Glycine max
gaacaagtagttgagaactaagaaggagaagcaaatggcttcctcaatgatctcttccccagctgttaccactgtcaaccgtgccggtgccggcatggttgctccattcactggcctcaagtccatggctggcttccccaccaggaagaccaacaatgacattacctccattgctagcaacggtggaagagtgcaatgcatgcaggtgtggccaccagttggcaagaagaagtttgagactctttccta

SEQ ID NO: 114714 - DNA, 251 bp, Glycine max
aaacaatgaggactaccgttctccagcaattccagctatgaccaaaacactgcttgaggatgtcaagaagattttcaagaccataactggaatcccatttctcatccctacaactggtactggtgcttgggagagtgctctcacaaacacactgtctcctggggatcgaattgtatctttcctgattggccaattcagcttgctttggattgatcagcagcaacgcctgaaattcaatgttgatgttgtag

SEQ ID NO: 114715 - DNA, 250 bp, Glycine max
ggacaatgtgagaaatcctgttggtaaccctcttgcaggcattgaccctgatgagattgttgacactcgaccatacaacaacttgttatctcaattcatcactgccaattcacgtggcaaccccgccatgtcaaacttgcctaggaagtggaatgtgtgtgtggttggatcccatgatctgtttgagcatccacacatcaatgatctggcttacatgcctgcaaacaaggatggtcgttttggattcaac

SEQ ID NO: 114716 - DNA, 251 bp, Glycine max
atggttgcaatggcagcagcaacagcatccacccagttgattttctcaaagccttgttccccttcacgtctatgccccttccaactatgtgtctttgacactaaacaagtgctatcaagtggcaggagaaggcatgtggggggttctggagttaggtgcatggctgtgggggaagcagcaaccactgggacaaagaagagaagtggatatgagcgtgatcactcactagctggttgctgaagcaggagcaa

SEQ ID NO: 114717 - DNA, 255 bp, Glycine max
gtaaccaaacgtcttttctttcttatacattttactttagtttgtgaaattctatccaaagattttgagaatgtctagctgtgggtgtggaagcagctgcaactgtggcagcaactgcagttagaacaagtactcttttgactacgttgagaagatcacaaatgagactctagttttgggtgttgggccggtgaaggcccaattcgagggtgctgaaatgggtgttgcagctgagaacggtggctgcaactgtgg

SEQ ID NO: 114718 - DNA, 256 bp, Glycine max
aaggtactcctgctacagaagctcagatggggaaggatgttgtgtcattcttaacttgggccgccgaacccgagatggaagagagaaaactgatgggatttaaatggatatttgtactgtcattggcactacttcaggctgcctattaccgccgcttgaggtggtcagttctaaagtctcgcaagctggttcttgatgttgtcaactagctctgcctcgagtttcattttcacttgaacaaagtttactgttggca

SEQ ID NO: 114719 - DNA, 251 bp, Glycine max
aattgaagttaaaagccttagccttccctacaactccaaacacaaagacatcatcatccatggctgcctccgtctccactgtcggagctgtcaacagagctcttttgaacctgaatggttctggagctggagcttcagctcccagttcagccttctttgggaccagcttgaagaaggttattgcctcaagggtccccaacagcaaggtttccggtggaagcttcaagattgttgctgtagaagagaagaaa

SEQ ID NO: 114720 - DNA, 250 bp, Glycine max
aacatatacaaattctctgtgttgtgttgtgtacttgtgttaattgtgttgttgttgtaggaaatttaagtgaagagagaatgatgatgaagtctgctatgtgtgcattggtgcttgtggcactggttgtggttgaagtggggcccatggctgaggctgcggtgacttgcaacccaacacagttgactccttgtcttccggcaattaattcaggttctgcaccttcgagtgcttgttgccagaagctgaa

SEQ ID NO: 114721 - DNA, 249 bp, Glycine max
atttccacaccacaccatggctacaaccaacgctctctcttcagcctccattctacgctctcccaaccgccagtcgctgacccgaagagcgaaccataatggaagagtaaattaccggaaaccgaataaccgtttctccgtgaaagcctccgccaaagagattgcctttgaccagcattcccgctctgctatgcaggccggcattgacaagctcgccgacgctgttgggctcactcttgggcccagagg

SEQ ID NO: 114722 - DNA, 210 bp, Glycine max
gatcgagataactagaaacagtgtgatgaaaatgaacggtccttgctttcttcgttgctacaattccggtagcatggcaatgccatgcgtacgatatgttccctctccgaatgaacactggctatggtgcccgtactccggaggtgaaatgcgcaagttggaggcttgctgtggaagcacacaacatctttggcttcgagaccatccctg

SEQ ID NO: 114723 - DNA, 252 bp, Glycine max
ctcgagccgttttacctcccctatggctcgtcactccttgctcttagccctcctcctcttcgccgctgtggccaccgccgcgatggccgtggtcgcgatccgacgccgacgacatcctgatccgtcaggtggcgccagctgttggcgaagccaagcaggaggaccccctgctgaacgccgagcaccacttcgcgaccttccaggccaacttcgctatgacctacgccaccaagcaggagcacgatcatcgct

SEQ ID NO: 114724 - DNA, 256 bp, Glycine max
agctaagagaatacaccaaaacccaacatgaaaacccttaacaaagcctcacttattttattccctctcttgttcctttccctattcaagcattcccatgctgcaggaatcgctatctactggggccaaaacggtggagaaggcaccttagcagaagcttgcaacactagaaactaccaatatgtgaacatagccttcttgtccacttttggcaacggccaaactccacaactcaaccttgcaggtcattgtgacc

SEQ ID NO: 114725 - DNA, 252 bp, Glycine max
ggttgacaaggtggttgtcctgtggacagccaacacagagaggtacagcaacgtagttgtagggactaaacgacaccatggaaaacctctttgcttccttggacaggaatgaggctgagatttccccttccaccttgtatgccattgcttgtgttatggaaaatgttcctttcatcaatggaagccctcagaacacctttgtcccaggactcattgatctggccatcaaaaggaatagtttgattggaggag

SEQ ID NO: 114726 - DNA, 248 bp, Glycine max
ttcactgaaagcactcagtagggtttgcggtttcagagtttgtgacgcacgcatccatggccaccaccaccaacgccgccgcagccccgccgcgccagctctcccagaaggaagccgacatccagatgatgttagccgccgacgtccacctcggcaccaaaaactgcgacttccaaatggaacgttacatcttcaagcgccgcaacgacgggatttacattattaaccttgggaagacatgggagaag

SEQ ID NO: 114727 - DNA, 249 bp, Glycine max
gcgaatccctctctctatctctcacacacactttctctctctctctctctcacccagatcttgtagcaatggcgagcgctcccactccacgcgaagagttcgtgtacatggcgaactggcggagcaggccgagcgctacgaggagatggtggagttcatggagaaggtctccgcctccgccgagagcgaggagctgaccgtggaggagcgtaacctcctctccgtcgcctacaagaacgtgatcggcgc

SEQ ID NO: 114728 - DNA, 251 bp, Glycine max
ctactacacccaagtattccaaggccaggtatgatgaaattgtgaaggaagtctcttcctacttgaagaaagtaggatacaaccctgacaagattccttttgttcctatctctggttttgagggagacaacatgattgagaggtccacaaaccttgactggtacaagggtccaactctgcttgatgcacttgaccagattagtgagcccaagaggccctctgacaagcccctcaggcttccccttcaggat

SEQ ID NO: 114729 - DNA, 247 bp, Glycine max
gcagaaagcaagctcatcctagagttttaaaaatggcagcagcctcctccatggctctctcttccccatccttggctggcaaggccgtgaagctgggcccatcagcccccgaagtcgggagggtcagcatgaggaagaccgtcaccaagcaggcctcctccggaagcccatggtacggcccagaccgcgtcaagtacttgggcccattctctggcgagcccccgtcctacctcactggcgagttccc

SEQ ID NO: 114730 - DNA, 251 bp, Glycine max
atttttcttcctcagtagtgtcatttacgcttctcttctctgcagcaactatgcctaaccctaaggtcttcttcgacatgaccatcggcggtcaatctgctggccgcatcgtgatggagctctacgccgacgtcactccccgcaccgccgagaacttccgcgcgctttgcaccggcgagaagggcgtagggcggagcggcaagcccctccactacaagggctcgtccttccaccgcgtgatcccgagtttc

SEQ ID NO: 114731 - DNA, 252 bp, Glycine max
ctttgcctgaagtgggaaatcataaggatgaggtcattcctaaaaatgttcagcaattctggatctcatgtcctgccagtgataagttactttacatccttgctgtgttgaaattggggttggtccaaaagaaagttctgatattcacaaataccatagacatgagtttcaggttgaaacttttcttggaaaagtttggaatcagatctgctgttttaaatcccgagttgcctcagaattctcgtctccata

SEQ ID NO: 114732 - DNA, 246 bp, Glycine max
aaaagttattaagagcttttgcttttctttctgcgcgcttttcccaattaagtagttcttccttttctcagagcacaaaaaatgttcatcgagagtttcaaggttgagagtcctaacgtgaagtacacagagactgagattcagtccgtgtacaactatgaaaccactgaacttgttcacgagaacaataatggcacttatcagtgggttgtcaagcccataactgtcaaatatgaatttaaaacc

SEQ ID NO: 114733 - DNA, 250 bp, Glycine max
ctatttctcagtctctgtgtttgcggctgaggattccgaacgagtgaccttcttcgtttctcgcaaagtttaagtaatcatgggtaaggaaaaggttcacatcaacattgtcgtcattggacatgtcgactctgggaagtcaactaccactggtcacttgatctacaagcttggaggtattgacaagcgtgtgattgagaggttcgagaaggaggctgccgagatgaacaagaggtcattcaagtatgcc

SEQ ID NO: 114734 - DNA, 244 bp, Glycine max
gttttccgctgcttgtttgtgcctgcgtagtacaaagtaaaagagggactagtacaaaagttgttggcagtgaccatgtcgagcacttcgttgaaggagatgaggaacggtggtgaggattatagcaatggtcatggtggtggtgtaagggacttgtatggagaggattgtgccacagaggaccagcttatcaccccatggactttctctgtggccagtggatgcagtttgctgagagatccac

SEQ ID NO: 114735 - DNA, 248 bp, Glycine max
ttcttgcaattccttcctcgttatggagtcgcgagtgctgtcacgcgccggaaccttgtcctccctccctcacctccgcaagccgccgctggaggccgtctccagcgcctccctcgtcgccgtgaaggccgtgggctccgtcgcggacggcggaaacctgatttgggggaggcagctgcgcccggagctctgctcgccggtgctgaagaaggaggctgtcctcctccggccatgcctcgccgccgcct

SEQ ID NO: 114736 - DNA, 247 bp, Glycine max
ccttccctgaggcttctcttgtctgtcgcgagtgaccatggtgagggttagtgtgctgaacgatgctctgaagagcatgtacaatgctgagaaaaggggaaagcgccaagtcatgattcggccatcctccaaagtcattatcaaattccttttggtgatgcagaagcacggatacattggagagtttgagtatgttgatgaccacagggctggtaaaatcgtggttgaattgaacggtagactgaac

SEQ ID NO: 114737 - DNA, 248 bp, Glycine max
gattgtttgttgttgtaactcgttcttcttcttttgttgttctgtgtttgtgtttgttttttctctcacctgaaaatgtcttgctgcggtggtaactgtggttgcggaagctcctgcaagtgcggcaacggctgcggaggctgcaagatgtacccagacttgagctacactgagtcaaccaccaccgagaccttggtcatgggagtggcacctgttaaggctcaatttgagggtgctgaaatgggtgt

SEQ ID NO: 114738 - DNA, 248 bp, Glycine max
ggggaggcaagggacaaggaaaatctttccaatgtgagcttgtctttgccaagatgggaatcaaccccatcatgatgagtgctggagagttggaaagtggaaatgcaggagagccagcaaaactgatcaggcagagataccgtgaagccgcagacttgatcaagaagggaaagatgtgtgctctcttcatcaacgatcttgatgcaggagctggtcgtcttggaggaaccacccaatacactgtcaac

SEQ ID NO: 114739 - DNA, 251 bp, Glycine max
tgaaaaggcttcacctaggctatattttgatgaacagttgaatagcaagagatatgagacaataacacctgataccctgacaagtgaaatcccacgtagcactgaaacctctaatcgaaagattgaaatacttgaagctttgagtgaatcaagtacaaaggaggttgctaatgaaggcgacaatgtggagagtaaaggtgaaaaccccccaccgttggctggggccaatgtcatgaatgtcatattggttg

SEQ ID NO: 114740 - DNA, 255 bp, Glycine max
aagaaatttaagtgaggagctagagaatgatgatgaagtctgctatgtgtgcagtggtggttgtagcacttcttcttctggcggaggtggggcccatggctgaggctgtgacatgcaccccaacagagttgagtccgtgtcttccagcaatcacttccggtgctaaaccttccaatgcttgttgcacgaagctgaagcagcaaaaaccatgcttatgtggctacctcaaaaacgctagcttgaagcagtatgtta

SEQ ID NO: 114741 - DNA, 251 bp, Glycine max
gaaaaatggcagaaacaaagttgagctccttcaaagacaaaagatggtcactccatggcatgacagctctagtgacaggaggcacacgaggcatagggtacgcaatagctgaagagttagcagaatttggggcagctgtgcatatttgtgcacgtaaacaacaagatattgataaatgtttagaagaatggaataagaaaggacttcccataacagggtcggcatgtgatgtactatctcgtgaccaacgt

SEQ ID NO: 114742 - DNA, 240 bp, Glycine max
cttctaaaaaaataaaattaagaaattttcatggtaaccattcgtgcagatgaaattagtaaaattatccgtgaacgcattgagcaatataatacggaagtaaaaattgtaaatacgggtaccgtacttcaagtaggcgacggtattgctcgtatttatggtcttgatgaagtaatggcgggtgaattagtggaatttgaagagggtactataggcattgctttgaatttggaatccaaa

SEQ ID NO: 114743 - DNA, 247 bp, Glycine max
gttaaaagccttagccttccctacaactccaaacacaaagacatcatcatccatggctgcctccgtctccactgtcggagctgtcaacagagctcttttgaacctgaatggttctggagctggagcttcagctcccagttcagccttctttgggaccagcttgaagaaggttattgcctcaagggtccccaacagcaaggtttccggtggaagcttcaagattgttgctgtagaagagaagaaagag

SEQ ID NO: 114744 - DNA, 246 bp, Glycine max
attggatatggatattcagataaaccaaatcctcgtcaaatcggagaccattccttttacacttttgagacctgggccactcaactaaatgagttttgtcttgatgtcatcaaggacgaagcattctttatatgcaattctattggaggagttgttggtcttcaagcggctgtgttagcaccacacatttgccagggtattatccttctcaatatatctctgcgtatgcttcatataaagaagcag

SEQ ID NO: 114745 - DNA, 246 bp, Glycine max
cctggcccaatttatggaaggggagatgctcggagaactagtaaaaaaatttttgtcggccgtcttcccccagaagcaacttctgatgatcttcgccaatattttggaagatttggtcgtatattagatgtttatgttccaagggatcctaagagagcaggtcatagaggttttggatttgttacttttgctgaagatggtgcagcagatcgcgtctctcgaaggtctcatgagatttgtggacat

SEQ ID NO: 114746 - DNA, 247 bp, Glycine max
gttcctcactcactcgcatttattcaccatgactaagcaacaagctaattggtctccatacgataacaacggaggatcatgtgttgcaattgctggagcagattactgcgtcatcgccgcggatacgaggatgtccaccggttacaatatcctcactcgcgattactccaaaatctcccaactggcggagaagtgtgttatggcttcttctggttttcaagctgatgtcaaagctttgcagaaggtt

SEQ ID NO: 114747 - DNA, 249 bp, Glycine max
ctcgatctcgccatcgacggcgccgacgaggtcgaccccgacctcaacctcgtcaaaggccgcggcggcgccctcctccgcgagaagatggtcgaggccgcctccgacaagttcgtcgtggtcgtcgacgacaccaagctcgtggacggcctcggcggaagcgggctggccatgccggtggaggtggtccagttctgctggaagtacaatctggatcggcttcaggagcttttcaaggaagaaggtgtg

SEQ ID NO: 114748 - DNA, 254 bp, Glycine max
gtgcttgggcccccaagatttgatggcagagaagctgcagaacgtgtggctacccctggggtctctgttgggctagtttggactgcttttggtggagaagttcagtttgtggaggctacagctatggttgggaagggtgaactgcatctcactggacaacttggtgatgtaataaaagaatcagctcagattgcactgacatgggtaatggcaagggctactgatctgaggcttgctgctacagaaggattaat

SEQ ID NO: 114749 - DNA, 273 bp, Glycine max
gcagaagaacaagtagttgagaactaagaaggagaagcaaatggcttcctcaatgatctcttccccagctgttaccactgtcaaccgtgccggtgccggcatggttgctccattcactggcctcaagtccatggctggcttccccaccagaaagaccaacaatgacattacctccattgctagcaacggtggaagagtgaaatgcatgcaggtgtggccaccagttggcaagaagaagtctgagactctctcctacctgccagaccttgatga

SEQ ID NO: 114750 - DNA, 270 bp, Glycine max
caaagttgaagtgacacatcgtggaaacatgagaagaaaatatcgtatctctggtctgacttcacaggcaaccagagaattgacattcccggtagatgaaaggggaaccatgaaatctgttgtggagtacttctatgagacatatgggtttgtcattcaacatactcagtggccttgtctgcaagttggcaatgcacagagacgaaactatttgccaatggaggtttgcaagatagtggagggtcaaaggtactcgaaaaggcttaatga

SEQ ID NO: 114751 - DNA, 245 bp, Glycine max
aattgaagttgaagtcttgcccttctctcttcaactccaaacacaagacatcatcatccatggctgcctccgtctccactgtcggagctgtcaacagagctcttttgaacctgaatgggtctggacctggggtttcagctcccagttcatccttctttgggagcagcttgaagaaggttattggctcaagggtccccaacacaaagatttcctctggaagcttcaagattgttgctgtagaagag

SEQ ID NO: 114752 - DNA, 273 bp, Glycine max
aaataaactcacccactaagcactacacaaatcacacagagttgcaagagaaagataaaagaagatggcgactcttgattccgacgtgcctatggttcccgccggcgagccctcgagcagcgccggtccttcttccaagaagcccaagcgcttcgagatcaagaagtggaacgccgtcgctctctgggcttgggacatcgttgtcgataactgtgctatctgccggaaccacatcatggatctctgcatcgagtgccaagccaaccaggctag

SEQ ID NO: 114753 - DNA, 270 bp, Glycine max; identical to SEQ ID NO: 107085

SEQ ID NO: 114754 - DNA, 265 bp, Glycine max
agtgatatctttggggagagaggcattttacttggtgctgttcatggggttgtggagtccctgtttaggagatacactgaaaatggaatgaacgaagatctggcctataagaatactgttgagtctataacaggaattatatctaaaaccatctcaactaagggcatgctagctgtatacaatgctttatctgaagatgagaccagggatttgagaggcttatagtgctctttttatcctgcatggaaatctgtatgaggctacg

SEQ ID NO: 114755 - DNA, 269 bp, Glycine max
cttctcttgttcctgcttctttctcggttcttaaagagggaaagagtggtgtgtctctcaaggactccaccttgttcggtctttcattttcagaacctatcaaagctaacttcagctcttctgcattgaggtgcaagagggaattcgaacaaaagctctgtgctgtgagggccgaaacagtggctacagcctctccagcagttaccaagtctacaccagaagggaagaaaacattgaggaagggcagtgttgtgataactggggcttca

SEQ ID NO: 114756 - DNA, 261 bp, Glycine max
ctcattcttcatccatagacatggccaccgtcacttctgcagccgttgctattccctcattcactggcctcaaggcaagcgcaggcaaagtgagtgccgcagttaaagtctcagctccccaagccacaaggttgggcatcaaggcttcgctgaaagacgttggagtcgctgttgtggccactgccgcgagtgcagtgctggctagcaacgccatggccattgaagtgttgctgggtggtgatgacgggtctctggctttcg

SEQ ID NO: 114757 - DNA, 273 bp, Glycine max
cattcgtcatagcgacaaacaggcatctgagcgtggttcaccctatttacaaacttctgtttcctcactatcgtgacaccatgaacattaattcacttgcccgcaaatccttggtcaatgccgacggtattatagagaaaacattcttgtggggtaggtactctttggaaatgtctgctgttatttacaaggattgggttttcaccgatcaagcattgcctaatgatcctgtcaagagaggagttgctgttaaggatccatctgctccccatg

SEQ ID NO: 114758 - DNA, 267 bp, Glycine max
tgaagttaaaagccttagccttccctacaactccaaacacaaagacatcatcatccatggctgcctccgtctccactgtcggagctgtcaacagagctcttttgaacctgaatggttctggagctggagcttcagctcccagttcagccttctttgggaccagcttgaagaaggttattgcctcaagggtccccaacagcaaggtttccggtggaagcttcaagattgttgctgtagaagagaagaaagagtttgaagagacccagc

SEQ ID NO: 114759 - DNA, 271 bp, Glycine max
agaagagaagtggatatgagcttcaaacactcactaactggatgctgaagcaggagcaagctggggtgattgatgcagaactcactattgtgctgtctagcatttccatggcgtgcaatcagattgcttctttggtgcaaagagccaacatttccaacctcactggggttcaaggagctgtcaatgttcagggggaagaccagaaaaagcttgatgttgtttcaaatgaggtcttctcatactgcttgaggtcaagtgggaggacagggat

SEQ ID NO: 114760 - DNA, 85 bp, Glycine max
cgaagtagttgagaactaagaaggagaagcaaatggcttccgcaatgatctcttccccagctgttaccactgccaaccgtgccgg

SEQ ID NO: 114761 - DNA, 225 bp, Glycine max
gccaagtgaaagtgagaaaaaataaaaatcaaagagcataatgtcagggatcattcacaagattggggagacccttcatgtgggagggcacaagaatgacgaggagcataagggtgagcaccatgctggagcatacaaaggggagcaccatggtgaacacagtagtgactacaaaggatagcatcatggtgaacacaaatctgaagagtaccatggtgagcacaa

SEQ ID NO: 114762 - DNA, 273 bp, Glycine max
ttaaaagttattaagagcttttgcttttctttctgcgcgcttttcccaattaagtagttcttccttttctcaaagcaaaaaaaatgttcatcgagagtttcaaggttgagagtcctaacgtgaagtacacagagactgagattcagtccgtgtacaactatgaaaccactgaacttgttcacgagaacaataatggcacttatcagtgggttgtcaagcccaaaactgtcaaatatgaatttacaactaacacccatgtccctaaactagggg

SEQ ID NO: 114763 - DNA, 273 bp, Glycine max
agcttgtgaatcagcaccacattcacctgagctttttgtgaggattccaaagcatggcttcccttgcagcatccactgctgctgcttcccttggcatgtcagaaatgcttggaaaccccatcaacctcagtggtgccacaaggccagctccatctgcctctagccctgcctccttcaagactttggctcttttctccaaaaagaaggctgcacctccaaaaaaagctgcagctgctgctcctgccaatgatgagcttgccaagtggtatggtc

SEQ ID NO: 114764 - DNA, 157 bp, Glycine max
ctcgtctgagggctgttaccatggccatgctgatccttttcgtgttaaggcaggtagtggagttgccaccttgggacttcctgattctcccggtgtccccaaagctgacactgtggaaacccttacagcgccctacaatgatactgccgccgtcgag

SEQ ID NO: 114765 - DNA, 264 bp, Glycine max
gtctcacttgactcgattgcaagtgatccacgacacactgttcgcttcacaaaagcttcgaatccaattcctcagtaacatctgacagaagtcttctccttcttcatgccaccaaagcctttagactatgggtcaataaatgaaaacgtgaagaagagtcaatatgctgtcagaggtgaattataccttcgagcttctgagcttcagaaagagggcaaaaagatgatattgactaatgttggcaacccacatgcattgggacag

SEQ ID NO: 114766 - DNA, 269 bp, Glycine max
ctcatcaagggttgtgaaagcagagaagtgagatacactaagttatcctcataaatacactctaattaggtggcaagataagtgtctaaccttagtaacattgccacatattgtgttcattttggaattgtgccactaaaattctattcaattcatctatggctgcctcttcttatgctatgcaatcaatcctggcaaaccctttgatccgcatttccagcgggtctagggtgaaccaatttggcgttcctgctttgcacatgagaagg

SEQ ID NO: 114767 - DNA, 259 bp, Glycine max
gagatagaagcctcagtctgctggcttatgctgacagcatgttgaagcatgtgaggacatcgcctgaggcttcaaagtatatgccaagtgataaggctcaggatgcaaggctctacatactgagtctgcagttttagcttggacggtctcctgataacttggagaatttcctgacaatggtttctggatcttatattccggcgctgaaagtgacgaagatctcatattcggatccggttttgtacttgtatgcggggat

SEQ ID NO: 114768 - DNA, 211 bp, Glycine max
gcgttcttcattgtgcattattcaatggccaccacagcagctctatccggtaccatggtgagcagctccttcatgaggaagcaacctatgacgaccaagagcctagagacattccccaacgctcttgttggtctgaaaggtcgacgatgcggtcgtgtaacttgcatggcctcgtacaaggtgcagctcatggccccggatggagtcgtgg

SEQ ID NO: 114769 - DNA, 260 bp, Glycine max
gtttcttacaaggctctactctactgcttcaccttctgctctagaaaattcagtggtgatacatggcttcggctactctctctgtagccaaaccagcccttcaggcaaatgggaaaggcttctctgaattctctggcctccgcagctcatcaggcttccttcccttttctagagaatcttcagaggatttccattctgtcattgccttccagacctatgcagttggaagcagtggaggttacaagaagggtgttacagaa

SEQ ID NO: 114770 - DNA, 269 bp, Glycine max
ctgctacgaggcactaccagacaatgggaaggtgattgtggcagaatgcattcttccagtggctccagactctagcttggccacaaaaggtgtggttcacatcgatgtgatcatgttggcacataatccaggtgggaaagagagaacagagaaagagtttgaggctctggccaaagggtctggattccaaggtttccgagttgtttgctgtgctttcaataccaacatcatggaatttctcaaaaagatttaagttctttggcatggat

SEQ ID NO: 114771 - DNA, 267 bp, Glycine max
aagatattgaagtagtgctaagtgcctaacacctgcagtgaacaatggcctctgcatcagcatctcttctcaagtcttcacttgttcttgacaagtctgagtgggtgaagggacaaacacttcgccaaccttctgctgcatcagttgtgagatgcaaccccaccaccccatcaggcctcaccatcagagctggttcctatgctgatgagctcgttaagaccgcgaaaacagtggcttcaccagggaggggtattttggccatggatg

SEQ ID NO: 114772 - DNA, 135 bp, Glycine max
ctcttcttcgtctcaaacctctgcgttccttcgattcgttccatttcttccataatggacaaagacccagttcgcgtactcgtcaatggagtcgcaggcaaattcgatatgctctagtccctatgattgctaggg

SEQ ID NO: 114773 - DNA, 267 bp, Glycine max
cattggtttttcttcttccatctctcttcatttctaagcttttctcgattacccattttgagattctgtcctaatggctcttgctccttccaaagtttcctccttttccgggttttctcccaaacccagtgttggggatgctctgaaaaacccaacttgctctgtttctctgagctttgcgaatgtgaaacttggaagcagaaaccttacggtttgcgcctcaactgtgcctctctcaggggtgattttcgaacccttcgaggaggt

SEQ ID NO: 114774 - DNA, 213 bp, Glycine max
gacaatagcaacatatatagtggaagggggtacaacacgcacatatacaaccattaagagcatgtgccacactgccccacatgtattgaggactttgctttctcatttgacgcaggcaatagctgattacgttattttccaagtggagtctggggctcattgcatacaaatatttgattcatggggtggacaactaccacctgaaatgtggga

SEQ ID NO: 114775 - DNA, 264 bp, Glycine max
gcagaagaacaagtagttgagaactaagaaggagtagcaaatggcttcctcaatgatctcttccccagctgttaccactgtcaaccgtgccggtgccggcatggatgctccattcactggcctcaagtccatggctggcttccccaccagagagaccagcaatgacattacctccattgctagcaacggtggcagagtgcaatgcttgcaggtgtggccaccagttggcaagaacgagtgggagactctttcctacctgcaaga

SEQ ID NO: 114776 - DNA, 261 bp, Glycine max
gtattctgatcgctccctgagagagctcgtcgcggcggttgcagaagaagattgcaagatgaagttcaacatcgcgaatcccaccactggatgccagaagaagctcgagatcgacgacgatctgaaactgcgagcattttgggacaagaggatctcacaggaggtcatcggagatgcactcggtgaggaatttaagggctatgtcttcaaaattaccggaggttgtgacaaacaaggatttccaatgaagcagggagtgct

SEQ ID NO: 114777 - DNA, 266 bp, Glycine max
gtctcaagcaaccatggcaatggcaacccaagcctctctcttaaccccacccctctccggtctcaaagccagcgaccgcgcctccgtgccatggaagcaaaactccagcctctccttctccagcccgaagcccctcaagttctccagaacgctcagagcagcagccgccgacgagaccacagaggcaccagcaaaagtagaggctgcaccggtcgggttcaccccaccagaacttgacgcaaacaccccttccccgatcttcgggg

SEQ ID NO: 114778 - DNA, 259 bp, Glycine max
gcaagctactaagagaagccaaaaagggttcacttttgagttcaaagccatgggaatttcctttggttttggattccataacgagtattgttgttaagaggccgaagaaatggaggagcaaggaggagaaagaacaagaggaggaggttttggtgatagaagggattgagtttggaagtgataaatatgtcaagtttgatgttcatatggatgatgatgaagacaatttgagtggtccggatgacacagagtttgtggg

SEQ ID NO: 114779 - DNA, 268 bp, Glycine max
aaaaaagacttgctctgcctctgccactctctgagtaggactacactgccatggctgcctcagtctccactgttggagctgtcaacggagctccactgagcttgaacagctctggagctggagcttcagttcccagttcagccttctttggcaccagcttgaagaaggttattgcctcaagggtccctaacgtcaagatttcttctggaagtttcaaaatcgttgccgcggaaaaagagattgatgagaaacaacagacagacaaggc

SEQ ID NO: 114780 - DNA, 264 bp, Glycine max
taaaaaggcagatactgtacagtatattatattgatcatggctattacaacgaaccctcttgttgttggacgtgtaataggagatgttctggagccatttgcaagttctatccctttgagagttgtttacaacaataacaaagaagtcatcaacagtggagagctcaaaccctcccaaataatcaaccctccacgagttgaggttggtggtgatgacctcaggaccctctacactctggtcatggtggaccctgatgcacccag

SEQ ID NO: 114781 - DNA, 266 bp, Glycine max
gtgacaagccaattctttgtgtaggtgctaaatccctagtaagccgccatggtgaagtactcaagggagcctgacaatccaaccaagtcttgcaaggctagaggcgccgaccttagggttcattttaagaacactagggaaactgcctttgcaatcaggaagttgcccttggttaaagctaaaaggtacttggaagatgttcttgcgcacaagcaggccattccgttcagacgtttctgtcgtggtgttggaaggacagctcaagc

SEQ ID NO: 114782 - DNA, 269 bp, Glycine max
  unsure (1)..(269): unsure at all n locations
ccgtggtgtaggacccctgaaagatcacatctatctccacttgaatcacttacccccagatgttcttaaggagaggctacctggtatctctgaaacagctgctatttttgctggtgtggatgttactaaggaacctattcctgttttgccaacagtgcattataacatgggtggtattccacaaatcatcatggagaggtgattactattanaggtgatgatcccgatgcagtagttcctggattaatggctgccgnggaaacagctgt

SEQ ID NO: 114783 - DNA, 236 bp, Glycine max
actcatcaagggttgtgaaagcagagaagtgagatacactaagttatcctcataaatacactctaattaggtggcaagataagtgtctaaccttagtaacattgccacatattgtgttcattttggaattgtgccactaaaattctattcaattcatctatggctgcctcttcttatgctatgcaatcaatcctggcaaagcctttgatccgcatttccagcgggtctagggtgaa

SEQ ID NO: 114784 - DNA, 254 bp, Glycine max
cttgcaggtgttattgagcagatagcatggagccacagtgtagcatcaagaaggatgccactgaattgatagggaataccccaatggtatatctgaacaacattgtggatgggtgtgtagcccgtattgctgctaaattggagtacatgcaagcgtgctgtagtgtcaaagataggattgctttgagcatgattgaagatgctgagaaaaaaggccttattacacctggaaagactgtcctggttgagtataca

SEQ ID NO: 114785 - DNA, 267 bp, Glycine max
ttgcaattgaagttgaagtcttgcccttctctcttcaactccaaacacaagactacatcatccatggctgcctccgtctccactgtcggagctgtcaacagagctcttttgaacctgaatgggtctggacctggggtttcagctcccagttcatccttctttgggagcagcttgaagaaggttattggctcaagggtccccaacacaaagatttcctctggaagcttcaagattgttgctgtagaagagaagaaagagattgaagac

SEQ ID NO: 114786 - DNA, 258 bp, Glycine max
  unsure (1)..(258): unsure at all n locations
tgtaccgattgcacacaatgtttccttggctcgtcagaactatgcagatgactctgaatctgcaatcaacgagcagatcactgtggaatacaacgtatacctatgtgtaccacgccttgtttgcgtacttcgtcagagacaacatagctctcaaaggacttgcaaagttcttcaaggaatcaagtgaagaaganagagagcatgccgagcagcttataaagtatcagaacattcgtggtggacgagtggtgctgcacc

SEQ ID NO: 114787 - DNA, 259 bp, Glycine max
gcaagaacgacttgcccctcaagacgacaatcaccgtgtgcgaggtgcgtgaggaggctggcttcctcgacggtgacgtgttgattttccccgacatgatcaaatacaggggtttggaggaatcaaatgttgatagctttttcgaagatgttttggtgaatggtataccatggactgctggagttccggaggtgtttagtggttcacatgtttatgtgtgtgctcatggaagtcgtgacgtgagatgtggtgtttgtgg

SEQ ID NO: 114788 - DNA, 271 bp, Glycine max
ttaaggggcttctgtctttcccatatgatggaacctactctactgattttattgaggagtgggtcaaaattggcttgcctgcaaaggcaaaggtgaagacacagcatggggatgccccttttgctgagttgtgctcacactgtgagaaggaatctgtgaatgtttcacttggaaacctgctaaattacccatttgttagagatggcttggtgaacagaacattgtcactgaaaggaggatactatgactttgttagaggatcttttgagct

SEQ ID NO: 114789 - DNA, 263 bp, Glycine max
acttctcttgttcctgcttctttctcggttcttaaagagggacagagtggtgtgtctctcaaggactccgcttgttcggtctttcattttcagaacctatcaaagctaacttcagctcttctgcattgaggtgcaagagggaattcgaacaatcgctctgtgctgtgagggccgaaacagtggttacagcctctccagcagttaccaagtctacaccagatgggaagaaaacattgagtgaaggagtgtggtgaaactggggc

SEQ ID NO: 114790 - DNA, 263 bp, Glycine max
cgccagatcgtgcttgtaatcttgccaagcaggcatttgatgaggcaatttccgagcttgacacattgggtgaagagtcatacaaagatagtacattactcatgcaacttctccgtgacaatctgactttgtggacatcagacatcacggacgatgctggagatgagatcaaggaaacatctaagcaacaaccaggcgaataggcgatggcagttgcgatgtggtagttgattggatatgtattaccgataatatggatccat

SEQ ID NO: 114791 - DNA, 161 bp, Glycine max
actagatcgcgagcggccgtgctttttctttatcccataaccacccagagtgaagaagagaggttgcagcaggaaaatgaaaaaaaggaatataacagtagagtctattttatgaagcaaactgtgggtaatgcttgtgggacaattgggctgcttcatgc

SEQ ID NO: 114792 - DNA, 134 bp, Glycine max
gtcatatgttcggctatgccactgacgagactcccgagctcatgcccttgagccatgtccttgccacgaagctcggtgctaagctcagcgaggttcggaataacgggatatgcccttggttgatacctgatggc

SEQ ID NO: 114793 - DNA, 176 bp, Glycine max
ctcgagcgtttctcaacaacttctgctacttcctactccaaccgcacttctgctccgcaattatcatgggcaaggtcaagatcggaatcaacggatttggaagaattggccgtttggtagccagagtggctctgcagagagacgatgttgaactcgttgccgttaacgaccctttc

SEQ ID NO: 114794 - DNA, 170 bp, Glycine max
atgatcgagataactagaaacagtgtgatgaaaatgaaggtccttgttttcttcgttgactacaattttggtagcatggcaatgccatgcgtacgatatgttccctctccgaatgaacactggctatggtgcccgtactccggaggtgaaatgcgcaatttggaggtttg

SEQ ID NO: 114795 - DNA, 253 bp, Glycine max
tgtaatgcagtaatagaaaatcttgatggaaaagagttcctgggcagaaccttgagggtgaacttctctagcaaaccaaaaccaaaagaacccttgtaccctgaaactgaacacaagctttttgttgggaacctgtcatggtcagtaactaatgagatattgacgcaagctctttcaagaatatggaacagtggttggagctagggtcttgaatgatggagaacctggaaaatcacgtggctatggtttcgtt

SEQ ID NO: 114796 - DNA, 177 bp, Glycine max
cttgtttgttgttgtaactcgttcttcttcttttgttgttctgtgtttgtgtttgttttttctctcacctgaaaatgtcttgctgcggtggtaactgtggttgcggaagctcctgcaagtgcggcaacggctgcggaggctgcaagatgtacccagacttgagctacactgagtcaa

SEQ ID NO: 114797 - DNA, 133 bp, Glycine max
cttgatactacaattttgggtcttgatgacgagagagcaaaagagatgccttatattgctcagcatgggtatatatgttgttagcaaaaatgtgatgttagacctgctccgtgagaagtttcctggtgcaaat

SEQ ID NO: 114798 - DNA, 223 bp, Glycine max
aggtgcatgcaaagcaatgcctgtttcaataagatgtgagcaaagtacccaggaagggaacagtttagatgtgtggctaggccggctagccatggttgggtttgcagtacccatcactgttgaaattgctaccgggaagggactcctagagatctttggactcacaagtccactgcctacagttgcccttgcagtaacagcatggggggtctcccacggtttt

SEQ ID NO: 114799 - DNA, 226 bp, Glycine max
tcagagggtctgtgacacacagactcacttccaagttccaagctttggccatttattcccactgtttattgagaacaactgcagaacatggcacagattttggctccctctacgcaatggcagatgagaatctcaaaatcctctcccaatgcaagtcccattacatcaaacatgtggagttctttattgtggaaacaaaatacgaagttttcacccaaaagtcctg

SEQ ID NO: 114800 - DNA, 242 bp, Glycine max
gagaatggcagcacttggtggcaatcgtgatgtggcaggaagccagaacagccttgagatcgatggtttagctcgctttgctgttgaagaacacaacaaaaaacagaatgcccttttggagtttgaaaaggtagtaagtgcaaaacagcaagtggtttctggtaccttgtacaccatcactttggaggcaaaagatggtgggcaaaagaaggtttatgaagccaaagtttgggagaaggcat

SEQ ID NO: 114801 - DNA, 264 bp, Glycine max
tgaagaatccgttgaattatgattcctggttcgattacataaggttggaagaaaatgtgggggataaggagagaatcagggaggtttatgagagggcaatagccaatgttcctccggctgaggaaaagcgctattggcagcgctatatctatttgtggattaattatgcactctatgaagagcttgatgctggagacatggagcgaacaagggatgtatacaaggagtgtctcaaccagatacctcaccaaaggttttcgtttg

SEQ ID NO: 114802 - DNA, 173 bp, Glycine max
gcagaaagcaagctcatcctagagttttaacaatggcagcagcctcctcgatggctctctcttccccatccttggctggcaaggccgtgaagctgggcccatcagcccccgaagtcgggagggtcagcatgaggaagaccgtcaccaagcaggcctcctcgggaagcccatgg

SEQ ID NO: 114803 - DNA, 171 bp, Glycine max
gttctcctaacaaggctaactcctacagtgtgcatggaagtgcactgggtgccaaagaagttgatgccacaaggcagaaccttggatggtcacatgagccattccacgtgcctgaggatgtcaaaaagcattggagtcgccacacccctgagggtgctgcacttgaagctg

SEQ ID NO: 114804 - DNA, 127 bp, Glycine max
ggagatgtgaaagtacttggattttggtcaagccctttcgttcatagagtgatatgggctctaaagttgaagaacattagttatgagtacatagaggttgataggttcaacaaaagtgagctacttc

SEQ ID NO: 114805 - DNA, 193 bp, Glycine max
caagattcaggtactgcgtttcggaagcagacacagatggctcgtacgaagcaaaccgctcgtaagtccacaggaggaaaggctcctaggaagcagcttgcaaccaaggctgcacgtaagtctgcaccaactactggtggtgtgaagaagccccaccgttatcgtcctggtaccgttgctctccgtgagatta

SEQ ID NO: 114806 - DNA, 196 bp, Glycine max
gtcaccagggataacactggagaggttcttggcaggggtactaagatcactctctacctcatggaagatcagcttgaagacaccttgaggagcgtcgcttgaaggatctgatacagatgcattctgagttcattagctacccaatttctgtttggattgagaacactactgagaaggagatctctgatgatgaggg

SEQ ID NO: 114807 - DNA, 257 bp, Glycine max
ccaacactgtgttcctgtttttgttcttcgatggcggcaacctcaacatcactggcttctcaactctacattggcctgcgccgcccctgcctcaagctcgattctttcaattctcaatctttctctctcttcgacgctaatcttcgcctatccctctctccagccaaaccctcacgcgccgtcatcgccatggccggcaccgggaagttctttgttggtggcaactggagttgtaacgtaccaaaggactcattcag

SEQ ID NO: 114808 - DNA, 228 bp, Glycine max
ctcataacacaaagcacaaagcaaagctcatccttgagttaaaaaatggcagcagcttcttccatggctctctcatccccatccttggctggcaaggccgtgaagctgggcccatcagccccagaagtgggaagggtgagcatgaggaagaccgtcaccaagcaggtctcctcaggaagcccatggtacggcccagaccgagtcaagtacttgggcccattctctggc

SEQ ID NO: 114809 - DNA, 129 bp, Glycine max
gcttcaccttctgctctagaaaattcagtggtgatacatggcttcggctactctctctgtagccaaaccagcccttcaggcaaatgggaaaggcttctctgaattctctggcctccgcagctcatcagg

SEQ ID NO: 114810 - DNA, 128 bp, Glycine max
ggccgggtcccagatcttcagcgagggtgggctggactacttgggcaacccaagccttgtccacgcccagagcatcctcgccatctgggccacccaagttatcctaatgggtgctgttgagggttatc

SEQ ID NO: 114811 - DNA, 168 bp, Glycine max
cccagaccagcaacgtctcatcttcgccggaaagcaacttgaggacgggcgcaccctcgccgactacaacatccagaaggaatcaacccttcacctcgtcctccgtctccgtggtggcatgcagatcttcgttaagaccctcaccggcaagactatacccctagatgt

SEQ ID NO: 114812 - DNA, 208 bp, Glycine max
ctcaaattcagatgaagaaatgaagcacttcggggaccagatgcgtgatgctgaaatgaagtcatacgggctaatcataaacacttttgaagagttggagaaggcatacgtgacggattacaagaaggtgagaaatgataaggtgtggtgcattggtcctgtttcattctgtaacaaagatgatttggataaagctcaaagaggcgac

SEQ ID NO: 114813 - DNA, 248 bp, Glycine max
cggctcgagaaggtgttagtgctgtaggtcacgttgtctcaggacggttctatattgatccacctggccttgttgaccgccttaattcatacctcccctctcagataaggatctttggttacaaacgtgtgacagcttctttagatgccaaaaagttttgcgacgggaggaatcatgtctatctcattcccgtgtttgcacttgatccaagctgtcatcgtgatatagagactgtcatggctagtttg

SEQ ID NO: 114814 - DNA, 262 bp, Glycine max
atttattgtcctgtaaaataagcaatgcattaaatctggaagtagaaagtacgttcatcttcaaaggagtgtaaaagagggtaatatgtattttacagacttgctgtagaggcatggggttagaagaattgcacccagcaggatgactggtacagtgacactgtgactgctgttctagttcctgcttacattgatagtactgaacatagtaggttggcatggaagagctccaatttgagctgaggacttggactgaacaaag

SEQ ID NO: 114815 - DNA, 225 bp, Glycine max
gcagaaagcaagctcatcctagagttttaaaaatggcagcagcctcctccatggctctctcttccccatccttggctggcaaggccgtgaagctgggcccatcagcccccgaagtcgggagggtcagcatgaggaagaccgtcaccaagcaggcctcctcgggaagcccatggtacggcccagaccgcgtcaagtacttgggcccattctctggcgaccccccgt

SEQ ID NO: 114816 - DNA, 120 bp, Glycine max
atcggtttcccgccatatatccaataagctttaaccatgtctgcctttgttggaaagtacgcagatgagcttatcaagaatgccaagtacatagccacacctgggaagggcatcttggca

SEQ ID NO: 114817 - DNA, 243 bp, Glycine max
tcttcttcccctctctcgtgttatccgctttagttttctcgggaaaatcatggtgaaaggtccaggtctctactctgacatcggcaagagagctcgcgatcttctgttcaaggattatcagaatgaccacaagttcaccatcaccacttacacttccactggagtggaaatcacttcaactggagtcaggaaaggtgaaatatatttggccgatgtcagcactaaggtgaagaccaagaacat

SEQ ID NO: 114818 - DNA, 239 bp, Glycine max
cactactggaaccccatttctcatccctacaactggtactggtgcttgggagagtgctctcacaaacacactgtctcctggggatcgaattgtatcgttcctgattggccaattcagcttgctttggattgatcagcagcaacgcctgaagttcaatgttgatgttgttgagagtgaatggggccatggtgctaagcttgatgtcctggaatcaaagattgcttcagatacttcacaca

SEQ ID NO: 114819 - DNA, 258 bp, Glycine max
gaagaacaagtagttgagaactaagaaggagaagcaaatggcttcctcaatgatctcttccccagctgttaccactgtcaaccgttccggtgccggcatggttgctccattcactggcctcaagtccatggctggcttccccaccagaaagcccaacaatgacattacctccattgctagcaacggtggaagagtgcatgcatgcaggtgtggcaccagttggcaagaagaatttgagactcttcctactgcagacct

SEQ ID NO: 114820 - DNA, 236 bp, Glycine max
aatcaattggttgaaagctggacttatagaatcatggtttgtgataactgttagcccaaactatgctaaagaactggtgtcaggtccagacaagggagtggaattggacaacatccttcgcaaaattgatgatgatggtcgtttggttggaattgtgaatggcatggatgttcaggagtggaatccaaccactgacaattatatagctgcaaaatacgatgttccaacagtatggg

SEQ ID NO: 114821 - DNA, 124 bp, Glycine max
cttgccttctccaacatgccaaacgacagcgttctgagtcttgtcttcttcgttaccctcttcacatggcttctctctgctaattcccacgatgaccatattttcctaccgagtcaactccatg

SEQ ID NO: 114822 - DNA, 251 bp, Glycine max
gcgttggtactgaattccttaatcgagtccagtattcataatctttgagttgatatgggcaactggagcagtgaacgtcatcaaaccactcaacaaagtgatctcggtgcagttttgcgtgatggaaaagaagtacttcttcaagcattcaactgggagtccaacaaatacaactggtggaataatttagaaggcaaagtttctgacatagctaaagcaggatttacttcagtctggttgccaccaccaac

SEQ ID NO: 114823 - DNA, 253 bp, Glycine max
agaagaaagagattgaagagacccagcagaccgacaaggacagatggaagggtcttgcctatgatatctcagacgaccaacaagacatcacaagaggaaagggtttggttgactcccttttccaagctccacaggatgctggaactcactatgcagtcatgagctcctacgagtacctcagcactggacttcgccagtacttggacaacaaaatggatggattctacattgctccagcttttatggacaagct

SEQ ID NO: 114824 - DNA, 254 bp, Glycine max
caagaaccaacctaccttttgcaatctcaattcaatggcgtcctctctcattgcgaacgcttcctctcctcttccctcctctccaggtccctccttcgccccgccgcttccgcttcccaccgctctttcaacaccaacgccatgcgccagtatgacaaccgcgccgacgaccacagcaccgacatcgatcgtcactccgaacgctctttccctagcactgcgcgccgcgacgatatcttctcaggtagttgtag

SEQ ID NO: 114825 - DNA, 250 bp, Glycine max
gacatagtaaggattgacagactgagagctctttcttgattctatgggtggtggtgcatggccgttcttagttggtggagcgatttgtctggttaattccgttaacgaacgagacctcagcctgctaaatagctatgtggaggtaaccctccacggccagcttcttagagggaccttggcttcagagggaacagacagaaaacaagaatgatgtggttgattgacgaattggggatagaagtattcaggt

SEQ ID NO: 114826 - DNA, 245 bp, Glycine max
tcttcttctcttaaaagagcctttgctttttctttaggcctttccgaattaagtacttgtttcattttctctcgaagcaagaacaatgttcatcgagagtttcaaggttgagagtcctaacgtgaagtacacagagactgagatttcgtccgtgtacaactatgaaaccactgaacttgttcacgagaacaagaatggcacttatcagtgggttgtcaagcccaaaactgtcaaatatgaattta

SEQ ID NO: 114827 - DNA, 252 bp, Glycine max
aaaaggtaaactttttgcaacaaccatggttgcaatggcagcagcaacagcatccacccagttgattttctcaaagccttgttccccttcacgtctatgccccttcgaactatgtgtctttgacactaaacaagtgctatcaagtggcaggagaaggcatgtggggggttctggagttaggtgcatggctgtgggggaagcagcaaccactgggacaaagaagagaagtggatatgagcttcaaacactcac

SEQ ID NO: 114828 - DNA, 249 bp, Glycine max
ggaaaatttgaccatattgttattgagactacaggtttggcaaatcctgcaccaataatccagaccttttatgcagaggaaaatatttttaatgatgtcaaattggatggtgttgttactctggttgatgcgaacatgctggttttcatcttgatgaggttaagccaaaaggtgtggtcaatgaggctgtggaacagattgcatatgcggatcgtataattgtaaataagactgacctagttggtgaat

SEQ ID NO: 114829 - DNA, 253 bp, Glycine max
agaaaaacaagtagttgagaactaagaagaaggaaatggcttcctcaatgatctcctccccagctgttaccaccgtcaaccgtgccggtgccggcatggttgctccattcaccggcctcaaatccatggctggcttccccacgaggaagaccaacaatgacattacctccattgctagcaacggtggaagagtacaatgcatgcaggtgtgggcaccaattggcaagaagaagttcgagactctttcctactt

SEQ ID NO: 114830 - DNA, 253 bp, Glycine max
gttgagaactaagaaggagaagcaaatggcttcctcaatgatctcttccccagctgttaccactgtcaaccgtgccggtgccggcatggttgctccattcactggcctcaagtccatggctggcttccccaccaggaagaccaacaatgacattacctccattgctagcaacggtggaagagtgcaatgcatgcaggtgtggccaccagatggcaagaagaagtttgagactctttcctacctgccagacctt

SEQ ID NO: 114831 - DNA, 267 bp, Glycine max
ggaaaagaaaggtgttgagcttgtgttggtcaatcctcttgctgaggtcatagaaaagcttaaaaaagcagatgaagctaatgatttcataagagcagataaccttttcttgacagttggagaggctgtagcttcactttcttcagcaatgaaaggccaatcatcaaccattacagaaggggcacacacaattgtgtcacataattgataaaataagactgcaaaatatataagcaaaagttaaaagaaaaagaaaaaaaaatagaa

SEQ ID NO: 114832 - DNA, 250 bp, Glycine max
aagacacaacatggggatgcaccttttgctgagttgtgctcacactgtgagaaggaagctgtgaatgtttcccttggaaaccttctaacatacccatttgttagagatggcttggtgaacaagacattgtcactaaaaggaggatactatgactttgttaagggatcttttgagctctggggccttcagtttggccttgcatcctctttctccgttaaagatgtggccaccattctgcattggaagctat

SEQ ID NO: 114833 - DNA, 249 bp, Glycine max
ttatcgagccgattcggctcagtcgttagtcgtttgtaacgccagctgtttgcgctttttgcacagaagaattaacacgtagtatagcaagcatggcagtcacactctacgaccttagctctgcctctgggttgaagaagcttgatgagtaccttctcccacgcagctacatcaccgggtaccaagctacaaaggatgatcttactgtttatgcagctttgccaactgctccatcagatgaatatggaa

SEQ ID NO: 114834 - DNA, 247 bp, Glycine max
caagatcaaagcactccaccaatatgattgcttgcgagccaataaatcaacatttgcttggggtctagacgcccgtgtaccatttttggacaaggcatttatcaatactgcaatgagtattgaccctgagtcgaaaatgataaaaagagatgaaggacgaattgagaagtggattctgaggagagcctttgatgatgaagagcatccttatctgccaaagcacattttatacaggcagaaagagcaa

SEQ ID NO: 114835 - DNA, 247 bp, Glycine max
ataagatagtaacaggcgaactgatttcgttatcagaacaagaattggtggattgtgatactggatataaccaaggatgcaatggaggacttatggactatgcatttgagttcataatcaacaatggcgacattgattctgatgaggattacccataccgtggtgttgatggtagatgcgacacatataggaaaaatgctaaagtcgtttctattgatgactacgaagatgttcctgcctatgatga

SEQ ID NO: 114836 - DNA, 246 bp, Glycine max
ggcttaaaagatctgtttgaaaatctggtgtctaatgatggaagtttgacacatgaagatccagctagagacagtctcaccgatgaccagtagagggtgaaagttggtgcaaactgcaccatttcttaataaatgctgctcatatggtgctggctgcaacaagttaatgaatggaatagtgaaaactgcaccagtgtgagtgatcttgatacattaccatatcagctggttgtacatcatctagaa

SEQ ID NO: 114837 - DNA, 245 bp, Glycine max
cttttgaacctgaatggttctggagctggagcttcagctcccagttcagccttctttgggaccagcttgaagaaggttattgcctcaagggtccccaacagcaaggtttccggtggaagcttcaagattgttgctgtagaagagaagaaagagattgaagagacccagcagaccgacaaggacagatggaagggtcttgcctatgatatctcagacgaccaacaagacatcacaagaggaaaggg

SEQ ID NO: 114838 - DNA, 251 bp, Glycine max
cttccataaacgggtggtgcctctcttccttctccccagccaaaacctctctcaggaaggccacattacgcccttccgtcttcgcaacccttaacactccttcacctccttcctcttcatcttccttcccctctctcattcaagacaggcctgtttttgctgcccctgcccccatcatcaccccaactgtgagagaggatatggcaaaggaatacgagaaagctattgaagaacttcagaaattgttgagg

SEQ ID NO: 114839 - DNA, 259 bp, Glycine max
tcgagttcagcagagattagaaacggcatctgtagaagagaagaccaagatatttcctgagatcattcctcatgctcgtgccttaatgactgatgtttttggcaattatgttatacaaaaattttttgagcatggtaccgaaagtcaaagaaaggaattagccaaccaacttacaggtcatgttttacctcttagtctgcaaatgtatggttgcagagtgattcaaaaggccttggaggtggttgatgtggatcagcag

SEQ ID NO: 114840 - DNA, 247 bp, Glycine max; identical to SEQ ID NO: 114729

SEQ ID NO: 114841 - DNA, 249 bp, Glycine max
gcaattgaagttaaaagccttagccttccctacaactccaaacacaaagacatcctcatccatggctgcctccgtctccactgtcggagctgtcaacagagctcttttgaacctgaatggttctggagctggagcttcagctcccagttcagccttctttgggaccagcttgaagaaggttattgcctcaagggtccccaacagcaaggtttccggtggaagcttcaagattgttgctgtagaagagaa

SEQ ID NO: 114842 - DNA, 248 bp, Glycine max
cggctcgaggcgccaattcaccatgttatttttccttccagaaacaaaagatgggctgttagctttggctgagaagttggcttctgaatctgggttcttggaacgcaagcttcctaataacaaattggaagtaggagacttcaggatcccaagattcaaaatttcttttgggtttgaagcctctaatgtgctgaaggagctgggagtggttttgcctttctccgttggaggtttgacagaaatggtgg

SEQ ID NO: 114843 - DNA, 251 bp, Glycine max
caaaggaatacgagaaagctattgaagaacttcagaaattgttgagggagaagagtgaactcaaagcgacagctgctgaaaaagtggagcagataacagcttctctagggacatcatcatctgatggcatcccatcatcagaagcctcagacaggatcaaagctggtttcattcacttcaagaaggagaaatacgacaagaatccagctttgtatggtgaacttgccaaaggccagagccccaagttcatg

SEQ ID NO: 114844 - DNA, 250 bp, Glycine max
cctcatcttcctctttttctcaaccaaaaggggttcaattctagctagttctattacatcgtccgcgaccatgaacatggcgatcgtgcttctgttcatggttttcgcagtttcatcagctttagacatgtcaataatatcacatgacaacgctcatgcggatagggccacgaggcgcaccgacgacgaggtgatgtcaatgttcgaggagtggctggtgaaacacgacaaggtgtacaacgcgctcggt

SEQ ID NO: 114845 - DNA, 246 bp, Glycine max
cggctcgagctctaccgcgccgtcgatgtgtatctcaaggcacatccgtgggttttggaagaggagagagagaagatttgcggattgttggactgtcagaagctgacgctggaggcgtgcacgcacgcggcgcaaaacgagaggcttccgctgcgcgcggtggttcaggtgctgttcttcgagcagcttcagctgcgacaagccatcgccggaactttgatggcggcggaggccgccgcggaaccg

SEQ ID NO: 114846 - DNA, 247 bp, Glycine max
accttgcagaagttggcaaagatccaagttcacgccaagaaattataggcagaataagggaagcttctgagagatggggtttctttcaggtggtcaaccatggcatccctgtgactgttctagaggacttgaaagatggggtgcaaaggtttcatgaacaagatattgaggagaagaaagagctatatacccgtgaccatatgaaacctctggtgtataatagcaattttgatctgtacagttcacc

SEQ ID NO: 114847 - DNA, 245 bp, Glycine max
gcatcatacaaagcattgaattcaaaaacttaagttcattccttgtgttttgctttcttcctcaaaaccaaacatgtcgaacacatgcggcaactgcgactgcgctgacaagactagctgcaccaagggaaacagctatggtgttattgtagagactgagaagagttacatcgagactgttgtcatggatgttccagcagctgagcatgatgggaagtgcaagtgtggcactaactgcacttgca

SEQ ID NO: 114848 - DNA, 249 bp, Glycine max
aaagcagagaagtgagatacactaagttatcctcataaatacactctaattaggtggcaagataagtgtctaaccttagtaacattgccacatattgtgttcattttggaattgtgccactaaaattctattcaattcatctatggctgcctcttcttatgctatgcaatcaatcctggcaaaccctttgatccgcatttccagcgggtctagggtgaaccaatttggcgttcctgctttgcacatgag

SEQ ID NO: 114849 - DNA, 244 bp, Glycine max
gttctttacaagaaagaatcacttctaccaaagatgggtccataacttctattcaagcagtttatgtacccgcagacgatttaaccgatcctgcgcctgctacgacatttgcacatttagatgctactactgtactatcaagaggattagcggccaaaggtatctatccagcagtagatcctttagattcaacctcaactatgctccaacctcgaatcgttggtgaagaacattatgagactgc

SEQ ID NO: 114850 - DNA, 246 bp, Glycine max
cacacagcaacacactgcactgtgtggaaagtaagcatggcaagagtggtggcactccaacagaaccaactatctttctctcccttagcttcctctctttttgacttcagtggaaccagacttcaaactcaacttcagttcaagcagaaactatgccatccaaaagggtctttctacgtctcggcatcgagcaccaagaaaatcctaataatgggaggcaccaggtttattggtgtgtttttatct

SEQ ID NO: 114851 - DNA, 207 bp, Glycine max
gagagttgttccctggtccttcaaaggcaacaagagcatatcttcactctgaggcagatgtagagagagcattgcaaaaggttggctggaccataaggaagagaggcttaaccactacccaattttactttgctaggcttattgaggctgtccctatgtagtggggattgaaaggtgagtttcgcatgtttaggggaaattcttagt

SEQ ID NO: 114852 - DNA, 246 bp, Glycine max
gggaaagcaaaaggagaaggtgaacaatatggtgctgtttgatcagggcacctatgacaagctcctttctgaagctcccaaatacaagctcatcactccttccattctctctgatcgtttgaggattaatggatcacttgcaaggaaggctataagagaattgatggcaagaggttctatcaggatggtgtctgcccatgcaagtcagcaaatttataccagggcaacaaacacctaggtggtgaa

SEQ ID NO: 114853 - DNA, 244 bp, Glycine max
tttctccttcctttttgtcatactattcttcaagttctacacactttgccactcatgctgccttcagcatcagtgccagtgccgccgagaagaagaaggtgctcatcgtgaataccaacagcggcgggcatgccatcattggcttttactttgccaaagagcttcttggtgctggccactcagtcaccatactcactgttggtgaagaaggctccgacaagatgaagaaacctcctttcaacag

SEQ ID NO: 114854 - DNA, 244 bp, Glycine max
agaaccgtgaactcgaagtgatccactccaggtgggccatgctcggagccttgggctgcgtcttcccggagttgctgtcccgcaacggggtgaagttcggagaagccgtgtggttcaaggccgggtcccagatcttcagcgagggtgggctcgactacttgggcaacccaagcctgatccacgcccagagcatcctcgccatctgggccacacaagttatcctaatgggtgccgttgaaggtta

SEQ ID NO: 114855 - DNA, 244 bp, Glycine max
cgacgaaactatgcttgaacaagtgcttggagcctcaagatttgatggcagagaagctgcagaacgtgtggctacccctggggtctctgttgggctagtttggactgcttttggtggagaagttcagtttgtggaggctacagctatggttgggaagggtgaactgcatctcactggacaacttggtgatgtaataaaagaatcagctcagattgcactgacatgggtaagggcaagggctact

SEQ ID NO: 114856 - DNA, 244 bp, Glycine max
cagatggccaaatattcttatctgccgatctattcaatgctggaatcagacccgctattaatgtaggtatttccgtttccagagttggatcggcggctcaaattaaagccatgaaacaagtagctggtaaattaaaattggaattagcacaattcgcagaattagaagcttttgcccaattcgcttctgatctcgataaagctactcaaaatcaattagcaagaggtcaacgattgcgcgagtt

SEQ ID NO: 114857 - DNA, 247 bp, Glycine max
accttccacacatttaaacgaatctgatacacattggttgccgcaaatgatgtgttgctagattcttcactcatgaagtatagccccacggattgccagagaccagaacttttaaataagaatttaataaagggaaatattcttctctgtggatattccttcaactttgttgttggcactgcatcgatcaagaaagtctcagaaacagcaaaggcccttggtgcagttggatttgttctttgtgttg

SEQ ID NO: 114858 - DNA, 244 bp, Glycine max
cggagaagttgagttgtttggtgtggggggaagcccttttgccagaagggtgcagattgccctggaactgaagggagtccaatacacttactttgaagaagatcttaggaacaagagtgatcttcttatcaaatacaaccctattcacaagaaggtacctgtgcttgtccacaatggaagaccattggctgagtcccttgtgatccttgaatacattgatgagacatgggagaaccaccacccc

SEQ ID NO: 114859 - DNA, 255 bp, Glycine max
ttccgattctagtggtgattgccgtttatcccttgcgattccccaatatggaatatttgaaaatgtaaattcactggacgagcttgcaaaaatgcctcaatggacagaagaaaagcctctacgagttgctactggtttcacctacctggggcctaaatttatgaaagagaatggacttaagcatgtgacattttcaactgctgatggagcactggaggcagctcctgcgatggggatagccgatgctatcttgga

SEQ ID NO: 114860 - DNA, 245 bp, Glycine max
ctaacaccaagttcccatccaaggcttcacactctttcccaacccaatgcgcctcaaagagacttgaggtgacagaattctctgggctaagatccacttcatgtgtgacatatgctaacgatgctagagaatcttccttttttgatcttgtagcttcccaactcactcccaagaccaatggatcatcaactcctgtgaggggagagacagtggccaagttgaaggtggcaatcaatggtttcgga

SEQ ID NO: 114861 - DNA, 244 bp, Glycine max
taggattggtgaggtaaacttgaattgaagtgaagaaggagatggctgcaacctcttccttgtgctcatcgaccctccaatcccagatcaatggattcttccttcacaaaacctctctttcccatactccttccctcactttctccaggaggaaaatttcaaccacagtgaaggctacatctcgagtcgacaagttttcaaaaagcgatatcattgtctctccgtccattctttctgcaaactt

SEQ ID NO: 114862 - DNA, 244 bp, Glycine max
  unsure (1)..(244): unsure at all n locations
gcaaccctatacaagcagttcacggatgctagtcaacattttcgtgaggctgatacgaataatcgagtgctaaaatcagatgtagaagctttgagagccaaggtgaagttagcggaggatatggtcactaggagctcttttactacgttaaactatcagcttcttcagacacaacaacatcaaatgagcacacccccgcaactgaacacgactaatcttcgccgcatggngcatgtttcgccaa

SEQ ID NO: 114863 - DNA, 243 bp, Glycine max
gcggttagtgctgcagtctcttttccatccaccaagtctacctctctcccaagcaggacctccatcattaccccagagagagttgtattcaagaaggcttcattgcaatacagagatgtttgtagcagtggaagggtagtttccatcagagctcaagtcaccactgaggctccagccaaggttgaaaaagagtccaagaaacaggatgaaggtgtggttgtgaacaagttcaaacccaagacc

SEQ ID NO: 114864 - DNA, 244 bp, Glycine max
gctcttggaaatgctaacgaggatgctattcagaggggaactttcttccagtcttgaattggaggcaaagcaaacttggcaagtaaatatttctgttcgtgaaggttgttgtactaatccaagtgctagaagttgtgatggaacttgcgtgtaacattcttagcattctcaatgtcttaggtgcaaagagaagatgctaagtttgagatgatcttactatatttttcatattggaccgtcttcc

SEQ ID NO: 114865 - DNA, 241 bp, Glycine max
gcccctgcccccatcatcaccccaactgtgagagaggatatggcaaaggaatacgagaaagtgattgaagatattcagaaattgttgagggagaagagtgaactcaaagcgacagctgctgaaaaagtggagcagataacagcttctctagggacatcatcatctgatggcatcccatcatcagaagcctcagacaggatcaaagctggtttcattcacttcaagaaggagaaatacgaca

SEQ ID NO: 114866 - DNA, 243 bp, Glycine max
cagccatggccacccacgcggctctagcttctacaaggatccccactaacaccaagttcccatccaaggcttcacactctttcccaacccaatgcgcctcaaagagacttgaggtgacagaattctctgggctaagatccacttcatgtgtgacatatgctaacgatgctagagaatcttccttttttgatcttgtagcttcccaactcactcccaagaccaatggatcatcaactcctgtga

SEQ ID NO: 114867 - DNA, 246 bp, Glycine max
ccgccacaaccaccatcgtctgcagcaccaccaacaacaacaacaacaacaacgtgtcctccgacctgaaggcgttctccgccgcgctggccctctcctccatcctcctctccgcccctctccccgccggcgccgacatctcggggctcaccccatgcaaggagtcgaagcagttcgcgaacgtgcagaagcagtcgataaagaagctggagtcgtcgctgaagctctacgaggcgggcagccccc

SEQ ID NO: 114868 - DNA, 140 bp, Glycine max
gcttcgctcaggggtggcatgcaaatctttgtcaagactttgactggcaagaccatcaccctcgaggtcgaatcctcggacaccattgataatgtcaaggccaagatccaggacaaggagggtatccctccagatcagca

SEQ ID NO: 114869 - DNA, 80 bp, Glycine max
cattccagccacacgcttcagaagacatggcctcattgggtgggttacaaaatgtgagcggcatcaattttcttatcaaa

SEQ ID NO: 114870 - DNA, 241 bp, Glycine max
cgttcattctctttgcgcagttccctacctctcctttcaagatgcagatcttcgtcaagaccctcaccggaaagaccatcacccttgaggtggaaagctccgacaccatcgacaacgtcaaggccaagatccaggacaaggaaggaattcccccggatcagcaacgtctcatcttcgccggaaagcagctcgaggacggccgtaccctcgccgactacaacatccagaaggagtcaaccct

SEQ ID NO: 114871 - DNA, 240 bp, Glycine max
  unsure (1)..(240): unsure at all n locations
gttaagantttcgtggggttgtctgtatctgatggttacattgctactggttcagagacaaacgaggtgttcatataccacaaggcttttcccatgccagcattatctttcaaattttacagtagtgaccctctttttgggaatgaagaggatgattctacacagttcatcacttctgtttgttggcgcggtcagtcctccaccttacttgctgcaaattccacaggaaatgtcaaaatt

SEQ ID NO: 114872 - DNA, 239 bp, Glycine max
agacagacagtgagaaatgatgatgaagcgtcggttccttttggttctcttggttctctatgtcacagtggagcagagtaagctactccaccacgtagaagccgatggtgggtttgtaaaaacaagaggagtgcagcttatgctgaatgggagtccctactatgctaatggctttaatgcctattggcttatgtaccttgcctctgatccttcccagagaaacaaaatctcatcggtat

SEQ ID NO: 114873 - DNA, 237 bp, Glycine max
aggcattagaaaaattcttccagattctgagatttgtgactttgactttgagccatgtggttattcaatgaactctgttgaaggtgctgctgtttctaccattcatgttaccccagaagatggtttcagttatgcaagctttgagactgttgggcatgacttcaaagtggtgaatctgaacgaaatggttaagagggtattggcatgttttctcccaactgagttctctgttgcagt

SEQ ID NO: 114874 - DNA, 142 bp, Glycine max
gacgaacaagtagttgagaactaagaaggagaagcaaatggcttcctcaatgatctcttccccagctgttaccactgtcaaccgtgccggtgccggcatggttgctccattcactggcctcaagtccatggctggcttcccc

SEQ ID NO: 114875 - DNA, 241 bp, Glycine max
aggtttctactcgggaaacttgcctccgtgagcatgaaggatcttactcatcaagagaaacttgcattttggataaacacttataattcctgcatgcttaatgcatatttagagcacggcatacccgagagtcctgaaatgattgtagcactaatgcagaaggcaacaatagaagtgggggggcagctgctcaatgcaattacaatagagcacttcatcttgagacttccttatcacctga

SEQ ID NO: 114876 - DNA, 111 bp, Glycine max
attggggtcacttccttgtacattggatggggattagatggctctgtttggatttcatcagaaatgaaaggcctgaatgatgattgtgaacactttgagtgttttccacct

SEQ ID NO: 114877 - DNA, 243 bp, Glycine max
agttttggatagccatggaacacaaagtagccacaacaactgaaggacaatccataagatgtaaagcggcaatttgtcgcaaagcaggtgaaccactgagtattgaggagatcattgtggcgccaccaatgcctggtgaagctcgcattcgtattatatgctcctctctctgtcaaaccgatatcagttttcggaacatgcaggaccatcctgccatttatccaagaattctgggtcacgagg

SEQ ID NO: 114878 - DNA, 239 bp, Glycine max
taatcttttcaaagtttttgctggtggaaagcccgtctccttcacagctgcatctcttgcaccagaagttcagagtgcgattccttctggattagttaggaagagcccttatctgacgcaccctatctttaacacgtaccaaactgagcatgagttgcttaggtacttgtataggctacaatcaaaagatctctcactatgccacagtatgatcccacttggatcttgtacaatgaagc

SEQ ID NO: 114879 - DNA, 238 bp, Glycine max
ggttgctgtaggagataagatattgaagtagtgctaagtgcctaacacctgcagtgaacaatggcctctgcatcagcatctcttctcaagtcttcacttgttcttgacaagtctgagtgggtgaagggacaaacacttcgccaaccttctgctgcatcagttgtgagatgcaaccccaccaccccatcaggcctcaccatcagagctggttcctatgctgatgagctcgttaagaccg

SEQ ID NO: 114880 - DNA, 236 bp, Glycine max
ggtttgacacaatggtatgcatttcacaaagaacctcctgctggtgttgatgagcccaacggtaaacaggaaaggttgcttaggatatttgagggctggtgtgataatgctgtagatctgatacttgccacagaagaagaagcaattctaagacgagacatatatgacaggataccaacattgacatggggaaagggtcgcgtgactttgcttggtgattccgtccatgccatgca

SEQ ID NO: 114881 - DNA, 243 bp, Glycine max
tgtgaaattcgaggagaaagacggaattgactatgctgctgtcactgttcagcttcccgggggagagcgtgtgccattcctctttaccattaagcagttggtggcatctgggaaaccaggcagcttcagtggggagttcctagtgccttcttaccgtggttcctctttcttggaccccaagggaaggggtgcctcaactggttatgacaatgctgttgctttgcctgctggtggcagaggaga

SEQ ID NO: 114882 - DNA, 139 bp, Glycine max
agattatctttactaatgttggcaacccgcatgcattgggacagaaaccactgagcttccctcgccaggttgttgctttgtgccaagctccattcctacttgatgatcctaatgttggactgctattccctgctgatgc

SEQ ID NO: 114883 - DNA, 236 bp, Glycine max
agcaaacattggttctgatgctccaaaagacagctgggatcttgaaaaactaactgcaaaaattcagcaatattgctacttgttgaatgatctatcccctgatttgctggggaacacatgttcagattacgaggaattgcggaattatctccgtcttcgtggtcgtgaagcctacctgcagaaaagggatattgtggagcaacaagcagcaggcttgatgatagaagcagagcggt

SEQ ID NO: 114884 - DNA, 236 bp, Glycine max
atttctccttcttttttatcatacacttcgtcacatcccatacactttaccactcatgctgccgtcagcatcagtgccagcgccgccgagaagaagaaggtgctcatcgtcaataccaacagcggcggtcatgccatcattggcttttactttgcaaaggagcttcttggtgctggccactacatcaccatactcactgttggcgatgaaggctcagacaagatgaagaaacctcc

SEQ ID NO: 114885 - DNA, 244 bp, Glycine max
aaacactcataacacaaagcacaaagcaaagctcatccttgagttaaaaaatggcagcagcttcttccatggctctctcatccccatccttggctggcaaggccgtgaagctgggcccatcagccccagaagtgggaagggtgagcatgaggaagaccgtcaccaagcaggtctcctcaggaagcccatggtacggcccagaccgagtcaagtacttgggcccattctctggcgagcccccgtc

SEQ ID NO: 114886 - DNA, 239 bp, Glycine max
caaagcagcacccatttggatcctctcttctcttctttgatctccgttaccctttttgttttctcaacagagagagagagagagaatctttcgaagttcgtttgcgtgtgttgtgtggtcagtcaccgatggcagcaccacctgcgagggcacgtgccgattacgattacctcatcaagcttcttcttattggcgatagcggtgtgggaaagagttgtctgcttttgcgattttctgat

SEQ ID NO: 114887 - DNA, 238 bp, Glycine max
ttcctttaccatacaggggacagccccaatcagatatgaatgtttctgaattttcccatctcccagaaggacctgttaggagctttgcactggtcagagtaatgcgtgctgctgaaatcgatttcaggaagccagcacgccatggtgttttggggattcctggttacgttcagtttacatcccccatccgtagatatttggatcttcttgctcattatcaggtaaaggcattccttag

SEQ ID NO: 114888 - DNA, 237 bp, Glycine max
gaaataaatgagctgggtgcacggaggattgcagtattcagtgcacccccaattgggtgtttgccatttcagagaacagtgggacgaggattagaaaaaagatgtgcagaaaggcccaacaatttggcccaattatttaacaccaaattgtcaaaggagcttgattccctcaaccgcaactttcccaatagcaggcatgttttcatcaatggctacgaccctctacttgacatcatc

SEQ ID NO: 114889 - DNA, 238 bp, Glycine max
gaaaaaagagaaacaaatggcagcactgggtggctttaccgacatcaccggagcacagaacagcatcgatatcgaaaatctcgctcgctttgctgttgatgaacacaacaaaaaagagaatgcagttctggagtttgtgagggtgattagtagaaagaaacaagtggtttctggcaccttgtactatatcactttggaggcaaatgatggtgtgacgaaaaaggtttatgaaactaag

SEQ ID NO: 114890 - DNA, 237 bp, Glycine max
tggatccccaccctatctgtgccttatcctatgtatgcgaattaaatgaagcaagcattcataaagcataactgaagaaaactaaggaaggaaggaaggaaggaagagtgagcgtgagagatgccttcggcgaggctttcagggtcaccaaggctcgacgttgctattgacatgggcaatccatttctcaatctcactgttgatggtttccttaagatcggagctgtcgcagccacg

SEQ ID NO: 114891 - DNA, 235 bp, Glycine max
tgaaaccatcactgttgatggtaagcccatcaaggttgtttcaagcagggaccctcttaagcttccttgggctgaacttggaattgacattgttattgagggaaccggagtgtttgtggatggccctggggctggtaaacacatccaagcaggtgccaagaaagttattatcactgctcctgcaaagggtgctgatattccaacttatgttgttggtgtaaatgaaggggactac

SEQ ID NO: 114892 - DNA, 77 bp, Glycine max
gttgagaactaagaaggagaagcaaatggcttcctcaatgatctcttccccagctgttaccactgtcaaccgtgccg

SEQ ID NO: 114893 - DNA, 236 bp, Glycine max
tccaaacccaggtagctaaaagaagaaagggtttgttgaactacatgctttttctaagactgactccgaccctgcccaacacatttattaattttgcttctccaattgtggatgtgccttatcatattttcttcttggcaactgttattgggctgatacctgctgcctatgtcacagtcaaggctgggttggctcttggagagttacaatgcgtgggtgatctctatgatttcaac

SEQ ID NO: 114894 - DNA, 234 bp, Glycine max
cacgaagctcggtgccaagctcaccgaggttcggaagaacgggacatgcccttggctgagacctgatggcaagacccaagtcactgttgaggactacaatgacaagggtgccatggacccaatccgcgtccacactgtgctcatctccacacagcatgatgagactgtcacaaatgatgagattgcagctgatcttaaagaacacgtgattaagcctgtgattcctgagaagta

SEQ ID NO: 114895 - DNA, 235 bp, Glycine max
gaaaaaagtctatggcatgactctgatgctgatggtaatatgctccatcggttccggcctttcattcggacatagcgcaaaatccgtgatagcaactctctgcttcttccggttctggcttggatttggtattggtggagactatccactttctgctaccataatgtctgagtattctaacaagaagactcgcggtgcattcattgcggcggtgtttgccatgcagggttttgga

SEQ ID NO: 114896 - DNA, 242 bp, Glycine max
gcgcagtttaaaggagagttttgatcaggcgatacagagagatgatgtcaaggcaattgttgttacaggtgcaaagggacaattttctggaggttttgatatttctgcatttggtggtattcaagaggcaaaagagcgtccaaaacctggttggatatcagtagaaatcatcactgatactattgaagcggctaggaaaccatcagtcgctgccattgatggccttgccttgggtggaggat

SEQ ID NO: 114897 - DNA, 108 bp, Glycine max
gccgagtcatcctgtgctgctcttgttgttgcttccatctcttcttttggggtgaatcatgagttgactgctaggttataccctctaattatcagttctgtgggtatc

SEQ ID NO: 114898 - DNA, 235 bp, Glycine max
atgcctttggacagcgtgacggcggggaacgcggtgaaccggaaaaaggcgatgaacgcggcgatggctgcgctgaagagcgcgggggtggagggggtgatgatggacgtgtggtggggtttggtggagagagagaagcctggggagtataattggggagggtacgtggaactcatggaaatggcgaagaagcatggcctcaaggtgcaggctgttatgtcatttcaccaatgtg

SEQ ID NO: 114899 - DNA, 234 bp, Glycine max
tcttcctcttcacttcgttctttttcgcctctacaatgagcaacgacaaggacacattcaacgtcgccgatctcacttctgctctcaacgaggacaatagagcagaccttgtcaatgctcttaagagcaagatacagagtttggctggacaacactcggatattctagagtctctgtcgcccaatgtccgaaagcgtgttgaggttcttagagagatccagggccaacatgatg

SEQ ID NO: 114900 - DNA, 135 bp, Glycine max
gacaaatgctccactggaggaagtgcgcaagaatatttggttggtggactcaaagggattgattgtcagttcccgcaaagattcgctccaacattttaagaagccctgggctcatgagcatgaacctgttagaaa

SEQ ID NO: 114901 - DNA, 235 bp, Glycine max
gaacatatttcctgagagacctggtcagcccgaatgccaattctacatgaagacaggagattgtaagtttggcgcatctgtcggttccaccacccacaagagatgctagttcctgctcctaactgtgtcttgagtcccataggccttcctttacgtcctggagaacctttgtgtgtcttctattctcgttatggcatatgcaaatttggcccaagttgcaagtttgaccacccaa

SEQ ID NO: 114902 - DNA, 256 bp, Glycine max
gttttccgactcgcgccgccttgagaaccgctcctcgcggcggaggcgtcaagtgcgaggcaggagacaccgccgttgaagtggctcctattactgatgcaaattggcaatcacttgtgcttgaatctgagtctccagtattggttgaattctgggctccatggtgtggtccctgccgtatgatacatccgataattgatgagctggcaaaggaatatgttggtaggcttaagtgctacaaactcaatactgatgg

SEQ ID NO: 114903 - DNA, 257 bp, Glycine max
gtgactgagagatggacgctcccctgctgctggccaaaggcgagggggcggcgctggtgacggagaacggcgactacgtggcggtgagggagctgaaggaggtgaagaaggtgttctggattgagacgaagagagtgtggcagattgcgatgcccattgttttcaacatatggtgtcagttcggtgtgaattccgtgaccagcatgttcgttggacacctcggcgacattcagctctctgctatctccctcattaac

SEQ ID NO: 114904 - DNA, 254 bp, Glycine max
cttttgtttgttcttcagtactttagtgtgtgatttaattccaagattttgagaatgtctagctgtgggtgtggaagtagctgcaactgtggcagcaactgcggttgcaacaagtactcttttgacttgagctatgttgagaagacaaccacagagactcttgttttgggtgttgggcctgtgaaggcccaattggatggtactgaaatgggtgttgcagctgagaacggtggctgcaactgtggatcaagctg

SEQ ID NO: 114905 - DNA, 253 bp, Glycine max
ctttttctcaaccaaaaggggttcaattctagctagttctattacatcgtccgcgaccatgaacatggcgatcgtgcttctgttcatggttttcgcagtttcatcagctttagacatgtcaataatatcacatgacaacgctcatgcggatagggccacgaggcgcaccgacgacgaggtgatgtcaatgttcgaggagtggctggtgaaacacgacaaggtgtacaacgcgctcggtgagaaggagaagagg

SEQ ID NO: 114906 - DNA, 258 bp, Glycine max
ctgctctagaaaattcagtgctgaaacatggcttcggctactctctctgtagccaaaccagcccttcaggcaaatgggaaaggcttctctgaattctctggcctccgaagctcatcaggcttccttcccttttctagaaaatgcttcagaggatttccattctgtcattgccttccagacctatgcagttggaagcagtggaggatacaagaagggtgtgacagaagcaaaactgaaggttgccataaacgggtttgg

SEQ ID NO: 114907 - DNA, 258 bp, Glycine max
gaaagagagagagagagagagagaagagatatacactgccaagaagaagaccatgaaaattcagtgcgatgtgtgtgagaaagctccggcaaccgtgatttgctgcgcagatgaggcagctttgtgtgccaaatgtgacgttgaagttcatgctgcaaacaagcttgcgagcaagcaccagaggcttctcgttcaatctttatgtaacaagcttcccagatgtgacatatgtcaagatacgccagcttacatattttg

SEQ ID NO: 114908 - DNA, 148 bp, Glycine max
atccatggctgcctccgtctccactgtcggagctgtcaacagagctcttttgaacctgaatgggtctggacctggggtttcagctcccagttcgtccttctttgggagcagcttgaagaaggttattggctcaagggtccccaacaca

SEQ ID NO: 114909 - DNA, 256 bp, Glycine max
aactttgcccccttgtaaaacttcttattgtgatgtctaaaagcgaagacttgaagcttttgggaggctggttcagcccatttgccctgagggtgcagattgcccttaacctcaagggtctagaatatgaggttgttgaagagaccttgaatcccaaaagtgacctgcttcttaagtccaaccctgtgcacaagaaaatcccagttttcttccatggagataaagtcatttgtgaatctgcaatcatagttgagta

SEQ ID NO: 114910 - DNA, 254 bp, Glycine max
agaaaatatttgaacaatccactcacaattgattttgttggtgatgttgaggaaaagcttgctgaagggataaaactttatgctatagcagccactgccacttcaaagcggacaattctttctgatcttgtaactgtttatgcaaagggtgggaagactatagtttttacacagacaaaaagagatgctgatgaagtatcattgtcattaacacatagtataatgtctgaagcactgcatggtgatatatctca

SEQ ID NO: 114911 - DNA, 251 bp, Glycine max
tccctattgtaatttctgccagcctcaaaaaagacttgctctgcctctgccactctctgagtaggactacactgccatggctgcctcagtctccactgttggagctgtcaacggagctccactgagcttgaacagctctggagctggagcttcacttcccagttcagccttctttggcaccagcttgaagaaggttattgcctcaagggtccctaacgtcaagatttcttctggaagtttcaaaatcgttg

SEQ ID NO: 114912 - DNA, 254 bp, Glycine max
cggctcgagtgttgtaactttttgattcctaaattctctaaaattcgaaattctaatttcgttaggggaaagagattgtttgtgtgtgagtgagtatggctggaaaaggcgagggtccagctatcggaatcgatttgggaacgacgtactcttgcgtcggcgtgtggcaacacgatcgtgttgaaatcatagccaacgatcagggtaacagaactaccccatcctacgtggctttcaccgacacagaacggttg

SEQ ID NO: 114913 - DNA, 254 bp, Glycine max
aactttgcccccttgtaaaacttcttattgtgatgtctaaaagcgaagacttgaagcttttgggaggctggttcagcccatttgccctgagggtgcagattgcccttaacctcaagggtctagaatatgaggttgttgaagagaccttgaatcccaaaagtgacctgcttcttaagtccaaccctgtgcacaagaaaatcccagttttcttccatggagataaagtcatttgtgaatctgcaatcatagttgag

SEQ ID NO: 114914 - DNA, 256 bp, Glycine max
ctatcatggccacggcaacagcagctgccacctcgtcctttatggggacgcgtctcctggaggctcactccggagcggggcgagtgcacgcccgattcggcttcggcaagaaaaaggctcccgccccaaagaaagcctccaggggatcgggccgagacaccgacagacccctttggtatccgggcgccaaagcgcccgaatacctcgatgggagtcttgtcggagactacgggttcgatccgtttgggctagggaa

SEQ ID NO: 114915 - DNA, 257 bp, Glycine max
  unsure (1)..(257): unsure at all n locations
atgcaggacacaattgaacgctaccgcaggcataacaggagtgctcaaacagtgaacagatctgatgaacaaaatatgcagcatttgaagcaagaaacagcaaacttgatgaagaagattgagcttcttgaggcttcaaaacggttcaagatcttgcttttcaatccatcttcgcaacttgtttatattcactgttagatttatctcacaaagaatanaaataaaaaatatattctgtgtactattcatccctcagg

SEQ ID NO: 114916 - DNA, 250 bp, Glycine max
acgaaatccggttcttcgagctaaacactggagctaatatcccttcactagggctgggaacttggctggctgatcctggtgttgttggtgatgttatagctcatgccgtcgaggttggttatcgccatattgattgtgctcaaatttacggcacatcaggaggagattggtttagcattaaagaagttatttgaagagggtgtagtcaagcgagaagatttatggatcacctctaaactctggtgtacag

SEQ ID NO: 114917 - DNA, 257 bp, Glycine max
aagatgggttacggttccaaattccggtgatacagatctatcgccacgacccatccatggcagggaaagaccctgttgaggttatcagaaaggctttggccagaacgcttgtgttctactatccttttgctggtaggctcagggaaggacgtgatcggaaactgatggtggattgtactggggaattaggtgttttgttcattgaggctgatgcagatgtcactcttaagcattttggtgatgctcttcaacctcct

SEQ ID NO: 114918 - DNA, 255 bp, Glycine max
attcctctggatctcgtctcgatcgatagatctcgaacatgagcactggggagcttctcaacatcgaacctctcgaactcaagttcccctttgagctgaagaagcagatctcatgttctcttcaattgtccaataagaccgatagctatgtagccttcaaggtgaaaacaaccaatccgaagaagtattgtgttcgtccgaacactggggttgtcacgcctcgatctacgtgtgatgttatcgttaccatgcaag

SEQ ID NO: 114919 - DNA, 254 bp, Glycine max
acaggagtcgcctcgtgtttccgtttccgtttcaatttcctctcacaggctttaatgttaccagctcgagataagacatggaccggatcaaaggcccatggagtccggaggaggacgaggctctgcagaagctggtggagaaacacgggcccaggaactggtctctgatcagcaagtccatcccgggccggtccggcaagtcctgcaggctccggtggtgcaaccagctgtccccccaggtggagcaccgggcc

SEQ ID NO: 114920 - DNA, 250 bp, Glycine max
gagaaatactcaagcctggaaattgtggaggagagcccaaactcgggtgtgttctttcttatcttaaatcgtccgtcacgacggaacgctctctcgcgcgaattcttcagcgagttcccgaaagctctgcacgcactggatcacaacccggaggtgaaggtgatcgtgttgtccggcgccggggaccacttctgctccggcatcgacctctccctcctgggatcaaccgccgcgagttcgggttcctccg

SEQ ID NO: 114921 - DNA, 253 bp, Glycine max
caacaagtagttgagaactaagaagaaggaaatggcttcctcaatgatctcctccccagctgttaccaccgtcaaccgtgccggtgccggcatggttgctccattcaccggcctcaaatccatggctggcttccccacgaggaagaccaacaatgacattacctccattgctagcaacggtggaagagtacaatgcatgcaggtgtggccaccaattggcaagaagaagttcgagactctttcctacttgcca

SEQ ID NO: 114922 - DNA, 253 bp, Glycine max
gcgtgacacatgcaggaacattggttttgtctctgatgatgttggtcttgatgctgacaactgcaaggtcctcgtcaacattgagcaacagagtcctgatattgctcaaggtgtgcacggccacctcacaaagaggcctgaggagattggtgctggtgaccaaggtcatatgttcggctatgccactgacgagactcccgagctcatgcccttgagccatgtccttgccacgaagctcggtgccaagctcacc

SEQ ID NO: 114923 - DNA, 254 bp, Glycine max
gccttaaggaacgttcgagaccacagaggtttctctagtcttcttctgtggagagcttgttttctcttgttcattcatctcacttccaattaaggaacaagctttccaccaatttgaatcaccaatggctcgctctttctccaacctcaaggttctctctgctcttgtcgccgacggattctccaacactctcaccaggcgtgggtacgcagtagcgacacaaagcgcaacaagaggaggagcagcctccatca

SEQ ID NO: 114924 - DNA, 252 bp, Glycine max
gtgttctgtgattttgggcctgagtttactgttgttgatgtggatggtgaagaaccccgtactggcattattgcatccataaacaatgacaaccgtgctctagtatcctgtgttgatgatgagaggcttgagtttcaggatggagatcttgttgtattctctgaaattcatggtatgaaagaattgaatgatggaaagccaagaaagataaaaaatgctagagcatattcttttactcttgaagaagacacc

SEQ ID NO: 114925 - DNA, 250 bp, Glycine max
caagctcatcctagagttttaaaaatggcagcagcctcctccatggctctctcttccccatccttggctggcaaggccgtgaagctgggcccatcagcccccgaagtcgggagggtcagcatgaggaagaccgtcaccaagcaggcctcctccggaagcccatggtacggcccagaccgcgtcaagtacttgggcccattctctggcgagcccccgtcctacctcactggcgagttcccaggtgactacg

SEQ ID NO: 114926 - DNA, 252 bp, Glycine max
ggaatcaaccccatcatgatgagtgctggagagttggaaagtggaaatgcaggagagccagcaaaactgatcaggcagagataccgtgaagctgcagacatgatcaagaagggaaagatgtgcgctctcttcatcaacgatcttgatgcagtgagctggtcgtcttggtggaaccacacaatacactgtgaacaaccagatggtgaatgccactctcatgaacattgctgataaccccaccaatgtgcagct

SEQ ID NO: 114927 - DNA, 251 bp, Glycine max
gccaaattaggattaggattagggctaccaataccaataccaataccaattctattctatggcttgctcaagcgcccaaatacacggtctcggaaccccttcctcccgaaccctatttttaggtcagaggctaaataccaaggccgcctttatcaagctcaagtccacacctagaagactccgccctctcagagtggttaatgagaaagtcgtcggtatcgatttgggaaccaccaactccgccgtggctg

SEQ ID NO: 114928 - DNA, 254 bp, Glycine max
gcccggtgaacatccagaccatgtggttgtcattaagtacgtgccttatgtaggggacagcaagagggccatggatgagtacacttctgagatattcatgggtggaaagaacacaattgtgttgcacaacacatgtgaggattcactgttagctgctcctattatcttggacttggtccttcttgctgagctcagcactcgaatcgagtttaaagctgaaaatgagggaaaattccactcattccacccagttg

SEQ ID NO: 114929 - DNA, 252 bp, Glycine max
attttaatcacgcgcacatcagcacaacacaacaattcactaagctaaaatcacttcatcatggcttcctcgtgtgcttcctctgccattgcagctgttgccatctccacaccaagttcccagaagaatggatcactcttgggaagcacaaaagcttcttttcttagtgggaggaaactgaaggtgaacaactttacagcaccagttggagcacgatccagcactacagtttgcgcagttgctgagcctgat

SEQ ID NO: 114930 - DNA, 250 bp, Glycine max
tgcaattgaagttgaagtcttgcccttctctcttcaactccaaacacaagacatcatcatccatggctgcctccgtctccactgtcggagctgtcaacagagctcttttgaacctgaatgggactggacctggggtttcagctcccagttcatccttctttgggagcagcttgaagaaggttattggctcaagggtccccaacacaaagatttcctctggaagcttcaagattgttgctgtagaagagaa

SEQ ID NO: 114931 - DNA, 250 bp, Glycine max
aacccccgtgttcccatcattgtcaccggtaacgatttctcaacactctatgcacctctcatccgtgatgggcgtatggagaagttctactgggcaccaacaagggaagaccgcattggtgtttgcaccggaattttccgcactgatggtattcctgaacaggacattgtcaagcttgttgacaccttccctggccaatccattgatttctttggtgcactgagggccagagtatatgatgatgaagtga

SEQ ID NO: 114932 - DNA, 249 bp, Glycine max
ctcatcttcctctttttctcaaccaaaaggggttcaattctagctagttctattacatcgtccgcgaccatgaacatggcgatcgtgcttctgttcatggttttcgcagtttcatcagctttagacatgtcaataatatcacatgacaacgctcatgcggatagggccacgaggcgcaccgacgacgaggtgatgtcaatgttcgaggagtggctggtgaaacacgacaaggtgtacaacgcgctcggt

SEQ ID NO: 114933 - DNA, 253 bp, Glycine max
attggagatagatgcagacgaggatgttcgcatgatggtcatagtcaacgcacgtgctaggtttaatcctccattacctgctggttactacggcaatgcctttgcataccccgcggcagttaccaccgcagggaagctttgtgaaaatccatttgggtatgcagtggagttaataaataaactgaaaggtgaggtgacagaagaatacatgcattctgtggcagatctaatggtgactaatggaagatgcttg

SEQ ID NO: 114934 - DNA, 133 bp, Glycine max
agggtgtgcccatctcatgtgctagatttccaaccaggagaggcctttgtggtcagaaatgttgctaacattgtcccaccatatgaccagtcaaaatacgctggaactggggcagcagttgagtatgctgttt

SEQ ID NO: 114935 - DNA, 259 bp, Glycine max
gcgtgaaggccattaggagaaagaccaccggaactggaaggatgaggtacttgcgtaacgtgcctcgcagattcaagagcggcttcagagagggtaccgaagctgcacccaggaagagaggagctgctgcctctgcctaagctttgaatgaatgacagcaatttttgctgggtcagtgaattataggagttaatgtttctgtgttggtgccaaactctttggaacacattttctttctgtcggtttaatttcattaata

SEQ ID NO: 114936 - DNA, 244 bp, Glycine max
gcgggtagctgagatcggagaaccctctctttcttctccttcttcagcagttgaaaataaaaaatggcagatggtgaggatattcaaccactcgtctgcgataatgggacaggaatggtgaaagctggatttgctggggatgatgctccgagggctgtgtttcccagcattgttggtcgtccccgtcacacgggagtgatggttggcatgggccaaaaagatgcatatgttggggatgaagctc

SEQ ID NO: 114937 - DNA, 169 bp, Glycine max
gctctgtttctgtctctgtgtttgcggctgaggattccgaacgagcgaccttcttcgtttctcgcaaagtttaagtcatcatgggtaaggaaaagactcacatcaacattgtcgtcattggacatgtcgactctgggaagtcaactaccactggtcatttgatctacaa

SEQ ID NO: 114938 - DNA, 173 bp, Glycine max
caaaaacaaagaaaaaaaaaaacccttagccaacacaaccatcatggccacctctgctattcagcaatcagcattcactggtcaaactgctctgaagcagctcaatgagttcgtccgcaagaccggtggcgccggcaaaggtcgcactaacatgcgccgcaccgtcaagagtg

SEQ ID NO: 114939 - DNA, 184 bp, Glycine max
gccattcgtattgtcgcagagaaagataaccctagctcaccgtttcaagatgcatctcttcgttaagaccctcactggtaagaccatcactctcgaagtcgagagttcagataccatagacaatgtaaaggccaaaattcaagacaaggaggggatcccaccagatcagctacggctcgttttt

SEQ ID NO: 114940 - DNA, 253 bp, Glycine max
caaaaccctatctctcaccaacttccgctacttcctactccaaccactttcttttttcccgcagtcatgggcaaggtcaagatcggaatcaacggatttggaagaattggccgtttggtggccagggtggctctgcagagagacgatgttgaactcgttgccgttaacgatcctttcattaccaccgattacatgacatacatgtttaaatacgacagtgttcccgggcactggaagcatcacgatgtcaccg

SEQ ID NO: 114941 - DNA, 85 bp, Glycine max
cggatttgcaggagtatttcctgaacacaaatatgacattgttaagaggctgcaagagaggaagcatatatgtggaatgacggga

SEQ ID NO: 114942 - DNA, 182 bp, Glycine max
acgggtggtgcctctcttccatctccccagccaaaacctctctcaagaaggccacattaggcccttctgtcttcgcaaccgttagcactccttcttctccttcttcttcttcttcttcttccttcccttctctcattcaagacaggcctgtctttgctgcccctgcccccatcatcacccca

SEQ ID NO: 114943 - DNA, 236 bp, Glycine max
caacaactcactcactaagctaaacaatttcatcaagcctgccatggcttcctcgtgtgcttcctctgccattgcagctgttgccatctccacaccaagttcccagtagaatggatcactcttgggaagcacaaaagcttcttttcttagtgggaggaaactgaaggtgaacagttttacagcaccagttggagcacgatccagcactacagtgtatgcagttgctgagcctaata

SEQ ID NO: 114944 - DNA, 152 bp, Glycine max
gaagctatggccatttaaggtcatccctggtcctgctgacaaacctatgattgtggtcaactacaagggtgaggacaagcagttctccgctgaggaaatttcttccatggttctcatgaagatgcgtgagattgccgaggcttatctcggtt

SEQ ID NO: 114945 - DNA, 260 bp, Glycine max
gttccattcactggcctcaagtccatggctggcttccccaccagaaagcccaacaatgacattacctccattgctagcaacggtggaagagtgcaatgcatgcgcgtgtggccaccagttggcaagaagaagtttgagactctttcctacctgccagaccttgatgatgcacaattggcaaaggaagtagaataccttcttaggaagggatggattccttgcttggaattcgagttggagcgaggtttcgtgtaccgtga

SEQ ID NO: 114946 - DNA, 244 bp, Glycine max
cacaaggcagaaagcaagctcatcctagagttttaaaaatggcagcagcctcctccatggctctctcttccccatccttggctggcaacgccgtgaagctgggcccatcagcccccgaagtcgggagggtcagcatgaggaagaccgtcaccaagcaggcctcctccggaagcccatggtacggcccagaccgcgtcaagtacttgggcccattctctggcgagcccccgtcctacctcattgg

SEQ ID NO: 114947 - DNA, 229 bp, Glycine max
gtggtttcagtgagtgatcggtgttcacttgatccttcataagtcgtcatcatcatcatcatcatcaccgttgattgaagaagatgccgatcagaaacatcgccatcggaaggcctgaagaggctactcaccccgacacgttgaaggcggggttggctgagttcatctccaccttgatcttcgtgttcgccggttcaggttccggcatcgcctacaacaagctcaccga

SEQ ID NO: 114948 - DNA, 212 bp, Glycine max
gcaaagctcatccttgagttaaaaaatggcagcagcttcttccatggctctctcatccccatccttggctggcaaggccgtgaagctgggcccatcagccccagaagtgggaagggtgagcatgaggaagaccgtcaccaagcaggtctcctcaggaagcccatggtacggtccagaccgagtcaagtacttgggcccattctctggagagc

SEQ ID NO: 114949 - DNA, 240 bp, Glycine max
aaaaaggatagattattatgtatcgattgaatcaatgactattcatgattccataattgaatcaattacatactggatccaagctaaaggaatgttatggtaaaacttcgtttgaaacgatgtggtaaaaagcaacgtgcgacttgaaagacatgattagattagctgtggattcttacatccgccattttttctagtatatagaaatggaacatgctcttgactcaacatcgtttgttc

SEQ ID NO: 114950 - DNA, 127 bp, Glycine max
gaagatttgcattcgccgacttctcacttctaaatctcccagaccaatttaagagctcctttgactttattgatgggcatgttaaaccagtggttggaaggaaaatcaattggttgaaagctggact

SEQ ID NO: 114951 - DNA, 210 bp, Glycine max
ttgcagtattatgagatttcagcgaagagcaactacaatttcgagaagcctttcctctatttggccaggaaacttgcaggtgatcctaacttgcactttgtggaatctcctgcattggctccaccagaagttcaaattgatttagctgcacagcaacaacacgaagctgagcttcttgcagctgctagtcagccccttcctgacgatgat

SEQ ID NO: 114952 - DNA, 255 bp, Glycine max
gttttggatagccatggaacacaaagtagccacaacaactgaaggacaatccataagatgtaaagcggcaatttgtcgcaaagcaggtgaaccactgagtattgaggagatcattgtggcgccaccaatgcctggtgaagctcgcattcgtattatatgctcctctctctgtcaaaccgatatcagttttcggaacatgcaggaccatcctgccatttatccaagaattctgggtcacgaggcaataggggttgt

SEQ ID NO: 114953 - DNA, 255 bp, Glycine max
cattagcaaaagcaagaagaactagtctaagcagaaatggcctcttcagtgatggcatctgtggccctcaaacctgcccctttcactgttgagaagtcctcagttagaggccttccctccctctcaaggaactcctcttcattcagagttgtggccagtggtggcaagaagatcaagactgacaagccttatggaattaatggtggcatggctttgagggaaggagttgatgcatctggcaggataggaaaggga

SEQ ID NO: 114954 - DNA, 260 bp, Glycine max
gaagaacaagtagttgagaactaagaaggagaagcaaatggcttcctcaatgatctcttccccagctgttaccactgtcaaccgtgccggtgccggcatggttgctccattcactggcctcaagtccatggctggcttccccaccaggaagaccaacaatgacattacctccattgctagcaacggtggaagagtgcaatgcatgcaggtgtggccaccaattggcaagagacgtttgagactctttcctacctgccaga

SEQ ID NO: 114955 - DNA, 253 bp, Glycine max
gaagcattagcaaaagcaagaagaactagtctaagcagaaatggcctcttcagtgatggcatctgtggccctcaaacctgcccctttcactgttgagaagtcctcagttagaggccttccctccctctcaaggaactcctcttcattcagagttgtggccagtggtggcaagaagatcaagactgacaagccttatggaattaatggtggcatggctttgagggaaggagtcgatgctctggcaggaaaggaa

SEQ ID NO: 114956 - DNA, 182 bp, Glycine max
gactcctcaatcatccatagacatggccaccgtcacttctgcagcagtttctattccctcattcactggcctcaaggcaagcgcaggcaaagtgagtgccgccgcagttaaagtctcagcttcccaagccacaaggttctgcggcatcaaggcttccctcaaagacgttggagtcgctgttt

SEQ ID NO: 114957 - DNA, 236 bp, Glycine max
attccagccacacgcttcagaagacatggcctcattgggtgggttacaaaatgtgagcggcatcaattttcttatcaaagagggtccaaaagtcaatgcaaagttcgagctgaagccgccaccatatccactgaatggtttggagccggtgatgagccagcagacacttgagtttcactgggggaagcaccacaagacttatgtggaaattctaaaaaaacaagttgttgggacag

SEQ ID NO: 114958 - DNA, 210 bp, Glycine max
gcgaccttgaagagctatggctgtcggaaagaataagaggatttccaagggaaagaagggtggcaagaagaaagccgctgatccctttgccaagaaagactggtacgatatcaaggccccttccctcttccaggtcaagaatattggcaaaaccctcgtctctcgtacccagggaaccaagattgcatccgaaggattcaaacatggggt

SEQ ID NO: 114959 - DNA, 183 bp, Glycine max
cagaaagagtccaagaaacaggatgaaggtgtggttgtgaacaagttcaaacccaagaccccttacgttggtagatgcctgctcaacacaaagatcactggggatgatgctccaggagaaacttggcacatggtcttcagcaccgagggagagattccttacagagaaggacaatcaatgggg

SEQ ID NO: 114960 - DNA, 227 bp, Glycine max
atacaaaggttgctgtaggagataagattgcagtagtgctaagtgctaacacctgcagtgaacaatggcctctgcatcagcatctctgctcaagtcttcacttgttcttgacaagtctgagtgggtgaagggacaaacccttcgccaaccttctgcatcagttgtgagatgcaaccccaccaccccatcaggcctcaccatcagagctggtccctatgctgatgagc

SEQ ID NO: 114961 - DNA, 181 bp, Glycine max
atggcatccacacaatgcttcttgcaccaccatgccctcaccactccaaccagagcttcatcacagcgcttagttgtgagcaccaaaccaaaccacattgtttgcaaggcacaaaagcaggttgtccaagagggtgaggacactactaacattgtctctcgcaggttggccctcactgttc

SEQ ID NO: 114962 - DNA, 260 bp, Glycine max
agcagaagcagcaatgaagaagaagatgatggcaagcacggccatctccctcgtcttcgccgcgctcttcctcttctcctccgtccactctttctacctccctggtgtcgctcctcgcgatttccaaattggtgaccccctctttgtcaaagtgaacaagttatcatctaccaagactcaacttccatatgactactacttcttgaagtattgcaaacccaaaacgatattgaacaatgcagaaaatttgggagaggttc

SEQ ID NO: 114963 - DNA, 253 bp, Glycine max
cacaaggcagaaagcaagctcatcctagagttttaaaaatggcagcagcctcctccatggctctctcttccccatccttggctggcaaggccgtgaagctgggcccatcagcccccgaagtcgggagggtcagcatgaggaagaccgtcaccaagcaggcctcctccggaagcccatggtacggcccagaccgcgtcaagtacttgggcccattctctggcgagcccccgtcctacctcactggcgagttccc

SEQ ID NO: 114964 - DNA, 250 bp, Glycine max
caaaggttgctgtaggagataagatattgaagtagtgctaagtgcctaacacctgcagtgaacaatggcctctgcatcagcatctcttctcaagtcttcacttgttcttgacaagtctgagtgggtgaagggacaaacacttcgccaaccttctgctgcatcagttgtgagatgcaaccccaccaccccatcaggcctcaccatcagagctggttcctatgctgatgagctcgttaagaccgcgaaaaca

SEQ ID NO: 114965 - DNA, 249 bp, Glycine max
gtggtgttgttactgctgctcttttctcttttcttttctctttagttctctcttcccctttctttttctttttcttcttcttctgagcttgtttaagcttttcttccattaacatattatcataatgtgtggtattcttgctgttcttggttgttctgatgactctcgagccaaaagggtccgcgtgcttgagctctctcgcagattgaagcaccgtggccctgactggagtgggctccatcaacatgg

SEQ ID NO: 114966 - DNA, 248 bp, Glycine max
ctaagaaaaaaaaaaacccttagccaacacaaccatcatggccacctctggtattcagcaatcagcattcactggtcaaaatgctctgaagcagctcaatgagttcgtccgcaagaccggtggcgccggcaaaggtcgcactaacatgcgccgcaccgtcaagagtgctcctcagagcatttggtatggccctgaccgtcccaagtacttgggtccattctcggagcagattccatcatacctgaccg

SEQ ID NO: 114967 - DNA, 245 bp, Glycine max
gtgaaattcagatctgctgcttactctaactgttctcgcaaaccatcctgatacacatccggattgatagttcgttgcatgcaaccatagttttattaggattttttcttctttgttttcaattaggtttttttgttgctctccttcaaactccatctttcgaaatcctctctttgcgattgtgttttgatctgcttcctactgcgatagtttctctactgttacatggccatggcggtttccgc

SEQ ID NO: 114968 - DNA, 247 bp, Glycine max
tgaagttatagcgatatcaagtgatgaagcagttgaaactgcaaagcaattagcactccaggaaggcttgctggtgggaatttcttcaggagctgcagctgcagctgctttgaaggttggaaagaggcctgagaatgcaggaaagcttattggggttgtcttcccaacctttggtgaaagatatttgtcaactattcttttccagtcaatacgggaagaatgcgagaaaatgcaacctgagccatga

SEQ ID NO: 114969 - DNA, 246 bp, Glycine max
ctcgagcgagagaacgagccagagtaagaaaggagtgtcattcatggcgattgaggcatggttgatggacgatagcaatgaagatccaaggctttctcaccgtcgcaatcccaacgaatcagtttcattggaccaattagcagaattgggtgtgttatactggaagctcaatccaactatctatgagaacgatcaagagttgaccaagattagacaagataggggatacaactacatggacctgct

SEQ ID NO: 114970 - DNA, 255 bp, Glycine max
cagaaattaagctagagctacatagtttttttcttttctcaccttccttctctcccttcagacaagggacgagaaatcagagagagagagagagagagagagagaaattccaaaaccatgtcgtcccacagtcatctaagtttcgcctttggggttctaggtaacatcgcctccttcgtgtgctttctggcaccactaccgacattttatagagtttgtaagaagatatcaaccgaagggttccaatcaattcca

SEQ ID NO: 114971 - DNA, 260 bp, Glycine max
cacgctacacatggcgcatagagaaactcgacatacgagtgagtatcctacgctcacccgcaagaaaaaaatggcatctcacatcgttggatacccccgtatgggtcccaagagagagctcaagttcgctctcgagtctttctgggatggcaagagcagcgccgaggatttgcagaaggtgtcttctgatctcagggcatccatctggaagcagatggctgatgctgggatcaagtacatccacagcaacactttctctc

SEQ ID NO: 114972 - DNA, 248 bp, Glycine max
tagggttatcatatctccatttccatttcctctctctcagtttccaagaatcttaagctatgggaaagtcttacccaaccgtgagcgctgattaccagaaggccgttgagaaggcgaagaagaagctcagaggcttcatcgctgagaagagatgcgctcctctaatgctccgtttggcatggcactctgctggaacttacgacgtgagctcgaagaccggtggtcccttcggaaccataaagcacccc

SEQ ID NO: 114973 - DNA, 245 bp, Glycine max
agaacaagtagttgagaactaagaaggagaagcaaatggcttcctcaatgatctcttccccagctgttaccactgtcaaccgtgccggtgccggcatggttgctccattcactggcctcaagtccatggctggcttccccaccagaaagaccaacaatgacattacctccattgctagcaacggtggaagagtgcaatgcatgcaggtgtggccaccagttggcacgaagaagtttgagactctt

SEQ ID NO: 114974 - DNA, 245 bp, Glycine max
agtgtttctgtaaccatggcatccaccactctatcccctacaaccccttctcagctatgctcaggaaagagtgggattttcagtccctcacaggcacttcttgtgaagccagtgaagaggcagatgatggggaagagcaagggaatgagaattgcatgccaagccaccagcattcctgctgatagagtccctgacatgggcaaaagacagctcatgaatctgcttcttcttggtgccatttcact

SEQ ID NO: 114975 - DNA, 245 bp, Glycine max
gccaaggtcaccaaggccgctgccaagaagaagtgattgcatttgggcaattttgctagcacatgtgatcatcatcgtggttactcctttatagtagttttatccttgcagagtcttaggtgttttgtttaagttatatttttaagtttctgccgatttcatgtagccgtaactttcaaaactaggttcttgatcggcggtggtcaattttcattgctgtttgtttttgatgagtactgtttttt

SEQ ID NO: 114976 - DNA, 249 bp, Glycine max
gcagttgcagagtttaacgtttggccatcacagaagggggaatggagttttctcaagatgattttgatcggttactgttattcgagcacacgcgaaagagcgctgaagcaaactacgcagagaatcctctagacgctgataatctgaccaagtgggggggagctttgatcgagttgtcatcgttccaagctcctaaggatgccaaggcgatgattgatgatgccctttcaaagctggaggaggctttgc

SEQ ID NO: 114977 - DNA, 250 bp, Glycine max
tgaaatttggaaatggagcatataactccatggataatgggatgctaaggtttgaccatgtacggattccaagaaatcaaatgttaatgagggtttcacaggtaacaagggaaggaaaatatgtacaatccagtgttccacgacaattagtctatggtactatggtatatgtaagacaaacaattgtatctgatgcgtcagttgctttgtcgcgagcagtttgcattgctacaagatatagtgctgttcg

SEQ ID NO: 114978 - DNA, 257 bp, Glycine max
gagactcaggcgctgctgcccttcagtccttcagcaatggtttacgtgaagtcacagaaatcaaaagcctacttcaagagctatcaagtcaagttcaagagaagaagagagggaaaaaccgattaccgtgccaggattcggttgcattaatcaggacaagaacaaatataacaccccgaaatatcgctttgttgttcgtttcagcaacaaagacattgttgcacaaataatatctgctagcattgctggcgatattg

SEQ ID NO: 114979 - DNA, 244 bp, Glycine max
ggttaagaaaaaatgggaaagaagagactacttaggtgttcatccacagaaacaagatggcctaagctatgtagggattcacattccagttggtagagttcaagcagatgatatggatgagttggcgcgattggtggacaaatatgcaactggagagctcaggctcacagtggagcaaaacataataatcccaaatgtggatagcaacaaaattgatgccttgctcaatgagcctctcttgaag

SEQ ID NO: 114980 - DNA, 242 bp, Glycine max
gtggattaaataatagtggatcatactttagtcggttgagctatagtggcttttacactgctattttggagagaggggatgaaatcattgctgcagcatctatcaggttccatggaactaagatagcagagatgccattcattggaactcgccatatatataggcgccaggggatgtgccgccggcttttttccgccattgaatcgaccctttgctctctgaaggttgaaaaactagttatt

SEQ ID NO: 114981 - DNA, 242 bp, Glycine max
agtgaatcttgcagaaaaatacactcttgcaaaccatctattttggggcttgtggggacttatttcgagtcatgtcaatacaattgactttgactacaaggagtatgcgaggcagagatttcagcaatactggttgaagaagcctactttattggactcaccaagtatcgtttcccaagatgggattgccaatggtgtgaaccattgacatggatgcttcttatgtatttagcatgttcagc

SEQ ID NO: 114982 - DNA, 241 bp, Glycine max
gtttggatgagcaatgaatttctgctgctttatcaagttatagtactggctccttttattttggccagctttgtgatttatatgaaaatgattcaatttttgataagtttgagtgttgtctaagtggtgatggattgcgtgtttcaactggctcttacagcaatctattccgtgtgtttggttgtgttcctggaagtactgaggctacaactttggaagccagtaaaaatccaatgagacg

SEQ ID NO: 114983 - DNA, 242 bp, Glycine max
gaacgacccgagcgtggggacgggtttggtgggggccccggcgtgcggcgatgtgatgaagctccagattaaggtcgacgacaaaaccggaaaaatcgtcgatgctcgattcaaaactttcggctgtggctccgccattgcttcttcctccgtcgctactgagtgggtgaagggaacgcaaatggaggaagttctgactataaaaaatactgaaattgcaaagcatctttcacttccaccag

SEQ ID NO: 114984 - DNA, 242 bp, Glycine max
gtacaagtagttgagaactaagaaggagaagcaaatggcttcctcaatgatctcttccccagctgttaccactgtcaaccgtgccggtgccggcatggttgctccattcactggcctcaagtccatggctggcttccccaccaggaagaccaacaatgacattacctccattgctagcaacggtggaagagtgcaatgcatgcaggtgtggccaccagttggcaagatgaagtttgagactc

SEQ ID NO: 114985 - DNA, 250 bp, Glycine max
gacagcttttatccaagttcttggtaatgagaaggccagcaaggaagtattcaacatctcgggagagaagtatgtcacgtttgacggattagcaagagcatgtgctaaggctggtgggttcccagagccagagatcattcactacaaccctaaagattttgactttgggaaaaagaaatcatttccattccgtgaccagcatttctttgcatcaattgagaaagcaaagagagtgcttgggtgggaactg

SEQ ID NO: 114986 - DNA, 264 bp, Glycine max
cggttcgagtcgaggtatccctagagccacatccaagagaattggaggatccttgacttcttctctcactttccagaaagccttcacatgttcacctttttatttgatgatttgggtgttccacaagattacaggcatatggatggttttggagttaacacatatacgctgatcaacaaggctgggaaagcagtgtatgtgaaatttcactggaagaccactagtggtataaagtgtctattggaggaagaggccattaaggtg

SEQ ID NO: 114987 - DNA, 252 bp, Glycine max
gctctttcttcctcttcctcagtagtgcgattttcgattctcttctctgcaactatgcctaaccctaaggtcttcttcgacatgaccatcggcggtcaacctgccggccgcatcgtgatggagctctacgccgacgtgactccgagcaccgccgagaacttccgcgcgctctgcaccggcgagaagggcgccgggcggagcggcaagcccctccactacaaaggctcgtccttccaccgcgtgatcccgaac

SEQ ID NO: 114988 - DNA, 248 bp, Glycine max
gtcaggtaaaggctgaccaagccaatgatgcttagctggtcttttcggatgatcagccacactgggactgagacacggcccggactcccacggggggcagcagtggggaatcttggacaatgggcgaaagccgatccagcaatatcgcgtgagtgaagaagggcaatgccgcttggaaagctctttcgtcgagtgcgcgatcatgacaggactcgaggaagaagccccggctaactccgtgccagcag

SEQ ID NO: 114989 - DNA, 245 bp, Glycine max
ctcctctgtctctctctctccaccattgccatggatccttacaagctccggccatccagcgccttcaattctcccttctggactacaaattctggtgctcctgtttggaacaacaactcctctttaaccgttggagctagaggtccaattctgcttgaggattatcatcttgtggagaagcttgcaaactttgacagggaacgtatcccagaacgtgttgtccatgccaggggagctagtgcaaa

SEQ ID NO: 114990 - DNA, 239 bp, Glycine max
gaaatggcaacaagcgaagaagtggttgcggcggcgcggaggagccgcgccggaggagggttgaagcacaaactggagagaaaatggacgttttggtgcgacaaccaatccaaacccaagcaaggcgctgattggggaacctctcttcgcaaggtctacaccttcgacaccgttgaagagttctggtgtttgtatgatcaggtattcaagcccagcaagttgcaaatcaatgccgattt

SEQ ID NO: 114991 - DNA, 241 bp, Glycine max
tgcaattgaagttgaagtcttgcccttctctcttcaactccaaacacaagacatcatcatccatggctgcctccgtctccactgtcggagctgtcaacagagctcttttgaacctgaatgggtctggacctggggtttcagctcccagttcatccttctttgggagcagcttgaagaaggttattggctcaaggggtcccaacacaaagatttcctctggaagcttcaagattgttgctgt

SEQ ID NO: 114992 - DNA, 239 bp, Glycine max
tgcaatacttgactttgggcttgttacaaaactgactgatgatcaaaagtatggaatgatcgaagcaattgctcatctcatccatcgggattatccagccatagtaaaagactttgttaaacttggtttcattccagatggtgtcaatttggagcctatcttgccagttcttgccaaggtttttgatcaggccttagaaggtggaggggcaaaaaacatcaattttcaggagctggcat

SEQ ID NO: 114993 - DNA, 237 bp, Glycine max
gtcaccatgacttttaagcgcaggaatggaggtcgcaacaaacacggccgtggccacgtcaagttcattcgatgctccaactgcggcaaatgctgtcctaaggacaaggctatcaagaggtttctggtgaggaacattgttgaacaggctgcagtcagagatgttcaggaggcttgtgtctatgaacaatacacgcttccgaagctttatgtgaagatgcagtatgtgtttcctgtg

SEQ ID NO: 114994 - DNA, 243 bp, Glycine max
ctctttcacagcacactcctcccagggtttctccaccaagagggaaatggctcccaaaccgcctagtacgggtctgtttgttggactgaacaagggacatgtcgtcaccaagaaggaattgcccccacgcccctcggatcgtaaggggaaaacaagcaagagggtgcactttgtgaggaacctcataagagaggttgctggttttgcaccctatgaaaagcgtataactgagttgctgaaggt

SEQ ID NO: 114995 - DNA, 240 bp, Glycine max
tttcattgagtatgggttcggtggactgttatccttctcgtacggacgatgctgccgtggtgtctttggattcgctgcctttagggttccgattccgacccaccgacgaggaactcgtcaattactacctgcgacagaagatcaatggtaatggtcgccaggtttgggttatccgagaaattgatgtctgcaaatgggagccttgggatatgcccggtttgtcggtggtacagaccaagg

SEQ ID NO: 114996 - DNA, 248 bp, Glycine max
cgtcgagccgaatcggctcgaggttttacatggttggcggtattacggaggtcattgcaaaggccgagaaaattgctaagagttctgcagcgtcttaatcacacacagccctgttctcattttaatcccttttttttttgtaattgctaaatttaataatttaggaactcttggcaatgccaaacaacaaaattttccattttttgggtatgaaaatgtatcaggttattccttccttccattttaat

SEQ ID NO: 114997 - DNA, 267 bp, Glycine max
acttcggctcgacgctagcatgggcatggagaactgtttacgagtgaccacagtaggcacagccacaccccaatgcctttctccattctttccatcttcaagggataagcttgtcttcccaactcacagaggtttcaagaaatccttgcaaaactcaacactgtcatgcccttctctttactcaaccggtgctgcctatagaaagtcccgttttgtttgcaatgctcgtgaagcagtaaatgaagttaaagtggtagctgactcaag

SEQ ID NO: 114998 - DNA, 241 bp, Glycine max
atagacatggccaccgtcacttctgcagccgttgctattccctcattcactggcctcaaggcaagcgcaggcaaagtgagtgccgcagttaaagtctcagctccccaagccacaaggttgggcatcaaggcttcgctgaaagacgttggagtcgctgttgtggccactgccgcgagtgcagtgctggctagcaacgccatggccattgaagtgtcgctgggtggtgatgacgggtctctgg

SEQ ID NO: 114999 - DNA, 243 bp, Glycine max
gttctgcaatgaactctcccctcgccaaatcgctcttcgcaatcgacggcgttactcgcgttttctttggatctgatttcgttaccgttacgaaatcggaagaggctgcgtgggaattcctcaagcctgaagtcttcgccgccattatggatttctactcctccgctcagcctctctttttagattctcaagccgccgcggccatggatacagctattcacgaagatgattctgaaacagttg

SEQ ID NO: 115000 - DNA, 241 bp, Glycine max
gttcggaatcctgtctttcgttgataaggatcagttggagcctggttgtgctattttgatgcataataaggttctttctgttgttgggcttcttcaagatgaagttgatccaatggtctctgtcatgaaggttgagaaggctcctctggaatcttatgctgacattggtggtttagatgcccaaatacaggaaattaaagaagcagttgagctacccctgacgcatcctgaactatatgaa

SEQ ID NO: 115001 - DNA, 239 bp, Glycine max
gggaagaccttgttagccaaggctattgctggtgaagctggtgttccatttttctctatatcaggttctgagtttgttgagatgtttgttggtgttggtgcttctcgtgttcgtgatttgttcaagaaggcgaaagagaatgccccttgcattgtctttgttgatgaaattgatgctgttggaagacaaagagggactggaattggtggagggaatgatgaaagagagcagaccctcaa

SEQ ID NO: 115002 - DNA, 241 bp, Glycine max
ctaacagccaaagcatggcttctctctcttgctccgccaacgaccttgccccactcttcaacgacaccgccgccgccaactacctctgcgcccaattcgattccatttctagaaagctcaacgtaacaacctacgccgtcgacaacacctaccttctgttttcagcgtatcttgtcttcgccatgcagctcggcttcgccatgctctgcgccggctccgtcagagccaaaaacaccatgaa

SEQ ID NO: 115003 - DNA, 238 bp, Glycine max
taacagagctcttttgaacctgaatggttctggagctggagcttcagctcccagttcagccttctttgggaccagcttgaagaaggttattgcctcaagggtagccaacagcaaggtttccggtggaagcttcaagattgttgctgtagaagagaagaaagagattgaagagacccagcagaccgacaaggacagatggaagggtcttgcctatgatatctcagacgaccaacaagac

SEQ ID NO: 115004 - DNA, 243 bp, Glycine max
ctgctctaaccatttccaaggtgttgctctcaatttgttccctgattgacggacccaaatcctgatgatcctttggtccccgaaattgcacacatgtacaagacagacaggaacaagtacgagtcaactgcaagaagctggacccagaaatatgccatgggctaattgacatagagaagagagcgatttttactttcagtgtttaggccaaacagccttgtatgaatatttgtggtcttcgat

SEQ ID NO: 115005 - DNA, 242 bp, Glycine max
gagaagtgagatacactaagttatcctcataaatacactctaattaggtggcaagataagtgtctaaccttagtaacattgccacatattgtgttcattttggaattgtgccactaaaattctattcaattcatctatggctgcctcttcttatgctatgcaatcaatcctggcaaaccctttgatccgcatttccagcgggtctagggtgaaccaatttggcgttcctgctttgcacatga

SEQ ID NO: 115006 - DNA, 245 bp, Glycine max
ggaaagtgatgcccttgcaactcttattctaaataaacttcgtgctggaatcaaggtatgtgccatcaaagctcctggttttggtgaaaaccgtaaatctggtctccaggatcttgctgttcttacaggatgtcaacttatcaccgaagagcttggtttgaatcttgaaaaagtagacctggacttatttggctcttgcaagaagataacaatttctaaagatgacactgtcatccttgatggag

SEQ ID NO: 115007 - DNA, 242 bp, Glycine max
cgagaatcacctggttttggtgaatctgaagaataagggtattgatggctccagagttgagaaggtgttggaagcagttcatattgcagctaataaaaacactgttcctggagatgtgtctgccatggttcctggtggcatcaggatgggaacccctgctcttacttctagaggatttgttgaggaggattttgtcaaggtagcagagttttttgatgcagcagtgaagatagctgtgaaga

SEQ ID NO: 115008 - DNA, 241 bp, Glycine max
tgcaattgaagttgaagtcttgcccttctctcttcaactccaaacacaagacatcatcatccatggctgcctccgtctcaactgtcggagctgtcaacagagctcttttgaacctgaatgggtctggacctggggtttcagctcccagttcatccttctttgggagcagcttgaagaaggttattggctcaagggtccccaacacaaagatttcctctggaagcttcaagattgttgctgt

SEQ ID NO: 115009 - DNA, 239 bp, Glycine max
gttaaaagccttagccttccctacaactccaaacagaaagacatcatcatccatggctgcctccgtctccactgtcggagctgtcaacagagctcttttgaacctgaatggttctggagctggagcttcagctcccagttcagccttctttgggaccagcttgaagaaggttattgcctcaagggtccccaacagcaaggtttccggtggaagcttcaagattgttgctgtagaagaga

SEQ ID NO: 115010 - DNA, 238 bp, Glycine max
gtttcttacaagcctctactatactgcttcaccttctgctctagaaaattcagtgctgaaacatggcttcggctactctctctgtaaccaaaccagcccttcaggcaaatgggaaaggcttctctgaattctctggcctccgaagctcatcaggcttccttcccttttctagaaaatcttcagaggatttccattctgtcattgccttccagacctatgcagttaggaacagtggagg

SEQ ID NO: 115011 - DNA, 237 bp, Glycine max
agagcgatggccctcacagctttgcggtcacgcgtgccgtgccggggccatcctgtggagatgttcttcgagtgatgcagcaccagcccgagctcatgttcgagacactcaagcaccgcgcgcaggagtatgtcagccacgacaacgcagcagcgcttctggctgctggccttgctcgcacctttgacagaatgccttatctgctgtctctgtcttcctttgtggctgacgatgttg

SEQ ID NO: 115012 - DNA, 237 bp, Glycine max
atattaattaacattgcagtctcaggtgctgctggaatgattgcaaatcatctacttttcaagcttgcatctggtgaagtttttggcccagatcaacctattgctctcaaattattgggatcagaaaggtcaatccaagctcttgaaggtgttgcaatggaattggaggactctttgtttcctttgttgagggaggttagtattggtatcgatccttatgaagtgttccaagatgca

SEQ ID NO: 115013 - DNA, 238 bp, Glycine max
attcattttaatcctaattctgcacttcttgatcattcgatttttctcctcaagatgcagatattcgtaaaaactttgaccggcaagaccatcacccttgaggtggaatcctccgacaccattgacaacgtaaaagctaagattcaagacaaggaagggatcccacctgaccagcagagacttatctttgcgggtaaacaacttgaggatggtcgcacccttgccgattacaacatcc

SEQ ID NO: 115014 - DNA, 243 bp, Glycine max
ggcagttagagacagagagagagagaaacaaaaccctaattggtgagtggcgaaaatggcgcaccggcggcggcagcagcagcaacaggagcagcagtaatcgagcaagtgcagtgcttcgggcggaagaagacagcggtggcagtgacctactgcaagcgtggtcgaggcctcatcaagatcaatggctgcccgatcgagctggtggagccggagatcctccgtttcaaggccttcgagcca

SEQ ID NO: 115015 - DNA, 270 bp, Glycine max
cttccttgatgatgaacaaatagaaagtggatgggttctcagctgtgttgctctacctaggtcagacgttgtcattgagacacacaaggatggagagatcgaatgatcgatatatatcataatgtaatcttgtccattgctcttctaatgccatctatctatgtcgtgttttgattttgttagagtgatttggcattggctagttagctagctgaaatcatcgcgagtttattaattacttttgtcatgtttgtggaaacaagtgaaatt

SEQ ID NO: 115016 - DNA, 267 bp, Glycine max
atggtgagataatcaatggtcgttatgcaatgttgggtgcagttggtgcaatagcacctgaaattctaggcaaggctggtctgatccctcaggagacagcactcccatggttcagaaccggtgtgttcccacctgcaggaacctacaactactgggcagactcctacacactgttcgtgtttgagatggcactgatgggatttgcagagcacagaagattccaagactgggccagaccaggctctatgggcaaacaatacttcctag

SEQ ID NO: 115017 - DNA, 265 bp, Glycine max
aggaggaggccgccgtgaaggtggtggaggtggctataaccgcaacggtggaggtggtggatatggtggtggtggaggttatggtggtggtggaggtcatggtggcggtggaggttatggtggcggtgggagagaccgtggatatggtggtgacggcgggtcccgctactcgagaggaggcggtgcttcggatggaggaagctggaggaattaggattaggttttttagtgggtgaaaaaatggggggaggttctgttggagtaa

SEQ ID NO: 115018 - DNA, 266 bp, Glycine max
taagatctggctcatattgaggaacacatgaaagcattcaaggccaaaggtggtgatgtgtcttggcacatccacgatgagagatccctacttgctctgcagggtcctcttgctgcccccgttcttcaacacctgacaaaagaggatttgagcaagctctactttggggagttatgtgtgttggacatcaatggctcagagtgttttcttaccaggacagggtatactggggaagatggatttgagatctcagttccttcagagca

SEQ ID NO: 115019 - DNA, 266 bp, Glycine max
atttccgttaacgctctccaatacaaaataaccactcactgaatattcggtcgaagatgtccgccgccgaagaagctaaagttcccgccgtcgaaaagccggtggaggaggtgaaggcgccgaagcttgccaaggagaagaaacctaaggctccgaaggaaaagaagccgaaacaggccaaaactgcttctcattctcaatatctcaagatgattaaggacgctttgattgctctgaacgagaaaggaggatcgagtccatatgcg

SEQ ID NO: 115020 - DNA, 265 bp, Glycine max
gtgataaatatgcacgccccgttcttggtggttcagccttaccttaccctcgcagaggaagaaccggaagaggaaaaactagaaaagatcccaacagtgagaagccgagcgattttgtttaccttccaagagatgaagcatttggtcacttgaagtcatcagattttctcgcttatggaatcaaatctgtatcccaagatgtcttgcctgtcttgactgatgcattcgatggaaatattttgagccttgagtttgatattttgct

SEQ ID NO: 115021 - DNA, 267 bp, Glycine max
ccaattcttattctttttctctctttctctctgcttgcggtgcttcacaagccaaatctaacttgtctctgttttctccgatctagtactactatcaatggccggaaaaggagatggtcctgctatcggaatcgatctcggcaccacctactcctgcgtcggagtgtcgcagcacgaccgtgtcgaaatcatcagcaatgaccagggtaacagaatcacgccgtcttacgtcgctttcactgattccgagcgattgatcggtgacgc

SEQ ID NO: 115022 - DNA, 265 bp, Glycine max
tagacatggccaccgtcacttctgcagccgatgctattccctcattcactggcctcaaggcaagcgcaggcaaagtgagtgccgcagttaaagtctcagctccccaagccacaaggttgggcatcaaggcttcgctgaaagacgttggagtcgctgttgtggacactgccgcgagtgcagtgctggctagcaacgccatggttattgaagtgttgctgggtggtgatgacgggtctctggctttcgttcccaacaatttctccgt

SEQ ID NO: 115023 - DNA, 265 bp, Glycine max
  unsure (1)..(265): unsure at all n locations
ttcgagcgattcggctcgaggcttgatggggagcatggtaattacagaacttttgaactagcanaaaaggtctggacagaggttttcttctaccttgctgagaacaatgtcctttttgagggtattcttcttaagcctagcatggttacacctggagctgagtccaaggacaaggccagtcctcagacagttgctgattacaccctcaagctccttcacaggagaattccccctgctgtccctggaattatgtttttgtctggtg

SEQ ID NO: 115024 - DNA, 260 bp, Glycine max
atggcctcgacacaatgctttttgcaccaccacgccctcaccactccagctagagcttcaacacagcgcctagttgtgagcaccaaaccaaaccacattgtttgcaaggcagcacagaagcaggttactgtccaagagggtgaggacactactactggccttgtctctcgcaggttggccctcactgtgctcattggtgctgctgctgttggctctaaggtggcactgctgatgcagcctatggagaagctgccaatgtg

SEQ ID NO: 115025 - DNA, 266 bp, Glycine max
ttcttatttttttcctctcttcactttcactctctctctctctctcagccatcatcatgggagcagtgattctcccagatctcggcaccgagattttgattccggtctgcgccatcattggaatagggttcgccctcttccagtgggtcctcgtctccaaggttaagctctccgctgccagagacgcttcccctaacgccgccggcaaaaatggctacgacgattacctcatcgaagaagaggaaggcctcaacgatcacaacgtt

SEQ ID NO: 115026 - DNA, 253 bp, Glycine max
gtgcccgtttcgccaaatggcgtactgttgtgagcatccccaacggtccctctgctctggcagttaaggaagcagcctggggtctggctcgctatgccgcaattgctcaggacaatggattggtcccaattgtggagccagagatcttgcttgatggggagcatggtattgacagaacttttgaagtagcaaaaaaggtctgggcagaggttttcttctaccttgctgagaacaatgtcctttttgagggtat

SEQ ID NO: 115027 - DNA, 260 bp, Glycine max
aaagagtcaatatgctgtcagaggtgaattataccttcgagcttctgaacttcagaaagagggcaaaaagattatctttactaatgttggcaacccgcatgcattgggacagaaaccactgagcttccctcgccaggttgttgctttgtgccaagctccattcctacttgatgatcctaatgttggactgctattccctgctgatgcaattgcaagagctaaacactatctttcattgacctcgggtggttaaggtgctt

SEQ ID NO: 115028 - DNA, 267 bp, Glycine max
taggctacatattcaacacaatctgtatcaacaaatgagccagttgtatctgtagattggctttatgataacctgaaggagccagatatcaaggtactagatgcttcgtggtacatgccggatgagcagaggaatccaattcaagaatatcaggttgctcacattcctggtgcccttttctttgacgtagatggaatagcagatcggactacaaaattaccacatatgctgccatcagaggaagcttttgctgctgctgtttctgct

SEQ ID NO: 115029 - DNA, 267 bp, Glycine max
cttatctgcacttatggtaacatatccttcaacccacggtgattatgaggaaggtattgacgaaatttgcaatattattcatgataatggaggccaagtatatatggatggtgccaacatgaatgctcaggtgggactcacaagcccgggttggataggagcagatgtttgccatctcaatctccacaagacattttgcatccctcatggaggaggtggccctggcatgggacctattggtgtaaagaaacacttggcaccattttt

SEQ ID NO: 115030 - DNA, 186 bp, Glycine max
catagactcacttccaagttccaagctttggccattttttcccactgtttattggtgagttcctgtgtgtcattgtgttcaaacccttttgtgagaggcaaaagccaaaaagggtgacatttagtattaatttcttttttgttctgtgcctgtgattctgcttattcttgttagctttttccacac

SEQ ID NO: 115031 - DNA, 261 bp, Glycine max
ggctgcctcactacaagctgcagctaccttcatgcaacccaccaaggttggcatagcctctcgcaacctcaaatctacacaatgcatttctaaggcttttggcttggaacctgctgcagctaaactcacttgctcccttcagcctgatctcaaagaatttgctcaaaaatgtgtcgacgctaccaaaattgcaggattcgcccttgccacctctgctctcgttgtttctggagcaagtgcagaaggtgttccaaaaaggct

SEQ ID NO: 115032 - DNA, 261 bp, Glycine max
ggctactgctgttttacccgtttgtctgtctccacagatactattctctatcaacagggacaaaatgtaatatgtgtttatgtagctattggtcaaaaagcatcttctgtggctcaagtggtgaataccttacaagaaagaggagcaatggaatacactattgtagtagctgaaacagcggattctccagctacattacaatacctcgccccttatacaggagcagctctgactgaatattttatgtaccgtgaacgtcac

SEQ ID NO: 115033 - DNA, 192 bp, Glycine max
cttgtgcagtaccctggcactgagggagaggttttggactatggggagtttgtgaagaaggctcatgctcatgaggtgaaggttgttatggcaagtgatttgttggcactgactgtgttgaagcctcctggtgagttcggggcagatattgttgttggatcagctcagaggtttggggtgccaatggggtat

SEQ ID NO: 115034 - DNA, 264 bp, Glycine max
ttggtggccacagcaacaataacaatggcagcctcactacaagctgcagctaccttcatgcaacccaccaaggtgggcatggccactcgcaacctcaaatctacacaatgcatttctaaggcttttggcttggaacccgctgcagctaaactcatttgctcccttaagcccgatctcaaagattttgctcaaaaatgtgtcgacgccaccaaaattgcaggattcgcccttgccacctcagctctcgttgtttctggagcgagt

SEQ ID NO: 115035 - DNA, 257 bp, Glycine max
  unsure (1)..(257): unsure at all n locations
gatttgagcaagctctactttggggagttccgtgtgttggacatcaatggctcagagtgttttcttaccaggacagggtatactggggaagatggatttgagatctcagttccttcagagcatggagtagatcttgccanagcaatactggaaaaatctgaagggaaggtaagattgacaggattgggagctagagatagtctgcgacttgaagctggattgtgcttatatggaaatgacatggaacagcacattac

SEQ ID NO: 115036 - DNA, 263 bp, Glycine max
ataccatagaagaagcacaaagagaagcattagcactaggagcagcaacaactagtctcagctgaaatggcctcttcagtgatggcatctgtggccctcaaacctgcccctttcactgttgagaagtcctcagtgagaggccttccctctctctcaaggaactcttcttcattcagagttgtggccagtggcaagaagatcaagactgacaaaccttatggaattaatggtggcatggctttgagggatggaactgatgcatc

SEQ ID NO: 115037 - DNA, 264 bp, Glycine max
ctctgctctggcagttaaggaagctgcctggggtctggctcgctatgcagcaattgctcaggacaatggattggtcccaattgtggaaccagagatcttgcttgatggggagcatggtattgacagaacttttgaagtagcaaaaaaggtctgggcagaggttttcttctaccttgctgagaacaatgtcctttttgagggtattcttcttaagcctagcatggttacacctggagctgagtccaaggacaaggccagtcctca

SEQ ID NO: 115038 - DNA, 262 bp, Glycine max
  unsure (1)..(262): unsure at all n locations
gtttggcttcaattgggctagagaacactgaagctaaccgccaggcataccgtaccctccttgtgacagttccaggacttggtcagtacatctctggtgccattctctttgaggaaactctctaccaatccacaactgatggcaggaagattgtcgacgtgctcctcgagcaaaacattgttcccggtattanagtcgacaagggtttggtaccccttgctggttccaacgacgagtcatggtgccaagtcttgatggtctg

SEQ ID NO: 115039 - DNA, 266 bp, Glycine max
atggcagctgcttctcctatggcaagccaactcaagtccaccttcactaaaactcttgtagctcccaagggcctctctgcctcttcaccactccacctcctgccttctaagaggcaatttagcttcactgttagggccatccaatcagaaaagccaacctatcaagtgattcaaccaatcaacggtgatcccttcattggaagccttgaaaccccagttacatccagccccttgattgcatggtacttatcgaacctccccgcata

SEQ ID NO: 115040 - DNA, 266 bp, Glycine max
ggctgccactgctgctgcaggcatagcttccttgttttcttcttctattaacagtgtcaaatgtcttcgttcctccaagaactgctccataatagaccctctcataacaacagtgccctcaaaccgtggcatgtttgggtcacacttggtggaacctttgtccattaattcgcacaagttgtggggacctagaatttctgctgctgttgcacaagaagaggctgttgttgttgtggatgatgatggtgctggtttagttgaagaag

SEQ ID NO: 115041 - DNA, 263 bp, Glycine max
accacacattcctacacaggagaccagaggcttttggatgcttcacaccgtgacttgagaagagccagggctgcagcactgaacattgtcccaaccagcactggagctgccaaggctgtgtctctagtgttgccacagctgaagggcaagcttaatggaatagcgctccgtgtgcctacacccaatgtttcagttgttgaccttgttgtgaatgttgagaagaagggtcttactgctgaagatgtgaatgcagcattcagaaa

SEQ ID NO: 115042 - DNA, 265 bp, Glycine max
  unsure (1)..(265): unsure at all n locations
aaggcgcagagcgtgatccattgacgaagatggtgcagcgtctcacctaccgcaagaggcacagctatgccaccaaatccaaccaacacagggtcgtcaaaacccctggtgggaagctcgtttatcagaccaccaagaagagggccagcggngccaagtgccccgtcactggcaagaggattcaggggattccacacttgaggcctgcagagtacaagagatcaaggttacccagaaaccgtaggactgtcaaccgtgcatatgg

SEQ ID NO: 115043 - DNA, 258 bp, Glycine max
ccagaagggaatggagaaaatcatgaggacagtattaatggctttgttgatggctttcacgatgcttatatctaagggtgaaggccaattagtagagaatttctatagttcatcttgcccaaacgtggaatccatggtgaaacaagcagtgactaacaagtttacagagaccatcacaactggacaagcaactctgcgtctctttttccatgattgctttgttgagggctgtgatgcctccgtgataatctcctcgcc

SEQ ID NO: 115044 - DNA, 261 bp, Glycine max
agtaagttcatttgactctcacaaaccttgcatccatccacacatggctggcatgaactctagcgtattggcctgtagctatgccatatctggtgcagcatgctccgagctcaatgggaaggtcacttccgtggcctctgttgcatcctctggctacaagttgccattgatcaaatgtgaggccagagttcccaaagccaaagaatctgaaggaaggagaggtgcccttgttctcttggcagctacccttttcatctctgc

SEQ ID NO: 115045 - DNA, 259 bp, Glycine max
gtttccatgtgctacttctgatgctcaatctatgcaaactacatctataggtcaatccgaaaaggttcactcactttcatatgctgatccaaagcaaccaggtcctgagagtgatgaagagataagaagagtgccagagattggaggtgaaagtgccggaacttcggcctctcagccagatgccggttcaaatgctggtacagagcgtgttcaggggacaggggagggtcagaagaagagagggagaagcccagctgat

SEQ ID NO: 115046 - DNA, 246 bp, Glycine max
  unsure (1)..(246): unsure at all n locations
aaggctcggggagcttgctcttctagagcagccttttattaaggatgacagtgttttagtgaaagacttggttaagcaaactgtagctgcacttggagagcacattaaagtgcgccgttttgttcggtttacgcttggggagacatctgaaaaagaaacaacagtaccagcataactttaggataagtaccatcaagcatgaatggtaactggggaattcatatgcatgttccanaagcatatatg

SEQ ID NO: 115047 - DNA, 260 bp, Glycine max
aaagcgactactgggtgttacgacccttgatgttgtgagggcaaatacttttgtggcagaggtacttggagttgatccaagagaggttgatgttccagtggttggaggtcatgctggtgtcacaattttgcctcttttgtcacaggttaagcctcgcagtagcttcactgcagaagaaactgaatacctgacaaatcgcatccaaaatggtggaactgaagttgttgaggcaaaagctgggacaggttctgcaacactat

SEQ ID NO: 115048 - DNA, 210 bp, Glycine max
gtggtttcagtgagtgatcggtgttcacttgatccttcataagtcgtcatcatcatcatcatcatcaccgttgattgaagaagatgccgatcagaaacatcgccatcggaaggcctgaagaggctactcaccccgacacgttgaaggcggggttggctgagttcatctccaccttgatcttcgtgttcgccggttcaggttccggcatcg

SEQ ID NO: 115049 - DNA, 254 bp, Glycine max
gagatagagagagagagaaagaaattaagaaaaaatggcagcctgcactgtctactcaacacaatctctgagcacaaattgctccatctcaaccccatcaaagacacagctgagtttcttccaccaaaagcaggtagttttctggaggaacagcaacaggggcaacagcagcagcagaagaagctatgtgataacatgtgcagcaggtgactcacagacagtggtgattggtcttgctgcagactcagggtgtg

SEQ ID NO: 115050 - DNA, 265 bp, Glycine max
gcaattttctattttcttctctcatggcttcagattccaaaaaggatttccctgctgatgacaaagctggaacagcagagaataaagcatccaaagatgaaacgtcatctaaagattctccagcagcacaaagagctactacagctacttctggacctgcaactggttttccaggcaacccttatgatttctctgcaatgtctggcctgctcaatgatccaagtatcaaggaattggctgaacagatagcaaaagatccatcatt

SEQ ID NO: 115051 - DNA, 265 bp, Glycine max
aaaacaaatacaatcaaagaatcttctttgctttctctcctttgcactttccttctcctcgtgattttttgtttgcatcaaagggagaaactgggagacacagaagatgagagagataattagtattcatattggacaagctggaattcagtgacacctctgttggcattgcacacgatgctttcaacaccttcttcagcgagaccggattcggcaagcatgtgccaagggctttatttgttgatttggaacctagtgttattga

SEQ ID NO: 115052 - DNA, 256 bp, Glycine max
gcttgtgctgccttcgtttgcgtttttatcacagaggaattaacatatatatagcaagcatggcagtcacactctacgaccttagctcttcctctgggttgaagaaacttgatgagtaccttctcccacgcagttacatcaccgggtaccaagctacaaaggatgatcttactgtttatgcagctttgccaactgctccatcagatgcatatggacatgtatccaggtggtactagcacattgatgcgttgttgag

SEQ ID NO: 115053 - DNA, 260 bp, Glycine max
aagggcatccccccagatcagcagaggctgatttttgccggtaaacaacttgaggatggaagaacccttgctgattacaacattcagaaggaatccacccttcacttggtgcttcgtttgagaggtggtatgcagattttcgttaaaactttgaccggaaagaccataaccttggaggtggagagttcagataccatagacaatgtgaaagctaagattcaggacaaggaaggtatcccaccagaccaacagaggcttat

SEQ ID NO: 115054 - DNA, 258 bp, Glycine max
  unsure (1)..(258): unsure at all n locations
tgaagcattgcattctgctatttaattccactacgtacacgcacattctcctcaaagacaacaatggcaccaacagccaagactctgacttacctggcccaggagaaaaccctagaatcgagcttcgttcgggacgaggaggagcgtcncaaggttgcctacaacgaattcagcgacgagatcccagtgatttctcttgccggaatcgacgaggtggatggacgcagaagagagattgtgagaaatcgtggaggcttg

SEQ ID NO: 115055 - DNA, 258 bp, Glycine max
ccataaacgggtggtgcctctcttccatctccccagccaaaacctctctcaggaaggccacattacgcccttccgtcttcgcaacccttaacactccttcttctccttcctcttcatcttccttcccctctctcattcaagacaggcctgtttttgctgcccctgcccccatcatcaccccaactgtgagagaggatatggcaaaggaatacgagaaagctattgaagaacttcagaaattgttgagggagaagagtg

SEQ ID NO: 115056 - DNA, 257 bp, Glycine max
  unsure (1)..(257): unsure at all n locations
atatagcccaagccctatacaaccaaaccctaacacacacccatttgattcagtttccatggctagcctcaaggttgcatttttggctgcagtgctctgcatggttgtggtgagtgcacccatggcacatgcagctatcacgtgcgggcaggtgacgaatagcctgatcaattgcatcggttacctccagaacggaggaacgccgccgtcgggatgctgcaacggagtgaagagcctcaatgccgncgcccaagaca

SEQ ID NO: 115057 - DNA, 257 bp, Glycine max
agcaaaagcaagaagaactagtctaagcagaaatggcctcttcagtgatggcatctgtggccctcaaacctgcccctttcactgttgagaagtcctcagttagaggccttccctccctctcaaggaactcctcttcattcagagttgtggccagtggtggcaagaagatcaagactgacaagccttatggaattaatggtggcatggctttgagggaaggagttgatgcatctggcaggaaaggaaagggaaagggc

SEQ ID NO: 115058 - DNA, 256 bp, Glycine max
  unsure (1)..(256): unsure at all n locations
aacgctgccccattccttgaaaagctggtcattgccgatgttgctgggcttgcccctggaactgggacgttgactgttttcacaaatgaaaagggaggtgcaattgatgattcagtaattactaaggtgacggatgaccacatatatttggttgtgaatgctggctgcagggataaagatctggctcatattgaggaacacatgaaagcattcaaggccanaggtggtgatgtgtcttggcacatccacgatgaga

SEQ ID NO: 115059 - DNA, 261 bp, Glycine max
ggaaattttggagaggttggtcctttggatgctaatttgaagccacgaaatttcacatggttgagaaaagcagatctcttgtttgtggacaacccagttggaaccgggtacagttacgtggaggattccaatctctatgccaaaacagacgaagaggcaaccacagacttgacaacattgttagttgaattattcaacaatgatgcaagtctccaaaagagtcctctgttcattgtggcagagtcttatggtggcaaattt

SEQ ID NO: 115060 - DNA, 263 bp, Glycine max
ctccacaggatgctggaactcactatgcagtcatgagctcctacgagtacctcagcaccggacttcgccagtacttggacaacaaaatggatggattctacattgctccagcttttatggacaagcttgttgttcacatctccaagaacttcatgaccctgcccaacatcaaggttcctctcattcttggtatctggggaggcaagggacaaggaaaatctttccaatgtgagcttgtctttgccaagatgggaatcaacccc

SEQ ID NO: 115061 - DNA, 253 bp, Glycine max
ttccaatatattccattctctctgtgtatttccctacctctcccttcaagatgcagatcttcgtcaagaccctcaccggcaagaccatcacccttgaggtggaaagctctgacaccatcgacaacgtcaaggccaagatccaggacacggaaggaatccccccggaccagcaacgtctcattttcgccggaaagcaacttgaggacggccgtacccttgctgactacaacattcagaaggagagtactcttca

SEQ ID NO: 115062 - DNA, 260 bp, Glycine max
aagaaagaaagaaatggaggagaaagaagagctcaaaaagtctaaggttattaaaatagactctcaaaaatcatgggaacaccacatctcttatgctaccaatcaaaagtaccctattgtagttcatttctctgctttctggtgtgtcccttctttagttatgaatcctttctttcaagaattggcctccacttatgaagatgttttgtttctgacgttggatgtggatgaggttaaggaaattgcctccaagatggaaa

SEQ ID NO: 115063 - DNA, 259 bp, Glycine max
accaacatcaaggttcctctcattcttggtatctggggaggcaagggacaaggaaaatctttccaatgtgagcttgtctttgccaagatgggaatcaaccccatcatgatgagtgctggagagttggaaagtggaaatgcaggagagccagcaaaactgatcaggcagagataccgtgaagccgcagacttgatcaagaagggaaagatgtgtgctctcttcatcaacgatcttgatgcaggagctggtcgtcttggtg

SEQ ID NO: 115064 - DNA, 257 bp, Glycine max
actttgttatcgaacatttctttttgatttcaaaaattttccggaaaaaatttgaatctatttttatatgcgaatcaatcctactacttctggtcctgaggtttctgcgcttgaaaaaaaaaatctgggacgtaacgcccaaataattggtccggtactagatgtagcttttcccccaggtaagatgcctaatatttacaacgctctgatagttaagggtcgagatactgttggtcaacaaattaatgtgacttgtg

SEQ ID NO: 115065 - DNA, 257 bp, Glycine max
tgtttaactagaatttacacaaaaaagcatagctagcatgggcatggagaactgtttacgagtgaccacagtaggcacagccacaccccaatgcctttctccattctttccatcttcaagggataagcttgtcttcccaactcacagaggtttcaagaaatccttgcaaaactcaacactgtcatgcccttctctttactcaaccggtgctgcctatagaaagtcccgttttgtttgcaatgctcgtgaagcagtaa

SEQ ID NO: 115066 - DNA, 256 bp, Glycine max
caaaacacttgcaaactagttttgtttttggaacatatcgcattacattacattagattggtggcaaagcaatggcatcgtcactacaagcagcagctactttcatgcaacccaccaagtttttgcagctaaagtctactcaggccatatctaaggcttttggtttggaacctgctggagttaataaggtcacatgctcccttcaggctgatcttaaggacttggctcacaagtgtgttgatgctaccaaaattgc

SEQ ID NO: 115067 - DNA, 264 bp, Glycine max
aggaatagcaaagtccattggcatatgcaattatggtatcaaaaaactcactaaactcttggaaatagccaccattcctcctgcagtcaatcaggtggaaatgaacccatcttggcagcaagggaaactcagggagttctgcaagcagaaaggaattcatgttagtgcttggtcagctcttggtgcttataagatattttggggctctggagctgtcatggagaatccaatcctccaagacatagcaaaggcaaaagggaagac

SEQ ID NO: 115068 - DNA, 258 bp, Glycine max
tgcaagagttagatcggtaagcctcataaaaatctcgctacccttcttcatctgtttttcctgattatcactgtcactgattgggtgcaggacgaggattgcgtgtacacggtgtacgttcggacgggttcgatcatcaagggaggcaccgattcagtaattggtctgaagctatacgacaagtccggctacggcatatacatcaccaacctcgaggcatggggcgggttaatggatccgggtcacaactactacgag

SEQ ID NO: 115069 - DNA, 255 bp, Glycine max
cttaataccaattttctagggtttatacaattttcgatggcatcttcagatgttgagtaccgttgctttgtcggtgggctcgcttgggccactgacgaccaagctctcgagagagccttctctcagtacggcgaaatcgttgaaacgaagattatcaacgatcgtgagactggaagatccaggggttttggatttgtgaccttcgcctcggaacagtccatgaacgacgccatcgaagggatgaacggccaaaac

SEQ ID NO: 115070 - DNA, 256 bp, Glycine max
ctaacagccaaagcatggcttctctctcttgctccgccaacgaccttgccccactcttcaacgacaccgccgccgccaactacctctgcgcccaattcgattccatttctagaaagctcaacgtaacaacctacgccgtcgacaacacctaccttctgttttcagcgtatcttgtcttcgccatgcagctcggcttcgccatgctctgcgccggctccgtcagagccaaaaacaccatgaacatcatgctcaccaa

SEQ ID NO: 115071 - DNA, 239 bp, Glycine max
ctattagtcttcctggtgacaatggatttgaccctctggggctagctgaggacccagagaacttgaggtggtacgttcaagccgagcttgtgaatggacgttgggccatgttgggtgttgcaggaatgttgcttcctgaggttatcaccaagtttggaatcatcaatgcccctcaatggtatgatgctgggaaatcagagtactttgcatcttcctcaaccctcttcgtgatcgagttc

SEQ ID NO: 115072 - DNA, 263 bp, Glycine max
ttttggttgtgagagtgaaagagaacaatggaaggcataacagagggtgtgaacaacatcaacattaacatctccgattcgtataagaagaatcgcattcaggtctctaacaccaagaagcccctcttcttctacgttaatctcgccaagagatatatgcaacagcatgatgaggtcgagctctcagctctaggaatgggtattgaaatccctctcgtcttttttcctcttttattccttgaatttcgcttgtgttggttcta

SEQ ID NO: 115073 - DNA, 257 bp, Glycine max
ctttcttcctcttcctcagtagtgcgattttcgattctcttctctgcaactatgcctaaccctaaggtcttcttcgacatgaccatcggcggtcaacctgccggccgcatcgtgatggagctctacgccgacgtgactccgagcaccgccgagaacttccgcgcgctctgcaccggcgagaagggcgccaggcggagcggcaagcccctccactacaaaggctcgtccttccaccgcgtgatcccgaacttcatgtg

SEQ ID NO: 115074 - DNA, 256 bp, Glycine max
tgaacagcgtcctctttctctctcttcaacgccaacggcgaccatatactactcccttcctctgttcgctactctcagggcaaacacttggttccatgcgctaccaagaactccaataaccggcccttaaccggcgtcgtatttgaaccctttgaagaggtcaagaaggagctcgaccttgttcccactgtcccacaagcttcccttgctcgccagaagtacaccgatgagtctgaggctactatcaacgaacaga

SEQ ID NO: 115075 - DNA, 251 bp, Glycine max
gtttgatcctggctcagaaggaacgctagctatatgcttaacacatgcaagtcgaacgttgttttcggggagctgggcagaaggaaaagaggctcctagcgtgaaggttgcttgtctcgcccaggaggtgggaacagttgaaaacaaagtggcgaacgggtgcgtaatgcgtgggaatctgccgaacagttcgggccaaatcctgaagaaagctaaaaagcgctgtttgatgagcctgcgtagtattaggt

SEQ ID NO: 115076 - DNA, 250 bp, Glycine max
gcagccttgtgcggcactatgatgagcagctccttcctgaggagaaaagcagtggtcacaagcctgaaggcattccccaatgctaacgcatgtttggtgtaaagggtggacgtggaggtggtgtgactgccatggctagcttcaaggtgaagctgataaccccagagggagagaaagaatttgaatgcccagatgatgtatacattcttgaccaggcagaggaggaagggcttgagcttccctactcatg

SEQ ID NO: 115077 - DNA, 160 bp, Glycine max
tggccaccgtcacttctgcagccgttgctattccctcattcactggcctcaaggcaagcgcaggcaaagtgagtgccgcaattaaagtctcagctccccaagccacaaggttgggcatcaaggcttcgctgaaagacgttggagtcgctgttgtggccac

SEQ ID NO: 115078 - DNA, 255 bp, Glycine max
gatagtgtgggagagagaagagcggaagagaaaatgacgaccaggttcaagaagaacaggaagaagagaggtcacgtcagcgccggacacggccgtatcggaaagcaccgcaagcatcccggaggtcgcggtaacgccggtggcatgcatcaccaccgtatcctcttcgacaagtaccatcctggtttcttcgggaaggtaggcatgcgctacttccacaaacttcgcaacaaattctacaatccgatcatcaac

SEQ ID NO: 115079 - DNA, 255 bp, Glycine max
catagcatctcctttaccaccattctagatatcagagaactttgcagctctcttaggtttttaaaaaacaccacgcaaacagcaagatggccacttccgacagtaacatgctagcaaattatgttccagtttatgtgatgctcccactcggagttgtcaatgttgacaatgtttttgaagacccagatggccttaaagaacagctcttgcagcttcgagctgcgggtgttgacggggttatggttgatgtgtggt

SEQ ID NO: 115080 - DNA, 255 bp, Glycine max
caaagaacctcctggtggtgttgatgagcccaacggaaaaaaggaaaggttgcttaggatatttgagggctggtgtgataatgctgtagatctgatacttgccacagaagaagaagcaattctaagacgagacatatatgacaggataccaacattgacatggggaaagggtcgcgtgactttgcttggtgattccgtccatgccatgcagccaaatatgggccaaggagggtgcatggctattgaggacagtta

SEQ ID NO: 115081 - DNA, 254 bp, Glycine max
ctctctcttctttttactctctctctgtctctctctacgctttctcgttcgagatccctcaagggatccactaactgaaggagaaatggggttgacattcaccaagcttttcagccggcttttcgccaagaaggaaatgcgaattctgatggtgggtctcgatgcagctggtaagaccaccatcctgtacaagctcaaacttggagagatcgttaccacaattcccaccattgggttcaatgtggagactgtgg

SEQ ID NO: 115082 - DNA, 252 bp, Glycine max
gaaaatcttcagaggatttccattctgtcattgccttccagacctatgcagttggaagcagtggaggatacaagaagggtgtgacagaagcaaaactgaaggttgccataaacggatttggaaggattggaaggaacttcttgaggtgctggcacggtcgcaaagactcccctcttgatgtcattgccatcaacgacaccggtggcgtgaaacaagcctctcaccttctcaagtacgattcgatcctcggaa

SEQ ID NO: 115083 - DNA, 254 bp, Glycine max
aattggcatagatgggttgttagtgcttttctacttgttgcatgggcttgaattcttgacactggagagatatgtttctgtatgggtggaaagaccagtgattttctgagaaatgattatttatcgttggatatgccaatagacagtgatacgttccgtgtgcctcctggttacaacgctccccaacaggtgcatataacacaaggagatcacgtagggaaaggtgttatcatctcttggattagcccacatga

SEQ ID NO: 115084 - DNA, 246 bp, Glycine max
gaccctgcccaacatcaaggttcccctcattcttggtatctggggaggcaagggacaaggaaaatctttccaatgtgagcttgtctttgccaagatgggaatcaaccccatcatgatgagtgctggagagttggaaagtggaaatgcaggagagccagcaaaactgatcaggcagagataccgtgaagccgcagacttgatcaagaagggaaagatgtgtgctctcttcatcaacgatcttgatgc

SEQ ID NO: 115085 - DNA, 251 bp, Glycine max
tggaagagtgcaatgcatgcaggtgtggccaccagttggcaagaagaagtttgagactctttcctacctgccagaccttgatgatgcacaattggcaaaggaagtagaataccttcttaggaagggatggattccttgcttggaattcgagttggagcacggtttcgtgtaccgtgagcacaacaggtcaccaggatactacgatggacgctactggaccatgtggaagctgcctatgtttggttgcactg

SEQ ID NO: 115086 - DNA, 250 bp, Glycine max
ctggtcacttgtactctagcaaagaaagagggttccgcagatggtacaatcctccttggttctctgaggctattccatctgccccttatgatcctcttgttttaagacacgcctttgagcaggcagtcataaaaaggttgatgactgatgtgccttttggtgttctactctctggaggtttggactcttctttggttgcatccatcacttctcgttacttggccaacacaaaggctgctgagcagtgggg

SEQ ID NO: 115087 - DNA, 258 bp, Glycine max
ctcttctatagagacacacggagagagtctcagtgcaatagacacccttcaatggctaccactaaagtttacattgtttactagtctacgtacggacatgttgataagttagctgaagagattatacagggagctggttccgttgaaggtgtggaagcaaagctatggcaggtacctgaaacactttctgaagaggtccttgggaagatgggtgcacctccaaagagtgatgcaccgattattacacccaacgagcta

SEQ ID NO: 115088 - DNA, 252 bp, Glycine max
ccaaattcttcggccgtgcggcctcatgtccttcatttccaacgttccagaacctcaaagacccgcgctgtttcagtcgctgctcttcgaagcgtgcgggagaacggtgaaccccgtgaacggcgccgtgggacttctctggaccgggaactggcacgtttgccaggccgcggtggagacggtgctccgcggtggcacgctgaggcccatgccggagctcatgggcctcgacgctcccgccgccgcggccac

SEQ ID NO: 115089 - DNA, 253 bp, Glycine max
atagaagaagcagaaagagaagcattagcaaaagcaagaagaactagtctaagcagaaatggcctcttcagtgatggcatctgtggccctcaaacctgcccctttcactgttgagaagtcctcagttagaggccttccctccctctcaaggaactcctcttcattcagagttgtggccagtggtggcaagaagatcaagactgacaagccttatggaattaatggtggcatggctttgagggacggagttgat

SEQ ID NO: 115090 - DNA, 251 bp, Glycine max
tattggtcaaaaagcatcttctgtggctcaagtggtgaataccttacaagaaagaggagcaatggaatacactattgtagtagctgaaacagcggattctccagctacattacaatacctcgccccttatacaggagcagctctggctgaatattttatgtaccgtgaacgtcacactttaatcatttatgacgatctctccaaacaagcacaggcttatcgccaaatgtctcttctattacgaagaccac

SEQ ID NO: 115091 - DNA, 92 bp, Glycine max
gtaaacttctgcaacaaccatggttgcgatggcagcagcaacagcatcctcccagttgattttctcaaagcctcgttcaccctcgcgtctct

SEQ ID NO: 115092 - DNA, 253 bp, Glycine max
aagttacaagtaaagtaaattaagaagatcattaatggcttctcttgcaaccttagctgctgttcaaccagctgcgctcaatggccttgctggaagttccctctctggaactaagctctctttcaagccctctcgccacactgtcaaatccaagaacttcaggagtggtgccgtggtagcaaagtatggtgacaagagtgtgtactttgatttggaggatctgggcaacactacggggcagtgggacttgtat

SEQ ID NO: 115093 - DNA, 252 bp, Glycine max
gttagatgagcctacaaatcaccttgatcttgacaccattgagtggcttgaagactatcttaaccagcaggatgttccaatggttatcatatcccatgatcgagcttttcttgatcagctgtgtacaaaaattgtggaaactgacatgggtgtgtccaggacgtttgaggggaattactctcagtatgtaatttcaaaagcagcatggattgaagcacagtatgctgcatgggagaagcagcagaaagaaat

SEQ ID NO: 115094 - DNA, 253 bp, Glycine max
caaagtttcttcctttctctgctctttgccttctctgacacatttggtgccttgtagagcgtgttttggcaggaaggtggtatggcgaaggacgttgaggttgctgagcgtggctccttctctgggaaggactaccaggaccctccaccagcaccactcattgatgctgaggagctcacaaagtggtccttttacagggctctcattgctgaattcattgccactttgctcttcctctacattactgtgctca

SEQ ID NO: 115095 - DNA, 251 bp, Glycine max
gtctctctctcactgtccggttctccgatcgccgtctttgccctgcccattcctgatcaatatgtctcgaagatatgatagccgtactacaatcttctcccctgaaggacgtctttaccaagtggaatatgctatggaggccattgggaatgctggtactgcaatagggatcttgtcaaaagatggggtagttctggttggtgagaagaaagtcacatccaagctgctgcaaacctcaacttccaccgaga

SEQ ID NO: 115096 - DNA, 252 bp, Glycine max
tttttcacaccaccaagccaacagaagatgtttctccacattgttttcctcctttcccttctctcatccacttcccatgccactgtccaagacttctgtgtggcagaccttaagggtgcagacaccccttcaggctacccctgcaagccacctgcaaatgtaacttcagatgactttgtgtacacaggcttagctgaagctgcaaatgtcacaaacataatcaatgctgctgtgaccccagcttttgttgct

SEQ ID NO: 115097 - DNA, 251 bp, Glycine max
tgattggtcagacaagtgttatgctccggtgactccttccttcgccacccccactcaaattcaaccatggcgttgtacgtgctctcgcgtcgtttatcagctggatccaactcaaccacgctcctcgccttgcgttttgtttcctctaccagatcctactcctcttccttcagggaagaaagagatacctttggagccattcaagttccctccgagaaattatggggagcacaaactcaaagatcgttgca

SEQ ID NO: 115098 - DNA, 249 bp, Glycine max
gttgcgtcgggagtgttgttcgtttagcaatggagagtatgtaaaaacaggtctggctgaattagagcagtggtgcatcgaggcaacggaggagtatactggctctgcttgggaggaactgaaacatatcaggcaggctgttggattcttggtgatacatcaaaaacccaaaaagtccctgaatgaaattacaaaggagctttgcccagttctcagtatacaacagttatacaggataagtacaatgta

SEQ ID NO: 115099 - DNA, 249 bp, Glycine max
ggaggcgcagagtagagcagcagagaagagagaaaacggcactgcagccgtagaaggaaaaccgaccatggtgcacgtctccttttacaggaactatggtaagacgtttaagacgccccgccgtccgtacgagaaggagcgtctagacgcggagctgaagctggtgggggagtacgggctgcggtgcaagagggagctgtggagggtgcagtacgcgctcagccgcatccgcaacaacgcgcggaatct

SEQ ID NO: 115100 - DNA, 244 bp, Glycine max
catctgggtcgatggggaaaagtttttgacttcagaaccacctgaagtagttcaggcacgaaatgacaattctcatggtacaaactttccagattcccccgagcctatctatggaactcagttcttgccaaggaaattcaaaattgccgttactgtgccaactgataactcggtggatattctcacgaatgatattggtgttgttgttgttatggatgatgatggggagcctcaagggttcaac

SEQ ID NO: 115101 - DNA, 247 bp, Glycine max
gtggctgttaagtatggaggacctatggatgtggccaggcatgttcttaggtcagaagggggcgtgagaggtcttttcaagggcttggttcccactatgggacgtgagatacctggaaatgctataatgtttggtgtatatgaagcattaaagcaaaagtttgcaggaggtactgatacttctggcctaagtagaggttctctgattgttgctggaggcttggctggagcttccttctggttcttgg

SEQ ID NO: 115102 - DNA, 249 bp, Glycine max
aagcaaatatggcatactctcaacttcaaaaggtggaaactagcctgcagatcaaggcttctgctgaacagttctatgatgttttttgcaacaagccacacactattgccaacatttcaccagaaaatattcagtcagttgaagttcataaaggtgaatggggcaaagagggatcaatcgtctcctggaactatttacatgagggaacagtttgtgtagccaagcaagtgcttgaaggcatagacaagg

SEQ ID NO: 115103 - DNA, 247 bp, Glycine max
  unsure (1)..(247): unsure at all n locations
tgcantgtggtgcagaagaactgatgagctagtggatggcccaaatgcttcacacatcacccctggggccttggacaggtgggagcaacgattgagtgatgtttttgaaggtcgaccctatgatatgtatgatgctgccctctcacatactgtctcaaagtacccggttgatattcagcccttcaaggacatgatcgaagggatgagggtggacctgagaaagtcaagatacaataactttgatgag

SEQ ID NO: 115104 - DNA, 249 bp, Glycine max
tcgagcgattcggctcagtcttcatctgcatgcacaaggttgcatagttttacgaaaccaagaattcctgaagaagggtagcatcaacaagcagttctgaaaatggagatcaccaatgtcagtgagtatgaggctattgcaaagcagaagttgccaaagatggcgtttgactactacgcatctggtgcagaggaccagtggactctgcaagagaacagaaatgccttttccagaattttgtttcggcca

SEQ ID NO: 115105 - DNA, 244 bp, Glycine max
tctcaccttaaataagttgagtgttgacaggaacttgattgaggtgtttgctaagggtgttgagaaagagtatgttatccttcttgcagcaagagcttctaggactgaaaatcaagatgccatagatgctgcaattgttggcatgcttgctgacccaaaggaggcacgtagtggtgttagggaggtacatttccttccattcaatcctgtagacaagaggactgcactgacctacattgattct

SEQ ID NO: 115106 - DNA, 245 bp, Glycine max
caactacaaaggttgctgtaggagataagatattgaagtagtgctaagtgcctaacacctgcagtgaacaatggcctctgcatcagcatctcttctcaagtcttcacttgttcttgacaagtctgagtgggtgaagggacaaacacttcgccaaccttctgctgcatcagttgtgagatgcaaccccaccaccccatcaggcctcacaatcagagctggttcctatgctgatgagctcgttaaga

SEQ ID NO: 115107 - DNA, 245 bp, Glycine max
agcccaagccctatacaaccaaaccctaacacacacccatttgattcagtttccatggctagcctcaaggttgcatttttggctgcagtgctctgcatggttgtggtgagtgcacccatggcacatgcagctatcacgtgcgggcaggtgacgaatagcctgatcaattgcatcggttacctccagaacggaggaacgccgccgtcgggatgctgcaacggagtgaagagcctcaatgccgccgc

SEQ ID NO: 115108 - DNA, 175 bp, Glycine max
gcaacttacttgttgatataaacttcagacagagcgagtcgttgtaaagctagccttgttgcagccatggccacccacgcggctctagcttctacaaggatccccactaacaccaagttcccatccaaggcttcacactctttcccaacccaatgcgcctcaaagagacttgagg

SEQ ID NO: 115109 - DNA, 240 bp, Glycine max
caactacaaaggttgctgtaggagataagatattgaagtagtgctaagtgcctaacacctgcagtgaacaatggcctctgcatcagcatctcttctcaagtcttcacttgttcttgacaagtctgagtgggtgaagggacattcacttcgccaaccttctgctgcatcagttgtgagatgcaaccccaccaccccatcaggcctcacaatcagagctggttcctatgctgatgagctcgt

SEQ ID NO: 115110 - DNA, 249 bp, Glycine max
gcgatggcaatggcgcttcgcaggctttcatcttcaattgacaagcctctgcgccctctcttcaatgccggttccctctactacaagtcgtctttgcctgatgaagctgtttacgacaaggagcgacccggagttacatggccgaagcagttgaatgctccacttgaggtcgtggatcctgagattgctgatattattgagcttgagaaagctaggcaatggaaggggctagaattgataccgtcagag

SEQ ID NO: 115111 - DNA, 239 bp, Glycine max
cacctatggaggatggggtgcacatggtggtggtgccttctctgggaaggatcctaccaaggttgataggagtggtgcctacattgtgaggcaagctgcaaagagcattgttgcaaatggacttgctaggagggcaattgtgcaagtttcctatgccattggtgtgcctgagcccttgtctgtgtttgttgacacttatggcactgggaagatccctgacaaggaaatcctcagcattg

SEQ ID NO: 115112 - DNA, 243 bp, Glycine max
aggtcagagtgacatctactacatcaccggtgaaagcaagaaggctgttgagaactccccattcttggagaagttgaagaagaaagggtatgaggttcttttcatggttgatgccattgataaatatgctgttggccagctcaaggaatttgagggcaagaagcttgtctctgccaccaaggagggtctcaaacttgacgagagtgaagatgagaagaagaagcaagaggagttgaaggagaa

SEQ ID NO: 115113 - DNA, 243 bp, Glycine max
gtaatttctgccagcctcaaaaaagacttgctctgcctctgccactctctgagtaggactacactgccatggctgcctcagtctccactgttggagctgtcaacggagctccactgagcttgaacagctctggagctggagcttcagttcccagttcagccttctttggcaccagcttgaagaaggttattgcctcaagggtccctaacgtcaagatttcttctggaagtttcaaaatcgttg

SEQ ID NO: 115114 - DNA, 245 bp, Glycine max
acgaaggatggaatctgggtctagcgaaggagaagaggtgcagcaacgcgtgccgttgagggagagagtggagtggtcagatgttactccggttcctcaaaacgacggccctaaccctgtcgttccgatccagtacactgaagagttttccgaagttatggattactttcgcgccgtttacctcaccgatgaacgctcccctcgcgccctcgctctcacagccgaagccgttcaattcaactccg

SEQ ID NO: 115115 - DNA, 245 bp, Glycine max
tggaaagaatatctatctctcattctctcgtgcctcaacgcttttttaactcctttcgcttttccattccaacctctttcacacttcagatctgtttcttcatcggttgttcaagtaaatggcctttgtcaccactgctgaagtgtgtgatgcgaacccacagttaattttgagtggggagcttcgtgcccttcagccagtttttcagatttatggccgtcgacaggttttctctggacctatag

SEQ ID NO: 115116 - DNA, 245 bp, Glycine max
agcgaatcacacacactctgaacaacgcccaccatgcaggccagtgataggtttaacatcaattcccagcttgagcatctccaagccaaatatgttggaactggccatgccgatttgaacagatttgagtgggcagtgaacattcaacgagatagctatgcatcatatattggacactaccctttactgggattctttgctattgctgaaaatgaatctattggaagagaacgctacagctttat

SEQ ID NO: 115117 - DNA, 246 bp, Glycine max
aatagcgctccgtgtgcctacacccaatgtttcagttgttgaccttgttgtgaatgttgagaagaagggtcttactgctgaagatgtgaatgcagcattcagaaaggcagctgagggtccactgaaaggtgtgttggacgtgtgtgatgttccacttgtgtctatcgacttccgctgctctgatgtatcctctactattgactcctccttgactatggtcatgggagatgacatggttaaggtggt

SEQ ID NO: 115118 - DNA, 247 bp, Glycine max
tggagaaacgagttggtgttctttgttggcgaatactcactcacgcgtttgtagttgcaggctctaatcagatcccaaatgatcaactttgtgcttctcattagtcgccaagggaaggtgagattgacaaaatggtactcaccttattctcagaaagaaaggagtaaggtaatccgtgagctcagtggaatgattctttcccgtgcgcccaagcaatgtaattttgtggaatggcgaggacataaag

SEQ ID NO: 115119 - DNA, 245 bp, Glycine max
cagaaaaacaagtagttgagaactaagaagaaggaaatggcttcctcaatgatctcctccccagctgttaccaccgtcaaccgtgccggtgccggcatggttgctccattcaccggcctcaaatccatggctggcttccccacgaggaagaccaacaatgacattacctccattgctagcaacggtggaagagtacaatgcatacaggtgtggccaccaattggcaagaagaagttcgagactct

SEQ ID NO: 115120 - DNA, 241 bp, Glycine max
cattctcatcctcttctttctctctctaccattgccatggatccctacaagcaccggccatccagcgccttcaattctcccttctggactacaaattctggtgctcctatttggaacaacaactcctctttaaccgttggagctagaggtccaattctgctggaggattatcatcttgtggagaagcttgcaaattttgatagggaacgtatcccagaacgtgttgtccatgccaggggcg

SEQ ID NO: 115121 - DNA, 243 bp, Glycine max
cattgaggcagctgggaagaaaaaggaagaagggaatgccttttttaaggttggcaaatatgaaagggcttcaaagagatatgaaaaggccataaagtttgtcgagtatgattcctcctttagtgatgaggagaaacagcaaactaaggcattgaaaatcacatgcaatctcaacaatgcagcctgtaagttgaagctaaaggactacaaacaggcagagaagatgtgcacaaaggttttaga

SEQ ID NO: 115122 - DNA, 242 bp, Glycine max
ttttgttgttgtggtgtttcatttgtgaaactaacaacaacacaaggccatcatcatggcagctgcttccccaatggcaagccaactcaagtccaccttcactaggactcttgtagctcccaagggcctctctgcctcttcaccacttcacctcgtgccttctagaaggcaatttagcttcactgttaaggccatccaatcagagaagccaacctatcaagtgattcagccaatcaacggtg

SEQ ID NO: 115123 - DNA, 240 bp, Glycine max
tgggcaatgctgacattatacagatttcaggacatgatgggggaacaggagcaagccctataagttccatcaagcatgcaggaggtccttgggaacttgggcttacagaatctcaccagacactcattgaaaatggacttagagaaagggttattctcagagttgatggtgggtttagaagtggagtagatgtcatgatggcagcaataatgggtgctgatgaatatgggtttggttcag

SEQ ID NO: 115124 - DNA, 245 bp, Glycine max
attcacaagaaggtacctgtgcttgtccacaatggaagaccattggctgagtcccttgtgatccttgaatacattgatgagacatgggagaaccaccaccccatcttgcctcaacaaccttatgatagagccttggctcgattctggtcaaggttcattgatgacaaatgcatgcctgcaatatcaaaggcagcatttactgcagacaaggaggaacgtgacaagggcactgaggaatcactcga

SEQ ID NO: 115125 - DNA, 247 bp, Glycine max
ccctacctctcccttcaagatgcagatcttcgtcaagaccctcaccggcaagaccatcacccttgaggtggaaagctctgacaccatcgacaacgtcaaggccaagatccaggacaaggaaggaatccccccggaccagcaacgtctcattttcgccggaaagcaacttgaggacggccgtacccttgctgactacaacattcagaaggagagtactcttcacctcgtcctccgtctccgtggtggc

SEQ ID NO: 115126 - DNA, 242 bp, Glycine max
aaatggaactctaagaactgatgtaactgcttcagcctcaaaagataatatcagcatagaaagtgagaagtgttgttcctctttgttggtgaacagaagaacagttttggcttctggggtttccttgttgggtttcccgggtgagagtttggctgtggtgaaacaaggccttctagctgggagaattcctggcctgtccgagccagatgaacaaggttggaggacgtatcgcaggccggatg

SEQ ID NO: 115127 - DNA, 240 bp, Glycine max
gcagaacagaaatttaaagaacttagtaatgcatatgaggtcttgtcagatgatgagaaacgatccatatatgacacatatggagaggctggacttaagggttcaggaatgggcatgggggatttcagcaatccttttgacctgtttgagacactgtttgagggcatgggtggcatggggggaagcagaggatcttggaatggagcagttgagggcgaggatgagtattacagtcttgtt

SEQ ID NO: 115128 - DNA, 240 bp, Glycine max
ggggctcagcactcatattgccaatctcttacacttacatagccatgatgggttctaaaggactcaccgatgcatcaaagatagccattttgaatgcaaactacatggcaaaacgattggagaattattacccggttcttttccgtggagtcaatggaacagttgctcatgaattcatcattgacttgagaggctttaagaatactgctggaattgagcctgaagatgttgcaaagcgcc

SEQ ID NO: 115129 - DNA, 238 bp, Glycine max
ctagtttcttacaagcctctactatactgcttcaccttctgctctagaaaattcagtgctgaaacatggcttcggctactctctctgtagccaaaccagcccttcaggcaaatgggaaaggcttctctgaattctctggcctccgaagctcatcaggcttccttcccttttctagaaaatcttcagaggatttccattctgtcattgccttccagacctatgcagttggaagcagtgg

SEQ ID NO: 115130 - DNA, 237 bp, Glycine max
gtaatccgaaataccactggttgtttatgtgtctcgtgaaagaaggccaaatgttcctcatacatacaaaggtggagcctcaacacattgagtctcagggctattcagtaacgggccctatgtacttgtagttgattgtgatatgtattgcaatgatccatcatcagctaaacaagccatgtgcttttttcttgatcctgaaacctccaaagatattgcttttgtccaattccctca

SEQ ID NO: 115131 - DNA, 238 bp, Glycine max
atttgctgtgacatctgtgagaagtggttccatggcaaatgtgtgaagatcacccctgctagagcagagcttatcaagcaatacaagtgcccatcatgcagtaacaagagagctcgctaagcaaatttccatcagggacaataaaccatttgagtcttaacgaatctgattaatattttttttttctagatgtagctgatggatagtttttatgtttgacacatgtagatttcttgtc

SEQ ID NO: 115132 - DNA, 239 bp, Glycine max
agatcttcaaggacaacctgcgattcatcgacgaccacaactccgcggaggaccgaacctacaagctcggactgaaccggttcgctgatctcaccaacgaggaatacagggccaagtacttgggaaccaagatcgatcccaaccggaggctcggaaagaccccgagcaaccgctacgcgccacgtgtcggcgacaaattgcctgattccgttgattggaggaaggaaggtgctgttcct

SEQ ID NO: 115133 - DNA, 238 bp, Glycine max
tatatttgtaactcgatctcgaggttggtcttatgttgagcgtcctggtttattgctggtgtttgcttttgttgttgctcaactgattgccactttgattgcagtatatgccaattggagctttgctgcaattgaaggaatcggttggggttgggctggtgttatatggttatataacatcatattctacatcccacttgatatcgttaaatttttaattcgctatgctcttagcggt

SEQ ID NO: 115134 - DNA, 245 bp, Glycine max
agtgtggtgcctctcttccatctccccagccaaaacctctctcaggaaggccacattacgcccttccgtcttcgcaacccttaacactccttcttctccttcctcttcatcttccttcccctctctcattcaagacaggcctgtttttgctgcccctgcccccatcatcaccccaactgtgagagaggatatggcaaaggaatacgagaaagctattgaagaacttcagaaattgttgagggaga

SEQ ID NO: 115135 - DNA, 242 bp, Glycine max
aagtagttgagaactaagaaggagaagcaaatggcttcctcaatgatctcttccccagctgttaccactgtcaaccgtgccggtgccggcatggttgctccattcactggcctcaagtccatggctggcttccccaccagaaagaccaacaatgacattacctccattgctagcaacggtggaagagtgcaatgcatgcaggtgtggccaccagttggcaagaagaagtttgagactctttc

SEQ ID NO: 115136 - DNA, 240 bp, Glycine max
atcacttccttgcctactacacattcttcatcacttcattcatcatttctccccttagcttgtttcaccaatggctagtgcggttagtgctgcagtctcttttccatccaccaagtctacctctcttccaagcaggacctccctcattgccccagagagagttgtgttcaagaaggcttcattgcaaaacagagatgtttctagcagtggacgggtagtttccatcagagctcaagtcac

SEQ ID NO: 115137 - DNA, 139 bp, Glycine max
ctgagtcctgcgagttgctcatcattgatagaactattgatcagattgctcctgtgatacatgaatggacatatgatgccatgtgccgtgatttgttgaatatggagggaaataaatatgttcatgaggttcctagcaa

SEQ ID NO: 115138 - DNA, 242 bp, Glycine max
ccaaattctccagccatggcagtttcttctgcatctgcttcctccaaacttatactattcccccatgcttcatcttcttcccttatctccacacccttccgttcctccaccaacacccacaaactatcccctctctcctcctccttcctccaccccaccaccgtcctccgccgcaccccctcctccaccactaccaccacctccccgcgccgccccctcaccgtccgcgccgcccgcggcaa

SEQ ID NO: 115139 - DNA, 241 bp, Glycine max
caaagcacaaagcaaagctcatccttgagttaaaaaatggcagcagcttcttccatggctctctcatccccatccttggctggcaaggccgtgaagctgggcccatcagccccagaagtgggaagggtgagcatgaggaagaccgtcaccaagcaggtctcctcaggaagcccatggtacggcccagaccgagtcaagtacttgggcccattctctggcgagcccccgtcctacctaaccg

SEQ ID NO: 115140 - DNA, 141 bp, Glycine max
cctcagacaggatcaaagctggtttcattcacttcaagaaggagaaatatgacaagaatccagctttgtatggtgaacttgccaaaggccagagccccaagtttatggtgtttgcttgctcagactcaagggtgtgcccat

SEQ ID NO: 115141 - DNA, 243 bp, Glycine max
aatagcgctccgtgtgcctacacccaatgtttcagttgttgaccttgttgtgaatgttgagaagaagggtcttactgctgaagatgtgaatgcagcattcagaaaggcagctgagggtccactgaaaggtgtgttggacgtgtgtgatgttccacttgtgtctatcgacttccgctgctctgatgtttcctctactattgactcctccttgactatggtcatgggagatgacatggttaaggt

SEQ ID NO: 115142 - DNA, 242 bp, Glycine max
ggccaattagtagagaatttctatagttcatcttgcccaaacgtggaatccatggtgaaacaagcagtgactaacaagtttacagagaccatcacaactggacaagcaactctgcgtctctttttccatgattgctttgttgagggctgtgatgcctccgtgataatctcctcgccaaatggggacacagagaaggatgccgaggaaaatatttcactgccaggagatgggtttgacactgt

SEQ ID NO: 115143 - DNA, 239 bp, Glycine max
gtttggatgagcaatgaatttctgctgctttatcaagttatagtactggctcttttttttttggccagctttgtgatttatatgaaaatgattcaatttttgataagtttgagtgttgtctaagtggtgatggattgcgtgtttcaactggctcttacagcaatctattccgtgtgtttggttgtgttcctggaagtactgaggctacaactttggaagccagtaaaaatccaatgaga

SEQ ID NO: 115144 - DNA, 239 bp, Glycine max
ctaagaagaaggaaatggcttcctcaatgatctcctccccagctgttaccaccgtcaaccgtgccggtgccggcatggttgctccattcaccggcctcaaatccatggctggcttccccacgaggaagaccaacaatgacattacctccattgctagcaacggtggctgagtacaatgcatgcaggtgtggccaccaattggcaagaagaagttcgagactctttcctacttgccagac

SEQ ID NO: 115145 - DNA, 235 bp, Glycine max
gaacactgtaaccaccgttcttggtcctgtctgcaacaaattcaaggacttccctgatgatgtcctggtttatgttgacaaaaaggtggatgaagcttcccacaagttcgatgagcatgctccttcctttgccaagcaccttgcggatcaagccaagggtgtgattcagaaagtgacttgtgaggcagggaaagttgcaagtgaagctcaatctggggggtcaagagctgctgtt

SEQ ID NO: 115146 - DNA, 237 bp, Glycine max
tcgcgacacaatcgcaggagcaatattcacaaccctcggaacctgcgacgccgcattcgctgttcaacaaatagccgacatagcagaaggcgacaaccgcggactggcactgttgctgcccataatcccagcaatagggtgggttctgttcaacattctgcagccggcgctgaaccagctgaaccgaatgcgcacaccaaaggcgtgatcattggcttggggcttggcggcttggct

SEQ ID NO: 115147 - DNA, 238 bp, Glycine max
cttcgacgatgacgccgagtatgatgccaccgataatgatgccaagtatgataccaccgacgatgatgcagagcatggtgtcatcaatgataatgccaaacatgatgacagtgccacaatgttactctgattccatctcgcacattatacaacaacaacaattaccattcatgttcagccggacactcgtggcgatctcacccatgtttttacagcagccctttgttggtgctgcatt

SEQ ID NO: 115148 - DNA, 235 bp, Glycine max
ttgcaagcgctctctttctttgcttttccttccccctttcagtttcttcaacgctgcaactatccatggcaaaccgctggctcagacccgaggtgtatccactgttcgctgcggttggtgccgctgttgggatctgtggattccaattggttcgtaatatctgcatcaaccctgaagtcagggtgaacaaggaggtgcagaaaggcaggagtgttggagaactttgctgagggag

SEQ ID NO: 115149 - DNA, 237 bp, Glycine max
gggcacccagacacgttggttgacaggcagtgacaagtacttttggattcatcttgataaacgggtgcctactggggcagggcttggcggtggaagtagcaacgctgcaactacactatgggcagccaatcaatttagtggctgtcctgcctctgagaaagaactccaagaatggtcaagtgagattggatcagatattcccttctttttctctcagggagcagcctattgcactgg

SEQ ID NO: 115150 - DNA, 276 bp, Glycine max
  unsure (1)..(276): unsure at all n locations
cagaacattcgggtgtgtgtggactgccacactgcaattaaatttatggcaaagattgttggcagggaaatcattgtgagggataatagccgatttcaccattttaagaatgggtcttgttcctgtggagattactggtgaaataactggaaagtggaaaccaagcatgtcaacattgtagctgcataagcagtaccgaactgaggtggattaaaatgctactaaatcagtgtacaaaggacagactgtaatcaaggtanaaaatggcaattgctg

SEQ ID NO: 115151 - DNA, 273 bp, Glycine max
cgaactcaacacactcttcgaaactctggatctgttcttctgcttctaagagacaacattctcttcttgaatctcaatctctcggaaactaaaccctaagaacagacaaagatggtttacaccatctcgggaattcgatttccggttcttccttcgctgcacaactcccgcttccgtggcgatcgcagaactgcgtctcttcccgtttttctcagaaacaactccttctctcgtaaaacccttgctctaaaatcttcccatgattctctgtct

SEQ ID NO: 115152 - DNA, 270 bp, Glycine max
cgttaagggatcttttgagctctggggccttcagtttggccttgcatcctctttctccgtatgaacatcaaccattatcaatgacctcatcttggttccctaagttaaagatgtggccaccattctgcattggaagctataggggccatgcttagaggtcgtgtgtatctgcaatgaagaggcctagccaccttcatcaccatatgatatttataaaaatatatatatatgaaactatgaactgcgtttatgcatgtcggacttcttttg

SEQ ID NO: 115153 - DNA, 267 bp, Glycine max
gaacaagtagttgagaactaagaaggagaagcaaatggcttcctcaatgatctcttcaccagctgttaccactgtcaaccgtgccggtgccggcatggttgctccattcactggcctcaagtccatggctggcttccccaccagaaagaccaagaatgacattacctccattgctagcaacggtggaagagtgcaatgcatgcaggtgtggccaccagttggcaagaagaagtttgagactctttcctacctgccaatgatgatgca

SEQ ID NO: 115154 - DNA, 260 bp, Glycine max
ttgcaattgaagttgaagtcttgcccttctctcttcaactccaaacacaagacatcatcatccatggctgcctccgtctccactgtcggagctgtcaacagagctcttttgaacctgaatgggtctggacctggggtttcagctcccagttcatccttctttgggagcagcttgaagaaggttattggctcaagggtccccaacacaaagatttcctcttgaagcttcaagattgttgctgtagaagagaagaaagagta

SEQ ID NO: 115155 - DNA, 260 bp, Glycine max
agcaagctcatcctagagttttaaaaatggcagcagcctcctccatggctctctcttccccatccttggctggcaaggccgtgaagctgggcccatcagcccccgaagtcgggagggtcagcatgaggaagaccgtcaccaagcaggcctcctccggaagcccatggtacggcccagaccgcgtcaagtacttgggcccattctctggcgagcccccgtcctacctcactggcgagttcccaggtgactacggctgggat

SEQ ID NO: 115156 - DNA, 261 bp, Glycine max
cgaacaagtagttgagaactaagaaggagaagcaaatggcttcctcaatgatctcttccccagctgttaccactgtcaaccgtgccggtgccggcatggttgctccattcactggcctcaagtccatggctggcttccccaccagaaagaccaacaatgacattacctccattgctagcaacggtggaagagtgcaatgcatgcaggtgtggccaccacttggcaagaagaagtttgagactctttcctacctgccagacc

SEQ ID NO: 115157 - DNA, 270 bp, Glycine max
cgagcctattgttgagcgtgattctctcttctctccacgatcgaacaggtttggaagaacacaagaggggttggaaaatggtggtgaggattaggctatcccggttggggtgtaagaacaaacccttctatcgagttatggccgctgatagcagatcaccaagagatggcaaacacctcgaagttctcggttactacaatcccttaccaggtcaagatggtggcaagagaatgggtctcaacttcgacagagtgaagtattggttttgag

SEQ ID NO: 115158 - DNA, 269 bp, Glycine max
cagaagaacaagtagttgagaactaagaaggagaagcaaatggcttcctcaatgatctcttccccagctgttaccactgtcaaccgtgccggtgccggcatggttgctccattcactggcctcaagtccatggctggcttccccaccaggaagaccaacaatgacattacctccattgctagcaacggtggaagagtgcaatgcatgcaggtgtggccaccagttggccagaagaagtttgagactctttcctacctgccaatatgtgc

SEQ ID NO: 115159 - DNA, 170 bp, Glycine max
  unsure (1)..(170): unsure at all n locations
tcaagggtgattgtctttcccgtcaaggctaagatacaggacaaagagggtatccctccagatcaacagaggcttatctntgctggaaagcagcttgaggatggccgtactcttgctgactacaacatccagaaagagtctactcatcatctagtgttacgtcttcgtgg

SEQ ID NO: 115160 - DNA, 264 bp, Glycine max
cacgcctcagtagaccatggcctcattgggtgggttacaaaatctaagcggcatcaattttcttatcaaaaaagagggtccaaaagtcaatgcgaagttcgagctgaagccgccaccatatccactgaatggtttggagccggtgatgagccagcagacacttgagtttcattgggggaaacaccacaagacatatgtggaaaatctgaaaaaacaaattgttgggacagagcttgatgggaaatcactagaagagtatgcatc

SEQ ID NO: 115161 - DNA, 258 bp, Glycine max
cagcgacagtgctgaaaaagtggagcagataacagcttctctagggacatcatcatctgatggcatcccatgatcagaagcctcagacaggatcaaagctggtttcattcacttcaagaaggagaaatacgacaagaatccagctttgtatggtgaacttgccaaaggccagagccccaagttcatggtgtttgcttgctcagactcaagggtgtgcccatctcatgtgctagatttccaaccaggagaggcctttgt

SEQ ID NO: 115162 - DNA, 253 bp, Glycine max
cgctgatagatgactctggagaacccttttttgttctcaacagtgatgttatcagtgagtatccactcaaagaaatgattgaattccataaaaaccatggaggagaggcttccgcaatggtaaccaaggttgacgagccatcaaagtacggcgtggttgtgatggaagagagcacagggcaggttgataaatttgttgaaaaaccgaaattgtttgttggtaacaaaatcaatgctggaatttacctgctgaa

SEQ ID NO: 115163 - DNA, 264 bp, Glycine max
cttcattcattcattctctctcatcacaccttgcatggccacggcgtgcgtgacgaacgctacccgcgcggcggcgtgcagggacggcgcggcggcggcgcacctgaaaatgatctcgatattcgtcatcttcgtgacgagcgtggccgggatgtcgtcgccggtggccctcgccggaatcttccgtgggaagcctctctacgacaaggccatcgtcgtaatcaagtgtttcgcggcgggggtgatactctcgactagtggagc

SEQ ID NO: 115164 - DNA, 264 bp, Glycine max
gaaaaaaacaaaaatgctgagaatcgctgctagcgcgaagacaattgttcgaacggggtcgttggaggcgccaccattggggattagggttctgcctcggctctaccacgagagggtggtggaccactacgataacccccgcaacgttggatccttcgacaagaacgaccccaccgtcggaacgggtcttgtcggagcacccgcgtgtggtgacgtcatgaaactccagattaaggttgatgacaaaacggggacgcgatgctc

SEQ ID NO: 115165 - DNA, 272 bp, Glycine max
agacagtgacactgagagaagaaggaaaaactaaccaacaccacagcccctaatttcctttttctcacaatggcggcttcagtcgacaaccgtcaatacggcacccacataaacgccgtcgttcgcgcttgcggcccagacttcaatacccctctcccgtcggatttcgatctggactcatccagcgacgacgaagaccaaaacgacgacgcttcgtatctcaaggagttgatacaaaaagcgaacgcggaaaccgaggcgtcttgaccgcg

SEQ ID NO: 115166 - DNA, 271 bp, Glycine max
aattgaagttgaagtcttgcccttctctcttcaactccaaacacaagacatcatcatccatggctgcctccgtctccactgtcggagctgtcaacagagctcttttgaacctgaatgggtctggacctggggtttcagctcccagttcatccttctttgggagcagcttgaagaaggttattggctcaagggtccccaacacaaagatttcctctggaagcttcaagattgttgctgtagaagagaagaaagagattgaagagcacagccg

SEQ ID NO: 115167 - DNA, 255 bp, Glycine max
gaaaattcggttcaatttggctttagagagtgggaacattcaaattgcagttgcttcagcaacagctattgatgagatagatcactggtaccgattaggggttgaggctcttcgccaaggcaatgctggtattgtagagtatgcataccagagaacgaaaaattttgagagattgtccatcctttatcatgtcactggtaacatggagaaactgtccaagatgttgaaaattgctgaagtcaagaatgatgtgat

SEQ ID NO: 115168 - DNA, 255 bp, Glycine max
caaacattgtgtgaccctgataatccaatcgtgctcgagcggatggacttccctgatcctgttattaaggttgcaattgaaccgaaaactaaagctgatgttgacaagatggcaactggtttaatcaaacttgcacaggaagacccttctttccacttctcccgtgatgaagagataaaccagacagtaattgaaggaatgggagaattacatcttgaaatcattgttgatcggctcaaaagagaatttaaggtg

SEQ ID NO: 115169 - DNA, 260 bp, Glycine max
cgtttgttgttgtaactcgttcttcttcttttgttgttctgtgtttgtgtttgttttttctctcacctgaaaatgtcttgctgcggtggtaactgtggttgcggaagctcctgcaagtgcggcaacggctgcggaggctgcaagatgtacccagacttgagctacactgagtcaaccaccaccgagaccttggtcatgggagtggcacctgttaaggctcaatttgagggtgctgaaatgggtgtgcccgctgagatgct

SEQ ID NO: 115170 - DNA, 263 bp, Glycine max
  unsure (1)..(263): unsure at all n locations
aaaagactcaacgacgtcgtaacgggactcagcactcgcngcttcttcgttttccttctcgatgcactgtttcttgaaagggtgaagcgtgtcaaacaaggaagaggnacgtttcgccggcggagacgccgatgaggaggaggatgactccaccgcgcgacggcggcggagagtggagttccagtggttcttgatggcgttgtcggtgcggccggggaggaggcgcgagatggtggcccatttgtttccgtgaactcgcttta

SEQ ID NO: 115171 - DNA, 260 bp, Glycine max
ctcgaaatcgaggtttttgaccggctcttccggtaaacttaaccgggaagtgactatgcggccaatggggtgccctccttctgcctctttcaaggttgaagccaagaagggagagtggttacctggcttggcctccccaacttacctcaatggcactcttcctggtgacaatggatttgaccctctggggctagctgaggacccagagaacttgaggtggtacgttcaagccgagcttgtgaatggacgttgggccatgt

SEQ ID NO: 115172 - DNA, 272 bp, Glycine max
tacaaaactgactgatgatcaaaagtatggaatgttcgaagcaattgctcatctcatccatcgggattatccagccatagtaaaagactttgttaaacttggttttattcccgatggagtcaatttggagcctatcttaccagttcttgccaaggtttttgatcaggccttagaaggtggaggggcaaaaaacatcaattttcaggagctggcatcagatttagctcaaattacctttgattatccttttaggatacccccaatccttataa

SEQ ID NO: 115173 - DNA, 271 bp, Glycine max
cattaagatggctaattcctacttatccttgcttgtcttgatccttgtagctctgctcctcacccctcaagggcttgctgatgaatctgattcttactataagccaccagtttacaagaaaccaccagtgtacaagcccaagcccaagccacccattcacaagcccaagccacccgtttacaagcccaagccacccgtttacaagaaacccccttatggtaagtacccaccagttcaagacaacgatcacttctaaaccatgcacgatgtt

SEQ ID NO: 115174 - DNA, 257 bp, Glycine max
tccatggctgcctccgtctccactgtcggagctgtcgacagagctcttttgaacctgaatggttctggagctggagcttcagctcccagttcagccttctttgggaccagcttgaagaaggttattgcctcaagggtccccaacagcaaggtttcctgtggaagcttcaagattgttgctgtagaagagaagatagagattgaagagacccagcagaccgacaaggacagatggaagggtcttgcctatgatatctc

SEQ ID NO: 115175 - DNA, 253 bp, Glycine max
cctgaaaccattattattgatgagattggaactgagcttgaggcattggcagccagtactattgctcaaataggagttcaattggttggaacggcacatggaatgaccattgataacataataaaaaatccttatcatcagattcttgttggtggcatagagagcgtaacccttggggatgaggaggccaggaaaagaatagtgcagaagacaattctcgaaaggaaaggaccctctacattttcatgtgcgg

SEQ ID NO: 115176 - DNA, 263 bp, Glycine max
cagtgctaatattggcatgtttgggacgatgaaagaaaaaataactgattagtctttctattataaaatagagtataggcattatttttttcttctaaaaaaataaaattaagaaattttcatggtaaccattcgtgcagatgaaattagtaaaattatccgtgaacgcattgagcaatataatacggtagtaaaaattgtaaatacgggtaccgtacttcaagtaggcgacggtattgctcgtatttatggctagaataatg

SEQ ID NO: 115177 - DNA, 261 bp, Glycine max
cagaggaatcttgagaaatggcaggggacagcaagagcaagattctgttcatcggagggactggttacatcggaaaattcatcgtggaagccagcgccaaagctggccacccaactttccttttggtgagggagtccactctctccaaccccgcaaaatcacccctcatcgacaatttcaaaggcctcggtgtcaatcttgttttaggagatctatacgatcaccaaagtttggtgagtgctataaagcatgtttgtaatt

SEQ ID NO: 115178 - DNA, 262 bp, Glycine max
ctgctccagttgatgttgacaattctcccagctttgttgccatcaatgtcagtcctattgagtatgggcatgttttgctgattccgcgcatatttgagtgtttgcctcaaaggattgaccgtgagagcttcctccttgcacttcagatggcagtggaagccgataatccttattttcgattgggttacaacagcttgggtgcttttgcaactatcaaccatcttcacttccaggcttattatttggctctgcccaatgagaa

SEQ ID NO: 115179 - DNA, 270 bp, Glycine max
cccaattcttccccctccacccacccagcatatctctctattcctatttattagcacccctcacattaccttgtgtcaccaactactttgactcctttaccataccattacaataattatcaaacctaaccagtaaaaatggtgaccgtggaggaaatccgcaacgctcagcgttcccatggacccgccaccatcttggccttcggcaccgccacgccgtccaactgcgtctcccaagccgattaccctgactactacttcgtacacagc

SEQ ID NO: 115180 - DNA, 270 bp, Glycine max
cagatggcttcacgcaggctcgtagtgtctctgattcgatcctcccttcgtagatctcaatcgaagccctcaatttccgcatcgcattcgagcgccacgtcatccaaccgtgcctcaccgcacggatacttgctgaaccccgtcgccgagtacgccaccgccgcggctgctgctaccactcctcccctacctcctcctccggggaagaaggagctcggcggcggcgggaagatcaccgatgaattcaccgggaagggcgcgacgagctgc

SEQ ID NO: 115181 - DNA, 260 bp, Glycine max
gttcattacttgatcagtgtcaaaagggtagttgcaaattgcaatggctaagcatgatgttgagggtggttccttctcagcaaaggactaccatgatcctcctccagcacctttgattgatgctgaggaactcacacagtggtccttctacagggctttgattgctgaattcattgccacattacttttcctttacatcacagtgctcactgtgattggttacaagagccagagtgatgtcaaggccgggggtgatttgt

SEQ ID NO: 115182 - DNA, 265 bp, Glycine max
agagaacttcaagtgagggtgagagtgacacaaatctagagagagcactagtactctaaaagtctattatattcttcaaaatatgaccatgcatcgcgagtcttgggcttttgtcttcggcgttatgggcaacatcatctcctttggagtgttccttgctccattgccaaccttttaccaaatctacaagaagaaatccactgaaggtttccagtcacttccttatgttgttgcactgttcagtgcaatgctttggttatctttc

SEQ ID NO: 115183 - DNA, 260 bp, Glycine max
tgcaattgaagttgaagtcttgcccttctctcttcaactccaaacacaagacatcatcatccatggctgcctccgtctccactgtcggagctgtcaacagagctcttttgaacctgaatgggtctggacctggggtttcagctcccagttcatccttctttgggagcagcttgaagaaggttattggctcaagggtccccaacacaaagatttcctctggaagcttcaagattgttgctgtagaagagaagaagtgagag

SEQ ID NO: 115184 - DNA, 257 bp, Glycine max
gcagcagctgagcttgtttccgtcgccgcttcacccaccgtagcaaccatgatcattcccgagaagaaccgtaaagagatctgcaaatacctcttccaagagggagtttgctttgcgaagaaggacttcaatctggcaaagcacccagagattgatgtgccgaatctgcaggtgataaagctgatgcagagcttcaaatccagagagtatgtgagggagacatttgcgtggatgcactattactggttcctaagagg

SEQ ID NO: 115185 - DNA, 247 bp, Glycine max
ccaaatattgcagaatcaaaagtagctctagtatatggtcaaatgaatgaaccgcccggagctcgtatgagagttggtttaactgccctgactatggcggaatattttcgagatgtcaatgaacaagatgtacttctatttatcgacaatatctttcgcttcgtccaagcaggatctgaagtatctgccttattgggtcgaatgccttctgctgtgggttatcaacccactcttagtactgaaatgg

SEQ ID NO: 115186 - DNA, 262 bp, Glycine max
ctcgagccgctcgagtcgcataaccaagatgtgaactctttaggcttaatttcctctacaaagacagctgaagcaatagatgtattaaagctcatgtcatccactttcttagttgctttgtgccaagccattgatttgaggcatttggaggaaaacttgaagaacactgttaagaataccgttagtcaagtggccaaaagagttctcacagttggcatcaatggcgagttacatccttctaggttttgtgagagcttatcaa

SEQ ID NO: 115187 - DNA, 253 bp, Glycine max
caattattgtatacattctcttttctctcccttttctcatcacacactaacttgctttcgaggttttcttcttctttctcgaatttgcacataccgaacttcttatctttcacatctccaggtatgtaatgaatcctgagaagtttactcacaagactaatgaagctcttgcgtcggcccacgagctcgtgatgagttcaggccacgcgcaattgactcccatccacttggcctacgcgcttatttccgatcc

SEQ ID NO: 115188 - DNA, 267 bp, Glycine max
cactcacccaccctccatacacactctctctgagtcggtcgagttgaatcggtgtgagtcagtgaccgagtcgaaccatgtcggacgaagaacaccatttcgaatccaaggccgatgctggagcctccaagacctatcctcaacaagccggaaccatccgcaaaaacggttacatcgtcatcaagggtcgtccctgcaaggttgttgaagtttctacttccaagactggtaagcacggtcatgccaagtgtcacttttgatgatatt

SEQ ID NO: 115189 - DNA, 266 bp, Glycine max
caagggacaaggaaaatctttccaatgtgagcttgtctttgccaagatgggaatcaaccccatcatgatgagtgctggagagttggaaagtggaaatgcaggagagccagcaaaactgatcaggcagagataccgtgaagccgcagacttgatcaagaagggaaagatgtgtgctctcttcatcaacgatcttgatgcaggagctggtcgtcttggtggaacacccaatacactgtcaacaaccagatggtgaatgcacatgacat

SEQ ID NO: 115190 - DNA, 267 bp, Glycine max
acgcaaatgtcaatacatagaagagatggccatccatctatttactatcttggaccaggcaggacatcctctatgtggcggcaagactgtagtcattggtgcctacctggcgttcctgattcatggaacgaaattctttatgcacttcttctcaagcgggaggatttttttcgaacggagacagcatacaacaaaagtttctcaagttccactataattggtcaatatacagtttgcagagaatgttataagttataactgtgacaa

SEQ ID NO: 115191 - DNA, 264 bp, Glycine max
tggaatccatggttccactccccggaatctatgacccggatttcattgctgccaaccaaggagaccgtgccactacacgtaatcaggggcacaaagaaagaacaagttcaacaaatcatcaaagacattaaggagttcaaagaaagcactaaggttgacaaggtggttgtcctgtggacagccaacacagagaggtacagcaacgtagttgtgggactaaacgacaccatggaaaacctctttgcttccttggacagtagtgag

SEQ ID NO: 115192 - DNA, 262 bp, Glycine max
cttcgttatccttccttttttctccttgaactcgaatattcagtatggcagatgaggtggttctgctagatttctggccaagtccatttgggatgagggtcaggattgcacttgctgaaaagggtatcaaatatgagtccaaagaagaggacttgcagaacaagagccctttgctcctcaaaatgaacccggttcacaagaaaatcccggttctcatccacaatggcaaacccatttgtgaatctctcgttgtcgtaattga

SEQ ID NO: 115193 - DNA, 247 bp, Glycine max
aggactaccacgggggatttgagcagggagagatcgagcaggtgttttcggcaatggaggcgaactacgaggcctgggtgaacggtttcgcgccgctgtcggtgggagcggatgttcccgcggcggtgcgggagttttcccggacgctgttcaacatgaggccggacatctcgctgttcgtgtcgcggacggtgttccacagcgacctgagggggattctgggtctggttaacgtcccctgttgtat

SEQ ID NO: 115194 - DNA, 257 bp, Glycine max
cttaaagggggaagatccgtgaagtgctaaggaattggcctgagaagaacattcaagtcatagttgtaactgatggagaacggatcctgggtcttggggatcttggttgtcaggggatgggaataccagtgggaaaactttctttatatacagcacttggaggagtgcgcccttcagcttgtttgcctattaccattgatgtgggtacaaacaatgagaagctgctgaatgatgaattatacattgggcacaagacg

SEQ ID NO: 115195 - DNA, 234 bp, Glycine max
  unsure (1)..(234): unsure at all n locations
cgattccgtccattcaaagagctgtcgacactgaacccagccgaagacctgcagcaacaactagtagtacttatccagctagcaactgtctacacacagctacagcaacttcagccatatcaccaattggcagcactgaagagctctgcncatntgcagcagcaaatactactggcatttagcgagctagctgcagcaagtcgtgcttccttcttgacacagcaacagttgctg

SEQ ID NO: 115196 - DNA, 245 bp, Glycine max
ccgagaacgacttcaaatatatatatcagatgcaggagtacttgcagtatgctatggccttttctgtcttgccatggcaaaagggcttgcctgggtggtgtgtgtttatggagttccattgcttgtggtcaatggatttttggtgttgattacatttttgcagcacactcaccctgcattgccacactacacttcctctgagtgggactggttgagaggagctttagcaacagtggatagagatt

SEQ ID NO: 115197 - DNA, 260 bp, Glycine max
gagtctctggccataccatatcagtaataaacctcatagtgtcgacatggtttgcgaggaagaattgttgatagaaaaagtgtgctcgctctatgaacaaatctcaagcctcgagagtctcaaaccttgcaagaatgtcgacatgctgttcaccaaactagtcctgacatgcatacccccaagcccaatcgatgtcacaaagctaaacaaaaccgttcaagacattcgatcccaccttataaaactatgtgagcgaggga

SEQ ID NO: 115198 - DNA, 258 bp, Glycine max
cggacaaattggagtattaccaaatcatgcgcctattgccacagccgtagatataggtattttgagaatacgtcttcttaaagaccaatggttaacgatggctctgatgggcggttttgctagaataaacaataatgagatcactgttttagtaaatgatgcggaaaagggttgacattgatccacaagaagcacagcaaactcttgaaatagcagaagctaatttgaataaggcggaaggcaagagacaatgaggca

SEQ ID NO: 115199 - DNA, 261 bp, Glycine max
ggttgtgaaagcagagaagtgagatacactaagttatcctcataaatacactctaattaggtggcaagataagtgtctaaccttagtaacattgccacatattgtgttcattttggaattgtgccactaaaattctattcaattcatctatggctgcctcttcttatgctatgcaatcaatcctggcaaaccctttgatccgcatttccagcgggtctagggtgaaccaatttggcgttcctgctttgcacatgagatgtg

SEQ ID NO: 115200 - DNA, 252 bp, Glycine max
agtttcccgccatatatccaataagctttaaccatgtctgcctttgttggaaagtacgcagatgagcttatcaagaatgccaagtacatagccacacctgggaagggcatcttggcagcagatgagagcactggcaccattggaagcgcctatcgagcattaacgttgagaacattgaggccaaccgccaagctcttcgcgagcttctctacaccgctccagatgccctccaatacctctctggtgtcactc

SEQ ID NO: 115201 - DNA, 261 bp, Glycine max
cggataacgaaatttcttagacaaaaaacaaggatcagaaccgttgaatcaagttgaggaagatggcactagtctctggaggaagatcaacactgaaccctaacgcccctctttacattcctgccgcgtttcgccaagtgaggatttctctccggaatggtggcagctggtgacgacgctgacatggtaccatgactactggctaagccagcagcacgatgagggagccttctacggcgaggacgacggtttgatggcaat

SEQ ID NO: 115202 - DNA, 259 bp, Glycine max
cggggactccgcgatcctcgacagtacaatttcaccgagttcccatcagcagtgcgaaggggagtcccatggctgaccccaagcgagtagttgtctgcggcggcggagtcatcggagtctccaccgcctactttctggcgagaagggcgccgacgtcacgctcatcgagaagtccgacgtggcatgcgccgcgtccggaaaagccggtggattcctcgccctcgattggtgcgacggaggaccgctgaagagctagctc

SEQ ID NO: 115203 - DNA, 258 bp, Glycine max
cgctggctcagcgtatgaggcaattagcaatgcactatctccggtctctactatggtagtgatcctccatgatattcgtcactctttacttcccgcaattgatgagggcacaatgccatatgtcaatgcacatactagacccttagcaagctccagtccagtatttctatccggagatttagagaagctgctaagggtgttacgaaacggattggtagaggtatgcatgaattagcagctaaagtgatgaatatgctc

SEQ ID NO: 115204 - DNA, 261 bp, Glycine max
catcaaattcaggggaaggtggggaggatcctgttcgctggaaaccacttacagatgtcgtagatggttactctccaactcttcctcatcttaaaggtcttcaaaatggggatactgcaactagtgccatcaagcaggttcttctggaaggtttggtgtcaccccaacattcttggcaaatgctgatcagttagaaatcaagattgcacaaggtgcaaaacctggtgaaggtggacaattgcctggcaaaaagttagcatg

SEQ ID NO: 115205 - DNA, 261 bp, Glycine max
atctgtttcccgccatatatccaataagctttaaccatgtctgcctttgttggaaagtacgcagatgagcttatcaagaatgccaagtacatagccacacctgggaagggcatcttggcagcagatgagagcactggcaccttgggaagcgcctatcgagcattaacgttgagaacattgaggccaaccgccaagctcttcgcgagcttctcttcaccgctccagatgccctccaatacctctctggtgcatcctctttga

SEQ ID NO: 115206 - DNA, 258 bp, Glycine max
cgagaagacagaagacaacaaaatggaagacacagtttctgcgttgaggtctttgatggtttctcactctccgccgctggatgccttagtggtgccctctgaagattatcacctgagcgaatatgtgtctgcacgagtcaacgccgcgaattcgtttccggcttcactgtaagttccggcttggcacttataacaaagaaagaagcactgctgtggacggatggacggtattttttgcaggctgagaaatcttagtgc

SEQ ID NO: 115207 - DNA, 263 bp, Glycine max
ctcatgacgatttgtccaccaacagacgaacagcgtccgaggaacaaccacgcgtatgggagggagtttcagtccatgctggaaggactcgacgaagaagggtgcgtggaagaaccagggcaccactctgagaagaaacgagactaagcgtggatcaggtgaaggctttggagaagaacttcgaagtagagaacaaactcgaacctgaccgaaagttgaagctggcacaagaacttggcttgcaaccaacaagttgcggtttg

SEQ ID NO: 115208 - DNA, 265 bp, Glycine max
cgacactgacgtgccggccaaccccacagcctacaccagcctccacgtcgtcggcgacctcgttgggcttctcgacgcgatcgtcggcgacgaggagaaggtgtttgtggtgggtcatgactggggtgcaatgactgcatggctctttccctctatcgccccgaacgaatcagggctcttgttaacttgagcgttgttttcactccccgaaaccccaagagaaaaccccttgacactttaagagcagtgtaggaaatgactacta

SEQ ID NO: 115209 - DNA, 258 bp, Glycine max
cgtgatttcagtgagtgatcggtgttcacttgatctcatcataatcgtcagcgtcaattgaagaagatgccgatcagaaacatcgccgtcggaaggcctgaagaggcgactcaccccgacacgttgaaggcggctttgctgagttcatctcaaccttcatcttcgtgttcgccggctcaggctccggcatcgcctacaacaagctcaccgacaacggcgctgccacccctgccggcctcatctcgctccatcgcccat

SEQ ID NO: 115210 - DNA, 256 bp, Glycine max
attcctgaacaggacattgtcaagcttgttgacaccttccctggccaatccattgatttctttggtgcactgagggccagagtatatgatgatgaagtgaggaagtggatttctggtgttggtgttgacagtgttggaagaagcttgtgaactcaaaagatggacctccaacctttgagcagcccaagatgactctggagaagctcttgctgtatggtaacatgcttgtccaagaacaagagaagtcaagagagtc

SEQ ID NO: 115211 - DNA, 256 bp, Glycine max
cttatacttaagtttctatctagccatatcttgtagtagttcacttcaaacttctaagcaacatggtggtcctcactttcactgatgagtttactagcaatgtcaagccaagaaggttgttcaaggctttgatccttatgctcctaacctcattcccaagctgatgccggaagccattaagaatgttcaactggttgaagggaatggaggccctggaagcattcaggagataaccattgctgaagtgataacatca

SEQ ID NO: 115212 - DNA, 258 bp, Glycine max
caaaaacaagaaaaaaggttacctctttcaattttatcccttgttgtgagcttaattcaatttctgctcacacataatggcttgcacgctcgctgattcattactcctattcaagggttcttatagaaaaccagttctaggagagacattgctgcccggtactccccgggtatatttagtctaaacagtaatgggcttatccagaaaaggttcaggcgtcaaaggaattttgttactaggaataattactgtcataca

SEQ ID NO: 115213 - DNA, 257 bp, Glycine max
gacatagtaaggattgacagactgagagctctttcttgattctatgggtggtggtgcatggccgttcttagttggtggagcgatttgtctggttaattccgttaacgaacgagacctcagcctgctaaatagctatgggaggtaaccctccacggccagcttcttagagggaccttggcttcagagggaacagacagaaaacaagaatgatgtggttgattgacgaattggggatagaagtatcaggtcagaggtgg

SEQ ID NO: 115214 - DNA, 256 bp, Glycine max
gccattgtgaagaacccgaataacccgttttacatgtactgtgggattgtgcaaagaatcactgatggaaaggcaggggttctctttgaaggagggaactgggacaggttgatcacgttcaggttggaagaacttagcgcagagaaaaaggcccccccatgaagaaccccaagtcagctgtgctcgaaccgtttcttgaaaagaagtcatagttaagcttagtttcaatttgcaaaacatgttcttttgtatcata

SEQ ID NO: 115215 - DNA, 255 bp, Glycine max
ctgaagaagggtagcatcaacaagcagttctgaaaatggagatcaccaatgtcagtgagtatgaggctattgcaaagcagaagttgccaaagatggcgtttgactactacgcatctggtgcagaggaccagtggatctgcaagagaacagaaatgccttttccagaattttgtttcggccacgtattcttattgatgtgagcaagatagacttgacaactactgtcctaggcttcaaaatatcatgccaatcatg

SEQ ID NO: 115216 - DNA, 254 bp, Glycine max
atatttttgtcaatggaaaccaaggggaagtgaagattggggatcttggtttggcagcaattctccggatatctcatgctgctcattgtgtagggacgcccgagttcatggccccagaagtatatgaagaggcattaatgagttagttgacatatattcctttgggatgtgcatattagagatggtcacatttgaatatccttatagtgaatgtactcatccggctcaaatctacaagaaagatttctgggaaa

SEQ ID NO: 115217 - DNA, 255 bp, Glycine max
cggctcgaggagaaaggaaatgctgacattaacaacaatgtacttaagagcgcccctcatccaccatcactgctcatggctgatgcatggacaaaaccatactccagggaatatgcagccttcccagctccttggcccgtgcttcaaagttctggcctaccacaggacgtgttgataatgtgtacggtgaccgcaacctgatttgcacccttctgccagcatcacaggctgttgaagaacaagtgctgccacagc

SEQ ID NO: 115218 - DNA, 255 bp, Glycine max
  unsure (1)..(255): unsure at all n locations
agaaattcgtgttgagtgttgagttgaggcagagattcaagagaatggagggtgtgagccccgagcccctgagatcagaattggattccatatccaaacatgacacagcaaaagaagatgatgacgctttgaaagcagcactgaagccgaagtcaccaaaattcgtctcatgagagagtntgttgaaagccgagatccctcttccaaggaagaaaatgatttgatgatgagaagattcttgcggctcgtagtttg

SEQ ID NO: 115219 - DNA, 250 bp, Glycine max
tctttctctctcccttagtcaaagggactcgttgttcttctcccaggttatttagagaagcaaaatggtgaagatttgctgcattggtgctggatatgtggggggtcctactatggcagtcattgcacttaagtgccatccattgaagttgctgttgttgatatctctaaatcccgcattgcagcctggaacagtgaccagcttcctatctatgaacctggccttgatggtgttgtgaagcaatcgtggc

SEQ ID NO: 115220 - DNA, 244 bp, Glycine max
taggtaggagataagatattgaagtagtgctaagtgcgtaacacctgcagtgaacaatggcctctgcatcagcatctcttctcaagtcttcactttttcttgacaagtctgagtgggtgaagggatcaacgcttcgccgccttctgctgcatcagttgtgagatgcgaccccattgccccatcatgactcaccatcagagctggttcctatgctgatgagctcggtaagaccgcgaagacagtg

SEQ ID NO: 115221 - DNA, 252 bp, Glycine max
atcatcttttgtttgttcttcagtactttagtgtgtgatttaattccaagattttgagaatgtctagctgtgggtgtggaagtagctgcaactgtggcagcaactgcggttgcaacaagtactcttttgacttagctatgttgagaagacaaccacagagactcttgttttgggtgttgggtctgtgaaggcccaattggagggtgctgaaatgggtgttgcagctgagaacggtggctgactgtggatcaa

SEQ ID NO: 115222 - DNA, 253 bp, Glycine max
caccgcacgaatatcttgttgtttggagcgatccgagaaaaactctgtaaacatgttggtttaccaggacctccttacaggtgatgagcttctctctgactccttccgttacaaggaaattgagaatggaatgtgtgggaagttgaggggaagtgggttgttaaaggagcagttgatgtagacattggtgcaaacccttctgctgagggtggaggagaagatgagggagttgatgatgcatgttaaggttgtt

SEQ ID NO: 115223 - DNA, 251 bp, Glycine max
cattctcatcctcttctttctctctctaccattgccatggatccctacaagcaccggccatccagcgccttcaattctcccttctggactacaaattctggtgctcctatttggaacaacaactcctctttaacgttggagctagaggtccaattctgctggaggattatcatcttgtggagaagcttgcaaattttgatagggaacgtatcccagaacgtgttgtccatgccaggggcgtagtgcaaagg

SEQ ID NO: 115224 - DNA, 251 bp, Glycine max
tcgtattgctggtgggcccctcggtgaggtcactgacccaatctaccctggtggcagctttgacccattgggccttgctgatgacccagaggcttttgctgagcttaaggtgaaggaactcaagaacgggagttggccatgttctctatgtttgggttctttgttcaggccattgtcaccggtaagggtccattggagaaccttgctgatcaccttgcggacccagtcaacaacaatgctgggcctacgcc

SEQ ID NO: 115225 - DNA, 253 bp, Glycine max
tccccagctgttaccactgtcaaccgtgccggtgccggcatggttgctccattcactggcctcaagtccatggctggcttccccaccagaaagaccaacaatgacattacctccattgctagcaacggtggaaggtgcaatgcatgcaggtgtggccaccagttggcaagaagaagtttgagactctttcctacctgccagaccttgatgatgcacatttggcaaaggaagtagaataccttttaggaaggga

SEQ ID NO: 115226 - DNA, 251 bp, Glycine max
ggacaaggaaaatctttccaatgtgagcttgtctttgccaagatgggaatcaaccccatcatgatgagagctggagagttggaaagtggaaatgcaggagagccagcaaaactgatcaggcagagataccgtgagccgcagacttgatcaagaagggaaagatgtgtgctctcttcatcaacgatcttgatgcaggagctggtcgtcttggtggaaccacccaatacactgtcaacaaccagtggtgaatg

SEQ ID NO: 115227 - DNA, 257 bp, Glycine max
ccatagttggtgtagctagcgagggagggatatagggggaagcgtttattcattcattaagatggcatcggagcttcaattgcccccaggcttcagattccatccaacggaccaggagctggtgttgcactatcttgccgtaaatgcgcgtcgcagcctatcgccgttcccatcatcgccgaaatcgacctctacaaatacgacccctgggacctacccggattggcttcctacggagagaaagtggtacttctttt

SEQ ID NO: 115228 - DNA, 252 bp, Glycine max
gaaaattttgctgcaggtccagaatcctcataacattaaatacaacggaacagtacaaggcctaaaatatatatggagaactgaaggattccgtggacttttcaaagggaatggtactaattgtgctagaatgtccctaattctgctgtgaagttcttcagttatgagcaagcttctaaaggtatactgcatctgtataagcagcaaactggaaatgaggatgctcagctgactcctctttacgccttggag

SEQ ID NO: 115229 - DNA, 250 bp, Glycine max
tctcgattgcaagtgatccacgatacactctacgcttcacaaaaccttcaaacccaattccacagaattcttctgcatacaccatgccaccaaagcctttagactatgggtcaataaatgaaaacgtgaagagagtcaatatgctgtcagaggtgaattataccttcgagcttctgaacttcagaaagagggcaaaaagattatctttactaatgttggcaacccgcatgcattgggacaaaccactgag

SEQ ID NO: 115230 - DNA, 250 bp, Glycine max
caatattgtaaaactcaaaatctagtttcatactttttttcttcttcttgaaatggctctccaggctgcttctcttgttcctgcttctttctcggttcttaaagagggaaagagtggtgtgtctctcaaggctccaccttgttcggtctttcattttcagaacctatcaaagctaacttcagctcttctgcattgaggtgcaagagggaattcgaacaaaagctctgtgctgtgaggcgaaacagtggct

SEQ ID NO: 115231 - DNA, 249 bp, Glycine max
gaagatgataaggtttatgtttccactgtacgttctcaaaactatcctgtgactggcttccaatggcatccagagaaaaatgcctttgaatggggttcaccaagaattccacacacggaggatgccattcaataacccagtatgttgcaaattttttggtcagtgaagctaggaaatccttaaacagatcagttgctcaagagttgctagacaatctcatttacaattacagtccaactattgtgggaa

SEQ ID NO: 115232 - DNA, 251 bp, Glycine max
acaacgaatccaagaaactcattgttgtggattttactgcttcttggtgtggaccatgccgtttcattgcaccattcttggctgagctggctaagaagttcacaagtgtcatattcctaaaggtggatgtggcgaattaaagagtgtttctcaagattgggctattgaggctatgcccacttttgtgtttgtgaaagagggaacgcttctggacaaagtgctgggagcaaagaaggatgctgcagcagaaa

SEQ ID NO: 115233 - DNA, 252 bp, Glycine max
caactacaaaggttgctgtaggagataagatattgaagtagtgctaagtgcctaacacctgcagtgcacaatggcctctgcatcagcatctcttctcaagtcttcacttgttcttgacaagtctgagtgggtaagggacaaacacttcgccaaccttctgctgcatcagttgtgagatgcaaccccaccaccccatcaggcctcaccatcagagctggttcctatgctgatgagctcgtagaccgcgaaaac

SEQ ID NO: 115234 - DNA, 257 bp, Glycine max
caaagctgaagtgtctgcttcttccgattccggcacgcccccatcaccatggtgaacgttccgaaaacaaagaagacatactgcaagagtaaggacgtgcaggaagcacaccctgcacaaggttacccaatacaaaagggtaaagatagcattgctgcccaaggaaaacgccgttacgatcgcaaacaatctggttatggcggacaaactaagcccgtcttccacaagaaggctaagaccaccaaaagattgttctg

SEQ ID NO: 115235 - DNA, 248 bp, Glycine max
ctcaccctcctcttcacacattttctgtgatatctaacaaacattctcgttcacactttcagattgtgtgaagatgggggcgggtggccgaactgatgttcctcctgccaacaggaagtcagaggttgccctttgaagcgggtgccatttgaaaaacctccatttagtctcagccaaatcaagaaggtcattccacctcactgtttccagcgttctgttttccgctcattctcctagttgtttacgac

SEQ ID NO: 115236 - DNA, 248 bp, Glycine max
ctctttctctagtcctgttatttctcagcgcgtaaagcatggctttgttggtggagaaaaccacgagtggtcgcgagtacaaggtcaaggacctttcccaggccgacttcggccgcctcgagatcgagtggccgaggttgagatgcccggcctcatggcctgtcggaccgagttcggcccctcccagcccttcaagggggcccgcatcaccggctccctccacatgaccatccagccgccgttctcat

SEQ ID NO: 115237 - DNA, 246 bp, Glycine max
gcctatcaaggagggtcagcctgttgttttcacttatgaggtcacctttgaggagagtgacatcaagtggccatctagatgggatgcttacttgaagatggagggagctaaagtgcattggttttctaccttaattcgcttatggtgatcacttttcttgctggcattgctctcgtgatcttcctaaggactgttaggagggatctgacccgttatgaggagcttgataaggaggcaagcacagat

SEQ ID NO: 115238 - DNA, 248 bp, Glycine max
cggcgaaagacgtcgccgttgagggcttttgcatgagccgctgcgggacccacggctctacccgcaacgtcaaaaacgctgcccggacagcttatatttgggttggaaactccgaaactcagtgccccggcaatgcgcgtggccattccaccaacccatttaacgcagcccagacgccgccgttagtcgcgcctaacggcgacgtcggagttgacggaatggttattaacttggccatcttctcgctg

SEQ ID NO: 115239 - DNA, 246 bp, Glycine max
ctgctttggctctccgtaaagttcctcaatgtaacagttcatgggcaaatgattatattcgccagtataataatgtgaatattaatgttgctgtgcagactgataacgggctctttgttccagtcatcaggatgcagacaagaaaggcctctctacaataggggaagaggtcaaacaattggcaaagaaagccaaagaaaacagcttgaaaccccaagattatgagggaggtacattacagtgtct

SEQ ID NO: 115240 - DNA, 251 bp, Glycine max
gagaaattgtaaaaatccaacgggtgtcagcccctgttggacagatgcaactgaagagcctgattgaagctcacgttgaaaaaacctgtagtaccaaaggtgcggctattctgaaggactgggataagtattatcactattttggcagctggttccacctagtgaagaagatacccccgaggcaaatgccaaatatgacacaactacggcagatcaggtcacttatcagtctgcttaggtaacaatctaag

SEQ ID NO: 115241 - DNA, 250 bp, Glycine max
agattatctttactaatgttggcaacccgcatgcattgggacagaaaccactgagcttccctcgccaggttgttgctttgtgccaagctccattcctacttgatgatcctaatgttggactgctattcccgctgatgcaattgcaagagctaaacactatctttcattgacctcgggtggtttaggtgcttatagtgactcccgtggccttccaggagtgaggaaggaagttgctgatcatactcaggcg

SEQ ID NO: 115242 - DNA, 251 bp, Glycine max
caaatggagggaatttcaaatgaagcatgctcacttgccggtcactggggtctagggaagcttattgctttatatgatgacaaccacatttccattgatggggacactgagattgcattcactgagaatgtgatcaacgttttgaggcacttgagtggcatgtaatttgggtgaagaatggaaatactggatatgatgaaattcgtgcagccattaaggaagcaaaggctgtcaaagacacccactatgat

SEQ ID NO: 115243 - DNA, 254 bp, Glycine max
ggtttctactcgggaaacttgcctccgtgagcatgaaggatcttactcatcaagagaaacttgcattttggataaacacttataattcctgcatgcttaatgcatatttagagcacggcatacccgagagtctgaaatgattgtagcactaatgcagaaggcaacaatagaagtgggggggcagctgctcaatgcaattacaatagagcacttcatcttgagacttccttatcacctgattttattacaattca

SEQ ID NO: 115244 - DNA, 250 bp, Glycine max
tcaagatgcagatcttcgtcaagaccctcaccggcaagaccatcacccttgaggtggaaagctctgacaccatcgacaacgtcaaggccaagatccaggacaaggaaggaatccccccggaccagcaacgtccattttcgccggaaagcaacttgaggacggccgtacccttgctgactacaacattcagaaggagagtactcttcacctcgtcctccgtctccgtggtggcatgcagatccgttaagac

SEQ ID NO: 115245 - DNA, 95 bp, Glycine max
caagggaagaccgcattggtgtttgcaccggaattttccgcactgatggtattcctgaacaggacattgtcaagcttgttgacaccttccctggc

SEQ ID NO: 115246 - DNA, 242 bp, Glycine max
caatcccacacgcttcttactcctctcataacttttctgctccccgttgagaaagatttgaatccaaaggaaaaataacgctaatggctccaagagacagccgagccaccgcgctcattgggcccggcccaagcctatcaccggcccacaaagagatccgctacagaggcgtcaggaaacgcccctggggccgctacgccgccgagatccgcgatcccggcaagaaaacccgcgtctggctc

SEQ ID NO: 115247 - DNA, 242 bp, Glycine max
gtccaatgctacctgtgggaagcgtttggcttcaattgggctagagaacactgaagctaaccgccaggcataccgtaccctcctcgtgacagttccaggccttggtcagtacatctctggtgccattctctttgaggaaacactctaccaatccacaactgatggcaggaagattgttgacgtgctgcttgagcaaaacattgttcctggtattaaagtcgacaagggtttggtgccccttg

SEQ ID NO: 115248 - DNA, 243 bp, Glycine max
ctagcttccaaaccctaacactcctcttcctcttcgatcatcacctctccacaatgccgccgaagttcgacccctcccagatagtcgacgtcttcgtccgcgttaccggcggcgaagtcggcgcggcgagttccctggccccgaagatcggtcccctcggtctctcccccaagaagatcggagaagacatcgccaaagaaaccgccaaggactggaagggcctccgcgtcaccgtcaagctca

SEQ ID NO: 115249 - DNA, 226 bp, Glycine max
atgtacggtgaccgcaacctcatttgcacccttctcccagcatcacaggctgttgaagaacaagcagctgccacagcataatgtgttcaaatgacaactattttcatttcccgttgtacataaactcttattcctattcatacagttcttgcacttgttgaatattgcttcatcatatgtgacaatgatgataatccactgctcttaagtttcatccaatcacagg

SEQ ID NO: 115250 - DNA, 233 bp, Glycine max
tacgcgttgtgttgcgttgtgcgtgagacagtgcgcgtggtgaaaaagcatggcttctcagctcctgagacgaaccttcggaagtcgtttccttgcaaaccctagggccttctcctccgctgcttccactccgatccgcgccactctcttccccggcgacggcatcggccccgagatcgccgattccgtcaaacagatattccaagcagctgatgtcccaatagaatgggaag

SEQ ID NO: 115251 - DNA, 235 bp, Glycine max
cagaagagcccactgtcgcggtggaacccgctcccgaacctgcctccgccgatcctcccccggaggagaaggaggagaccaaacctgaagccaaggctaagaaaaccaaggagcccaaacctaaaaaggtttccagacctcgcaaccctcccactcatccttcctacgaagagatggttaaagatgcaattacctcgctgaaggagaaaaccggttcgagccaatacgcgattgc

SEQ ID NO: 115252 - DNA, 234 bp, Glycine max
gcttgttagagtggaccgccgcagtaccggagcagaacggtgttcgaagacgcgagtcctgagttggtgagggatttcttttgggatgatgagttcaggttgaagtgggatgacatgcttatacatgcttccaccatacaagagtgtgtcctcactggaacaatgatggtgcactgggtgcgcaagtttcccttcttttgcagtgacagagagtatataattgggaggcgaatt

SEQ ID NO: 115253 - DNA, 110 bp, Glycine max
gaacaagtagttgagaactaagaaggagaagcaaatggcttcctcaatgatctcttccccagctgttaccactgtcaaccgtgccggtgccggcatggttgctccattca

SEQ ID NO: 115254 - DNA, 232 bp, Glycine max
gaaaaacaagtagttgagaactaagaagaaggaaatggcttcctcaatgatctcctccccagctgttaccaccgtcaaccgtgccggtgccggcatggttgctccattcaccggcctcaaatccatggctggcttccccacgaggaagaccaacaatgacattacctccattgctagcaacggtggaagagtacaatgcatgcgcgtgtggccaccaattcgcaagaagaag

SEQ ID NO: 115255 - DNA, 232 bp, Glycine max
aggtgtaatggtggatgcttggtggggtttggtggagaaagaagggcctttgaagtacaactgggaaccctatgctgaacttgtgcagatgctgcaaatgcatggcttgaagcttcaagttgttatgtctttccatcagtgtgggggaaatgttggagacaattgcagcattcctctaccaccatgggtgttggaagaaatcagctagaaccctgagctggtttacacagac

SEQ ID NO: 115256 - DNA, 233 bp, Glycine max
ggaaggtcctgtccaagggaaaggctgctggcgtgcttcgattggtattccatgatgccggaacctttgacatcgatgacagtacaggtggtatgaatggtttcatagtctatgaacttgaaagacctgaaaatgctggcctgaaaaaatcagtaaaggttctgcaaaaagcaaagactcagatagatgctatccaaccagtatcttgggcggacatgattgctgtggctgga

SEQ ID NO: 115257 - DNA, 233 bp, Glycine max
caagaagaagtttgagactctttcctacctgccagaccttgatgatgcacaattggcaaaggaagtagaataccttcttaggaagggatggattccttgcttggaattcgagttggagcacggtttcgtgtaccgtgagcacaacaggtcaccaggatactacgatggacgctactggaccatgtggaagctgcctatgtttggttgcactgatgcttctcaggtgttgaagg

SEQ ID NO: 115258 - DNA, 228 bp, Glycine max
agaagatggatgtaattgacttggaggatgagactattgatgcagaagtactgaattccatggcagttacaaatgagcatttccagactgcccttggaacaagcaacccatcagctttacgtgaaactgttgttgaagtgcctaatgtcagctgggaagacattggaggccttgaaaatgtcaagcgtgaactgcaagagactgtacaatatccagttgagcacccag

SEQ ID NO: 115259 - DNA, 251 bp, Glycine max
ttcggctcgagccaacacacaacaggactttcagtaaaagtaacaggaagaattgctcagatacctgtaagtgaggcttatttgggtcgtgttataaatgccctggctaaaccaattgatggtcgaggagaaatttcagcttcggaatctcgattaatcgaatctcctgctcccggtattatttcgagacgttccgtatatgagcctctccaaacaggacttattgctattgattcgatgatccccatagg

SEQ ID NO: 115260 - DNA, 227 bp, Glycine max
cgataacctgggtgcagaaatgggcgatcttgttcagggtggcttgattggactactgcgtggtattgaaaagtttgattcttcaaaagggtttaagatttcaacttatgtttattggtggatacgtcagggagtttcaagagctttagttgagaacttcaagaacattaagatggcctgctcatttgcatgagaggctatctctaatccgcaatgcaaagtttaga

SEQ ID NO: 115261 - DNA, 228 bp, Glycine max
cttgggtggcatgtaatttgggtgaagaatggaaatactggatatgatgaaattcgtgcagccattaaggaagcaaaggctgtcaaagacaaacccactatgatcaaggtaaccactaccattggatttggttctccaaacaaggctaactcctacagtgttcatggaagtgcattaggtactaaagaagtggatgctacaaggaagaatcttggatggccatacgag

SEQ ID NO: 115262 - DNA, 227 bp, Glycine max
gaaatggatgggtttgagggtaacacaggtatcattgtcgttgcagcaactaacagggctgacattcttgactcggccttgttgagacctggccgatttgatagacaggtgacagttgatgttccagatataaggggaaggactgaaatcctaaaggttcatgctagcaacaaaaagtttgatgctgatgtttctcttgaagtgattgcaatgagaacacctggctt

SEQ ID NO: 115263 - DNA, 230 bp, Glycine max
ttgaatcttcgttatccttctttttttctccttgaactcgaatattcactatggcagatgaggtggttctgctagatttctggccaagtccatttgggatgagggtcaggattgcacttgctgaaaagggtatcaaatatgagtccaaagaagaggacttgcagaacaagagccctttgctcctcaaaatgaacccggttcacaagaaaatcccggttctcatccacaat

SEQ ID NO: 115264 - DNA, 231 bp, Glycine max
gttgagaactaagaagaaggaaatggcttcctcaatgatctcctccccagctgttaccaccgtcaaccgtgccggtgccggcatggttgctccattcaccggcctcaaatccatggctggcttccccacgaggaagaccaacaatgacattacctccattgctagcaacggtggaagagtacaatacatgcaggtgtggccagcaattggcaagaagaagttcgagactct

SEQ ID NO: 115265 - DNA, 229 bp, Glycine max
aaaagttattaagagcttttgcttttctttctgcgcgcttttcccaattaagtagttcttccttttctcaaagcaaaaaaaatgttcatcgagagtttcaaggttgagagtcctaacgtgaagtacacagagactgagattcagtccgtgtacaactatgaaaccactgaacttgttcacgagaacaataatggcacttatcagtgggttgtcaagcccaaaactgtca

SEQ ID NO: 115266 - DNA, 225 bp, Glycine max
ggcttccatttctcacgaccaaccggttttgtgctccgcttggaaggacgatggaacgacagttttttctgggggctgtgacaagcaggtcaagatgtggcctcttatgtctggtgggcagccaatgactgttgcgatgcacgatgctccagtgaaagacattgcatggataccagaaatgaatcttttagccacgggaagttgggacaagaccctgaagtattg

SEQ ID NO: 115267 - DNA, 228 bp, Glycine max
ccccgaccaagatctggcgccgctggcataggaagatcaacgtgaaccagaagcgctacgccgtcgtctccgccattgctgcctccgccattccttccctcgtcctcgcccgcggccaccgcatcgagtctgtcccggagctcccccttgtcgtcagcgactccgccgaaggagtcgagaagacaaaagaagcgatcaaagtcctcaagcagatcggagcattcccgg

SEQ ID NO: 115268 - DNA, 226 bp, Glycine max
gcatctaagtgagatacacagtagttaggtagcaagcataagtgtctaaccttagaaacatatctgctacatatcgtgtgcattttggaattgtgccactaaaattctattcatctatggctgcctcatcttatgctatgcaatcaatccttgcaaaccctatgatccgcatttccagcgggtctagggagaaccattttggtgttcctgcttatcacatgagaag

SEQ ID NO: 115269 - DNA, 218 bp, Glycine max
gggaggaggaatgggcgttggccaagaagcaagaactcgatgctgccaagaagaagagagccgagagccgcaaactcatctacaacagagctaagcagtacgctaaggagtacgatcaccaggagaaggaattgattcggttgaaacgcgaggccaagctgaaaggtggtttctatgtggatccagaggctaagctgttgtttattattcgcattcgt

SEQ ID NO: 115270 - DNA, 216 bp, Glycine max
gacaagcagctcaagaaaaatctgcaaagaataaaacaagaggaggaaatgcaacttacttgttgatataaacttcagacagagcgagttgttgtaaagctagccttgttgcagccatggccacccacgcggctctagcttctacaaggatcccactaacaccaagttcccatccaaggcttcacactctttcccaacccaatgcgcctcaaagag

SEQ ID NO: 115271 - DNA, 216 bp, Glycine max
attggaaccaactcatcctgcaattccaatacttcttgctgttggtactgttcatcagcatctaatccagaatggcctgcgaatgtcagcttcaattatagcagatactgctcagtgctttagcactcaccactttgcctgtttaataggatatggtgcagtgctgtgtgtccgtacttggcattggagacttgtcggcagtggcgtttgagcaat

SEQ ID NO: 115272 - DNA, 226 bp, Glycine max
caaagagagaagaaaagtcaaagacaatgtcagggatcattcacaagattgaggagacccttcatgtgggaggccacaagaaggaggaggagcacaagggtgagcagcaccatggtggagaatacaaaggggagcatcatggtgaacacagtactgaatacaaaggagagcatcatgttggtgagcacaagccggagcaccatggaggagaagagcacaaagaggg

SEQ ID NO: 115273 - DNA, 224 bp, Glycine max
tgcacattcttcatcacttcattcaacatttctctctcccttagctagtttttaccaatggctgctgcggttagtgctgcagtctcttttccatccaccaagtctacctctctcccaagcaggacctccatcattaccccagagagagttgtattcaagaaggcttcattgcaatacagagatgtttgtagcagtgcaagggtagtttccatcagagctcaagt

SEQ ID NO: 115274 - DNA, 223 bp, Glycine max
ttcttacaaggctctactctactgcttcaccttctgctctagaaaattcagtggtgatacatggcttcggctactctctctgtagccaaaccagcccttcaggcaaatgggaaaggcttctctgaattctctggcctccgcagctcatcaggcttccttcccttttctagaaaatcttcagaggatttccattctgtcattgccttccagacctatgcagttg

SEQ ID NO: 115275 - DNA, 222 bp, Glycine max
  unsure (1)..(222): unsure at all n locations
accttccacacatttaaacgatttatacacattggntgccgcaaatgatgtgttgctagattcttcacttatgaagtatagccccacggattgccagagaccagaacttttaaataagaatttaataaagggaaatattcttctctgtggatattccttcaactttgttgttggcactgcatcgatcaagaaagtctcagaaacagcaaaggcccttggtgc

SEQ ID NO: 115276 - DNA, 213 bp, Glycine max
cccagcttgctcatcaagtccaagaaccaacctaccttttgcaatctcaattcaatggcgtcctctctcattgcgaacgcttcctctcctcttcactcctctccaggtccctccttcgccccgccgcttccgcttcccaccgctctttcaacaccaacgccatgcgccagtatgacaaccgcgccgacgaccacagcaccgacatcgatcgtc

SEQ ID NO: 115277 - DNA, 255 bp, Glycine max
aattcagctcgagctcttactctgattcgttagtgaagaaaaatggcaacaatcatcgccggcaccccaactacatcaatcactcgcacaggtcatgtgctcaaacgacctgttggggcctcatcctctaccgttcttggattgccagcaatggccaaggcggggagagtgaggtgctccatggaggaaaagccttcaagcagctcaaacctagggatgggggcatcttgttagcagctgcagctgcgcaaccat

SEQ ID NO: 115278 - DNA, 219 bp, Glycine max
  unsure (1)..(219): unsure at all n locations
cacaagttccgtactggatgtgattgtgatgttattgcacacctgtacgaggatcatggagaagactttgtggacatgctggatggtatcttctcatttgttctactggacacccgtgacaacagttttatagtggctcgggatgctattggggtcacttccttgtacattggatggggattagatggctctgtntggatttcatcaganaatgaaggc

SEQ ID NO: 115279 - DNA, 221 bp, Glycine max
gttctgttgtttcaaaattgcaaacgttatccacctcagaccatgcctccgtggtctccatgaacttatttgtggcacttctgtgttgttgtattgtccttggccatcttcttgaggagaatcgatggatgaacgagtctatcactgcccttttgattggtgtatgcactggcgtagtcattttgctgtttagtggtggcaaaagctcacatattcttgtt

SEQ ID NO: 115280 - DNA, 220 bp, Glycine max
ctcactctccctctctaatagtaatagtaatatacataagtaacataaccaatggaagcgcgtgcaggagccaatcagcgtattgcaagaatctctgctcatcttcagcctccaaatttccaggaagggagtgatgttcttcttaagagtgctgagtgcagagcaaagggtggggcacctggattcaaagttgcaattttgggggctgctgggggaattg

SEQ ID NO: 115281 - DNA, 220 bp, Glycine max
cctggatccccctgagctcattaaaccccccaaaatcttagtcattgaaggcttgcacccaatgtatgattctcgggtcagagatctcttggactttagcatctacctagacattagcaatgaggtcaaattcgcttggaaaattcagagagacatggcagagcgtggacacagtcttgaaagcatcaaggctagcattgaagcaaggaagcctgatttt

SEQ ID NO: 115282 - DNA, 219 bp, Glycine max
gtgcatagcgtttttcattgtgcattattcaatggccaccacagcagctctatccggaaccatggtgagcacctccttcatgaggaagcaacctatgacgaccaagagcctaaagacattccccaacgctctttttggtctgaaaggtggacgaggtggtcgtgtaacttgcatggcctcgtacaaggtgaagctcataaccccagaaggagaagtgga

SEQ ID NO: 115283 - DNA, 219 bp, Glycine max
agcatttcagcgagcgaagagctctcaagattatctcaggcctgcagaatttcaataaagacaatgttgcctcggttgtcactgctgctgacaagggtggagcaactcacgtggatatagcatgtgaccctgagttggtaaagctggccattggcttaacttcttgtccggtttgtgtttcttctgtagatcctgcaacatttccagctgcagttgaag

SEQ ID NO: 115284 - DNA, 255 bp, Glycine max
caaggacaaagtcttggaccaagatcactccaatctccatttagcttctccagaaaagcctcctttcttgttaaggcagctgctaccccccctgtcaagcaaggatcagacagacctttgtggtttgcatcaaagcaaagtctttcttacttggatggagccttccgggtgactatggatttgaccctctgggactttcagaccctgaaggaacaggagggttcattgagccgaaatggctagcatatggtgaga

SEQ ID NO: 115285 - DNA, 261 bp, Glycine max
ttcggttcgagggttgattcaaggccttcacagcattcgttgcggcattttaatcgatttatccaagcaggactgaatgaactaatggagtctaaaggtgggaaaaagaagtctagtagtagtagtagtaaatcattgttctacgaagctcccctcggatatagattgaagacgttagaccaaacggtggaatcaagaaattcagatctgctgcttactccaactgcgctcgcaaaccttcctgatatccatccagattga

SEQ ID NO: 115286 - DNA, 248 bp, Glycine max
ctgggaaaaaatggcagcaccaacgccgattcacaaaactgaagaggaatggaaggtcattctctcccccgagcagtttcggatccttcgccagaaaggaactgaattgaagggtacaggagaatataacaagttttttgaagaaggaatttaaactgtgctggctgtgggactcctctttacaagtcttcaaccaagtttgattctggttgtggttggcctgctttctttgagggttttcccggcgc

SEQ ID NO: 115287 - DNA, 248 bp, Glycine max
acattttctgtgcgctctaacaaacattctcgttcacactttcagattgtgtgaagatgggggcgggtggccgaactgatgttcctcctgccaacaggaagtcagaggttgaccctttgaagcgggtgccatttgaaaaacctcgatttagctcagccaaatcaagaaggtcattccacctcactgtttccagcgttctgttttccgctcattctcctatgttgtttacgacctcaccatagccttct

SEQ ID NO: 115288 - DNA, 260 bp, Glycine max
attcggctcgagtggtcaccggggtggagcaatgcagacaaggcattgacagcattcgtaaacggtgctttgatcgaatactcgaagaatcgcaggaaggcagacagtgccacaacctcatttctctcaccacatttgcactttggtgaggtgagtgtgaagaagttttccaccttgtccgcatcaagcaagtgttttgggccaatgaaggaaacaaggctggtgaagagagtgtgaacttgtttctcaagtctattggc

SEQ ID NO: 115289 - DNA, 245 bp, Glycine max
gatgaagtgaggaagtggatttctggtgttggtgttgacagtgttgggaagaagcttgtgaactcaaaagatggacctccaacctttgagcagcccaagatgactctggagaagctcttgctgtatggtaacatgcttgtccaagaacagagaatgtcaagagagtccaattggctgacaagtacttgaacgaggctgctcttggaaatgctaacgaggatgctattcagaggggaactttcttc

SEQ ID NO: 115290 - DNA, 245 bp, Glycine max
gagaagaacagagagagatccatccatcaattccaatggccgatcagctcaccgacgaacagatctccgagttcaaggaagccttcagcctcttcgacaaggacggggatggttgtattaccaccaaggaacttgggaccgtgatgcggcacttggccagaacccaactgaggcagagctgcaggacatgataaatgaggttgatgctgatgggaatggtaccattgatttcccagaattcctga

SEQ ID NO: 115291 - DNA, 238 bp, Glycine max
gttgttgtggtgtttcatttgtgaaactaacaacaacacaaggccatcatcatggcagctgcttccccaatggcaagccaactcaagtccaccttcactaggactcttgtagctcccaagggcctctctgcctcttcaccactcacctcgtgccttctagaaggcaatttagcttcactgttaaggccatccaatcagagaagccaacctatcaagtgattcagccaatcaacggtga

SEQ ID NO: 115292 - DNA, 245 bp, Glycine max
gtttggatcctgttggagctaaaaaggtcacatgctcccttcaggctgatcttaaggacttggctcacaagtgtgttgatgctaccaaaattgcaggattcgcccttgccacctctgccctcgttgtctctggggcaagtgctgaaggtttccaaagaggctaaccttcgacgaaatccagagctagacctacttggaagtgaaggggacaggaacagctaaccagtgcccaacaattgatggtg

SEQ ID NO: 115293 - DNA, 245 bp, Glycine max
atctgtttcccgccatatatccaataagctttaaccatgtctgcctttgttggaaagtacgcagatgagcttatcaagaatgccaagtacatagccacacctgggaagggcatcttggcagcagatgagagcactggcaccattgggagcgcctatcgagcattaacgttgagaacattgaggccaaccgccaagctcttcgcgagcttctcttcaccgctccagatgccctccaatacctctct

SEQ ID NO: 115294 - DNA, 245 bp, Glycine max
aaagtttcttcctttctctgctctttgtcttctctgacacatttggggccttgttgagtgtgtttttgcaagagggtatggcgaaggacgttgaggttgctgagcgtggctccttctctgggaaggactaccaggaccctccaccagcccactcattgatgctgaggagctcacaaagtggtccttttacagggctcttattgctgagttcattgccactttgctcttcctctacattactgtgc

SEQ ID NO: 115295 - DNA, 240 bp, Glycine max
cttcatccatagacatggccaccgtcacttctgcagccgttgctattccctcattcactggcctcaaggcaagcgcaggcaaagtgagtgccgcagttaaagtctcagctccccaagccacaaggttgggcatcaaggcttcgctgaagacgttggagtcgctgttgtggccactgccgcgagtgcagtgctggctagcaacgccatggccattgaagtgttactgggtggtgatgacgg

SEQ ID NO: 115296 - DNA, 242 bp, Glycine max
gcaagcgcttctcctctttgtgttctggctatgcttcttggcaagagttagatcggacgaggattgcgtgtacacggtgtacgttcggacgggttcgatcatcaagggaggcaccgattcagtaattggtctgaagctatacgacagtccggctacggcatatacatcaccaacctcgaggcatggggcgggttaatggatccgggtcacaactactacgagcggggcaacctcgacatatt

SEQ ID NO: 115297 - DNA, 241 bp, Glycine max
ttttccatcaccggccgtggtaccgtcgccactggccgtgtagagcgtggcaccatcaaagtaggggaaactgttgaccttgtaggtttgagagaaacaaggtacacaaccgtcacaggtctagaaatgttccagaagattctaacgaagccctggctggagacaacgtggggctgttgcttagaggggttcagaagactgacattcagaggggaatggtgttggctaaaccaggcacgat

SEQ ID NO: 115298 - DNA, 241 bp, Glycine max
caaagagaagcattagcactaggagcagcaacaactagtctcagctgaaatggcctcttcagtgatggcatctgtggccctcaaacctgcccctttcactgttgagaagtcctcagtgagaggccttccctctctctcaaggaaccttcttcattcagagttgtggccagtggcaagaagatcaagactgacaaaccttatggaattaatggtggcatggctttgagggatggaactgatg

SEQ ID NO: 115299 - DNA, 240 bp, Glycine max
aaagccttagccttccctacaactccaaacatgaagacatcatcatccatggctgcctccgtctccactgtcggagctgtcaacagagctcttttgaacctgaatggttctggagctggagcttcagctcccagttcagccttctttgggaccagcttgaagaaggttattgcctcaagggtcaccaacagcaaggtttccggtggaagcttcaagattgttgctgtagaagagaagaaa

SEQ ID NO: 115300 - DNA, 237 bp, Glycine max
ctccgagggctgtgtttcccagcattgttggtcgtccccgtcacacgggagtgatggttggcatgggccaaaaagatgcatatgttggggatgaagctcagtccaagagaggtatattaactctcaaatatcccattgagcatgtattgtgagtaactgggatgacatggagaagatctggcatcacaccttctacaatgaactccgtgtcgctcctgaggagcacccagttctgct

SEQ ID NO: 115301 - DNA, 235 bp, Glycine max
gctgcttgagcaaaacattgttcctggtattaaagtcgacaagggtttggtgccccttgcaggttccaacgacgagtcatggtgccaaggtttggatggtctagcctctcgctcagctgcatactacgagcaaggtgccgtttcgccaaatggcgtactgttgtgagcatccccaacggtccctctgctctggcagttaaggaagcagcctggggtctggctcgctatgctgcaa

SEQ ID NO: 115302 - DNA, 235 bp, Glycine max
cttggaagtgaagggaactggaactgctaaccagtgcccaaccattgaaggtggagtggactcattcgccttcaagccagggaaatacaacgcccagaagttgtgcctggaaccaacttccttcacggtgaaggcagaggcgtggccaagaacgccccacccgaattccagaacaccaagctcatgactcgtctcacctacaccctggacgagattgagggtcccttcgaggtta

SEQ ID NO: 115303 - DNA, 235 bp, Glycine max
cgaaacttcgtgaaaactcgcacgcctactcaggtcgctagtcacgctcagaagtacttcctccgccgccacaaccagaaccgccgtcgccggagatctagcctcttcgacatcaccacggatacggtgatggaatctttactataatggaagaggaacaagttccgcaagaaacgatggcggcgcctatccccgccgcatatccgccttttcccggcgcgggttttccgatgag

SEQ ID NO: 115304 - DNA, 236 bp, Glycine max
cagcccccgaagtcgggagggtcagcatgaggaagaccgtcaccaagcaggcctcctccggaagcccatggtacggcccagaccgcgtcaagtacttgggcccattctctggcgagcccccgtcctacctcactggcgagtcccaggtgactacggctgggacactgctgggctttcggccgacccagaaaccttcgccagaaaccgtgagctcgaagtgatccactccaggtggg

SEQ ID NO: 115305 - DNA, 232 bp, Glycine max
gacaaatatgacgagtacagaaagaaatggggtggtggaatcatgggatccaaatctcaagcgaaaaccagagcaaaggagaagcttcttgccaaggaagctgctcagaggatgaattaggaggagtttcttatatttgttgctttgcgaatgctattaagtttgttttttaatgtactcttttaattattgtcttcataaaaacatttgttattcacatgagctagagtat

SEQ ID NO: 115306 - DNA, 231 bp, Glycine max
ccactaacaccaagttcccatccaaggcttcacactctttcccaacccaatgcgcctcaaagagacttgaggtgacagaattctctgggctaagatccacttcatgtgtgacatatgctaacgatgctagagaatctccttttttgatcttgtagcttcccaactcactcccaagaccaatggatcatcaactcctgtgaggggagagacagtggccaagttgaaggtggc

SEQ ID NO: 115307 - DNA, 229 bp, Glycine max
gaaaatttctgacttgagaagagtgtgcgcggaaaagggagtgaatccatggattgaagtagatggtggagttggtccagcaaatgcttacaaggtgattgaggctggagccaatgctctggttgcaggctctgcttgtttggagctaaagattatgccgaagctataagaggaatcaaaaccagcaaaagacctgaagcagttgctgtgtgaaatgcccatgtggttc

SEQ ID NO: 115308 - DNA, 232 bp, Glycine max
gaaatggatgggtttgagggtaacactggtatcattgtcgttgcagcaactaacagggctgacattcttgactcggccttgttgagacctggccgatttgatagacaggtgacagttgatgttccagatataagggaaggactgaaatcctaaaggttcatgctagcaacaaaaagtttgatgctgatgtttctcttgaagtgattgcaatgagaacacctggctttagtgg

SEQ ID NO: 115309 - DNA, 230 bp, Glycine max
gggattggagggattgacgctgcgtctcttcctcttctctttcgatccatccctcattcctaatcctccaatccaaccacctcagcctcacactcacatatacacatatctgaacgcgtatcgtccctcctatggcttcaaagcgcatcctcaaggagctcaaggacttgcagaaagacccaccaacttcttgcagcgctggtccagtagctgaggacatgttccattgg

SEQ ID NO: 115310 - DNA, 228 bp, Glycine max
ggcaattttgctgaacaattaaataaggcaagacaaatgatttatcctcctgatgggagaccatcaaaacttggagctttacttccaactttgacagaggttgtggccaaagaacacaagaggcttcttgctcaaaatcaattattgagaagaggaaggaagaacaagaacgacagcttcttgaaatggaacgggaggaggagtcgaagaggctaagacttcagaaaa

SEQ ID NO: 115311 - DNA, 227 bp, Glycine max
gtaatcaatcatcttttgtttgttcttcagtactttagtgtgtgatttaattccaagattttgagaatgtctagctgtgggtgtggaagtagctgcaactgtggcagcaactgcggttgcaacaagtactctttgacttgagctatgttgagaagacaaccacagagactcttgttttgggtgttgggtctgtgaaggcccaattggagggtgctgaaatgggtgtt

SEQ ID NO: 115312 - DNA, 228 bp, Glycine max
tggaagtggtagaagctccattttcagagttcttagaggactatggccaattgccagtggaagactctctagaccatctgaagttgtggatgaagaggatggatctggttgtggcatcttctatgttcctcaaggccatatacatgtttgggaaccctaagggatcaaattatatatcccctttcctgtgaggaagcagaggttaaagtactgaagatgtatggaaaa

SEQ ID NO: 115313 - DNA, 214 bp, Glycine max
ctccctctctaatagtaacagtaatagtaatatacataacataaccaatggaagcacgtgcaggagccaatcaacgtattgcaagaatctctgctcatcttcagccttcaaatttccaggaagggagtgatgtcttcttaagagaggtgagtgcagagcaaaaggtggggcacctggattcaaagttgcaattttgggggctgctggaggaatt

SEQ ID NO: 115314 - DNA, 227 bp, Glycine max
cgaaggtgttccttggacggaggaagagcatagattgttcctgttagggttacacaaagtcggaaaaggagattggagagggatttctagaaacttcgtgaaaactcgcacgcctactcaggtcggtagtacgctcagaagtactttctccgccgccacaaccagaatcgccgccgccggagatctagcctcttcgacatcaccaccgatacggtgatggaatcttc

SEQ ID NO: 115315 - DNA, 226 bp, Glycine max
agatgtcgaagcgtggtcgtggtggttcggcggggaacaagttccgcatgtcgctgggtcttccagtggcggcgacggtgaactgcgccgacaacacgggggcgaagaacctctacatcatttcggtgaagggatcaaaggccgtttgaaccgtcttccctcggcctgcgttggcgacatggtgatggccaccgtgaagaagggaaaacccgatctgaggaagaag

SEQ ID NO: 115316 - DNA, 226 bp, Glycine max
ttgaagttgaagtcttgcccttctctcttcaactccaaacacaagacatcatcatccatggctgcctccgtctccactgtcggagctgtcaacagagctcttttgaacctgaatgggtctggacctggggttcagctcccagttcatccttctttgggagctgcttgaagaaggttattggctcaagggtccccaacacaaagatttcctctggatgcttcaagat

SEQ ID NO: 115317 - DNA, 229 bp, Glycine max
ggtggccacagcaacaataacaatggcagcctcactacaagctgcagctaccttcatgcaacccaccaaggtgggcatggccactcgcaacctcaaatctacacaatgcatttctaaggcttttggcttggacccgctgcagctaaactcatttgctcccttaagcccgatctcaaagattttgctcaaaaatgtgtcgacgccaccaaaattgcaggattcgcccttg

SEQ ID NO: 115318 - DNA, 261 bp, Glycine max
cgaaatgggagaacagaatgacattacgctgacatgggagaatttggaagctactgttacaaatggaaagaaccgaaaactaattcttcatgggcttacaggttatgcccagccagggagacttttggctataattggtccttctggcagtggcaaatccacacttcttgatgctttagcaggaagattgacatcaaacataaagcaaacagggaagattctaatcaatggccacaaacaagaactggcttatggaacatc

SEQ ID NO: 115319 - DNA, 261 bp, Glycine max
acttagtccaagaataatttctgctgttgctgagtttaagcctgacataatacatgcatcatcaccaggcataatggtttttggtgcccttatcattgcaaagcttctgagtgttcctattgtcatgtcctatcacacccacgtaccagtatacattccaagatacacctttagctggctggtgcaacccatgtggtgggtcataaaatttctgcatagagcagctgatcttacactggtgccatcagctgccattgcaaa

SEQ ID NO: 115320 - DNA, 258 bp, Glycine max
ggaaattgaagctgatggtgccaattatcagcttgaaatgatgagatgcctgagggaggttaatgttgacaacaacacagttggatggtaccaatctacattgcttggctccttccagactgtggagcttattgaaacctttatgaattaccaggagaatattagacgctgtgtttgcataatatatgatccatcaaggtctgatcaaggtgttctagctctgaaggcattgaagctttctgactcattcatggaact

SEQ ID NO: 115321 - DNA, 121 bp, Glycine max
aaattctcaaaggcaccaatttcattgctcagagttcccaaattctccccaagagataaaatgtctctaatcccaaacttcttcggtggccggagaaacaatgtgttcgatcctttctcac

SEQ ID NO: 115322 - DNA, 120 bp, Glycine max
agaagaacaagtagttgagaactaagaaggagaagcaaatggcttcctcaatgatctcttccccagctgttaccactgtcaaccgtgccggtgccggcatggttgctccattcactggcc

SEQ ID NO: 115323 - DNA, 261 bp, Glycine max
ccctagttcgcttgcagtcacacaagaggccaatcctattcatagctcgagatgggtgaagaagtgaaggtagttgttccagaatcagtgttgaagaagcgcaagagggaggaggaatgggcgttggccaagaagcaagaactcgatgctgccaagaagaagagagccgagagccgcaaactcatctacaacagagctaagcagtacgctaaggagtacgatcaccaggagaaggaattgattcggttgaaacgcgaggcc

SEQ ID NO: 115324 - DNA, 258 bp, Glycine max
cggctcgagcagatgatatcaagaactggtggatttggggttactggatttcacctttaatgtatggacagaatgcaatagtggtgaatgaattccttggagatagttggaaccacttcaccccaaattcaaataagacgttgggaattcaaattttggagtcccgtgggttcttcacacatgcatattggtattggataggaattggggcgttgattggatttatgatccttttcaacattatatacactttggctc

SEQ ID NO: 115325 - DNA, 256 bp, Glycine max
cggctcgagatgggtttttgtgttaggtattattgcagcaatgttggtggttgtgaatggacaatcatcagtgaagccattggtgaagacagtgaaggggaagaaggtgtgtgacaaagggtgggagtgcaagggttggtctgcttattgctgcaatgagactatctccgattactttcagacataccagtttgagaacctcttcgcgaagccaattcgccggtggcacatgcagtcggattctgggactaccgtt

SEQ ID NO: 115326 - DNA, 254 bp, Glycine max
gctgattggatctgcagtagtttatcttgttggagcccttgtaacagcattagctcctaattttcctgtattggtgcttgggagacttgtatttggcacaggaattggactggcaatgcatgctgctccaatgtacattgcagagacagctccaacaccaatacgtggccaactaatatctctaaaagagttctttatagtacttgggatggttgcaggatatggaattggtagcttgttcgttgaaactgtag

SEQ ID NO: 115327 - DNA, 255 bp, Glycine max
gtctcagggtctgtgacacacacagactcacttcaagttcccagcttttgccatttttcccactgtttattgagaagaactgcagaacatggcacagattttggctccctctacgcaatggcagatgagaatctcaaaatcctctcccaatgcaactcccattacatcaaacatgtggagttctttattgtggaaacaaaataagaaagtttcacctaccagttctgctaaatttagagtgctggcaattaagtc

SEQ ID NO: 115328 - DNA, 258 bp, Glycine max
gtgagatttgcgaatctgagaaatggcggattcttctcgggaggagaacgtttacatggcgaaattggcggagaggccgagcgttacgaggagatggttgagttcatggagaaggttgcaaagactgtggaggttgaggagttgacggtggaggagaggaatctcctctctgtggcttacaagaacgtgattggtgcgaggagggcttcgtggaggatcatatcctccattgagcagaaggaggagagcaggggcaat

SEQ ID NO: 115329 - DNA, 254 bp, Glycine max
agagaaacaaagttagaagtaaagaagatcatggcttctctagcaaccttggctgctgttcaaccagctacgatcaatggccttgctggaagttccctctctggaactaagctctctttcaagccctctcgccacagtgtcaaatccaagaacttcaggagtggtgccgtggtagcaaagtatggtgacaagagtgtgtactttgatttggaggatctgggcaacactacagggcagtgggacttgtatggctc

SEQ ID NO: 115330 - DNA, 106 bp, Glycine max
tgaacaagttggaggtgttgaagccatggactctctcattctcattcgggcgagcactgcaacaaagcacactcaagacatggggtggaaagaaggagaatgtcgc

SEQ ID NO: 115331 - DNA, 148 bp, Glycine max
cactcttcatcaagctccgctccaacacaggggaaaatgagggagatccttcacgtgcagggagggcaatgcgggaaccagatcggttccaagttctgggaagtggtgtgcgacgagcacggcatagatccgacggggaagtacgtcg

SEQ ID NO: 115332 - DNA, 254 bp, Glycine max
ctctctccaccattgccatggatccttacaagctccggccatccagcgccttcaattctcccttctggactacaaattctggtgctcctgtttggaacaacaactcctctttaaccgttggagctagaggtccaattctgcttgaggattatcatcttgtggagaagcttgcaaactttgacagggaacgtatcccagaacgtgttgtccatgccaggggagctagtgcaaagggtttctttgaggtcacacat

SEQ ID NO: 115333 - DNA, 114 bp, Glycine max
gggcaatttgtggggcttgctgagatgattggtcctgttgattttaacaagagtgttgagtattggcagcaagacaagtggaatggttgctttcctcttaagtggcacattgtt

SEQ ID NO: 115334 - DNA, 104 bp, Glycine max
atggcttcttcaatccctaatgcgccttctgcgttcaattctcagagctacgttggtctcagagcgccactgaggaccttcaacttttcttctcctcaagctgc

SEQ ID NO: 115335 - DNA, 134 bp, Glycine max
ctgcttcaccttctgctctagaaaattcagtgctgaaacatggcttcggctactctctctgtagccaaaccagcccttcaggcaaatgggaaaggcttctctgaattctctggcctccgaagctcatcaggctt

SEQ ID NO: 115336 - DNA, 253 bp, Glycine max
tcttggacgtgaaaggcccacttggccacattgaatacactggcagaggaaacttcctcgttcatgggaaaccaaggtttgccacgaggctagccatgttggctggtggcacaggaatcacacccatttaccaagtggttcaagccattctaaaggatccagaggactgcaccgagatgcatgtggtttacgcgaaccgaaccgaggatgatatattgctgaaggaagagcttgatgagtgggctaagaagta

SEQ ID NO: 115337 - DNA, 113 bp, Glycine max
ggcacttatcagtgggttgtcaagcccaaaactgtcaaatatgaatttaaaaccaacacccatgtccctaaactaggggtaatgcttgtggggtgggggggaaacaatggctc

SEQ ID NO: 115338 - DNA, 250 bp, Glycine max
cccaaaccatcatatggaatggaccaatgggagtgtttgagtttgacaagtttgctgttggtacagaggctattgcaaagaagctggctgatctcagtggaaagggggtgaccacaattatcggaggaggagattctgttgcagctgtggagaaagtaggagttgctagtgtcatgagccacatatctactggtggtggtgccagtttggagttattggaaggcaaagagcttccaggagtccttgctct

SEQ ID NO: 115339 - DNA, 103 bp, Glycine max
tgggcgtatggagaagttctactgggcaccaacaagggatgaccgcattggtgtctgcactggaatttttcgcaccgattcaattcctgaacaggacgttgtc

SEQ ID NO: 115340 - DNA, 122 bp, Glycine max
tcttggacgtgaaaggcccacttggccacattgaatacactggcagaggaaacttcctcgttcatgggaaaccaaggtttgccacgaggctagccatgttggctggtggcacaggaatcaca

SEQ ID NO: 115341 - DNA, 252 bp, Glycine max
ggcacttatcagtgggttgtcaagcccaaaactgtcaaatatgaatttaaaaccaacacccatgtccctaaactaggggtaatgcttgtggggtgggggggaaacaatggctcaaccctcactggtggtgttattgctaaccgagagggtatttcatgggcaacaaaggacaagattcaacaagccaaggtgtttgatatcgacctgcagaaacagttgaggccgtacatggaatccatggttccactcccc

SEQ ID NO: 115342 - DNA, 110 bp, Glycine max
aaagctcttaaggatggaattgctgttgaaaaaccaatctacaaccatgtcactggtctcctggatccccctgagctcattaaaccccccaaaatcttagtcattgaagg

SEQ ID NO: 115343 - DNA, 112 bp, Glycine max
cagaagaacaagtagttgagaactaagaaggagaagcaaatggcttcctcaatgatctcttccccagctgttaccactgtcaaccgtgccggtgccggcatggttgctccat

SEQ ID NO: 115344 - DNA, 146 bp, Glycine max
cttgtttaaacctaattctcatttcttcatcgttcgattcttctcctcctaaagatgcagatcttcgtgaaaactttgaccggtaagaccatcacccttgaggtggagtcctccgacaccatcgataacgtgaaagctaagattcc

SEQ ID NO: 115345 - DNA, 266 bp, Glycine max
ggcggggataagattaaagattcaacaatggcctctgcttctgctactcttctcaagtcatctcctgttcttgacaagtgcgagtgggtcaaaggccagacccttcgccaacctctcgtgagatgtaacccttcctcagcatcagctctcaccatcaaagctgcttcctatgctgacgagctcgtcaaaaccgccaaaacagtggcctcaccggggcgtggtattttggcgatggatgagtcaaatgcaacctgcgggaagcgttg

SEQ ID NO: 115346 - DNA, 263 bp, Glycine max
gccaaaaccctagcagccggcgagaatggcagacgttgaggttgatgcggcggcacggcaggggcagcgcaccgaagaagagaacgttcaagaaattcagcttcaggggcgtggatctggacgcgcttctggacatgtccaccgacgaactggtgaagatgttcagtgcgcgtgcacgtagaaggttccagagaggtctgacgaggaagccatggccttgattaagaagctccgcaaagctaaaagggaagcaccagcaggtg

SEQ ID NO: 115347 - DNA, 179 bp, Glycine max
catagatcagggctttttcatgaattacttcagatccgttaaacaacagccttattttttatacttctgtggtttttcaagaaattgttcagatccgttgacaaaaagccttattcgttgattctatatcgtttttcgagagatattgctcagatctgttagcaactgccttgtttgtt

SEQ ID NO: 115348 - DNA, 215 bp, Glycine max
gggaaaccaagggttttgaccaaggagaccaggcatggccgttctgcacacagaatgtcctccacctctttgcgcaagaaatctagccgaactcttgtctcaaaggttccatgtgccactctcagaaactttctttcaaatttgcaagaggttattcttggcaccaagctttccattctcatccctgctattccagctgccatcgttgctgagtg

SEQ ID NO: 115349 - DNA, 246 bp, Glycine max
gcgtttttcattgtgcattattcaatggccaccacagcagctctatccggaaccatggtgagcacctccttcatgaggaagcaacctatgacgaccaagagcctaaagacattccccaacgctctttttggtctgaaaggtggacgaggtggtcgtgtaacttgcatggcctcgtacaaggtgaagctcataaccccagaaggagaagtggagtttgaatgcccagatgatgttttcattgttgac

SEQ ID NO: 115350 - DNA, 260 bp, Glycine max
caaaggttgctgtaggagataagattgcagtagtgcaaagtgctaacacctgcagtgaacaatggcctctgcatcagcatctctgctcaagtcttcacttgttcttgacaagtctgagtgggtgaagggacaaacccttcgccaaccttctgcatcagttgtgagatgcaaccccaccaccccatcaggcctcaccatcagagctggttcctatgctgatgagctcgttaagaccgcgaaaacagtggcttcaccaggga

SEQ ID NO: 115351 - DNA, 266 bp, Glycine max
ctttggggtttctctcttcaaactagggttttacagaatatcagctctctctatctttggttttcgtcattcaaatccaatccaatatcaaatatgagtcgtcatcccgaggttaagtgggctcagagacttgacaaggtctatatcacggtgcaattggctgattcaaaaaatgccaaggtggatcttacaccagatggtatttttaccttctctggtagtgctggtgctgaagaccatcagtatgagctaaaactggagctctt

SEQ ID NO: 115352 - DNA, 175 bp, Glycine max
attgtttaaacctaattctcatttcttcatcgttcgattcttctcctcctaaagatgcagatcttcgtgaaaactttgaccggtaagaccatcacccttgaggtggagtcctccgacaccatcgataacgtgaaagctaagattcaagacaaggaagggatcccacctgaccagc

SEQ ID NO: 115353 - DNA, 250 bp, Glycine max
atgaaagactaagggttggttatgttagtagtgactttggtaatcatcccttgtcacatctcatgggatctgtttttggtatgcacaacaggaagaatgttgaggtgttctgctattccttgagtgttaatgatggtactgaatggaggcaacgtattcagtctgaagcagagcactttgtagatgtatctgccatgtcatcggatgcaatagcaaaaatgattaatgaggataagatacatatccttgt

SEQ ID NO: 115354 - DNA, 253 bp, Glycine max
ggagtgagcaatttctcttcaaagaagcttcaagatttgttagatatagcaagagtggttcctgctgttaaccaagtggaattgcacccaggatggcagcagccaaagttgcgcgcattttgtgaatctaaagaaattcatctatctgtaagtatggcatatatgatatatactttcacttaaaagacttgatattcctaaattatcaagactttaatggtgatgcactcacaatgtaaagtaagcttgcatt

SEQ ID NO: 115355 - DNA, 244 bp, Glycine max
gaaacgtgctgaacttcttcacaaggcagctgctatccttaaagagcacaaagcaccaattgcagagtgcctggtgaaagaaatagcaaagccagccaaagatgctgttacagaggttgtaagatctggggatctggtttcttatactgctgaagaaggtgtaaggattctgggagagggaaagttcttggtgtcggatagctttcctggaaatgaaaggacgaaatattgcctcacatccaag

SEQ ID NO: 115356 - DNA, 258 bp, Glycine max
atctgtttcccgccatatatccaataagctttaaccatgtctgcctttgttggaaagtacgcagatgagcttatcaagaatgccaagtacatagccacacctgggaagggcatcttggcagcagatgagagcactggcaccattgggaagcgcctatcgagcattaacgttgagaacattgtagccaaccgccaagctcttcgcgagcttctcttcaccgctccagatgccctccaatacctctctggtgtcatcctc

SEQ ID NO: 115357 - DNA, 262 bp, Glycine max
tcaggattcactttctactttaaccctgttgatttattctggtactgggatccatattattataggaggcgaaggctacaagctgatgatgacaagatgaacttcattgaatcggtcttctcctttgtatttggagatggtgatcccaatcaaggaattgaagaagagagatggaagttgattgggcaatacatagcatctaatggtggcgttgttgcagctgaagaacttgctcaatatcttgatatagattccacagagg

SEQ ID NO: 115358 - DNA, 223 bp, Glycine max
gagaaatgggtgcttcggcatcggtcacagaaaaatccatccatgaattcatggtcaaggatgctaagggcagtgacgtgaacctcagcacctacaaagggaaggttcttcttgtagttaacgtcgcttcaaaatgtggatttacaaattccaattacacccagttaactgagctttacagcaaatataaagacagaggtcttgagatactggtatttccatg

SEQ ID NO: 115359 - DNA, 143 bp, Glycine max
gaaatctgcttctgggaaaagtgtttccatcatcaaccccactaccagaaagactcaatacaaagttcaagcttgttcacaagaggaggttaataaggtcatggacttagcaaaatctgcacaaaagttatgggcaaagaccc

SEQ ID NO: 115360 - DNA, 138 bp, Glycine max
gccttggtgacttgaattatcctttgatttctgatgtcaccaaatccatatcgaaatcttatggtgttctcattcctgatcagggaattgcattgagaggtttgttcattattgacaaggaaggggttattcagcatt

SEQ ID NO: 115361 - DNA, 250 bp, Glycine max
atccaattgaaattttaaaaatgactgggataaacttaagaattcaattattgaaattgaataagtaaacaatttaattggattggtcgaatggtatcaaaaaaatggagtactaactcccatttcttatttattattgaattaaccgatcaacttgctttgttatcgaacatttctttttgatttcaaaaattttccggaaaaaatttgaatctatttttatatgcgaatcaatcctactacttctggt

SEQ ID NO: 115362 - DNA, 248 bp, Glycine max
aattgaagttgaagtcttgcccttctctcttcaactccaaacacaagacatcatcatccatggctgcctccgtctccactgtcggagctgtcaacagagctcttttgaacctgaatgggtctggacctggggtttcagctcccagttcatccttctttgggagcagcttgaagaaggttattggctcaagggtccccaacacaaagatttcctctggaagcttcaagattgttgctgtagaaggagag

SEQ ID NO: 115363 - DNA, 251 bp, Glycine max
ctgctcctggtgttcttcaatatctcagttctgtcatcctctttgaggaaaccctctaccagagcacagctgcaggcaagccctttgtgaatgtcttgaaggaagctggtgtgcttcctggcatcaaggttgacaagggcacagtcgagcttgctggaactaatggagaaaccaccactcagggtctagatggccttggtcagcgttgtgccaagtactacgaagctggtgcacgttttgccaaatggcgt

SEQ ID NO: 115364 - DNA, 119 bp, Glycine max
gttataagccacaaccctgataacgacacctctaggatcaagcttccttctggtgcgaagaagattgtgccaagtgggtgcagggcgatgattgggcaggttgcaggtggagggaggac

SEQ ID NO: 115365 - DNA, 223 bp, Glycine max
atgggcatggccatggatgctttccagcaccaaactctcatttccatcattctggccatgttagtaggcgtgttgatttatggcttaaagagaacacatagtggccatggcaagatctgtagtgcacctcaagcaggaggagcatggccaattattggccatttacacctctttgggggtcatcaacatactcacaaaacacttgggataatggcagagaaac

SEQ ID NO: 115366 - DNA, 249 bp, Glycine max
gcagaagttgttacaaaatcacagtcatacttttttacccattctgtgaaagcaatagaggtgacttcgacggccaagggtataacctctaagcagcttcttattggaacaattggtgatcaggttctggcacttgataaacgctttttggatccccggcgcacacttaatccctcacaagctgaaaaagaagaaggaattattcctcttaccgattcattgcccatcatttctcagtcctacattaca

SEQ ID NO: 115367 - DNA, 250 bp, Glycine max
agggtttctctttctctttctctgtctgcttcttcactttctctcgtttcaatcgaaaaaaatcatgggcagaaaattcttcgtcggtggcaactggaaatgcaatgggaccactgaggaggtgaagaagattgttactactttaaatgaagctaaagtccctggagaagatgttgtagaagttgttgtgagccctccttttgtgttccttccttttgtaaaaagtttgctgcgccctgatttccatgtc

SEQ ID NO: 115368 - DNA, 260 bp, Glycine max
atttatgatgttgcaggttgttgtttctgctcaagaccatattatgtgcattgagactgagagggaagcactcctccaattcaaggctgcacttctggatccctatggcatgctctcttcttggaccacttctgattgctgccaatggcaagggattcgctgcaccaacctcaccgcccatgttctaatgctcgaccttcacggtttgaatcgttcttggagacatgcttatttcaagttcataagcaatttctcagatg

SEQ ID NO: 115369 - DNA, 115 bp, Glycine max
caagtagttgagaactaagaaggagaagcaaatggcttcctcaatgatctcttccccagctgttaccactgtcaaccgtgccggtgccggcatggttgctccattcactggcctc

SEQ ID NO: 115370 - DNA, 252 bp, Glycine max
ctttccaccaacaagaaagaaaacagagagaaactttcatttcatagattttcatcatctcagcaaaggaatcaatcaatcaagccatggcaggcttcagtggcgacgaaaccgctcctttcttcggcttcctcggtgccgctgcggccctcgtcttctcctgtatgggagcggcgtatggaacggcgaagagtggggtgggggtggcgtcgatgggagtgatgaggccggagctggtgatgaagtcgatcg

SEQ ID NO: 115371 - DNA, 233 bp, Glycine max
aacacaaggcagaaagcaagctcatcctagagttttaaaaatggcagcagcctcctccatggctctctcttccccatccttggctggcaaggccgtgaagctgggcccatcagcccccgaagtcgggagggtcagcatgaggaagaccgtcaccaagcaggcctcctccggaagcccatggtacggcccagaccgcgtcaagtacttgggcccattctctggcgagcccccgt

SEQ ID NO: 115372 - DNA, 248 bp, Glycine max
ctctcttccatctccccagccaaaacctctctcaggaaggccacattacgcccttccgtcttcgcaacccttaacactccttcttctccttcctcttcatcttccttcccctctctcattcaagacaggcctgtttttgctgcccctgcccccatcatcaccccaactgtgagagaggatatggcaaaggaatacgagaaagctattgaagaacttcagaaattgttgagggagaagagtgaactcaa

SEQ ID NO: 115373 - DNA, 256 bp, Glycine max
atttctcagtctctgtgtttgcggctgaggattccgaacgagtgaccttcttcgtttctcgcaaagtttaagtaatcatgggtaaggaaaaggttcacatcaacattgtcgtcattggacatgtcgactctgggaagtcaactaccactggtcacttgatctacaagcttggaggtattgacaagcgtgtgattgagaggttcgagaaggaggctgccgagatgaacaagaggtcattcaagtatgcctgggtgct

SEQ ID NO: 115374 - DNA, 102 bp, Glycine max
ttgagaactaagaagaaggaaatggcttcctcaatgatctcctccccagctgttaccaccgtcaaccgtgccggtgccggcatggttgctccattcaccggc

SEQ ID NO: 115375 - DNA, 255 bp, Glycine max
ataccctgacaaggccagaggagtggcaaaattcaatgttcccctagcccacatgataattgctggagctgattttatattggttcctagcagatttgagccttgtggtctcattcagttacaagctatgcgctatggatctgtaccaattgttgcctcaacaggtggattagttgacactgtcaaagaaggtttcactggatttcagatgggtgccttcagtgttgaatgtgatgctgtggatccagctgttgt

SEQ ID NO: 115376 - DNA, 220 bp, Glycine max
ccaaagttctgattggaatggatatcaggcatctgtctacttacctgagaggagcattcatccaccttctacatttgtcatgaacaacccagcaattgatacaaatgtttacatgcaccatcaaaagcagatgcctgttgatgagtttccagaaaggcctggtgaacctgaatgcagcttcttcttaaaaactggggattgcaagttcaaatctaattgt

SEQ ID NO: 115377 - DNA, 234 bp, Glycine max
ggaaactctaagtgagggaggagaggatgagactccactgcaggtgaaattgaatggagttgctacagttattggtaaaattggtttgactttttctgtgctgacatttgtggtgttgacaataaggtttgttgttgaaaaagcagttcgtggggagtttgctagttggtcttcaaatgatgcattgaagctgctggactactttgctattgcggtaaccataataattgttgc

SEQ ID NO: 115378 - DNA, 267 bp, Glycine max
caagtagttgagaactaagaaggagaagcaaatggcttcctcaatgatctcttccccagctgttaccactgtcaaccgtgccggtgccggcatggttgctccattcactggcctcaagtccatggctggcttccccaccaggaagaccaacaatgacattacctccattgctagcaacggtggaagagtgcaatgcatgcaggtgtggccaccagttggcaagaagaagtttgagactctttcctacctgccagaccttgatgatgc

SEQ ID NO: 115379 - DNA, 258 bp, Glycine max
attgaagttgaagtcttgcccttctctcttcaactccaaacacaagacatcatcatccatggctgcctccgtctccactgtcggagctgtcaacagagctcttttgaacctgaatgggtctggacctggggtttcagctcccagttcatccttctttgggagcagcttgaagaaggttattggctcaagggtccccaacacaaagatttcctctggaagcttcaagattgttgctgtagaagagaagaaagagattga

SEQ ID NO: 115380 - DNA, 265 bp, Glycine max
ctgttaaggcatggattacgtggatccaaaaaggaaaggcaattttgttggaaaagtttttcttgctgcagcattaacggcattatgcattatcatgatcaagagatctccatctttgaatcccccgagtccgttttccatccatgaaccaggtgtcactcatgttttagtgacaggaggtgcaggctatatcggctcacatgctaccctacgacttctgagggaaaattatcgtgtcaccatagtggataacctgtcacgagga

SEQ ID NO: 115381 - DNA, 154 bp, Glycine max
atccattgatttctttggtgcactgagggccagagtatatgatgatgaagtgaggaagtggatttctggtgttggtgttgacagtgttgggaagaagcttgtgaactcaaaagatggacctccaacctttgagcagcccaagatgactctggag

SEQ ID NO: 115382 - DNA, 99 bp, Glycine max
gccatacactccttccatacatttgctgtatggtctgagagctgctcttgatctgatttttgaggaaggacttgaaaatgtgattgcaagacacagtcg

SEQ ID NO: 115383 - DNA, 261 bp, Glycine max
gagcacgaagacaaatttgactttgaccctcttgatgttactaagacttggcctgaggacattatacccttgcagcctgttggtcgcttggtcctgaataagaacatagataatttctttgctgagaatgaacaacttgcattttgccctgccattgtggttcctggtgtatactactcagatgataagatgcttcaaaccaggatattctcttatgctgattcacaaaggcacagacttggaccagactatctgcaactt

SEQ ID NO: 115384 - DNA, 269 bp, Glycine max
cgaggcacctcatgcccacgcgctacacgctcgatgtcgatttgaaggacgcggttacccccgacgtgctccaagccaaggataagaaggttactgctctcaaggagaccaagaagcgcctcgaggagaggttcaagactgggaagaatcggtggttcttcaccaagctcaggttctgagcataatattatgcatttttgttttcaaaatgtttttggatctcgctttgtttttcgtaattgatactttataatgatgtgttgagatta

SEQ ID NO: 115385 - DNA, 132 bp, Glycine max
gttgtttatgacataaatggacgcgaggcagatgaagttgaacccatactggatgctctgcctaatctggagcagtttatttactgctcttctgccggtgtctatctcaaatctgatctattacctcacgca

SEQ ID NO: 115386 - DNA, 133 bp, Glycine max
tgccattctcatcctcctctgtctctctctctccaccattgccatggatccttacaagctccggccatccagcgccttcaattctcccttctggactacaaattctggtgctcctgtttggaacaacaactcc

SEQ ID NO: 115387 - DNA, 141 bp, Glycine max
ggcctcttcagtgatggcatctgtggccctcaaacctgcccctttcactgttgagaagtcctcagttagaggccttccctccctctcaaggaactcctcttcattcagagttgtggccagtggtggcaagaagatcaagac

SEQ ID NO: 115388 - DNA, 99 bp, Glycine max
gtagattttggcacccttgccaattgggttcgctgtgttcttggttcacttggcaaccatccccatcaccggaactggtatcaaccctgctcgtagtct

SEQ ID NO: 115389 - DNA, 261 bp, Glycine max
gaaagagatcacatagcagaatggcttctactcaatgtttcttgcaccaccatgctcttaccacccctgccagatccccatcacaacgcatcatggttagcaccaagcctaaccagcttgtttgcaaggcacagaagcaagaggatattgatgtcagcccaatctctcgccggttagctctaaccgtgctcattggtgctgctgctgttggctcaaaagtccaacctgctgatgcagcttatggggaagctgccaatgtgt

SEQ ID NO: 115390 - DNA, 163 bp, Glycine max
attcccctagattcagccacagttggaaaaaaaaaaaaagttgttcgagatggcacgtacgaagcaaactgctcgtaagtccacaggaggaaaggcacctaggaagcagctcgcaaccaaggctgcacgtaagtctgcaccaactactggtggtgtgaagaac

SEQ ID NO: 115391 - DNA, 262 bp, Glycine max
aaaatggctcatcctgagggagaatatgcaacagcaagagctgcatctgctgctggaacaatcatgactttgtcctcatgggctacttccagtgttgaagaggtggcttcaacaggacctggcattcgctttttccagctatatgtgtacaaggacaggaatgtggttgctcagcttgtgagaagagctgaaagggctggattcaaagccattgcccttactgttgataccccaatactaggacgcagagaagctgatatca

SEQ ID NO: 115392 - DNA, 259 bp, Glycine max
gattggactatgctgaagtatcctcaaattggatccagttctagagcccgaccaagtgggaaaccagtcataaacccaggacaatcaggggagagaatagaacggccttcaggtgcagttgaggcatttgcaaggaggaatggctctggacttgttctacatagtgagctttctaggcataagtcttcagatgatgtgccatcttccaaagacgtgcaagctaattctgagaggcctcgcagctcttctcgtaatggca

SEQ ID NO: 115393 - DNA, 127 bp, Glycine max
gcgattccttctggattagttaggaagagcccttatctgacgcaccctatctttaacacgtaccaaactgagcatgagttgcttaggtacttgtataggctacaatcaaaagatctgtcagtatgcc

SEQ ID NO: 115394 - DNA, 258 bp, Glycine max
gaaggcacaaaaaatggcactgctttctttaagtgccatggacatgagcaatttgagatgacgggtttggatcctgagtataataggttgttcaatgagggcatggtgtgcactgctagggttgtgtccaaggctgtgatcactggctacaaagatgggttcaaccagattaagtccttggttgatgttggaggtggcattggagggtctctttcggagattgttagggcttatcctcatatcaatgccatcaacttt

SEQ ID NO: 115395 - DNA, 257 bp, Glycine max
ccctatttcatgcgcaaccacctcggaagctacgaatgcaaactctgtctcactctccacaacaacgagggtaactacttggcccacactcagggcaagcgccaccaaaccaacttggccaaacgtgccgctcgcgaggccaaggacgccccggcccagccccaaccccacaagcgcaaagtcactcttcgaaaaacagtgaagattggacgccctgggaatcgtgtgaccaagcagtatgacccggagaaaaaaca

SEQ ID NO: 115396 - DNA, 261 bp, Glycine max
ggcaatggcaacccaagcctctctcttaaccccacccctctccggtctcaaagccagcgaccgcgcctccgtgccatggaagcaaaactccagcctctccttctccagcccgaagcccctcaagttctccagaacaatcagagcagcagccgccgacgagaccacagaggcaccagcaaaagtagaggctgcaccggtcgggttcaccccaccagaacttgacccaaacaccccttccccgatcttcgggggcagcaccgg

SEQ ID NO: 115397 - DNA, 159 bp, Glycine max
ggaaagtctttccaatgtgagcttgtctttgccaagatgggaatcaaccccatcatgatgagtgctggagagttggaaagtggatatgcaggagagccagcagaactgatcaggcagagataccgtgaagctgcagacatgatcaagacgggaaagatg

SEQ ID NO: 115398 - DNA, 114 bp, Glycine max
ggatgatgcctgggagaatcatcggggtcagtgtcgattcttccggaaagaccgctttgaggatggcaatgcaaactagggagcagcatatcaggagggacaaggctaccagca

SEQ ID NO: 115399 - DNA, 252 bp, Glycine max
gtggtgtgtcacagctatctttttcatattagtgggagctgttgtttggattttggagcatagggtgaatgatgaatttaggggaccacccaaaaaaacaagtagttactgttttatggtttagtttttcaacaatgttcttttcccacagggaaaatacagtgagcacacttggccgctttgtgttgattatatggttatttgtagttcttataattaactcgagttacacggcaagtctaacctcaatcc

SEQ ID NO: 115400 - DNA, 256 bp, Glycine max
ggaacagactattaaccagcttctgacggagatggatggcttttctggcaattctggtgttattgttttggctgccactaacagaccggatgttcttgattcggcgttgttgaggcctggccggttcgacaggcaagttactgtggatagacctgatgttgccggcagagttaaaattcttcaggtgcattctagaggaaaagcacttgcaaaggatgttgactttgaaaaaattgcaaggtagacccctggattc

SEQ ID NO: 115401 - DNA, 250 bp, Glycine max
ctccagttaccatctcaagtgtagagcaatccattgttgcgcgagaccctgtggcaatggccctctatgcagtggtagtctcggtttgtgctccaatatgggaggagattgttttccgtggtttccttcttccatctttaaccaagtacatgcctgtatggagtgcaatattagttagctcaatagcttttgccttggcacattttaacattcagagaatgctaccacttgtatttcttggcatggtgat

SEQ ID NO: 115402 - DNA, 277 bp, Glycine max
aaattggcttgcctgcaaaggcaaaggtgaagacacaacatggggatgcaccttttgctgagttgtgctcacactgtgagaaggaagctgtgaatgtttcccttggaaaccttctaacatacccatttgttagagatggcttggtgaacaagacattgtcactaaaaggaggatactatgactttgttaagggatcttttgagctctggggccttcagtttggccttgcatcctctttctcggtatgaacatcaaccattatcatgacctcatcttg

SEQ ID NO: 115403 - DNA, 229 bp, Glycine max
ctgaagggtaacaaaccggattttcacgttgcgatggcacctcagagagccaagccattctatgcctctttagttgacaggtttaggaatgcctataactctgatgcaatcaagggtatgttatgttatctatctttcaactttcatttctctttttctataataattaatagatacagtaaattcattatagcctataaagacagcaacttaaactgagattttcaca

SEQ ID NO: 115404 - DNA, 280 bp, Glycine max
  unsure (1)..(280): unsure at all n locations
agaacacttttgtaccagggctgattgatcttgccatcgcgaggaacactttgattggtggagatgacttcaagagtggtcagaccaaaatgaaatctgtgttggttgatttccttgtgggggctggtatcaagccaacatctatagtcagttacaaccatctgggaaacaatgatggtatgaatctttcggctccacaaactttccgttccaagganatctccaagagcaacgttgttgatgatatggtcaacagcaatgccatctctatgagcctggt

SEQ ID NO: 115405 - DNA, 269 bp, Glycine max
tccattaacgggtggtgcctctcttccatctccccagccaaaacctctctcaagaaggccacattaggcccttctgtcttcgcaaccgttagcactccttcttctccttcttcttcttcttcttcttccttcccttctctcattcaagacaggcctgtctttgctgcacctgcggtcatcatcactgcaactgtgagagaggctatggcaaacgtatacgagcaagctattgaagaactcgagacattgttgagggagaagagtgactc

SEQ ID NO: 115406 - DNA, 268 bp, Glycine max
agagacaccgctgttgaagttgctcccgttactgatgcaaattggcaatcacttgtgattgaatccgagtctcctgtactggttgaattctgggctccatggtgtggtccctgccgtatgatccacccgataattgacgagctggcaaaagaatatactggtaagctaaagtgctacaaactcaatactgatgagagcccttcaactgctactaagtacgggatacgagtatcccaactgtcattattttcaagaatggtgagagaaa

SEQ ID NO: 115407 - DNA, 270 bp, Glycine max
catttctgctcaatgtgtggccctaaattctgctctatgaagataacggaggatgtgaggaagtatgctgaggaacatggctatggaactgatgaagctttgcagcgtgggatggatgctatgagtgctgaatttcaagctgccaagattactatcagcggggagcaatatggtgaagctggcggagagatttacttgccataagtgtacgtcagttcctcgcagacttaaatgtagcaaatcagttggaagaacttggagctacttccc

SEQ ID NO: 115408 - DNA, 276 bp, Glycine max
attaaataagatcaagaaagcatgcatatgatgaagaaggtgtgtgggtttgcaatagtggtgatggcagcactttttctggtggagatgagtcccatggcagaggctgtgacttgtagccctgtggagttgagtccctgtttgggggcaatcacgtcctcttcaccaccatcgacaacttgttgccagaaggtgagggaacaaaggccatgcctctgtggttacctcaaaaaccctagtctgaggccatatgtcaactctcctggtccagaaggg

SEQ ID NO: 115409 - DNA, 276 bp, Glycine max
ctggtttcgagggtgacaacatgattgagaggtccaccaaccttgactggtacaagggaccaactctccttgaggctcttgaccaaatcaatgagcccaagaggccctcagacaagccactcaggcttccattgcaggatgtctacaaaattggtggtattggtaccgtgccagtgggacgtgttgagactggtgtcgtgaagcccggtatggtggtgacttttggtctcactgggctgacaactgaggttaagtctgttgagagcaccatgaggc

SEQ ID NO: 115410 - DNA, 276 bp, Glycine max
aaaaagtgctatttttttacttcttttcatagtagactttctgtgctgtgctgccatgggtgtgacacagttgaaccccacttgctcaaaacctcgtcttcactcatctcagctctcttttctctcaaggactcttcctagacatcgccactgcacttttgcgccacttcatagaactcaacaagctaggatttcctgtgctgttgcaccatatgaagtgcaggtgccaactgtgataacccaggatcccatgagtaagcctgagtgctatggtgt

SEQ ID NO: 115411 - DNA, 242 bp, Glycine max
cggctcgagtcgcatcttgttcctccgctcaacaactataataacatctttctctctccgaacagatcacactatggccacctcaagcgccaaatcagtccatgacttcaccgttaaagatgccacgggcaatgatatcaatcttggtgactacaaaggaaaggtcctgatcattgtcaatggttgcatcacaatgtggcttgactagttcttataacactcagctcagtcagttgtatgag

SEQ ID NO: 115412 - DNA, 267 bp, Glycine max
acactttcgagttgcattgttgcatcaccgcaagtccacaacatggctgccactgccgctgcaggcatagcttccttgttttcttctgctattaacagtgtcaaatgtcttcgttcctccatgaactgctccattatagacccccttataagcacactgcgctcaaaccgtagcatgtttgtgtgacacttggtggaacctatgtccattgggggtgccattaattcgcacaagtccttggggactagaatggctgctgctgtgcac

SEQ ID NO: 115413 - DNA, 258 bp, Glycine max
acgttgctgtaggagataagattgcagtagtgctaagtgctaacacctgcagtgaacaatggcctctgcatcagcatctctgctcaagtcttcacttgttcttgacaagtctgagtgggtgacgggacaaacccttcgccaaccttctgcatcagttgtgagatgcaaccgcaccaccccatcaggcctcaccatcagagctggttcctatgctgatgatctcgttaggaccgcgacaacagtggcttcaccagggag

SEQ ID NO: 115414 - DNA, 275 bp, Glycine max
aagtagttgagaactaagaaggagaagcaaatggcttcctcaatgatctcttccccagctgttaccactgtcaaccgtgccggtgccggcatggttgctccattcactggcctcaagtccatggctggcttccccaccagagagaccaacaatgacattacctccattgctagcaacggtggcagagtgcaatgcatgcaggtgtggccaccagttggcaagaagaagtatgagactctttcgtacctgccagaccttgatgatgtcaattggca

SEQ ID NO: 115415 - DNA, 277 bp, Glycine max
caaagactcccctcttgatgtcattgccatcaactacaccggtggcgtgaaacaagcctctcaccttctcaagtacgattcgatcctcggaaccttcgatgctgatgtcaagcctgttggcagcgacatcatctctgtcgatggaaaggaaatcaaagttgtctctgaccgcaaccctgccaaccttcctaggcatgattgtgggatagacttggtgattgaaggaactggggtgtctgtagacagagaaggtgcacggtgacacttcatgcaggag

SEQ ID NO: 115416 - DNA, 273 bp, Glycine max
cttggacttggtccttcttgctgagctcagcactcgaatcgagattaaagctgaaaatgagggaaaattccactcattccacccagttgcgaccatccttagttacctgaccaaggcccctctggttccaccgggtacaccagtggtgaatgcgttgtcaaagcagcgagctatgctggaaaacatcctgagggcttgtgttggattagctcctgagaacaacatgatcctagagtacaagtgaagttcagagtcttaagagtacggtttggg

SEQ ID NO: 115417 - DNA, 247 bp, Glycine max
ggctcgggatgctatcggggtcacttccttgtacattggataggggttatatggctctgtttggatttcatcagaaatgaaaggcctgcatgatgattgtggatactttgaagtgtttctacctggtcacttgtactctagcaaacaaattgggtgccgcagattgtacaatcctccttggttctctgaggctataccatctgcactctatgagccacttgtatcaagacacccttttgagcaggct

SEQ ID NO: 115418 - DNA, 240 bp, Glycine max
atttgtcttcctcagtagtgtcatttacgcttctcttctcttcagcaactatgcctaaccctaaggtcttctgcgacataaccatcggcggtcaatctgctggccgcatcgtgatggagatctacgcctactacactcatcgcaccgacgagaacttcagcgcgcttagcatctgcgattatggcgtagtcgtagcagtaagagctctactataagggttcgttcttctactcgagatcc

SEQ ID NO: 115419 - DNA, 270 bp, Glycine max
atcaaagtttcttcctttctctgctctttgccttctctgacacatttggtgccttgtagagcgtgtattggcaggaaggtggtatggcgaaggacgttgaggttgctgagcgtggctccttctctgggcaggactaccaggaacctccaccagcaccactcattgatgctgaggagctcacaaagtggtccttttacagggctctcattgctgaattcattgccactttgctcaatgactacattactgtgctcacagtcataggtacag

SEQ ID NO: 115420 - DNA, 268 bp, Glycine max
ctccttgactatggtcatgggagatgatatggttaaagtggttgcttggtatgacaatgaatggggttacagccaaagagtggtcgatttggcacatctagtagcaagcaagtggccaggggcacctaaagcggggagtggagacccattggaggatttctgcgagacaaaccctgctgatgaggaatgcaaagtttatgaatagaggagagctcctcttctaacgtatcatgtgaaaaagaaggaaattgttcagacagctatctga

SEQ ID NO: 115421 - DNA, 273 bp, Glycine max
gcatcagaggagttgtaaattaagagcatggctgcacaagctcttgtatcatcatcttctcttaccttctcagcggaggctgcaagacaaagtcttggaccaagatcactccaatctccatttggcttctccagaaaagcctcctttcttgttaaggcagctgctaccccccctgtcaagcaaggatcagacagacctttgtggtttgcatcaaagcaaagtctttcttacttggatggcagccttccgggtgactatggtttgaccctctgg

SEQ ID NO: 115422 - DNA, 270 bp, Glycine max
aagaacatagataatttctttgctgagaatgaacaacttgcattttgccctgccattgtggttcctggtgtatactactcagatgataagatgcttcaaaccaggatattctcttatgctgattcacaaaggcacagacttggaccaaactatctgcaacttcctgctaatgctcccaagtgtgctcaccacaacaatcatcatgaaggtgtcatgaatttcattcacagggatgaggaggttaattacttcccttcaagtatgatcctg

SEQ ID NO: 115423 - DNA, 272 bp, Glycine max
cgaagtcacttcatgggctgaaaaggagacaaatggacttgttaaagaccttcttcctcctggatcagttgacaattcaaccagacttatctttgcaaatgcactgtacttcaaaggagcatggaatgagaagtttgatgcttcaataacaacagactacgattttcaccttcttaatggcagttcagtcaaggctctcttcatgacgagcaagatgaagcagtccattatggcttttgatagtttcaaagtccttggcttccctacaagca

SEQ ID NO: 115424 - DNA, 272 bp, Glycine max
cagaagaacaagtagttgagaactacgcaggagcagcaaatggcttcctcaatgatctcttccccagctgttaccactgtcaaccgtgccggtgccggcatggttgctccattcactggcctcaagtccatggctggcttcctcagcaggaagaccaacaatgacattacctccattgctagcaacggtggaagagtgcaatgcatgcaggtgtggccaccagttggcaagaagaagtttcagactctgtcctacctgccagaccttgatga

SEQ ID NO: 115425 - DNA, 270 bp, Glycine max
ttttcattttattatttttttgacaagcagctctagaaaaatctgcacagaataaaacaagaggaggaaatgcaacttacttgttgatatagacttcatagagagaaagtatgtagataagccatgatgctgccatggtcacatacgcggctcttgcttctacaaggatcccttcaaacacaaggttctcatctaaggcatctcactcttgcacaatccaatgcgccttatagagacttgaggtgtcagaattctctggcttagatccac

SEQ ID NO: 115426 - DNA, 270 bp, Glycine max
gctggttgtgtacttggtgaactaatgcatggccagcctctattccctggtgagagtggagtagatcagcttgttgaaattatcaaggttttaggtacaccaacaagggaagaaatcaagtgcatgaatcctaattataccgagtccaaatatccacaaattaaagctcatccatggcacaagatctttcacaagcgcttacctcctgaggctgtggatctcgtctcaaggctactgcaatactctccatatcttcgagcacagctctgg

SEQ ID NO: 115427 - DNA, 273 bp, Glycine max
tacaaaggttgctgtaggagataagattgcagtagtgctaagtgctaacacctgcagtgtacaatggcctctgcatcagcatctctgctcaagtcttcacttgttcttgacaagtctgagtgggtgaagggacaaacccttcgccaaccttctgcatcagttgtgagatgcaaccccaccaccccatcaggcctcaccatcagagctggttcctatgctgatgagctcgttaagatggcgaaaacagtggcttcaccagggaggggtattttg

SEQ ID NO: 115428 - DNA, 265 bp, Glycine max
ataaaaaacaaaaataatttatattttcttaaagaacaaaatgtttgttatgcttaatatctttaatttggtctgtatttgtattcactccgtcctttattcaagtagttgtttctcggcgaaattgcccgaagcctacgctttcttgaatctaattgtggatattatgccagtaatacccttactctgttttcttttagctattgtttggcaagctgctgtaagttttcgatgatatctgtaatttgcgtaatgtttaggaaaa

SEQ ID NO: 115429 - DNA, 269 bp, Glycine max
aatgaacccatatggacgaactaagcttatcatttctgacagagggaactcttctatagcttggaacccatatggacgaactaagcttatcattgaagaaatgtgtcgtgatgtccaccgtgcagagccagatgggaaaataatattgttaagatacttcaacccagtcggtgcacaccctagcggttgtattggggaggatccccgcggaattccaaacaatctcatgccatttgttcagcaagtagcagttggccacggctgcactg

SEQ ID NO: 115430 - DNA, 254 bp, Glycine max
ggtaatggcagcgtcactacaagcagcagctactttcatgcaagccaccaagttgagcaagagcaacactttgcagcaaaagtctactcagtccatttccaaggcttttggtttggaacctgttggagctaaaaaggtcacatgctcccttcaggctgatcttaaggacttggctcacaagtgtgttgatgctaccaaaattgcaggattcgcccttgccacctctgccctcgttgtctctggggcaagtgctg

SEQ ID NO: 115431 - DNA, 266 bp, Glycine max
ccgaaacaggtttcctataaaatcccgcatgtgccgtagcagttgagctgaaaccgagaagatgaagatggagatgtatcagatctggagcacgagaatagcgttaggagcgttcgcgtttgatctgcttttcctatcggcctcagcagacgacgtcgttgtgctctctgaagataacttcgagaaggaagttggtcaggacagaggagctctcgttgagttctatgctccttggtgtggacactgcaaagagcttctccagaata

SEQ ID NO: 115432 - DNA, 259 bp, Glycine max
cagcccatatgctctgggttggggaacgaaccaggcagcttgatggtgcccatgtcgagtttctaagaggagttgctaatcccttgggaattaaggtaagtgacaagatggatccaaatgagcttgttagactcattgagatcttgaatccccaaaacaaaccagggagaataactgtgattacgaggatgggagctgaaaatatgagggtgaagctccacatctcatcagggcagtgcgcagagcagggcaattgtca

SEQ ID NO: 115433 - DNA, 290 bp, Glycine max
cgtagtagctcggggcgtatggagacttctactgggcacctacaagggatgaccgagttggtgtctgcaagggaattttccgcactgacaatgttcctgaggatgaaattgtcaagcttgttgacaccttccctggccaatctattgatttctttggtgcactcagggctagagtatatgacgatgaagtgaggaagtggatttctggtgttggtgttgacttgattgggaagaagcttgtgaactccaaggaaggacctccaacctttgaccaaccgagatgactttga

SEQ ID NO: 115434 - DNA, 262 bp, Glycine max
accagatcatgagaggttacctatatgatcaagaggccacagagaggactatagactaaggaggatggttgcaaacaggtgatattggatacatagatgatagtgatgagctctgcagcgttgatcggttaaaggagttgattaaatatagaggatttcaagtggctccagctgagctcgtagccatgctagttgatcatcctaacatctctgatgctgctgttgtatcattgaatgatgaagttgcaggagaggtccagtt

SEQ ID NO: 115435 - DNA, 267 bp, Glycine max
catgaaaggaacccgcacaattcgaaggatgtagatgggtttgttttgccaactctggtgtatatggctcgtgagaagagacctcaatatcatcacaactacaaagctggagctataaattcattggtggagctccatggtgcggatggttatggtggccctttgtttattggaacttgttgctttcatagaagagacgctttatgtgggaagaagttcaattgtcaatacaaaaatgagtggaatgatgagatgagacagaggtgg

SEQ ID NO: 115436 - DNA, 262 bp, Glycine max
gcaccctatctttaacacgtaccaaactgagcatgagttgcttaggtacttgtataggctacaatcaaaagatctctcactatgccacagtatgatcccacttggatcttgtacaatgaagctgaatgcaacaactgaaatgatgcctgtgacatggcccagctttagtgatattcacccttttgcaccagttgaccaggctcaaggttatcaggaaatgttcaacaatttgggtgaactgttgtgcaccatcactgggttc

SEQ ID NO: 115437 - DNA, 257 bp, Glycine max
gttgggttgctggtacttctgaaaagcccaccccaaagtcgaaacgaaagcgcagagagagcgaaacgatgtcgtacgacgatgtggagatcgaggacatggagtggaacgaggagttgcaggcgtacacgtacccgtgcccgtgcggggacctgttccagatcacgaaggaagaccttaagctcggcgaagagattgctcgatgccctagttgctctctctacatcaccgtcatctacaacctcgaagatttcctc

SEQ ID NO: 115438 - DNA, 257 bp, Glycine max
cgatgagttactacaatcagcagcaaccacccgtcggtgttcctcctccccaaggttacccaccgccggattcttacggaaaggacgcgtaccctccgccagggtacccgccgcaaggaggataccctccgcaggcgtatccagcacaggggtaccctccaccctacgcgcctcctcagtacgctcagcctccgccgcaacaacaccagaattcatctggcgcaggttgcttagaaggatgtttcgctgctctctgc

SEQ ID NO: 115439 - DNA, 258 bp, Glycine max
atccaaaccaaaaccactcactcttctcattttttctgttgcataccaaatggaataagtttagattatgtccaattgttcatagcgttgaacaaaacaaacagcagcaaaatgagcacacccttgttccatgaattcaaaaggcaagcttctttcttcttcaaggagaaaatcaagactgctagattagcactaacagatgtcacccctgcagaactgatgacagaagaggcaacaagtggaaatccatgggcccca

SEQ ID NO: 115440 - DNA, 251 bp, Glycine max
agctggtcgtcttggtggaaccacacaatacactgtgaacaaccagatggtgaatgccactctcatgaacattgctgataaccccaccaatgtgcagcttccaggtatgtacaacaaggaagagaacccccgtgttcccatcattgtcaccggtaacgatttctcaacactctatgcacctctcatccgtgatgggcgtatggagaagttctactgggcaccaacaagggaagaccgcattggtgtttgca

SEQ ID NO: 115441 - DNA, 254 bp, Glycine max
gtggagggtctactatgtttccgggaattgctgatcgtatgagcaaggaaattggtgctcttgcacccagcagcatgaaaatcaaggtggttgcacctcctgagagacagtacagtgtcgggattggtggctctatcttggcatcacttagcaccttccaacagatgtggatctctaagggcgaatatgatgaatctgggccagctatcgttcatcggaagtgcttctaagttgggtcaagagctggatggtga

SEQ ID NO: 115442 - DNA, 242 bp, Glycine max
cgaccatgatggctgcgtatttgcgtgtatccatgcccacttccccacagtcccccacctatacgaggacgagatgcagaaatctgaaaacttcttgctccgttaacagactcaaaattccaatgccccctctcaaccctaaagacccctttctctcgaagcacgcttccgtcgctgcttcttcccctgaaacgctcctcaacactcccaaaaactccgacacgcttccttatctcgacatc

SEQ ID NO: 115443 - DNA, 253 bp, Glycine max
caagcaggctcttgaatggtgaaccctgatgatgttgtgtttgggggatgggatatcagtaacttgaacctggctgatgccatggccagggccaaggtgtttgatatcgacctgcagaaacagttgaggccgtacatggaatccatggttccactccccggaatctatgacccggatttcattgctgccaaccaaggagaccgtgccactaacgtaatcaggggcacacagaaagaacaagttcaacagatca

SEQ ID NO: 115444 - DNA, 251 bp, Glycine max
tgcttgtgttatggaaaatgttcctttcatcaatggaagccctcagaacacctttgtcccagggctgattgatctggccatcaagaggaacagtttgattggaggagatgactttaagagtggtcagaccaaaatgaaatctgtgttggtggatttccttgtgggggccggcatcaagccaacatctatagtgagttacaaccatctgggcaacaatgatggcatgaatctctcagcccctcaaaccttcc

SEQ ID NO: 115445 - DNA, 255 bp, Glycine max
ctctgattcattagtgaagaaaaatggcaaccatcatcgccggcatcccaactacatcgatcactcgcgcaggtcttgtgctcaaacgacctgttggagcctcgtcctctaccgttcttggattgccagcaatggctaaggcgaaagtgaggtgctccatggaggaaaagccttcaagcagctcaaatatagggatgggggcatccttgttagcagctgcagttgccgcaaccatgtcaagcccagccatggctt

SEQ ID NO: 115446 - DNA, 256 bp, Glycine max
cttcgtctcaaatctcttcgttccttcgattcgttccatttcttccaaaatggccaaagacccagttcgcgttctcgtcactggagctgcagggcaaattgggtatgctcttgtccctatgattgctaggggagtgatgttgggtcctgaccagcccgtgatcctccacatgcttgacattcctccggcagcagagtcattgaatggggttaaaatggaattggtggatgctgcattccctcttcttaaaggtgtt

SEQ ID NO: 115447 - DNA, 259 bp, Glycine max
gcattatgtagcccttaaaattcagaagagtgcacagcactatactgaagccgcgatggatgaaataaagattctcaaacaaatagctgagggggacccggatgataagaaatgtgttgtgaagcttttggatcattttaagcattcggggcctaatggccagcatgtgtgtatggtttttgaattcctgggtgataatcttctcacccttatcaaatatagtggctatcgtgggcttcctctccccatggttaaagaa

SEQ ID NO: 115448 - DNA, 252 bp, Glycine max
ctcaaaatgtcctccatggcttcctccaccgctttcttcacacccctccatgatttcactcaagccagaacaaccccatcaccccctttgcctttcatcaaatcctcctttacttcctccaagtcaaccttttttcaccctgccctttccctacaaacctcttccaactttcccaggctttttggaaagcctaagtttttctctgatcatgcaagggctgccacagaaaaaaccatttatgattttactgtc

SEQ ID NO: 115449 - DNA, 250 bp, Glycine max
caaagcgaacgagctatttgtgggaagattggctcaattgggtttcgttttctcattgattggagaaattattactggaaagggagctctagcccaactcaacattgagacgggggtaccaatcaacgaaatcgagcccctagtgttgttcaacgttcttttcttcttcattgctgctttgaatcctggaactggcaaattcgttacagatgacggggaggatgattagacactaacccttttgtttgct

SEQ ID NO: 115450 - DNA, 247 bp, Glycine max
gattcatccttttcttctgcagagctaatagccaaccatgacttgtatcttcagccatggccagtcaacctgaatcatctgacgcaaagggcacaaaaagggattttagcaccgccatattagagcgtaagaaggctccgaatcggctcgtggttgatgaagctgtcaacgacgacaactctgttgtcgcgcttcatcctgataccatggagaaacttcaactttttcgtggtgacaccatctagat

SEQ ID NO: 115451 - DNA, 249 bp, Glycine max
ctgatgtggtcatagcagacaagtttgctgctgatgctaacagcaagactgtgccagcatcaagcatcccagacgggtggatgggattagatattggtcccgattccatcaagacatttggtgaagcattggataagacccagaccgtcatttggaatggaccaatgggtgtttttgagtttgataagtttgccacaggaacagacgccatagccaagaaactggcagagctgagtgggaagggagtaa

SEQ ID NO: 115452 - DNA, 252 bp, Glycine max
catttgacaggattggattcgtgacacaagatgatgttctgtttcctcaccttactgtaaaagaaacattgacttatgtggccctcctaagattgccaaatacattaaggaaagagcaaaaggaaaaacgagctttagaagtcattgaagagctgggattggagaggtgccaagacactatgataggaggttcctatgttcgaggaatatctggtggagagaggaagcgagtttgtattggcaatgagatca

SEQ ID NO: 115453 - DNA, 249 bp, Glycine max
gtacttgataactaagaaggtggcacaatggcttcctcaatgatctcttccccagctgttaccactgtcaaccgtgccggtgccggcatggctgctccattcactggcctcaagtccatggctgccttccccaccagtcagaccaacaatgacattacctccattgctatcaacggtggtagagtgcaacgcatgcaggtgtggccaccagttggcaagtcgaagtttgagactctttcctacctgcca

SEQ ID NO: 115454 - DNA, 249 bp, Glycine max
ctcgagccgcttcaatcaatggcagcaacctcaacatccctcttctcctcatatctccattctctcaactcataacctttctcttcatcactctccttccgaaatgtccattccactctctctttcccttcttctaaaccctctcgtggcgttgtagccatggctggctctggcaagttctttgatggtggcaattggaagtgtaatggtaccaaagactccatcagacagcttgtctctgttttgaac

SEQ ID NO: 115455 - DNA, 249 bp, Glycine max
caattgggctagctcttggtcctcctcaatcatcgacatcagggatccatgctggtaactcttctatacagccataacctataaatccttcagatgattggtcacataatagtgacaagggggctgatgaattcttgtcggaagaagagatccgcttcagaagtcatgagatactagagaatgacgatatgcagcagttgcttagcctcttcaggatgggaggtaatggctccatgagttctgaggatg

SEQ ID NO: 115456 - DNA, 249 bp, Glycine max
acaagatggcatttttcgacccaacccgtgctatagatttcctctttatatctggaaccaagatgcgggcttttgcaaaaagtggggagaatccgccagaaggtttcatgtgcccaagtgggtggaaggttcttgtcaaatattatgaaagtttgcaggcagaagagccatcacaacagcctgtgctatctacttagacattcttctaaaagtagaagcttagcatcaattgattccaatgggagagtg

SEQ ID NO: 115457 - DNA, 245 bp, Glycine max
ctattagtcttcctggtgacaatggatttgaacctcttgggctagctgaggacccagagaacttgatgtggtacgttcaagccgatcttgtgaatggacgttgggccatgttgggtgttgcaggaatgttgcttcctgaggttttcaccaactttggaatcatcaatgcccctcaatggtatgatgctgggaaatcagagtactttgcatcttcctcaaccctcttcgtgatcgagttcatcttg

SEQ ID NO: 115458 - DNA, 240 bp, Glycine max
tgcagccacttccaatttcacacacacacagtaatacactgcactgtgtggtcagtaagcatggcaagagtggtggcactccaacagaaccagctatctttctctcactgagcttcctctcttattgacttcagtggaaccagacttcagactcaacttcagttcaagagaaaactatgccatccaaaagggtctttctacgtctcggcatcgatcaccaagaagatcctaataatggga

SEQ ID NO: 115459 - DNA, 249 bp, Glycine max
cttgttttcctttctatagagacacacagagagagcaataaacacacttcaatggctaccactaccactaaagtttacattgtttactattctatgtacggacatgttgagaagctagctgaagagattaaaaaaggagctgcttctgttgaaggagtagaagcaaagctatggcaggtacctgaaacactgcctcaagaggtccttgggaaaatgggagcacctccaaagagtgatgtaccaattatt

SEQ ID NO: 115460 - DNA, 248 bp, Glycine max
aaagttagtgaatgagaaacttctgaatgtgcacagtgtggcagatcgcaacaatgaccctcaaatggccgacttcattgaaagcgagtttttgtctgaacaggttgaatcaattaagaaaaattcagagtatgtggctcagttgagaagggttggaaagggtcacggtgtttggcactttgatcaaagacttcttgattaggaagatgctgcttaatcttgaatagccttattattagtcttcattt

SEQ ID NO: 115461 - DNA, 245 bp, Glycine max
tcaatggccaccacagcagctctatccggaaccatggtgagcacctccttcatgaggaagcaacctatgacgaccaagagcctagagacattccccaacgctctttttggtctgaaaggtggacgatgtggtcgtgtaacttgcatggcctcgtacaaggtgaagctcataaccccagaaggagaagtggagtttgaatgcccagatgatgttttcattgttgacaaggctgaggaagaaggcat

SEQ ID NO: 115462 - DNA, 245 bp, Glycine max
aagaatctcaactgatatctcagatacaggacttattgagattggaagaagtgaagaccaatcttcaatctcaatttggcagggaaccaactatggctgaatgggcagagggtgcaggacttaattgtcgattgctgcaatcacagcttcattctggtaacagaagcagagcaaagcttattcaggcacatttacgcatggtagtccatgttgccagaagtatcaggggcgtggtctcagccttc

SEQ ID NO: 115463 - DNA, 251 bp, Glycine max
catacaaaggttgctgtaggagataagattgcagtagtgctaagtgctaacacctgcagtgaacaatggcctctgcatcagcatctctgctcaagtcttcacttgttcttgacaagtctgagtgggtgaagggacaaacccttcgccaaccttctgcatcagttgtgagatgcaaccccaccaccccatcaggcctcaccatcagagctggttcctatgctgatgagctcgttaagaccgcgaaaacagtg

SEQ ID NO: 115464 - DNA, 259 bp, Glycine max
aacaaagataactttgtttctcaaggaagatcaacttgagtatcttgaggaacgccgtctgaaggatttgataaagacgcattctgaattcattagctatccaatttctctttggattgagaagaccactgaaaaggagatttctgatgatgaggacgaggaagagaagaaggatgaggagggtaaagttgaagatgtggatgaagataaggagaaggaggagaagaaaaagaagaccattaaggaggtatctcatgag
